United States Patent Application Publication US 2015/0240253 A1 - sequence listing, part 13

SEQ ID NO: 59381 - DNA, 403 bp, Zea Mays
tcgtaaccagatcggagaggagagaaggagagggccgccacccatcaacccactgcaagtcatcgctgaagccatgggaagttctcaggaatcatcgacgggatgcagtggaggcttccataaactcgtactggcgaattagtagctcgggtccttggaattgctcgccggtgtcaagaaccctcgcggagccgccaaaccccgtcgtcggccctctgcaccgatatatcaccggtataatacccctaacctaactccatgtgatatcctcttcgtgcgaacactcttggactgaagtttgggcggttgtgtgtggcggtggtggtacccggctatggcgctgccgtcctgggatgccaggggtggtaggtgaacttgctacctcgatttgaactggacggct

SEQ ID NO: 59382 - DNA, 368 bp, Zea Mays
ggacgaaggctagggcctatggtctgcacaagaattttgggtgttacaattttgcataccaaaaggataccaaggcccccgtgattggctatcgcactaaatggccgatcgggtgaacgaatgagtggttttacgtgaaggccgatgagaagaagagggagaagctcatgagcatggtaatgagtcccttaaggctgaacttcggcatgactcgacccttgtgcaatatgcatctagggtctccttagcactagggacttagtgcaagaatatttagcgaacagaacattcccagcttctagcgggtggggaatgccgaagaagaaggaagagggaaaaaagtatgaacttgtacgacttacttatcg

SEQ ID NO: 59383 - DNA, 920 bp, Zea Mays
gtgactaatatgtgctcgcctcttctgtcatttcagtgatttcgcctgctcgcctgcgcgtctcctgtcctacccggttcctctctctctctctctctctctctctctcgagaagttcccaggtagctatcacactctattcaggccttacctactgctctactctctcgcttaccttttctccttatcctgcagtagtcagtttaggattgtgaggacgaagaatgtcacaccgtcaggaggaggagatgaccaggaccctcctcgccccttcaggcaggtcaaggggaagactgtctaccttgagcaacaagggggcaaaaagaagagacgtctagacagagtcactcatgcagcgattacagcagtagatcaggcagagcagggaggacaattgcatatttcctctgatcagatcgtcttccgtgtccgtcgcctcgggtctcagactcgctcctccactgctcgctccactccttccaacccagtctccactccacctcccactttgccagttcctgccgctctcgagccgtccaccactcccgcttctaccaccacctccaccactctagctaccactgctctcgctcctgcttctgctccacctattcctccacctcgcttccgagagcgtgatgagaccgaggtgcgaccgcttgctgctaatccttgcctgcttgatcttcaacaagccacagttgcccgggtacgtcagttcagacacgtacccgtggattcttggttgccagctcagagggacccagcagctgcgccacttttcagcaccaggacccaagagtccttcagggcatagctacctgcttagatatctctgagagtgcacctgtgtttggatctccctgccttcctttcagcagacggtgtagagtcagggggtcatatcacatatctgccag

SEQ ID NO: 59384 - DNA, 624 bp, Zea Mays
tttagtcacaaactcatttttaatagttgcaaatatatttaaggtataatgttctttcttatatatgtgaattgtagaagaatgaccaggtaacacatgtgacaatatgtcagcaccaaacaattccatcaatatgttggtcaacttttcaagcactgtgccatgtttcatgcccggagaatatacgagtcttttgcttggtcttgatcaagaagcctcaactgcacgaaaactacattttgatgaaccagtaaatgatacaacatttgggaatagagaagttttgttaccagttgagaatattccagttactgttattgttcgccatatataaattagaaaattgtgatctcctttattaccagtcgatcacagatcaacaggcttcgagtatgctccagatacaaccaattctggacttgccttttctgatttcttccaatgttttactaatgtcaaaaggaataagagcagaagagtgatccccaaacgaagccgtcaacaaccaacacacatatgcgtcaacatccaacgttgcagccagcggagccgtgcctgctcgctcacacgtcacggagccgaacgcgtgaaaacagagccgaagagccagcggccaagcggtgg

SEQ ID NO: 59385 - DNA, 813 bp, Zea Mays
gcaaacgagaagaaaagggagaaattgatgactatggttatgagtccaatcaaattgagcttcgggatgacaaggcccttgtgccatatgcaacttggctccccatgctagttggccgaggtggaatttagagtggtagctgccgaaatcagcactccatacccagctttgggatacttagcaaataggacatttccgacctctagtggctggggaatgcctaagaaaaatgagggggaaagtacgaacttgttcggctcccttatcgattcaaatttgagaaacagttcaagaagccatgcaaagagtggctagaaatgatcgaaaccatgtgtagcgaaattcttggaaactataccaagaaggaagactaattaatgatcgctgccttcagcacccgaccgaaggttgaaccgggtgatggatgcattaaactttgaatacccggattacgagaagcttgacaaaggggccgaaggggtgaaaagaaaaaaggattatcagcatcctgaataggtaagctgctcggttagtaaaagaagatgaattttttttgaagaaaataaaaacagctccagagacgaaggcaacaatctataaaaagcgaaatcttgacacagggccctcttatgagccaaagatagatgagacagaagaagaagctccttcgacgccctctgccgctgatgtagctgaaattctgaaggttatgactgaatccccgcccttcaagctgctaagtcctctgggatcagaactgataatttttacagaggaaagaacagccttcgactgcaaaggagaaagttaaag

SEQ ID NO: 59386 - DNA, 351 bp, Zea Mays
cgggactaaaggtggcaccatgatccatgtccctgatgtgttaggagtctttgaccataagtgaaaagctcacagacttccaatcacctcatcgagagacatttcttcatacttaggattttcacgaattaattgcacttgtgtcggattgcgaaatacaagtgaccttaggattagcttgacgatgtcgtggtcgttgcacttggtgatcccaaggttgaggacttggttcaccattgtattgagtcggttgtacatggtttgtggctcttctcctttgttgagatcaggtccttcaaagcacctcaataccatatttttaggcatcgtaaatctagggacacacaaaac

SEQ ID NO: 59387 - DNA, 509 bp, Zea Mays
agggcttatttttgtattaaaagtaatttctaaaattaaataactgaatttacagagttatggactgggcgtactatttacagagaaatcaggggcctcgggggaagatgtccaagactcagtgcatagtgaatatggacgacgggttggttttctggaatcctggggtttcttttgcaaaatggttaaaccaaagggtactgcgtaatttcagccgcccgatctaaaatcgatggttccgattagatccagcgatcatgaaacctcggccgcacgatggaacttcaacgtctcagatttaaataacctatactgatttactaccggccgatcgagatcggacggcacgcgatcctcacccgaagcggtacgcatcaggctcaatcgcgaccgtaggtgctcgatccaacggcgagctcgtatttctcccctaccctcgaccagtgcggcggcgccaataatccccggcggcgcagcccgccggcgaggccacggtcggtgccctggtg

SEQ ID NO: 59388 - DNA, 280 bp, Zea Mays
gagggacgtggctgcggcctgtgacttggcgctagctagctagcggggcgcgacggggaggagagggctgccgccagccagccgaggaccgatggttcttggactccaatccacacccaactacatcatttccttgtttgccgaagtgtgctaccacatatgtttgtctcatgccactcgttggagtttggtgagaacaatagtgttgtcgtgattgagcttggcatgagtggcgaagaggttggcagtgagagacttggcgctagctagctagcgggac

SEQ ID NO: 59389 - DNA, 577 bp, Zea Mays
gttcttttgcagggtgtagtggggagaacaaaaggcatgctgctcagtccagcaacaacaattcagtagagacttgtatgatagctcaagggagattgggtcataacattcataacccgcctgattcgatggctttgcgcggacgcgcaagctcgcgctaccctagccagtcggatacggccgtttcggtagtatgtgcagatgtaggtaaaatgaccttaaaatgacttgtttttgcatccgctcatatagctcgcaccttccacgtacaggcaaccaaatagaagcttcagacaaagtcaacgaatacagtggcctaacttttgcatccgctcatgtagcatgagcatgtgcctcccgcctgcaggcaaccaaataggagcgcagacaaaatcaacgtatatgatggtctaagaccaaacaatgtaggccaccaatcgggcggttggctgtcgaattttctccctctgttaatatgaaacaattgatatgcgtcttcaggttgagttgaggacaaatgtccacgtgaatttgactatcactttaccaagaggatatgactataagtcgcactaat

SEQ ID NO: 59390 - DNA, 302 bp, Zea Mays
gttaaacaaggagctccacttgctgagaccgcccggtttattttttcctcagcttttctgaggatgttaaagtcaccaccaataagcaaggggacctgacttctcgagcaaactgcagacatttcactgaggaatcggcttttatgttccttttgagcaaccccatacacattgacaaaattccaaataagacttttttctctgtgaagaactagagtgcgaatcaaaaactcgccagcttcaaattctctgacatcaaacacatcagagttgaagcccactaaaaggcaaccagatctccc

SEQ ID NO: 59391 - DNA, 487 bp, Zea Mays
aagacctccgttgagtttgcttttgtctctactatgagtagcgctagggaatcaaggtttggacgtttgtgcgcgaagatgacgaactccagcgatgtctcctccgtggctggagtcgctctgtcgacggggtgggcggctgattgggtgtgaggggggaaatgataggcatcgaccgttgatcccgttacgtacgggcgagattagaagtaggttagcgattcacccagttaattctcagccgtctgattgtggatgggcgtatgtgatgggatcgcgtagtattgaactcgtgtccattagatcgagatctgagggatggcagtgcataccggttgaggatgaggacgatttaatcttagccctccatctgtgatcacacggctcctatgggccgataccccttcagcctggaataattgcaaatgagccctcgaacttcttggcaattaatctgccgtccatctgaggttaagtctatgtctgg

SEQ ID NO: 59392 - DNA, 590 bp, Zea Mays
ctccccgcgacagggtggacggcgaagcaactaggacagcgacggcgagcgtcttcggacagctatggtggagattttttcttctgatagcgccggaaggcgaacggtatgggcattgtaccgggccatatccgttaacactgtgatccgttaggccgaaataattccaggtctatttctggacaactgaacatatctttaggtagtgtttggttccgaaataagttggaatagaggggtttcatccggaagattttttagaagctagatggcttaacatttaagcataattttgtttttttaaacacactctatcatacatagaaccaatccaaacaacaagttaggagcaaaatagctcaatcccagtatcccatcgtactctaaaaccaaacactacctagtcagacgcaaccaaaccggaagggacgtgatcagtttgcgccgtgaattgatacacgtcgataagccccaaccaaatagtgtgtacctgcgagtataggtgaccagatggaccgggctatatgggacgacatgatgcacgaccattttaacacgacacgtcacacgagcacaacacaacgcgatgg

SEQ ID NO: 59393 - DNA, 532 bp, Zea Mays
cgtcgctcctctacccacgagctggttgtttacaccaacactgattgggcgggatgtcccaacacctgtaggtccacctctggctacattgtgtttcttggagacaaccttatctcttggtcctccaaatgtcatctcgtagcctcccgctccagcgccgagaccaagtattgtgttgttgccaaaggtgtggctaaggcatgttggctcagtcaacgcctccaggattcacgaccctctcaccaggagcacatttatctactacgacaatgtcagcattgtctacctctctgtcaacccgattcagcaccaacacatgaagcatgttgagatcgatcttcacttcatccgtgagtgtgttgtcgttgaggatattcgtattcttcacattccgacgacctcgcagtttgctgacatcttcaccaatgacctttcatcctcagttttttcaaagtttcggtccagtctcaacatctgttgcggctagagtttcaactatatggtgctagattgtatgttgtgtgttagactg

SEQ ID NO: 59394 - DNA, 476 bp, Zea Mays
ctcttgcccttgtgccacatatccgaacaccgctgtcgcgtcgtcgtgactctttacagccgtcaaatcgtcgccggtgagctcgccacgactgaggacacgaactcactgcgccatgatccttccctgtttccggccgccagctctgcccgaccaaattgagcgccactgtcgatgccctctataaattgatggccgtggcagctgcgctacatcatcgcgaaaccagagcccccactcccacccttaatcggtctccagggttcaccaatttcgaattctccccaaattagtttccgccacctcgaagagtacctcaccgcggccagcccctttccggttagttcaacctcccctctccctcgtttgatgctcgccgacccacacaattgagctagaaaccttctggtcgccgggaacatgggtgtctcgccgcaacgctctcggtccccgtggccagagccaaccaggcaccc

SEQ ID NO: 59395 - DNA, 346 bp, Zea Mays
ccgtcagcggtgtagtgtgtcattgtgtggcgacgcggcatgcagtggcatcgcaggcgcagccgggtggatcccgatcggcggcagcagcagagtgaaatggggggccagtacagtacacctccgtacagatgcctgcatgggcggtttattaattcagaccatgtaattaatgtccatcactcatgcaagcagagggggtaactagtagtatggcagtgaaagagggatgaaatgcatggactttatctactgtgttggtcaacctgaaggtgtggcaagattacgatggcatctttgcagtaaccaaatgacgatgtgaggaggtcgtgagggtaaatccgat

SEQ ID NO: 59396 - DNA, 614 bp, Zea Mays
gagcaaccaaaatgcctcctcatctgctaaaaccttcgcaaaggctgcagcttattgtaagacggagacggagctcaaaagcacacggaacgcggcaacaggatcggtgcccgctggagatccgagaggatatgcacggcagccggccacgccgatttcccctgtgatttgtccccgatcaagccgtcctagcaggcatgttggatgttggccgtgggctctagctcgctcggaaaaaggcgaagaaatcttccctatcatctccacgtctcaaatggccggtcttggagcagggaaaacgacgcgtacggaaaagctaccgtggcctggcccctcgtaactcgccaagaccccatgaaaagaaagctgcccacctctatcattctccgcctatgccgccaccttccgactgaagtttaaaatagaagacgagatattgaatatgatatgatagcgggtgaaaacagtctcaaggctctctatttaaactttaaaatgcagagattttgcataagactgaatgaagatccaagtattcctaacgtatagaacttcagagaaaactagagaaaaagaaagaaagaaactggaacattggtccgccgcccatcgat

SEQ ID NO: 59397 - DNA, 1150 bp, Zea Mays
aacacacctctgtatattaataaatctgaaagctgactcattgacgaatacatcactggccaagaacatggcacactacagccagtgcactcgtacgaagagaggaaaagcagcatgctaggctagcaatacgtgctggcacatcttctatttttttataacaatagggaacagactgaaaattgaaaaaaatgatgtagctaggaaatctagattagtagcagctgctagttaagatgtctacaaattcctatatcttggagcatcaagcctgaattctccacggaagcacaaaccatctgtgtcgacttgctccttgccgctaaaggtgacgaaagtgcaaggatctgcgaagcggacacacatagagacaacctatcgctaaaggtgacggaagtgcaaggggaggtgagggggaacaagtcgctggcacacgaagaactggagcatccatactgcaataacggtagaaggtaaagcgacagaaggtatatctacagcagcaggtataccttcttttagaggcagcgactcatgcactattaaatgggtcgtgcttcgggtcgccccgccagaaacaatccatttaactatctatagacgtcaatgtaaggagagttccatctctctcttggaaatatcattcactgctccacagactcaaacggaagagtcttgttggtgtcttgatccgaggatccaccaaccagtaaaataatgttgtgtgctctggcccagatgggtgatgcaaggtgacacaagttgtttatcctggttcgggcgagagaaagccctacttccagcagagggaggacgagacttatattacttgcatctaagtgcttgcagtagggagtacaaacaggtcgagaggggaggatcccaagtccctagggttgattgaggcaagtgtcaatatcgcagtggaggtgaaaaccgtgaagtgttcgcccgcctccctgaagccacagactcccctatttatagcctcaaggagggctgccatgagtgtcggggttggccgggtatgatgaggaggcaaggccgagcaccttcagacggtatggcctgtggtatgaggcttgtacttgttatttacttatgcctggtggagacgtctggttcctgtatttgcatctttgactacaca

SEQ ID NO: 59398 - DNA, 480 bp, Zea Mays
tagaactctattgaatactcactctattagattgaaaagccggtgacctgcatcggttgagttcttacatcgaaaaacaaaaggacttgtgagatttgttgtttcttgaagggtgctaatagtgtagatgctttttgttcatcaacctccaccaaaaggaaggggcatgtgttgagcaccaaattagctaccggacagtccggccctatagtccttacggtctagagtgcgcggtgacggcacaaacggtctgcatgtgaatagaataagttagccctagtttagccttcctctacctcaattcttcgcctctcttcagctctatgttgactagaaacgccttgggtgacctgtcgaccataagaaaacccttggatctctcctcccgacgcggtccctcacgggaggcgagattcaggttcttcgtgataaaatcggttcgggtacagatattttttgccgcccgtgggttacccgtgg

SEQ ID NO: 59399 - DNA, 1023 bp, Zea Mays
cttcaattattaatcatgttcatatcattgttttcataggatgttacttggttttgaattgatcagtatgctttgcacgatttcatcatttataaatacttttgctaaaccttataaacattctttaatttgtattaaattacatatctttaatttattttaaggtattcaatcaactatgtgacattcatgcatatttgcaaagctaggtgaagttgtatgcttaaatataaaaaaggcacaatcatgcttttaatggcatgccttaatgacttacatattgctcatgccttttgttagtccaatatgtagtgcggactggtgaaatgaattatttctcgtcattgccttcattgtgcagttcaactcggactctaggtatattttatcaattggatgtagtgtccttgtaaccgaaacacattggatgcattccgtatcatatggcttgtgggcacccaaagatgtcattgttgcctttcccaaatttgcttagtttattatgatcaccataaattccatcatcatattattgatattgttagagtgggagaaaaccctaaccctaatcagggttggacatgtattaatagatgagttatttgggctaaagcccattacaataaaggtatacatggcaaccctaacacttacgctaacaccccctcacagtcacaactctatcctgtatatatgttgaggcgggaacaaaactcaatcaaaatagtagaaggaagccccttggtgtagatgtcagcaaattgcgaagtggtcagaacgcggacatcaccgtcggcgacatgctcgcggacgaagtgaagctcgatatccacgtacttcgtgcgctgatgatgcacgagattggagaggtagatcttgctgaggttgtcgcaggagacgagggtggcgcgggcgatggggctgtggagctcatgaagaagttaacagagcaaggacgtcccgaccacgtcattggccatatctcgatacttggcctccgtgttggagtgggagaccacgggc

SEQ ID NO: 59400 - DNA, 431 bp, Zea Mays
tgatggtacgaacattaacacatgtgcatcatcgactaccatatcacccattctcttgcaaacatactttaatgaagtaccagatgatcgcgcgaaagtgcgtcgacagcgagatcgagccagacgtgcgagcatgacttctgaccaaattgaaagtagacgagcccgtgctagagaacggtatgcgaatatgacgccagaacaaaggagacgtaaaagagaccaaccgttaggcgatacaccacctcatggcgaaaccaaacaatggtaaatcttatcagattacacttgtatacaaggttcaagcataacttacattcaattgatttaataataatttgacttggtattattactagatgttagtgcaaccaacaatagttgcttacttgaaccttcacactttgctccaacatatctcgtccaagcaa

SEQ ID NO: 59401 - DNA, 1175 bp, Zea Mays
cgcttatctcttctccttatcttgcagcagtcaattcaggatggtgcgaacgaagaatgtcacaccgtcagggcgaggagatgatgaggaccctcctcgccccttcagataggtcaagggcaagactttctatcttgagcagcaagagggcagaaagaagaggcgtctggacagagtcgctcgtgcagcacttgcagcggcagcagcggcagatcaggctgagcagggagggcggttaaggatttcctcatcagatcgcctatccagttcgtcgcctcgcgtctcggcctcgctcctccactgctcactccactccttctgacccagtctccactccacctcccactttgctagctcctcttgatcacgagctgtccaccacacccgctgtgtccaccacctccaccactctagcttccactgctcccgctcccgcttccgctccgcctattcctccacctcgcttcagggagcgtgacgagaccgaggcaagaccgcttactgctgatcctcgtctgcttgatcttcagtgagccactgttgcccgggtacgtcggttcagacaagtacccgtggattcttggttgccagctcagagagacccagcagctgcgccactcttcagcaccaggactcaggagtcattcttcattgcgcggttgtctgctcgaattgccttgagggcgcaccggcttttggatcttcctgcttttctgtcaactgtcggtgccaagtcagagggtcacctctcctatctgccaggtttactttttcttctgactttcagtgggagatacactgaggagtgggtcagagtattttatgccacagtatggatagaccctaatcatcagtggctgaggttccggtttgcccgagaggatgtcactctgcatgctacccagatcagagagttgtttggatttcctgagtcgtcgacgaggctccacagcttgtgctatggcacgtcagatccttcctgtcgccctcacgacgaagttgctccagccactgctcacgtcgctgccctgtttagacctccgttcacagaagggtcgcggcgttctccagccgacttcactccagcaacgaattttctctatgagctgatgaggaggactttgctacccaggatgggatatagggaggccaccacgcatattcagctctggcta

SEQ ID NO: 59402 - DNA, 423 bp, Zea Mays
gaggaaatgtctagctagttgtacaacaaatgcactcgcacacgacaccacctacgatccaaagacgagcaacatctagctagcgcccctgctgtggcctgcctatagatcgaagcgatcggccggcccaatcgaaatcaaggggccacgggagaaactgccgtcacgcaagtcggcgacggcgagtgtctagcacgtgggcaaggagcgtctagtcatagaggatgcaggcattcagctatgtatgcactgttgtcccatgttggaacttgtaccatcagtggacccgacaatgtaaggaactcgtagcaaacctttcctaaagtgcccttcattatacgttcaatccaaccctaaatatcataatgagcttacaagagattgtcaaagcacggttgaacctagtgagaggtcaactaataa

SEQ ID NO: 59403 - DNA, 360 bp, Zea Mays
tggctgaaatgtgttgaaaatactagtgatgaactacttggagtgtactccaagtctgaagataatgcattatccgcggccttcgggagccaaaaaaagaaaagactaaatagggtttttgacgctattggatttgtgtaccctgactatcggtacccgccgtgggggcagaaaagaaagggtgcaacttctgggaaggatgttgcttcagctgctccaagcgagcccgcgccgaaaaggaaaaaggtgaaggttcttactcacctaccgcgctacattgaaccggccacagtgcctgaatttggcggtgagacctcttcggctactgaagccaaaggacctgcccttacgcagaggatt

SEQ ID NO: 59404 - DNA, 557 bp, Zea Mays
atttttgtgaacaagggatgtcatcactgtctgaagacggttggccagcaacttagtgatgattttcatactattatttagaagcgagattggcctaaaatctcccaccaattgagcattttccttcttcgaaactagaacaataaaagaaccattaatacttcggagacagacatccccctgataaaattgctcacataagtcgtagaaatcttgagaaatgaccggccaacattttttgagaaaattggtgttgaatccgtcgggccccagcgatttgtcggtggggagggtagcaacaatgctgtcgatttcttgctttgtgaaaggctcctctaaccaatgtaaatcttcatgcaacgaaatcaggctagagaggtcgaaaacattgtccgaaaagtcagaagaacccaagcgacatttgaatacattcaacagaaggccagctttcccgtcatgatctgaaaagaatgacccattatcatcggagagcagcgcaattgaattacgccgatgctttaccgttgcgtgagcatgaaaaaatctagagcaaatat

SEQ ID NO: 59405 - DNA, 1059 bp, Zea Mays
cttgtaaatatgaagctttcatttgaatcatcttttacagtctattacagattcatagacaccatttccccctaaatcattacctcatagtactccttatatcagcgagatcaattactaccttagggttgatttggtgaccaggtaatttgaggggatccaggtgactagggaattgaaggggatctatccttccacgacagcgacctattcttgggtcagcgggcccgcgcttaagaatttcccgtccctctggcggtcctcgtcgtatcgagcggttggcttaaaaaggtcggtcgcaaagatccccagtgggacggtcgtttgccccgatgccattttcattagggtgtttgtcatttcgttcaagaccatcgaattgctcctccatccaccttacctcctgacagtacgccgccatcttgcggtcgcggcattacaactacttcatctcatgtcctatgatgagatgagagtctcctcggatatctagacgccgaacacccaactgcacgacaatgtgtagcccatttacgagggcttcatactcggccacattgttacaagcttgaaaattgagttgcacaacatatcacagttgttcccccgatgatgacgtgaaaacgaggtcaccgtgggctccctcctttctaagtgactcatcaaaatgcatgatccaacatttctcagtagttggcaccggctccaattgggtctcggtccactccacgacgaaatcaagaaggactagtgatttgatcgttgctcatggggtgtaggagggtatttggcgattctcctagaaatgttcggattgtgggtcacctcacctagggggaactacgtcaccatggtgataggatgtgattttaaatagtgtctaagcttctatttagtaattaagacggtgtacaggagcttttgtacctgggggtagcgagttttcaagccggtgaggacttcgcttatgaagtagacggggtgctaaagcggccacacaccttcatcttcctgtctttcaatgacgagcaccaagctcaccacctgggtagtccctgc

SEQ ID NO: 59406 - DNA, 1054 bp, Zea Mays
gagatacggtctcttgcgctgcattacatcacattccatcgcaagaacaaagccatctcgctgcttgtagacatccaaagattcaaggtctaatggatgtagtctagtttagatatgttacatattgtgtatacaatggttccgtaaacttcagctgagttatgtgtgtatactatggcaatgacggtagacgtttcttatgttatgtcaatgacaacctggggaacagtgatgtctaaactggataaatgtaccctatgtattttaacttcatgtgtgttttctcagctgattctgctaattttttcacaattttatgttgttaacagcatcgtgttatgcttatttttttcaagtttatgctataatcatcaccgtgttatgctaaaaacatcactttgtacatttataagcttcaccgtctcacaagtttatccactaaacaacaccgtgttatgcatatttttttcataaatttatgctatataggtcaacgtgttatgccataaacatctcgcagtacattcataagtctacatatctaaataatgcttacgatacctttcacctacgtttatgttattatgcgtacatatttatgatgttgtatgtgccttgaaaatttaaattacgattcacaattacatctagaataccatttttaacttatatttccagcatattgtatgtcgttcattcatttgcatcactagttacaacagtaaacaaacccattgtctcataaatcttttggtattctactccctaccagatgattcatcatctccgacatacaccgttcgtttttttgatgttgatgtctcattccagtgtggtgctgcacctccgattttgttccttgaaccaggaggtcgtcctctcttgcgtccagctaggttagccaatcgaaccctattatcctctatagttaaacacgtacgactgttgtgaccatcagcgatgccacatttttggcacttcctgctcatcttcttagctcctttcgtgcccaatttaagaacttgttgctcactacttttgatagttcttccct

SEQ ID NO: 59407 - DNA, 550 bp, Zea Mays
cctgaggaagagtttgggacatgcatgacattacgatttccatcttcaaattgtgatacttttgacacacataatctggtgttcttaagtgtccttttaattttgatgccttcctttatccagtgactatagtctataacatatacccatcctatatcatatacccatcctataagagtttgggacatgcatgacattcacgagtctcgactacaagctcgagcagattgtcagtgttaaaagacagatttcaatagcgtcgcagattctccgtttgctttctcatgtcttttagttggaaaaaacaaaaattgttagtagtctccgatcttacagtacagggggcttcattcgctcatcattgggcaatccccggtttgcctattagtgctccatgctccatttgttgattagcatgtgccaaaatgaaatgctacaggagagcccccctacaatatcttaactaggcgctgtcctcatcttccaaattactgcatgctgcatgtatgagcgaaaatatccacaaatgattttacaactgtcaaaaaat

SEQ ID NO: 59408 - DNA, 751 bp, Zea Mays
tgatgtcatgtagcaatcgaaaacaagtaccaacaaggcccgaacctaaggggttccattgatgttcatattgcactccctagagaagatcttggggataacagtggatatggctgatggccttccaaggtggctagcactctagtggagacaagttgtgcatggattgacctcatgtacgtcgtgcataggaggtcaacaacctagccttgtatgcaacatcctagttgagaggaatcgagtggggaggagaggagtcgcatcttgatcttgttatagcctacatcacacgggaagaggagtcatgtgcatgtgttgggttcttagtagcaagatgtgatgaatgaagatctgatccaaataatattagttgttggatttggctgaaaagagaaatggttagccttgtgcaaacatatggttgatatgtgcccatgttgttcatgttgtgatatgtgattgccaacaaggtcgagtcatgtggactaaccggggcatgagtgcgtatgtgcaacatgtatcttggattgtggtgcacaagtatggagttttgagatggtggccaatggcgaagatgaaggtcatgtcagttcatgctgatggaccaggagcggtgaagaatgagcagtggatcttgattggggattagagaagtaaggtgactagccgtggtggttgatacctagggacactgataggcacaaggacatggcaaagtggatcatgttgttggagtagttgtggaccaatg

SEQ ID NO: 59409 - DNA, 1187 bp, Zea Mays
gtgttgagcacggtggcaacgctggagacgccggccatgggcgtcaccgtcaggtcgtccagcaccatgtacgtcactacgccctgcacaatcccttctgccgcgctctgtggcgccgccgccgccaccttgccggagtcgttgctgggaaccgccgacgacaggtactgcactgccgccgtcatatggttgccacaattccccgggcacttcttattgtacatgtccgttatgtagttaccgcagtacgtggatccagcgacagtcttgccgcatcgaaacaggttctttgccttcggcagacagaggagggatctcctggtgttcgcaatcgcatacggtgagacaacggtcgggcagaggagatcaacattagcgacgccggcctgcaagtaggtggagtcgagcttctcgacgctggcgtagaggttgccgacacagccgaccatggcctccttcccgaccagttcaaccgccgtggcgacgggcagcgcgaggatggcgaagaggaagtccacgacgtccttgctcgcctccgcaaacagcaaccgctgcgccttcctgtcgatgtaaagcttcatgctcagcgcggtggctttggtttttggcatctcgtaaccgtaagcgctaaagctcgctacttctcggatagtagggcgcagagcgtgagaacttggcggagaaaatacaagatacttaaatactagcagctttcacggactatctggcctgatatgagaatttgaaacgactcattgattgataactcttagaactacgtgctccacttaataattctgcatgggaataggagaggacatcatgcatgtgttgtgcaccaaatgcttgtcaccctactgtatcgacccgagacgaggcatgacatgtacacatgtacctagtgaaactgttgtgtatcgtcgtttctcttcaagcaccatttttccacgttcgtcccgcggaatatttttacaaataactcatattgcttgaaatggcccccaagacaaattctcttcacatcgatcacatctaatccaattcgtttatcaacactctgcacgtcgtgtgagcgtcacagtcacccacacaataacacaaacccacgcacgccatgtcttttgttcatagcaacgaccgacatggcaagtgtgcccacgccaaatgcaccgtgacaagagcccgac

SEQ ID NO: 59410 - DNA, 916 bp, Zea Mays
ccgtcaccggaatctgtgttgttcaccgcgattgcgccatgccttaggcccttaaccacgtcgcaatagctcgggtcatctgtatctggtgatagccggagagccgccacggtagatgccaccaatcacttgcaccagtgatctcctctttctccggccgccaccgtgcaagaccaaattcactggccaccgcttagcgcccttataaattgacggcacggtctgctgcgctaagttatctccaagccaaagcacccatccctgccctcgattatccaccatagccgaagaatttccttcttcccccaaattggtcgactgcgccgccgtgaatcacctcatcgcggctagctgcttctaggtccgccctcgctctttttgtccgtgttttagcacccacacgtgcttgtgatcgtcgtctgctcaacccattgagcttgacctcacttaatcaaccggaacatcttgatcggtgtacggtgttcgccatcaccatggtcaggaaaatcctaggcccgattaatccaattagaacctgttctatggtcgcctcgggtcagtaatgcttgcccagtagctaatttgggcagccgccgttgttcttggccggtccgagccactgggtggtcggcggtgagcgcgtcgtggccaagggatcgatttagagaagaaacagaaatcaacggacctcggagcaaatgtcagcgagacaagggaacagtggggagggctctttatagatatttcaaacctccagggttccctgcgcaaaatggacaccgcagcacgcgcgggcgcgtgttctccccgtttctgggccgacttagaccagattcggcccagcgctgttcatgttttctctttttctttttcttcaggacttagaaaattcctagaaatctatagaaaaatgcta

SEQ ID NO: 59411 - DNA, 898 bp, Zea Mays
cttaaaaagaatcttgtccttgagatttaggaaggactagggaaaagatggggaaaatctatgcgaagctcttcttctctctcccatgtagcctcatcttcaccatgatggctccattgcactttgcacatctttatcaccttatttctcgtaactcgagtcaaagtatcaagaatcttgatagaatattatgtataagtcaaatcaccctgaacactaagctcttccattggtagctgttcctaaggtacacggagacacttcttaagttgagacacatggaatacattatgcacatcagatagattatcaggtagctcaagttagtatgccatctccccaacccgcctaaagattcttaatggtccaataaagcgaggggataatttgcccttaactttaaatctcctcattccacaaagtggtgacaccttgaggtacacatgatcaccttcctcaaactccagttgtcttcttctattatcagcgtagctcttttgcctggtttgagctaccctcaagttctcccggattatacgtacttgttcttctgcctcttgaataagctcgggcccaaagaactgtctttctccagtctgatcccaatatagaggagtcctgcatttcctgccatataaagcttgaaagggtgacatctttagactggcctggtaactattattatatgagaactccgcatacggtagactctagtcccaactttctccatgctgaagggcacaagctctcaacatcttccaatactttatcagtcctttcagtctgtccatcagtctgagggtgataggctgtactaaagttcaacttcgtattcatattctcatgaaagcttctctagaatcttgaggtaaactatgaacctcgatcagacacgatg

SEQ ID NO: 59412 - DNA, 450 bp, Zea Mays
cgccagcctctctgttcttggtgatttccttccccgccgacgacccgctctctccggcgacctccatctccggcgatcttccggcgacctcgccaagcacttcttccccctcggtgagcaggtcccccctcctctgcctctccatctctctggctcttaggcagtacaccacaccttttgcaaatcttctaatttctgtgaaatccgatgaatccagttggtgaaatgagttcaagtatctctattgtgtatccctgcttgcttttagctccttcgggagggcattcccacctcaaatggccatattcctaaaaccctaactcctcgcacaccatgtgctcggtgaaatgcccaaactagccaaacttgctccaattgaacccaaatttttcaggcactttcaccacacttccagtaacctacttgccaaatttcacgccaatccgagat

SEQ ID NO: 59413 - DNA, 562 bp, Zea Mays
gaccagtctgctctttgaagctgcgatacacacttgttgccatccatatttagttaagctcaagctattgaagttattaatgttcttctgaacgatgcataggtcaatgaatattttagttgtcatcgcatcctagctgacactgtccgaactcatctatgggcaaggtgcacatgcaagtaactatttgaaacatatacaaaggcacatttaacaatttctgaaacagaagacatgtagtaaaagaaacaaaataagttatgcacataagaacttgccatgacagttgttttggcacgcttctaccgtaggttgtactgagtaggtgcagttatcttgccacacaggttgtactgagtaggtttgtccggggaacaagaatcagtgaatgaaggtggcagattgggcaaccatatgcaggaactgcgcaaaaaaagaagagtgacttaagacattatggtatggagtagagtgaataagacattatggctttaatctgtgccgacttttactacttctataatgttttgtatatatggattgcagctgcagcatcttgcaa

SEQ ID NO: 59414 - DNA, 1764 bp, Zea Mays
ggacaacaaggaaagagtgtactttggagagcttcccaagaataccacctccctacccgacgacgcctgcaataacactgtcttccaaaaacaggatataactgcgtgatattgagttaagcaatccatacccaaaataacatcaaatgactccagggaaatcaccacgagattagctaaaaagacctcatccgcaagaacgacggaacaacccgggcagactgaacaactactaatggagaccttagcagaactaacaacaattgggtgacccatccttcgcaccgaaagaccagcacacaacacaaaattcttcgaaacaaatgaaaaactagcgccagagtcaaaaagagcatgggcatcaaacgaatcaactgagaccgtacctgtcacaacatctccctgatatctgtcatccgtagagggtaacacatatgctccagaaacacccggagaagaggaagctcccagagtgaaattaacagaagaaccccatggagtcacaggatgaggcagacatggagctccaaactgagatggtacaggagtggtcggtgcaggagtgggcgcggccaggaactgagggaaacctagcataggcaagaactgaggagtaccgggcatataaaaccgctgctgagggggtcgtacagaaaattgttgctcagcggttgtcatcatgttgacagtgccctgcaaagaggaggaagtcaccggctcccatttaagcttcccattgggattcctcctacacaccacatccttgtgatcctggctgcagatagagaacctgccactccactgacactcggaacggcaatgcgcttcaccacaatagaaacacaccaaccctagcccaggcttaggaacagcccgatacctctgagtactccctcctgaagtacccgacagaggacttgccacgataggggtggcggcgctggtgttgagactttccccccttgtgggctggaccccgagtgttgcccctcctcgcgtcctggccacgaggctgatcaacacctgaagacttctgagattccattatgtactgatgctgcatctccatgcctaatgcctgctctaccgtagtacgaaaatccagcagtggaaatacgcccagagcatgcctgatagagggtttcaggccctgacggaactggctcgccttttccaattcattgtaggccacatgagggacaaagcggaccatcttgttaaaacccacttcatattctgtgaccgacttcttctcctgcttgtaagactgcaaatctatcttcatcttctccaggaaagtgactgggtaaaacctcctttcaaattgcctgataaaaacatcccaggtcaggattcccggtgaagacgagtgagctgtctgcacgcctctccaccaaatttgagccccccttcaatagttgcgtgccaaagcgaacacgatccccaaacactatctcaaaagcatccatcttatcttccacataagtcagccaatttgccgcctcaaccggagtaccactgccatcaaaagtgtccaacttcatgcccatccactgtatcagagagaccactgacgagaaggggcacctcagccccaccacctagagcagcacccgcaaggacagtgcccccaggaactcctccactaccggcaccctgagcacccgcgccctgagcagcaccagcaggagcaacaggaatggcttgcctcagaatgaacaacttctgctgcatggcctgcatcgcgactaacattgccgccgg

SEQ ID NO: 59415 - DNA, 687 bp, Zea Mays
tagatatctactgcatcatgattgattttgagtgtgtattaaatttcaattcttaaactttatcttggattggaatttgaattttgtaaatcaaaagggaataatatgggaatatctcatttgactaagtaaataatggatatataaaataaaataaaccatgtataacaagttgaagtttttggtttgagcacttaaatatactttaaatttgaactctgtttgcatttattcaaaatttgaatttgaattcaaaatggaaatacaaaatataaaacaaatggaatatagaaaagaaaatgaaactgaaaataaagagaaggaacaaacctgttcctgggccgaattcaccccgtcagcccagtcttccacgcacgctcggcccatttaaccaccctctggttcgtgcccttcgcccggtgggacccacgggccagtgtgccaaccgtcgtaggcgcggatccgggtatatggcgtgtggggccgctttgtcaggcgcgttcctagccttgcgcggactcacttctggtcgtcgactagcgggccccatcctgtcaggttcgcccctatcgaatcagttgggtcgtgcgcaaatcctgggcagaaaaggtcctcgccggcgacgcaattttggcggagacttcggttgctggctacaaatacggatgtccaaatgccctccgttat

SEQ ID NO: 59416 - DNA, 776 bp, Zea Mays
cgaccctggagatcgtgttccggatgattaatgggatcgaagctaaaattgaagcttgggaaggcattatgggttcaccaggaactaggtacatgattgagtttaggccgaacgaggatagaggagcagatcgacatagatggtgcatatggtggcgttctttggagcaacggagtgttctggtggtgggactttgataaactttgattgattggcgtcgtgagcaacatgaagctaaggacatgctggaacatgaggcaattgtgcgagtactaacccaaagagggctggccacagagaggtccttcacggcggtgctcagaaacagggcggaatggatttgtggactgtgtgagttctccagcgaaattgagtcgattgctcaagttggatgaggttcgcggagctgtaaacgcgctggcaagctcacccgcgtgggcagagccacggcgatggtccggcgactgccgattaactgggtagtgccacctcgagacattagcgccacgtcgtagaagatttttaccgtggccgcagacccatccctagtcgcggtggcgatcttatactagcgagatttttctcattacaggtgaacagtacgccaatccgcctgatttcaaagggctactgctccaaatttcatgtagttgctcacaaacaaatctgtatcaaacttgtaccatgatcaatgttctttcattgtgctgtaatgactatgccaaaaatccttatggattgatcaggccagagcacgcaaaatggcgcgataacac

SEQ ID NO: 59417 - DNA, 453 bp, Zea Mays
catgctctggtgagctcgaccatcgtggggcagggaacgtcgccaaactccggcgttgtgaggtgggtgatgagcgtcggtcgttagatagggacctaacgacgctggttagatctgcattccccttcggctagggcttctctcgcccgttgatcggacatcctgctcttaggattagaactcgcgtaattagaatccaatccgttgaccgcttgatgaacggttctgattggatgtggaggtcccctttcactttgttgcatcatggttgtcggtccgggatcggagatctgtgagtcgagcttgggtgtgtctgatttcgtgccattggatcttgatcctgcggcggtcggtgtgtactggttcgtgtggtataacaatctaatcacagccgtcaagggcagatccatcggccgaaatcgtctgataccctgtcgccatggcatgtttgcg

SEQ ID NO: 59418 - DNA, 914 bp, Zea Mays
ttttgtttcttgatagccctctgatcctccttgacggaccgaatggcctgcctggtcagaatgctaacaattctcttccttttcgctcctccggcccctttctcaagtctgtcataatctgtatactcaaagttcaaagcatccatcactcgattcaatcttcattttcacgggtgccgaaggcagcaatcatcagttgatcttctttgttcgtgtagttcccgagaatttcattgcacattatttctatcatctccaaccatccagtgcagggtttgctgaatcttttttggattttgaacctataaggaaggcatacaagttcatacttttttccctcttccttcctcttcgacattccccacccgctagaagatgggaatgttttgtttgctagatattcttgcactaagtccctagtgctaatgtgctcagccacgaccctaaattccacttcggtcagttggcaaggagaccctaactgcatattgcacaagggtcgaatcatgtcgaagttaagccttaagggactcattaccatgctcataagcttctccctcttcttctcatcaaccttcatataaaaccactcattcgcccacccgatcggccatttagtgtggtagccaatcacgagggccttggtatctttccggtatacaaaattgtagcacctgaagttcttgtgcagaccatcggttctagccttcgtctaataatgaagttcgtgcactcgacagaacccttcggcattggcactttttccttggcttcgaagagcccaaatatacacgctaagtctaacaatggcattgggggtcaattgatgtaggtaaatttcgaacttcttcaaaactccccctaccatctcatgaagggggaaccgaaagcccgccctgaagaagctcttgaac

SEQ ID NO: 59419 - DNA, 491 bp, Zea Mays
aaaagttcttatttgatatatggtcaaagggcagaaaagaaatctgtattgaagagtcgatgaaaaacaaggagaaggtctgtatttagctaccttcattttacttttgtgaagcatgcacactttctaatattcagatttttgtaggcttgaaaggtagctgaaaaggcgatggctatccaaaaaaatttgcaaccaaaggaagccaaatgttcctttattttttgttgattttcctagactactttgtgcacatgctggtaactcttctctaacatttactgggaagtttctactttacaggcaataattgaagttaaactaagcaaagccgaagttaagcagctaccactgaagccgaagcaatcgccacttaagcagcaaaaaatgctacaaatgacattacttggaaaatatgtgaacaaatttatgacaatgtgatgcaaggataataaacatttggatgacccttttattgttacatttgtgat

SEQ ID NO: 59420 - DNA, 887 bp, Zea Mays
tgacctgaatcgcgctagccgcggcgagctgttcttcgcggtgtattcgaaccggtttggggagaatctgaaattagcgctctctggtggggggtttgggatgcaggtgggtgcagtagctgctggaatatatggcaaagccgagggggctcaatttatagatcccatcgacggtggtgtccaattttgcaaggtcgtgctggcggccggagggaaacagggatactagagcaggggatgggtggctttcaccgtggcgctttctcccgtgatcaccggttgaggagctacggcggttaccggtgagctggtgcggctagggatgacgtggtggaaggcttggagcgtggcacagccgcagtaaagcacgacaactctggtgacggccatgaggccacgtcgccggtgaaaaggggcaggggacagcgaggccacattagctcatgcacatccgcgacgagatctttacccggtgaacgaaatccatacgcccgtggcacgaatcccggcgaagaggtcgccggcggtgagcattttgcgctggcgtgctgatccttatcaggtcactgtaccatggcgaaatccgattcagtgtacctgacagtcgaagttcagggccaaatttctcccaaattttgatggcaactcacttaaggttctgcagcaaagttgtagaccaaggattcagctacaattttgccacagcatctatagccaaaatcctactaaatcatgtttgaattggtgcccaaagttcctgcagtgcactatcagtctgaaaattcagacttaaattgacctgacagcccaactttgggtctgcttatctccaatttcttcataacaactaggcttaccttcttaagcaaagttgttctcctttgata

SEQ ID NO: 59421 - DNA, 347 bp, Zea Mays
ttgaactatgtttagttcaaattactctgtgaatggttaatcgaggagtgattataattgttgcgcttactttacatattatctcttgtacgcctcgataaccatgattgtaggaaggtctccatcaaaactctgatctattatgtgtgttgtatcttcggcttgaaatatcatgcacacacatagggggagcctttcttacattctgagttttattaggatttatctatctcccggacagaacttcaaatcaagataagtcctatgaaactcatctccaaaatccttcttatacctaaggtatgagggagatttggaaaaacaaaacttctcttgaatatattgtg

SEQ ID NO: 59422 - DNA, 501 bp, Zea Mays
taccattggaactattttttctagattgatccttatattttaatatgaggcatcaatttaagggattgttggagatgctctaagtaaaccatattctcatcccacatggagtcgccagcaccttgcacgttgtgccgctgcgccaacattgcccttgcgcccctgcctcccttctctggcgccaataagccaacaacttccttagtcccttgttgtcctctcttctatggtgcaactccagtgcctcccttcctcggtgtcccttctcatcgtgtctagatctctacctccgactaaaccctaacagcagcacgagtgattcagtgcccccctcttccatttctagatgcagcgatgccctataggtaccttgtcggtgtttcgaacctatctccgacaagtaaatctgtatgcgcattctaggcttcggacagtgtgtatggtgagcgcaagatttatacttgttcgggcagaacgtccctacatctagtctttggcggc

SEQ ID NO: 59423 - DNA, 1213 bp, Zea Mays
atgatatgtccgctgtggaaggacccgcccctaaatgacccaggggcaccgagcacggggccaggcgaaccgtaaggaggccactcgagtggattctacacctgacccacagacttcccccatcatttatgatcgcttgcattaaatacgcctagtgctgagctgcgatagtaagtcgatcctcattccactcatggcctatgcatccgagctagggccccactcattacttatgggacgtagacttgtggctcgctcataacctgtcgagcccttggcttgagtcccttgatagtctacgaagcccgcaacatgacgaggagcaccaaggctcaggctacgaaggtcatgggtcggcatggaacaggatgtgtaattatgaaacttgagtcccgctacgcatacacactatcccaactgacttaaaggagcacgactagagagctcagacaacaaggacagataccgacagatggacttataccaagggtagaatacctcgttttaccatgacgcaacaactccttccacaagaactcacttgtaactgccccctccttagtttataaaagggggaggaccgacccaacccaaggaggaaaagaggggacaaagagtgagcagcgatacacgatgacttagctaggtagagaacacctgatacatagtcccttagaaccaacgtcgcatagagacctatgatccttccctctctcgccttcttgtaaccccaactacgagcgatcaacaacaaggtgctggaagagcgagcaaccaaagactagaagtagggacattttgcacgaaccattataaatcttacgcccactgagcacaccatctggacttagaacatgcatacacatatttggaagctcaacccctagatttccccgctaacctagtagtaatgggtattcaagggttagatgtcatcctagggatgaattagctgcagagaaaccaagcaaccgtcagctatgacaaaaggacagtaaagttagtgtccccatcagggaaacaggtagtgactgaattattcatgcctgatctagaagaaggagactgtcaccatatgtctgtagattgtaaggaggccaacctgcttgaggccaccggagttgtgtcggagttccctgacgtgtttcctaaggagttaccaggcatgccacccgagcgtaaagttgagtttgcgatagagcttgaacctgac

SEQ ID NO: 59424 - DNA, 361 bp, Zea Mays
cgtaaaaacaaagagctatccttcatgatcccgataggcaccataccaacctcatccagtagtacccaggttcccgacaacaacccacacggttccacggtggcgccatagctccgttgagccattgcccgattctaatcacccccacgcactcaatactagctctatatgctgcggattgaacgaatgacttcatcggtcataccttacctccagccacggcccaagcgctgctggacacgtgatggcgcggcaccgcgacgacaccgaatcaacggcgataaattgtcaccgccctggccaccatccttgcctggcaacagcacgagcacccttagcgcaaacaactgatgccccccgg

SEQ ID NO: 59425 - DNA, 538 bp, Zea Mays
aaaaaaattaaagagcttggttccaagagaaagaaatgcaatccactgttgcttgaagaattttgatggaaaaaatggatgggttgatgcaaataataaacttgtacacaaagtttatggaaatactttgacttgggctgttgtggatgaagttgttggtgcaactcaagacctataggggcgtcacttgcgtaggtctgctgcagtttgtgctgctaccgttgtcaaacagacctgagcaagaagaaacgtctaagaaacgcacgggcttaagatatcgctgtagcagatgatgggaaagatggaacagaagaaaatatgaaccagaaccttctaatccagcagcaacaatggatgaggacgaagaatcatgatggagatgaagaggcttccggttgattgatggtctacttaattagccaatagccacaagattgcaagaaggctgcttttgttgctcgttatgttccattcgaaccttgtttggttatgtattactggcgaaagggtctctaactgagttggtcaggtggtctcg

SEQ ID NO: 59426 - DNA, 390 bp, Zea Mays
tgtttccgacaattctaattccaaatttgttttcgatttaaaatgtaaaaaattaaaacaagaaagtgtttatcccgaccgattacggctacctacgttgcttaggtggacttaacgagccaaggctatctctagcatccactggcgcacatatttatttttcataacactagtagaatacggatgagaacgtcgatagtaagcgtttatagtacgctaaatttatggttctcccttccctatgggtctatattcgcattcgcacacacgttcaatggaagcgtcctctcgtttgcgcgttcgcattcattctgtagtcttccattttccgcatgtgcatatagcatccgctggagatagcttaagtctggttccagtgctaatagcata

SEQ ID NO: 59427 - DNA, 487 bp, Zea Mays
ttggagagttgtctgcctagccgttggatgctttaccaactgatggatagtatttggatccacctatttgattcgtagcgttgatcgactaatggagggctcagattagaagtagcgcacccgttcggcagggtcaatactggcggttggatcttgatcggacgaatctgtatggtcacgggtctttaaaatctgaaccaaaggatgcaaatcgagcagcctggattactcgatggtttgatgtgtgtcggatctaatacggaccgtatgtgttagatcggatggctcgcatggctagataccccttcagccagcccgttttgcgtatgagcccttggactttacataaatcaacccaccgtcgggtcaggtatagattaattgcggttgtgcccttgaattttataaaacatgccctatgctctcggctttttgtatctagtacccaaataaaaccctaggcttattaaataagccagaaaataat

SEQ ID NO: 59428 - DNA, 827 bp, Zea Mays
gcttgtttgtgaatccacttatgctaatagttagaagtggtgtaaagaggtaatttgacctataaaagtctagttagaagcggtaatgcacccttgtgataactaatggtctaatgctatgtgaatttataagagcccacgaggagtttgaacccaacttaaaaaccgctcataataagtgagttggcggtgttgcattagcaccagacatgtccagtgtactttatatatgaagcatcggatagggaattgctttgttgagaacaagcgaaataccaacgtgtccggtgtgcactgaacatactgcactggataggatacccgaagatcttgtagattggtacctagacttaatgtactcacccgatatggtatcaaacatggtaaccagagaggttgaaaactgtgtctgagaggccgagacccacatgacatatctgatgtcactgaacatagcaccatacagggtactcagagaggtcgacaactatagatctcaagcaatatagtcactagacgtgtccggtatgacaccgatgtgagcaccaaataccggtaacaactagtatacgaagactagttgttaggaatgcactgagcgtatccgatgcaaagagtaggtgtgcaccagatatgtctgatgcactcgactagcaggttgagtaaagggcgggaggggtaatgcctagtttccctgcttgggactatggtccatttgaggtctaacaaccgatgattaagcatgcagttaaaaaaaatacacctaggtgcaagggaggatagcgtggaaagtgtttttcataaaacacaatagcttttgattgttg

SEQ ID NO: 59429 - DNA, 509 bp, Zea Mays
cttcgacggaggtaggagtcgccgtttttagggactccataacaacatccaaaacactagccatcctccttttcctcggggttgttgtcgctatagttgatggttttggcaactctgccattatcggagggcccaacggtttggttgttcttctattgttttcctcgtttctagttcttctacctcaccagtactagccttggttgacatgacaggaactgtttccgcagcttcagctgacatggcagggacaacttcagcattctcaaaaaactttacctcctctattgtgggcactgcagccatcccgacaggcctacgggtcagaaccttggccctcttcgacttcagcgcaccagaagaggttaaagtagaaattttcctttttcctttttgagtccgagcaggaaaacagcaatcaggttaaacaaacccaattatatcaaaaactctgttcagtcttcttttccctcgagcgccgaaggcaatagtcatggcctcgtcctttg

SEQ ID NO: 59430 - DNA, 712 bp, Zea Mays
acatgtgatgataaatggagatgcacatatattcaaaggagacaattcctccctttattcttccttacaatatgagtattacaaatcctaccccccttagaaagaatctcgtcctcgagatttaagaagatctagggaaaagatggggaaaatctatgcgaagctcttcttctctttcccacgttgcttcatcctctccatggtgactccattgtaccttgcacatctttatcaccttatttcttgtaactcgagtcagggtgtctagaatctttatagggtactcagcataagtcagatcatcttgaacactaaggtcctccagtggtagctgctcctcaggtaccctgaggcacttctttagctgagacacatgaaatacatcatgtacatctgacagatgatcgggtaacttcagttgatatgcaacttctcccactcgctttaagatcaagaaaggtccaatgaagcgaggggacaactttcctttgactttgaatcttctcataccccggagtggtgacaccttcaaatagacatgatcaccctccttaaactccagtaatcttctcctattatcagcatagctcttttgcctggattgtgcaactctcaaattttctcttatcattcgaacttgttcttctgcctcttgtataagttcaggcccaaagaactgtctttctccagtctgatcccaatacaggggagt

SEQ ID NO: 59431 - DNA, 562 bp, Zea Mays
tgcctttgcggcggtatatccgcggaaagctgacaagcgggcccgacggcgtcgtgaccgtgcatgtagtacccggaagcggaacacacacctcttgctccgcctggacagtggataactggataccgtaccggagacggctatcgcctgagctagcttttggatctgggaggcgcagagaacatgcaaggcacgcgttacatgcgagcagagctaacgctagatagatcagatgtacgtgcgatgctccacccaacagaaacagaccttgctgccacaaatctgttcgtctatccggagttccggactgtggtgtgtggtggtgcccggactgccacactactagtaactggcggcctagcatgaccaccataacgcgtgataatccaaagattttttttaatgggtgtggtgacggtgattgggtcagaaagagggcccgaaaagttgcaggccctctttcccttcgttccagcatggatagtaggcggcgttgccccgcgcccagcggtggtgctggtgggctggggttgtcgaccccagcgccggaggagaggagagg

SEQ ID NO: 59432 - DNA, 773 bp, Zea Mays
gtaaagtgaaaacataacttcagctgatacttcttatatgcatagtaaatgcatttaaggttgatttacctttttttgataattgataataagatacgcaaatatataaataaaagaaggtacgtagatggaaaaggtgtttaggaatatgttactacattgatgggctgtaactgaaagtgggaagagtggatatgctaattgaacgtaccagttctgctcagaattggaaatcataggaactagagatgttttctctcagcaccaacggtcgacctgcagaatcgatcagaaagcatgttaataaacgaccatcaaactatgtaaccaaatctgcaaaggaaaaaaatgcagtatggattggcatcgcaacgcaacgccatttgagaggtgtgtgtagagagggagaggctctcgacgttggcgcttgcgatgttgcagttgcctacaacgtcagcattttgtgcatacaccaatcaaatctatttgatgaacgaaatgctctgttttttcgtttaaaatgaaccaaatctaataaaggtgacaccgtgttatgctataatagaggtaaagagctagctcgagcagctttaacacattcagtcttcatcaccgacaacttcttcagagactctaagccactcctcaagtttcagttcttgttcttatttgaacatattgcacttgcacggctccaccggtccgggctagccagtagcaggctagatgtggttggatgcagttgtaccatctgacaaccaacttgaaaacgg

SEQ ID NO: 59433 - DNA, 356 bp, Zea Mays
ctggaatttgtctaattattaaacaaaaggtgggcaaatgaaatgccgacttgttggcctggccgagaaacaggacaaagaccggagttcaagggtagaaccttaaacggtatgaccttaggtgacttgctctctacttggtacgagattgatctgttgccatgtcttgacgctgcgctcctggtgttgtgttgcccgtagggtcatgcgtatccgtacccctgatatggcacactgtcttgctcattcgtcatatgggtcattgtagcgagtctgctgctgatatcttcgtagtagtgcacggtgggtcccgtgggtcagtcccatggcacggtagcgcgtagcgtagcttcgat

SEQ ID NO: 59434 - DNA, 317 bp, Zea Mays
ggccaatcgtgttgtctttatagtaatcgaaatcgaaatcgaaatgaaagttaacttcaaatctgttattggccgaagttatttgatcaaacaaaaaaggttaggtcaaaacaaaggaagggtgaaataaaatttttgttagacatactctctcgagagaaagattgcaagacctttcgtatgtatcgttgatagctaaatgtctcatacacggtttctatactatctactccctccgtccacgtaaaagtgtcgatttagccctttcaacttgtccacgtaaaaacgacgcttcaccgttctcacagccgtatctt

SEQ ID NO: 59435 - DNA, 561 bp, Zea Mays
atacggcctaatagacactggtcgggctccttcaaacagaggaataaaatgttcacaaaagcggctaggaggcagcgaggtagggaggggtattgaagagatcttcatactgtttgagcagattcagaatcggtgcaggcactgataagtcctcgaataacagcaactgagctgaatcaattgtgggcttggacaggtgtagaacttccaatagtgtgccgacaggtatcttaggctggcacccatgtaacaccactgtctgaccttggtagggaaggggcaaccacttgtgcttccaatgaacaaacatagggctaaatttctccaaccagtccatacctactataaggtcataaaatggaattcgaaggactttgaaagtagaatggattttgaatccttgtaacaaccattcaacgtcaggtagttcagcggtacaatgtaactgtgtgccattggccactttcacacacatgggctgctccatttgaactagtccttaaattgcagatgcatgaatctcattcaagaaggagtgagagctactagagtcgagcaaga

SEQ ID NO: 59436 - DNA, 292 bp, Zea Mays
tgtccaattcttcttcaaatgaatttgactggtctagaggatgttcctatgacttagacaaacatatccagtggcaatctaactaatctaagtcataaatcttggatattttaattttactaactcatatccctgtttttagctcaaactagctccaaaagagtgaattgttgaaattgagctatccaacccttctagatgtgtcaaatatgttccttggggtatttagaacttatccaaagtatagaactattgctagttcatatattccaagttttaaccctacacggct

SEQ ID NO: 59437 - DNA, 706 bp, Zea Mays
tctgattctattgagccattagttcctgcattgttggagctgagggaggtggggggggcaacctgctcgttttgtccacgacgaggtctagctgccatctgaaaatagaaattctgtcgttgttacctcttttcagggttccaagtagttactttatatcatgaaaagaaaaataacaaaaaattatatcgaaccaaatgaggataaccattcattcattgcattgttcatacaagtttttctgggttgcatcatattaggagatccaccctaaagcctagttccaaagttggtaccaaaagctaagcttacgtggttttcccgttctcctaacatgtttaattctaacccatctaaccctgattggtagaggcaacactggccacaggtgtagggggcactccggagtaggccgtgttcggaccggaagctggctctatttcctcgggatcctcctcttcctcacggcctgcctcattagcattcatttcttggtgatgcatttcttggtgagtgttggcctccgcaagctcctcttgcacatcatggagctggttttctaggacctcaatggtgttgtctaggatttccacctgctgctccaatgcttggatgtggttgctcatctgttccacctgtagatccttctccaccaattgcgaagacaggtcgaccatgaagtcctccctatcgtcgagggtgacct

SEQ ID NO: 59438 - DNA, 1000 bp, Zea Mays
ctttgtaattttgagctccttccctgggccggctcgaattgtcatgtcattatggtcaagcttttccatcagccaagctaaatgagatctactgccgagtgcgtcaactctcatatcaagaatactggagaacccccttcgtgcaatagctaggcgctgtctgtcatttaatatctggatgcttactaatacgtcttggggattgcatctcacattaagcctctgctgaaaaaatgtatacaatgaatagcgtaaacatttacatctgcataatcgcaactcaatgtttaaatcaaacctcaacacaacataatttcacgcataaaaataaaatattgccattgaccataaattctaacctgtcgtggggggtccactactttcctccgctttgtaactatcttcttcaagacttttcgagaactgtcatcagagttacgcttcttcgataatggcataaagtcattgtcctcatcagcagcctgccttgtattgtgtctaacagatgtcctcgagagtaagtcatcccacatctgtagcaaaacccttgggcttttcgataagcagacagagctgccatcttgttgtctgtagaagacgtcgttgaagcttgcttgacttctttagaagatgaggcctggactcccactgatggaggtggggcctgatgctgaaaaccagaatatggcttcttataatcccgcttctttccaagatcccccgcttcttcctgcaattgagcaagcacaacagcagtatcaaaatcggatgggcgttgtagcattaccacagctttgatatcgtctttcagaccctcaacaaatttcaaagtataatacaatgggtctggcatggtatggtatgcattaagttgatcgattaactgagcaaactcctccacataagatgacacggtgcccatctgttggatatgaaatagtcgtctgagcaatgattggtgttgatttttggcaaagctatcctgaatcaggtggcaaaa

SEQ ID NO: 59439 - DNA, 577 bp, Zea Mays
cgagactcccacttagcctcgagcgattggaacctcttgtccagttcggcgaggagcgaacgggtttgattctccagtgctagggtgagatttgtctcaacaggaggagtgtgcgacatgtttgtggcaagggatcgaccctctgataccaatttgttagctatctaggaaggaaggaagaattctgggaaggatacggaagggagggagttcaggagaaggagaagaaggtagacgaggaaggcatttccatagagtttcagatagtgttccttacaagcataatcctgaagacagacatcatctcctacatatacttcacacacaccagggacccatcagccagactaacagatagataaacccaccacacagagacctgcatcaagcccactccggaccactcgtacggacattaggacgacgcttgcgagctcctcggtgagtggtttcctttgtgtgcaccggcaacggaggtgtaacaaagagtatgtcatcgtggacgccaatgagagtgcaccacaatgaaagggtcaaccaacagaagaagtccattgatggagatttggcataaaat

SEQ ID NO: 59440 - DNA, 509 bp, Zea Mays
ctcacaactggcataattaaagttcatacgcagactgaggcgagatgctggaaggtaaaatcaaggaatatatacttgaatatccaaaccggaaaatgaagtaccaatagcactggaaagttaacaggtgaagacaatgaaaaagtgagcatgaatatgtacacagtgtgacccaacagactatagtcagtttcaaaaaagaccttttaagtggaatttatatcacattctagaggtaccaagaagactatagttaaatctgaaaaagaccttttaagcaaaatataatcatgtggaaggttactgaaggtggataatgttgaagggatcatgaaagaaaaaaagaaaaatacactaaaagcaaggtatataatatttatcacatcgtgaaaactgtgtaccttacttctacacgtggtagcagaagaagttatcaatgaggctgcgctcgccgccgatttccctgaccttcagaatctccttgacccggatcacgatgtggaaggaac

SEQ ID NO: 59441 - DNA, 427 bp, Zea Mays
ctaaaatggcttaatgttacctaagtgcttgaatgacttaatgttgcatggacaccaaaatgacttaatatttcctgaaataattgaaccaataacaaaggaatatctaagaaacatgaagaatgactgaaagacaaaaagagtgacttactatttcctgaaatgacttaatgtttactagaattaattaatgttgcctgaatgcttgaatgacttaatattgtctagacgctagagtaacttaatgttgcttggaatgattgaaccaataacaaaaggaatgtctaagaaaaaacacgaagaatgactaaaaacaaggatgacataatgttgtatgggtgttggaatgtctgaatgagaaggggaaaatgacttaacggacgcgcgggcccatgcatggagccaatgtgtgtcgtggagggagctg

SEQ ID NO: 59442 - DNA, 534 bp, Zea Mays
tgaatcacactgaactgaaatcaactgaaaatgaaattaattgacatgtgacctagagctcatggagatgctcttggatcatttgcagcttggttcaaagttcaattgtaaccatggcagaagcatgcttcaagaagaatttagactcaaaacactatggaataactcacttttaattagaactactatctagaaacgaagtgaacaaaaaaatcaacaacccagactaacatgaagacaaattgatacatgatcttatcggcaaactacttgtcgtccacctgcagaaaccttgaactaaaatgaaacatccatccaggattcagaagcatatggttcacactaattgaacaagagcatgtacaccatttctggacagatgaacaacaagcatattgaatcacactcaactaaaataaaaggtagagcttgcagtggttctagcaccagatgaattggatctgagggtaaaaattctaggaagattgaagcatgtaccttgataaaacagtgctaacagagatgtgccgtgca

SEQ ID NO: 59443 - DNA, 498 bp, Zea Mays
ctgcagttaggcttgttagaattagttcctatttttatggatcgcaagcatgcaatatctatttttatgtagatcccaaaattatggcaggtcgtgagagtttccattatatgcacacaaattttggctaacattttcgttcacactgcatccacgcaaaaaatggatgacatgtatcacacaaagcataaaaatctggcttgcaatacactgctggcacatctccagaccctagcataaaatccttcagatttttagcgtaaaaacccacaattatgagcataaaataccgagccaaacccccacgtccatgagtccaccataaatcaagggacttgattagaggacttgattaagagatttaataagctgggttgattagggaatttaaatttttatggtagtaacggacgccataaatcaagggactgtatgcgcaagatattatggaatcataacaaatgtccttatttttttggagtggttaccttttttgtg

SEQ ID NO: 59444 - DNA, 788 bp, Zea Mays
ttctgtgagttccagagcatgtcagactattcctacaacgagcatcgagaccatatggcacaactatttaagttagagttccttttataggatcgtcggaccttatgaacgatggccatgtcaggccaacaagttggatctgacaacctccatttagtgacaagagagggttttgcgggtgtcggattggcctgatggtgttcagaccatacactcatgataataattgaaacaactagctagtcctgacacagtggtaccacaattgtcgtagtgtcttatcggatcggcaatatggtatgatgtgtgagcgtcggccgtcggatggtttggtccagagttctataacaactagttagccagttagggtctataagtatcacaccggccagataaattaagtcatttccattaatctaaagtgcaccacttagagctcctttggtgacaagaaaattgaggggttgaaggagaaataaactaatcgttttcgttttcgtagcttttgtttacggtttcggttcacatcgttttcgttttacgtggcccatgaacacctgaccagtcgtacgatagctccgtggcgtgcgaggggaaagaaccaacgaaaccgtgtccaaacaaagtcgccagcaacgcgtctttcttttgtccaactgcaactcagccagcaggtcgacgtcgatttgaaatgcccgatcgagaggatgatcgccgtcatgtacgtacacgccaaaaactaagtagtgtggcagctggcggcccccggtctcggtctcgctctctct

SEQ ID NO: 59445 - DNA, 577 bp, Zea Mays
gggccactcgccgttcaggtgttccggcgacttggcaagtgtacgtcacagtgaccggcgcaaaggcaaagctcgctctgaccttgctccatgtatctgcagggacgagctagcgtgtgcagtcgtcgtacgtcgccaccctgtgttaatttgtacatttgccgtggatgatcaatgccaaatgggtggtactactaataagctagtaaagcgtatctcgcgagctgtgagcatccatgcatctccaacagggcctgcgtatgatacgtactacatctactagctgtgttgatcatggtctctcatctatctatatgatatggctaagctgcagtagaagcagtagctagcatctatatatcgatgtatctcttgcattgcatagagtgtatactcgcaggccacccttgggcttgggcgcagtatataagctagcagccggcacctgaagcatctcaagtccacgcaccaccgaacagacagagaccgcggagcagagtggccgcccatcgccatgccgaagctgcagaggttcagaggagtgaggcagaggcactggggctcctgggtctccgag

SEQ ID NO: 59446 - DNA, 1380 bp, Zea Mays
atggaaaattaggaatctagcaaaattggtttgacatttttatcatttttctacaattttctacaaatttccaaagtttcacagaaaaagaaaagagaaaagcgtgaacagtgtttggctcatttcagccgaagcggcccaaacccaggtggaaaatgcgcgcgcccacgcccacgctgcaagctttgcaagaaaggccctggcggtttaactattccactaagagtcctaactaatattccctgtgtcgctgaccttttacacttaagccctccgcctttcttttctttacacgccgagatcctcgacagtgaaccgcacagggagccaagctccggcgagctagactggccagagggagcaaagactggtgctttcgagtggcagacaccaaatcggaccgcgcccgtgcatttcccccaacataatttcaccaaaggctacttggtttgctatggccgcagtgaccgtggaccatgcggatagatgcacgcgttcctggcgattggtggcagtctagttcaatcgggtgggtcgacgagcatcacgggttcatgagagtactcaaacgagagagcatagaggatgagctgacctgtatcacgctagccacggcgaggtcgttttcatggtggcggaaacccggtttgggggaaatccgaaattggagctccctggtgaacgattgagggtgattcttggtggctgggtacttgactaccctacggagttcacagtggtttcaatttatactgatcgatcgcgagcacagcgaattcgagcggtggattgtgatcggtacgaactgggtgagtcactggtggccgcgcaacgtggcttttaccgtggcggcacctccggcggtcatcggacatgcgtagcatggttagccgcgacgtggtaaagcgtttggacacacggaggatgatagtgatggctcaacagtggtgagaatctattcgagtgattgatgagcaagggggggggggggtacggcggctagccggaatagtttactggccgggcttatccacgacggcgtgactccgagcatcatttgatcaacccgagcatgaatcgagacgacaacggcatgaatcgcggcggagatcgttggtggcgagctgagctggtgacctgatctatttcagagcactgtaccatggcgaagcccattcagtgcacttgacagtcaaagtttagggccaaatttctctcaaatttctatggcaactcgtccaaagttctgtagcaaagttgtagaccaataatttagctacaatattgccataacaactatagccaaattcctactaaatcatgtttgaatttgtgcccaaagttcctgcagttgcactgtcagtctgaaattcagacttc

SEQ ID NO: 59447 - DNA, 388 bp, Zea Mays
gctgaatttgtggtcttcatgggaataaaatgcgcagacttagtcaagcgatccactaccacccatatagcatccctgccacgaggggaacgaggtagacccaccacaaaatccatggtgatatgctcccatttccactctggaatttctaatggcttcagcaaacctgcaggccgcttatgctcggccttcacgcgctgacatacttcacaggcagccacatacttagaaacgtcaaccttcatccgcttccaccagaaattttgcttcaaatctcagtacattttggtttcgccaggatggacggtgtatggcgttttatgagcttctctcaagatatccattttcacttctgatttctaaggcacacagagacggcccctgaaac

SEQ ID NO: 59448 - DNA, 534 bp, Zea Mays
cgccgcaatttctcgccggcgccagatctccatctcagaccggcataccaccgtggcgggtgtctacgcagcataaaatccggtgagatctcgcccatagtattcgttcttatctcagcatcatttagcacctatcaatttttgatttgcgcgctgtagcgtcggggtaagctgctccggcatgggcgccactggacctggtgctcgtcatcgtttgtggaaggcaggggtagaagaagaggtgtgagccgagagccgtttgacccctatgacccctatagtatgtaccgcttcgtggaagggttgcggtggccgttgatccgaccgtggatgcctcagattggatcacagtcgttcaaaatccaaaccattgatcccagatctaacggctctgatcgcatcacgatccgatccgaggtggtcctgatcatggccgtggacttctaatctgacggccatggatgcttcgtacccttcgaccgtgcaatatttacataagagaccctcgggttattgcaaatcaacccgtcgtcc

SEQ ID NO: 59449 - DNA, 1174 bp, Zea Mays
gacaacagaatttttttggcccactcaaaagagtccggcctcataagcaggcccataaagaaagctgcccaaagttttggaacggggatgaggtctacattgggggggcagagctcagcccaggaggagaaacgttttctggccatgaaatcttcgtaggcagggtcctgagagggctgatccagatgagtcatgcagcccacaatgatgttttcatcagcattcagattcaaattttcctcaccctgatcgttatttccctccaaaaacggatccgctggtgggagggctggtagagcaagcacaacaacttcttgatcttggacttcttcctgagggaagtggactgcttgcgggataacgatatcgttgaaaagccccacagattcatctgaaggcaagtcctcaagaccgaaaagctgatagctaaattgttcctcctcattgttggcaattggtactggtgcaggtggttgctcttgctggacctgttcaaccggccatgggtcccaaccatcatcagcaatgttgtcatttacagcatcttcttcaatttcaccaatgggagggatgttgagttcaaattggaagttgggcacaggctgccccaaaccaaaaaattccaccggaagttgatgaccattatgaggatatggaggcacaggctcttcgtcctgaggcaaggcaccaagcatgaactgttgaactatgtcgcactgaatagtccaggaaaccccatgaaaaccttcagccactgaaaaaacaataaactaggggacttcctgtagagatgtcacccttgctctaaccagcaatctagtagcattagaaatatcaggatcccacatgagcacccgaccaaatgacccaatagcattctgaatgtgctcgtttgtccagaaatctaggggaaacccaaggagcatcagccaacattcatgattaaaatataacgcttgttggttccaagccgcattgtgtctaatcacagtgaaagtaaagcccaaagcttgctgcggacccatagccacgaggttgtccctatcaaaaataaactggaacctcaccaaagcctgacccaagtgggagcgctgaacactcctaatccggacatgtctaacctccaatagatactcccggacaatgtcatcgaaaaagtggaaattgacctcat

SEQ ID NO: 59450 - DNA, 1226 bp, Zea Mays
gtaatgttctgttgtaacaggcgaaatatgtatacttgccagtaccactcttaacatatattcactgccctttttccagatgcttttggttcaacatccatgcatgtatctcatgacactgtacaaagctcaccccacacaaacttaggttcttctgtacaaaatccacactagatctttctttttccccccttctgtttatactagcaccaggagtagctcattgtttgtaaactagaaataggagtgtaggcagtgatcagtagtaggtcagaagcaatagaaaaggattagtgctaccacaggcaggttctaaccaggtaaaggtgagtatatagccatgtgcccatgatctttgaattcttgactagagcaaagtgtttgtgcgtgacgtcctgccacaagtatctcgagatcaattaaatcttggtcaaaatgtgagcttcagtgtttcgctccatgatttgtcaagggaaaaatggtcacctgttgcttttgcattctcattttctgcacctcctataatcgatgttatggttttgatgacactaatttctgttgtagaaaaatagaaagcagttcctacaggagttgagagaaattcacgatgcttgtcagggaccttgggatgttcttgggaattttaaccttatatacaaagatgaagacaagaatgatgggcagatttcgaaagtttattaatgatttagccttgagggacattcctttacagggtcggagtttcacttggtcaaatctgcaagctgatccggtgttggtaaggcttgacagttgagtgggagcagctgtttccaaactgccttctgcagagtgcagcctcggaggactctgaccactgtcttctgttgctcgggctggatgatattaagcctggaaaacctcgatttcacttcgaatccttttggccaaaaatcgaaggcttcatgcatactgttgaggaagcttggaactcggttctaggatcctcctgcccttttgatgttttgtccaggaaactcaaatccactgcaagaaagcttcagaattggagccacagagtttcttcatctactggaaattgctcaagactctcggactttgtccaacgaggaagcatggctgcacaataatatcaagaaacattgccttgccctctcctctcaagcgtattgcgaggagccgctctaggatcagctggctgggtgagggcgatgccaacacagctc

SEQ ID NO: 59451 - DNA, 363 bp, Zea Mays
ctataaccgcagtagttcttggtattatggggttgaaaattttgttttgcgctagtgtagcatccccgtaatcctacagtggtatcggagccaaagttttaggtctggatctaggttcatgagatggatctacttgatgcacggtttgattagatcaattggtaataaagggttgaagtagattacatcggatatgactggagagatcagttcgtccttctctattgtatgcgcgacttgcccctaccggctggaatcaccgtcggggctaactgcgtacacaaccagcagattgacgtaacagatcaacgtcatgagtgtaatcttcttcgggtcgacatgtgatgatccaaagcgtatatg

SEQ ID NO: 59452 - DNA, 515 bp, Zea Mays
ctagcagcaatgatgacttcaaaagctttgagagcactacttcatacaccactgctgctagtcgttcatcgactattatactggtggcaatgcatggaacagcaccatgggtgattatgctggcagcttgtcagatgcgagaagtgagccatcattgtctgcatcagattctacagattcacgaggttttaggcgcaagacgacgagtggtgaaggaaacagaccaaatgttcatcatcaaagcttcagtttattagcagtcggtcctggctgtagctaagaagccttgctctgcagcggttattctagcaatggtggtgattttcaggatgttgtctccaggaaagcagcacagaagatgaaaaggatgcaacgatcaactcctgctacgactagttcatctaccatggctgcttcaggacctattgtagcacgtgcacacttcccaagagctccattccgtgaggtcattacaataggacattacataaatgatgatacattttatgctagaa

SEQ ID NO: 59453 - DNA, 519 bp, Zea Mays
aagaccatgaaagcttcgaacttggctcacatttaacggtgtaggccaatcctttattgctttaaccttctcttcatcaacctgaataccatctgcgaaaataacaaagccaaggaaaacaacacggtctgtgcaaaaggtgcacttagcaatgttgccatacaatttctcttccctcaaaacagcaagtacttgatggatatgatcaagatgttcatcaaatgatttgctatagatcagaatatcatcaaaataaacaacgacaaacttgccaatgaaagctcgtaaaacatgattcattaagcgcataaaagttgaaggagcatttgtcaagccaaatggcatcacaagccattcatagagaccaaatttaattttaaacgctgttttccattcatcaccaagtttcatgtggatttgatgatagccactacgcaaatctatcttggtgaaaatgatagaaccactcaattcatctaacatgtcatcaagtcgtggaatgggatggcgatatcgaac

SEQ ID NO: 59454 - DNA, 838 bp, Zea Mays
ctaagaatcaagccctgtaaagaagaagaaagaattgagtatgacaataaaatacttcttttctaacttcaaagtcaacttttataccttttatgctattatacgcgaggctatcaacaagttcatcttttgacagaaccgaaaggccttcttcaagcttaggaaatctcatactcttagctatctcccggcacacggatatttctttgttatccgagagacagtacaagaaatcatcttaattggtaccattgaacactgaggcccccttcggatattttaatctttgggcgtagtgtctggcttctagtatttcttcctgggataatttcttcctcggagcatgtcaaataatgtagtcaacatcttcgttcgaagctttgggggcaggagcttcagtcttttctggtacaatctgccttgctgttttgtcctcatgtgctgtaggcttcgtctcggtgggcactgaaggcccagcttcggctttggcctgaactttcgtagcttcggtaattttcttaggagcagggctcaaggccttcgtagtctctataacagcgtctaatacgctggccatcctcctcctcttgggagttgcggcaggatttttttgcatttttggcaaatctgcctctatcggtgggctaaggatttctggcgtttttatcaccttttccacctgtggctcttcagccttatcatctctagcttcggctggcccaactgtatgcaccttcggcactacaatcggctcttcagtactctacacaatcggagcagctctctttgcttcggcaactgaagaggtccccgcgccaaatttaggcaccacggctgg

SEQ ID NO: 59455 - DNA, 373 bp, Zea Mays
ataatattgttgcaggaattgcattaatataaaacataccaagtgcgatgttagctccttcaacagtagcatcagcgtgacctgattatccctggcaatagagaataccttgccagatcccggactctgctgcttgttctgcccaagtgtagtagcactcctctatgggcaaacattagcataatgacttatcttaccacacttatagcatgtggtaccagcactctgccctgagaatttcgccggggtgccagtgggggccgcatgacgagtcggtggagtcccctgaggtgtgtgctgagctggacgctggcatcctccagtgcgatctggtgtaccctggggtggaacgtagcgaggacaacgctgctgc

SEQ ID NO: 59456 - DNA, 783 bp, Zea Mays
atttggagtgcgaaagtcagagaattgaccatcaaatgtggagtgcatgtgatcaaaccggtcatcaacttgagacatcatgccttgaaactgaccatcaatatgagtctggagctcttgatgcatttgttgaaaatatggatcaaaatagccaggtgcaggttgctagtactgtccttgttgttgtggaggtggaggtggtggcatttgttgagcgggatgcactttaggctcatcatcaaaagtatctccctgagctccctcattatctgaaaacagtgtgagaggcctggtaagaaaaccaatttcattttttcaatggcctgaacagagtgtgagcagttttacactgcccttcgaatctggttttggctttaatcagagccataacatatggagcatatgtcagattctggttcttgtccatcttcagatcatttaattgacgcatcataaagagaacaacatccatgacctccaccttcatgacatgatcaataatattctagaatttgtccctgatcctgcttttgtccccactctttggaagaatggtgactcgagcaatcttgttgatgactgtacgatgatggcgcaggcctggagtctcgccgaaccgcctaggtatacccaacctggcaggttcgtaatactgagcaaaatcttcaaagtgatcctcagtataaagatctacaacctgagagataattgcatgatccagactatttgccgccgcaaattcagcaaatgttgccacatatcgcttaaaaccagtcgtccaga

SEQ ID NO: 59457 - DNA, 598 bp, Zea Mays
cagaaccagcaaaggagcaactcccagaccaaccagaggtctggtgggagttcacagaatcgtcaaggtggcgccaataacacgcaggccagaagcaacaaacgcacctgtccaacccaatggctgcttcaagtgcggtgagctaggccactatgccaacaactgcccaaggcgcaaccagcagacaccccagaaaagcaataaccaaagaaatgaccagaacacccccgctcgtggatctgcacaaaacaagactccacagaaccagagtagaggaagggtcaatcacgtcactgcagaatcagtgcctgaggatgccgacatagtgtatggtatgttccttgttaactccatacctgcatcagttttatttgactctggagcatcacattcgtttataactgagtcatttgtggaaaaacacaacatacctaagtaccctcttaagaaggtattacacattagttcaccatgaggtaacatgaaggccacacactcatgcccccatgttaatatcaagattcaaggaatagatttttcagtcgacccagtggtcctaggatccaacggtattgatgtgattcttggatgcgattgg

SEQ ID NO: 59458 - DNA, 574 bp, Zea Mays
ttctgggacggtgcacttgccaactggttaggggcttgcggggagaacggccgagggcggggtggtcttataggcacgggcgcaggtggaaacatgcgatggtcgatcgcaggcacgagggcattggttggacgcgcactaacgtggcaatggcccgtgtagtcatattcagacgcctatggccccaaatcttgttgaattcgggcaagatcagtttgtaggatcccctcccttgacttccctctatctgttcgatgtggagatcgtagcatttcttggcatgggtgaggagttgtcttgtcccaaaggttgatctgtctcaagggcccaaactgagaggaaactagcgttttggcttgtcaaaaagtttggtcccaatgccatcttctgacatgttatgagtggggtagtttaacacaactttgtgaattggagtccactgttttgaggcttataagataatgaaccttggaggtttagttagaggggttgatttttcagcaattagaaaattctgatttttatttacttctcccacttgggtgacttattttgtgggttgattttcagcaat

SEQ ID NO: 59459 - DNA, 704 bp, Zea Mays
ctaggtttcacttcagatgtaataggagctaggattgaggaataaagacatactagagcgatgctattattagtatgatgatgtaatggttcgaatgcttgaatgaatgaatgagttggatctttgtttgagtgctttgttcttgtaagattatgatcacaagagcgattatgttattgaagtcatagttgtgtggtgttcaaaactattttctcttataccttaacaagtgcttctcgtataaaacctcatcttctaaatgtcgagatggtgaataccaggggccagaaccagagtccgaatataggatagaactcaagacaatggtagccaccaccacccccacacccaacaatggatcggttcatcgtagctcaaatgcagctactgcagaacctcacttcgtcagtccaatagcttcagcagcagtaaatcaataacaaccacaacagtatgcaccctaggttagggacaagcatagagagttcatgagccaccatccacccaccttctctcattccaccaatcctttggatgctgactactgggtcaaggtcattagcaagaagttgtataactctcagtgcaatggtcatgagtaagtcatgtatgcatctgggaggcttgaagaagttgcctcaaactggtgggatgcatacacagcagctcacgcagatgccaacaacatcacttggcaagaattc

SEQ ID NO: 59460 - DNA, 638 bp, Zea Mays
cgagggtgttcttgcggtgggttagagcagatttgggcgaaattcgaaattcaagctctcggttgcaagattggaggcaatgctgggaggtgtggtgcgtgatgatcttgcggagcttacggagggctcaatttatactaagcgagagcggtggccgggaattggagcgatgacgcgcggcggtcggaggagggaaagttcactggcgcgtgtgattggtggcaaaccccatggcaaggccttaggtaatagaaggatggtttgttgcgatcgactgagacgtggtaagatggttgacggcgtggcataactgcgaagaacggcggcacgccggtgatggacatgcgaccacgtcaccggtaagtggatgagcgacagagtggctactgtgctccaagatcatccacggtgagatcttttctccaaaggattgttatctgtgtttagctgggcgagaatcatggcgccggcgtgaatccgagtgcacgatcgccaacggcgaggggctgagctggcgaactgatcccttcactgtaccatcgaattcttcttaagtgcgcctcacagccaaggtttagggtcaaatctctctcaattttctatggcaaccagttgatcgaccagtaataaagttgttg

SEQ ID NO: 59461 - DNA, 434 bp, Zea Mays
ccgatgcctgagagttccctgcctttctggtgggtttcatcataatggatggtcggctcaaagaagctagtcacaaagacccttggtggaatcgtcgttcgtcccgacgccaccttcacgagggcatccgttgctttgttatcccatcgagggacatgatttagctcaaggccatcaaatttgtcttcaaattgtcgtacctatcgatagtatgctaccatcctggtgtcacggcattccgaatccttcatcaactgccatacgacaagctaggagtcccgggcttcgaggcatcagatgcccaactctacagcgaagcgtatgtcattcacgagggcctcattttctgccacattattggaggcctggaagcagattcaaatgacgtacatcaatcattccccatgggtgacgtgaagacgcggccaccgcca

SEQ ID NO: 59462 - DNA, 679 bp, Zea Mays
gtttttggtcactgaggcaagcaaaggtataatttgatttttaaggcatatgaatttgaatatccagattacttaaaccttgcaaaagatgttgaaacgagggtaataaagagaatttttgcggtgaccatgagtgagaaagaggaaaagcatggcctaaagaagcaaaagcgcatcaatgccccacacttaataagatagatccttcgaagatgactgatgctagaaaatagaaggttacaaagcaggccacaaataagttgttcacatgcgaagtgactctagggactacatagatgcttgagacaatgacaacatgattgcccatggaccttcttagtcatctaggagctaattgtgatactcgatttttttatgaaaagaagttaaatttatttttcatctttttcgcactctgtgtctctggagtttggaattctaggaggcgaatacctcagttgaatggtagctttttggcatttattcgctggggccaggagctcagaggggagcatgggctgtgaaccgtcgattccacatctagtggatgggaggccccctcatttccccctaaccctagccgcccctcccactacccttgcagccgcccctcccattttcttttgggcagccgaccacaccttcctctccctctccctctctcatccttgcagctgcc

SEQ ID NO: 59463 - DNA, 665 bp, Zea Mays
caaatatgtatctaggtgtcctaggactgtatgtattagtgtaaaagatcaatataaagaaagatgttgtgccttgattatgtctcttacctcgcggtgcaacatcacgacgcctctcgcccacgtgcgttcaggcctcgtcctgcgataagccattcatataatttcaggagaaaatgaagccttaacaatctggtatcggacatgccagggttcaacgaagacgacaatgtggcatgtgctgcccaagcaccgtcgttggagtcaatcgccacgattcttgctgaagtacaacgccaacttgggggcttcactgagtatatgatgtccatcttttcccatgtcgccgcggtggagaacgcacaaggaacctctaccgccacaactcctcctggatttccgtatgacatgccaggttacggtggccttcccccgagcactagagggaccgacggaccgtagcctctttcaactgccaccgactgaatcaccgcatccgcggatgcagccaccgcacataccctcgccgccatgacaattccactccacctgctaccctttccgcactcggcgtcacccctaccaccattgccgccattgccacatccaacacccagtacccactactcgaccccttacggtcggcgttacccgcttccaccggc

SEQ ID NO: 59464 - DNA, 788 bp, Zea Mays
aaatttaatcctacgaatcttctccaatctcatacagccggataaggtccaagggggcctaaacctgtgacaaccctcaacttatcatacaacttataactacctgagcccacttaactcatgtcgaggtaaggacatatacaagtacaacccttaatcactagatcgggtttcaagtgcaagagacaactaagaaattgcatgatacttctttaaaatcaatcatatcgtaaacgtagttaatagaacgcctttaaagttagattgcacaaacgacactagatggccaatatgcaaacaactttgcccctcataatagtattgtcacatatccaaaacctgatcacagactccacaccacaacctttaaccaatgaaacaaaaatgccctgcaaatatacatttgtcttgcacattttattttatttcatccaccaatgatgctatacaagcatcaacctccaacttcatcgaatgatgaacaatgaccatcgataggtgtagccaaccatgatacctttgaacattgctcataatataaagctccttcgtcattctccatgaatgatatgatccactttatgtcaccatgtggccttattggttcttgatcgcaactttgcttgctcttcaccatttcacttggtccatcgatgccaagtccttactctagcttcactgtcacatggtccgttgccctcgggcctctaacttttccttcacactagcaaccaagtccttcatagccaagtcatgcctattgagcttctccaccttatgccacctcg

SEQ ID NO: 59465 - DNA, 706 bp, Zea Mays
tagacctccacttacgaaggtgattgtacacttgctggcctgttacttcttggccacagaactccgaggcatttttagcaatagagttaaggtggatttccttaaaacccttgtcagtcttaaccctagtacctatcaagccaacaaaacggcgtagaacaaacccagacattgtggcactccacctaagagtagacctaaccccctggctagcaacctcagagaccatgtcagccatagctggaacaagtaaaagattagggggaagacagatagatactctcagcataggaaagagaagtagaagtagtagtaatgtcagcataggaaagtagaagtagaagtagcagtaatcatcattgctagtcgacaatggtatcacgatgtaagtaatgtcatcattagcaactgggtacatcacacaaagaaagtgagttcaaaactgtagatagttcatcattgctaatagacaatgttctcagcatggaaccagttcttacaaatctatgagcaacttagcacatcacataaaggaactcaaataagaaagtgagttcataaactatatatagttcatcattgctaatagacaatgttctcagcatggaactagatcttacagttctatgagcaacttagcacaatacataatgaccactaccccctatgtgaggcactattttaccacatctgttgagcccaattg

SEQ ID NO: 59466 - DNA, 550 bp, Zea Mays
tagttttctaaaccaatgttagatcaggattgttatgaaaaatgtttgataaggttgttaatttgctatgtttgaggttatatattaggttgtttggataacacgagcaaaaacgagtacatcgtctctaaacaacaatgcgttttaattcgatatatcgaaacaatttgaaactaagtaaccttaccaatcatctaatcgagttgacattaaaatccacctacttgatgtgtgttggcgttgatctggacgtcaatcactgtgaggagtatcggtgatggtgctctctacagcggcacggatggtccgtggcttaagattggtcagtctgtgacatgtggtaggagcgaagtcttctctgcgttgagtcggacggtccacgtgtgtggaggcggtgacgtttgccagtagcactgcatctgacctcttgggagggttcccgtcagggacgagagatcacagggtttgtcttggaatcaacaggccacctaagacgcctccagataacgtagagtcgaatagaggtgaagattgaggtgaagaagactac

SEQ ID NO: 59467 - DNA, 700 bp, Zea Mays
gtagacccaaggcaggggggctatgtcatggcttgacgagggaagatcagcaggaacaatttgaagggtgttgtcaggggtgatctcagccccgccagcagataacagacctctcgcatctagcttgccgacctccaaggcgacttgtttgttcagatctgtggaagtatacactactgtcgccccatcggaccgaggtggagacgaccctacatggacgtccatggaggtgtgggaaggagagctcacctgaacatcctcgggggctgggttgcagcttgcgctacccaccagagccagatcactaccggaaccacccttggggggctgggtaactaccagcaccaccctcgggggctgggttttctgtagcagccacctctaaggctgagggctcccctgtcacctccatgggagtcgggcaactcggaccaacgtcttggcattgaagactgccctccaaagtcgacgatgcacgagacattgctcgggatacctccaatccaacgtctggaatttctgaacaaacagccatcacatcatcagcagttggctctgacagcatatccttagggacgacctcctcgagggcctggtcaaaattcgatattgacagtccttggagactgacaagagccgacagagctggagaaggaatatcacttcccccctcactaactctgtaatgtcggctgttctt

SEQ ID NO: 59468 - DNA, 394 bp, Zea Mays
ctacatgaaatcgagaaaaaactagagctcaagttgcggttttaggcgatgaacgatgctctttttcagcttcatctctgtttgcttcgccagccaccgacgatgtcaccaccgtccaccagtcgtgctcgtgcgcgaagcacacaactgcttgccttggacatgtccatgatgtaggtgataagctctagagccactcgcgccacatgaagatcgccagcgatgccacaattttcttctcggcgtttccagcaccgtcactatctccaccctgatacggccaaattggacgagctagatgcatttctcttcaaattgaacaatctacatgctttgcttttcctttgcgtcccttttccacccactctcatcgcatgccatcacccatagccac

SEQ ID NO: 59469 - DNA, 936 bp, Zea Mays
gaaattagcttcatcttcctttactttgttcaccaatgaaattaagattttgtcttttgccagaccttcgtttctcaattcaatcacctctgaacgaaggttattaagagccattgtatagcctccgtcttcaatattcttctgcgccctgtgggcattactaagaattaagccctgcaacaaggaggaaagaattgagcatgacaaataaaatacttcattctcaaattcaaagttaacttctatacctttatactgttgtatgctaggctgtcagcaagatcatccttcgacaaaatcgaaaggccatcttccagcttcgagaatcccatgctcttacctatctcctggcaaacagatatttctttgttgtccgggagacagtataagaagtcgtcatcgttagtgtcattaaacactaaagctcccttcagatatttcaactttcgtgcatagtgtctggcttccagaatttcttcttcagacaatttcttcctcgaagcgtgtcgaatgatgtagtcaacactttcgatcggagcttcgggagcaggagtctcgatcttttcagctgcaatctgccctaccgttttttcctcaagcgcgacaggcttcgccgcgacgggcgctgaaggcccagtttcggcttcagcctgagctttcgtagcttcggctgctgcttgcccagtttcggcttcggcttgcgctttggcagctttagcaattttctttgtaggagcagggctcaaggcctttgtagtctccagcacagcatccaagcacgttggccatcctcctcctcttgggagtcgcgacagaagccttttgcaccttaggcagttttgcctctgttggagggctcagaatttctggcattttcattatttcttcaatctttggctcttcagccttatcaaccttagcttcgactggctcgac

SEQ ID NO: 59470 - DNA, 390 bp, Zea Mays
agtactactagaagtcatggtgtatgcatatggtgaatgaaatgctcatgatatgaggtcttaagagagttaaaagggggggttagagtttagggtttctaaccttgggatcaaaaattgggatgttacagttcatcctcctctgttccatgttttagcatccttgaatgttaacgttgcttgtcggcccaaccgattgagcgctaccgcgatagggcatcgagaacatcatctcgccgccgcggaacacctctgagcgcgcactcatgtcgacccactcttccactcccattctgtccaaattcacgcgtgtacccaacctttgatgaactagtgaaactcccctagcttgaatttaaatgctaccgcgtttggttgctcagaacacac

SEQ ID NO: 59471 - DNA, 776 bp, Zea Mays
agctgaacgagctaggcgacaagacagagaagtcattgcggaccgaccttcatcagttctcggccttgcgtcagaagctagcggtaagccgtgtactggtgattggtgagggaagggctctcctactaaagattcaccttctcacctttcggacgtgatggatgtcgcacacatgtgatttgggatgcctccttcgtctaggtctgagtcgctgacctcccacctcaagagtcacatgggttgagtctaggagcttgaaactgaatccttatgttaggggatctgccaagcctctgtcgttgctacgtctcacttcgaaggcaaaatcaaactagcggctctgagcgaaggttattgtgatgcccagagtgatgcggagcttgccgaaatggtgaaagctgcggagccttttgctcaaaaactgggagtcaccatgctcgattgcgctcccctttggatgggttaaagaggatctgtgttcttgtaatggtcaagggatagagcctttttcaatatttcttcaactctatgagcatctgtgttggttggtgctggaccaggcctaagttggggttcgcaccctttttctcgtgttccacaccaaggacagttttgaaaacatgttttagtcgctaccttcagggggttacaaacagggtgtggtcgcgcttctgtctgcaaactactgtgggctctcgtcagaggcgtcatgcccaatggtccgtctagctcctgcgacatgtggtgctccatttcgctagtgccgctagtggcgc

SEQ ID NO: 59472 - DNA, 504 bp, Zea Mays
ctcgggttaattaccaatctggactgggcctcaattccagagaaatccaggggtctcggggtaataattctaagacacagggaacaacctgcctggactgcgggttgatgaatgggtttcaagggtttcttttgcaattttagctcgacaaaggggtacgggctaacgtgagccaccagatcaaatacgaacggccaagattatattgcggaagcaatggactagaacgcaatccatgtcgtcggatctagaacctatggctaagatcttatgaagccttgatctcatccaggtcgaacgattatcgatcaacgccttagaacaccccgctggaacgctgcgctaggactcacatctcagccctctgccactaatccaacggcatagagcccgtcttcctccctgcctccacggcgaatgacggggaaccgcaccgcggtgccaaactgtactccggcgaggacaactccgaccctggagcgcccaatccttaatcactaccac

SEQ ID NO: 59473 - DNA, 1636 bp, Zea Mays
caagcaatggcattcggatagcgctgccgcagaacattgtaatcttcccatgtggtggcatcatctggaagcaaactccaccggatcaacacctgtggcacggcacgattccctttcttgaccaaccggcgatccagaatctccaaaggttggacattgcggctactcaaatcagagtaagcaggcagattagaaaaaacaggagtgtaatctggaatgaatggtttcaactgtgagacatgaaacaccggatgtacttgagccgacgcaggcaactccaaacggtaagccactgctcccacacgctccacgatcttgtaaggtccaaagaacttaaatgcaagcttcggacaaggtctactgaccacggaatgttgcgcatacggctgtagtttgagcaacaccatatcgcccacttgaaactgtcgatcagtgcgaagacgatctgctcgcagtttcatgcgattctgggctgcggccagttgctcccgtaacatggctgtaaactgtgctctctcaactaaaacttgtgccacatcagctgcagtatcggaaggcacagaaggtgctgctgcaaagggaggatcatacccatacagaaccttgaatggagaacaagctaaagatgtgtgataagaggtattgtaccaaaattcagcaagtgagagccaggtcttccacttagttggttgagcatgaactgcgcatctcaaatacatctcaacacattgatttacacgctcactttgaccgtcggtctgtggatggtatgcagtgcttaaattcagcttagtacccaaaatcttgaacaattgagtccaaaaggcactggtaaagatcttgtcccggtcactgacaatagacttgggaaggccatgcaaccggaccacctgatccaaaatgacctgagccacttgggaagcagtaaatgggtgtttcagggcaataaaatgagcatacttcgtgaaacgatccactacaaccaggatagtatcacatccaccagattgtggtaacttctcgataaaatccattgtaatatcctgccaggcaccttgaggaatgggaagggggtgcagcaaaccagcggggtgtactctttcgcctttggcctgctggcagatttggcattgttgcacaaaatcagccacatcagatttcattcccttccacacaaacaacttcttgaggcgatgataagtggcatgcatcccagaatgacccccagccgcgctgtcatgaaccgctgccactaatttagtgcgaagagcagaattctggcccacccaaatcagacctcctttcctgatcaccccttgagataaagaataaccgtgttcatcaggattatggacacatagccgagccaggagagattgagcagcaggatcagtcacataggaatttgtaacttcttggatccaaagtggttgaacctcactgactgctgttaatgccatcactgcccccacccgagaaagtgcatcggcaaccttgttatctttaccttgcttgtaaaccactttaaactgcagacccatcagcttagccatcgcctttcgctgcaactcggaatgtaaatcttgacttcccaagaaactgagagccttgtggtcggtccgaatttcaaactcac

SEQ ID NO: 59474 - DNA, 737 bp, Zea Mays
gaatactccaacttaggcatagagtgatgaactgagtggaatgtgtagagatgtgtagagaactgcaagtgagcagtgcattggaggttggagggttatggtgctccataacagtttcttagaattttgaccaagtcccaaccatgagagatagcacagttcataggctctatatacatgttaatgctttgatgaattgtcatgaacgtagttggcatataagtttttagaacaatgatcctaaatggcatccgaactgaaatggtaggattgcaaatcgtaggatcataaataatagaattgcaaaaccatagatttgataaatagaattgtagaaccaacctgatcaacaagcacttgcatcccaccggcctccatggtgaacccttccacgtggttataggccacgaccagcggcggccactccccacacgcaatcatccgctggcattgcaccagcgtctccacgtcctccctcccagcacttgcatcccaccagtgagaggcctccagcaccgcgcggttcacagactgtggcaccatgccgtaggtgagttcattgttgaacgcgtttgtaccctgtcatgagttgtgttgatagttaagtatgattgaatataaggttgttctattaaggttatagacaatacatgatgtgaagtttcggtattcgtttttgaggtgtttttgctatgttttttctacaatagaagaatgttgtcaagtagaaatttata

SEQ ID NO: 59475 - DNA, 976 bp, Zea Mays
gctctgctaccctggaagaatccttcgccatcgtgctctctaccgagtgtggggcctccgccaccttcgcattccagcattcttggtgctgctgaagaaatggcttttcgcagagttgatcctacgccgttcctcccccatggcttcatggcgcaaaaagtcgatcatcgcgagataatggtacgtactgttactcgtcctcaaccttcggcacatgaagattggggcattgtgcttgttcaccctttaccggagcatgaggtcaacttccacatctttgatgatatcatccgtgagtatttggtggaagtccggcgggttcaagtcaggagcatccaacgctctcatctgggataggctttggtgcgattcaggttcgcgtttgacagagacaacttagtggcattaggcccccaacaagccctgggattttcttttactgtcattcgtcacaatgagggctggaaccagcgtgccctaacctttaatcacgagtgttggcttattcttcttggttttcctatggatttctggactcatgaacacattcagaatgcggttggtgcctttggaagggttctcatgtgggaccctgatcctaacaatgctactaggttgctggtccgagcaagagtgacttctttgcaggaagtgccacagttcatagtcttctcagtggctgaaggtttttagggtgtctcttggactgttcaatgtgacattgtgcaacaattcatgtttggtgcccagcctcaagatgaggaccctgtgcctccctacccccatgatggtcaccaagttcctgctgagttttttggaatggggcagccgatgcccaacttccattttcagttcgacctcaatattcctcctgaggaaggaatcaatgttgaggaaaatgttgctgtaaatgatgatgatggctgggacccttggcctgttgagcaggctcatccccctgtgccagaggtcttac

SEQ ID NO: 59476 - DNA, 271 bp, Zea Mays
tttcaccagccgcttcgcttccacctccgcatcatgtatagccttgccgttgtccgtttggtacaccgggttgctgggtcggcgatcgccggtgtgctacgccgccatgcttcgcctctcctcatcggtgcctggcatgtcggggaagaagcggtctggcccattgatccatcaatggacggtcaagatcatttcagaaaataatggttcagcttggaagtttatgaccgtagatcttggatcgcatggccgatggcgcgcgcgttgtttt

SEQ ID NO: 59477 - DNA, 1105 bp, Zea Mays
gtttattattaatgttaagtttattttttatgctcttatggccatcattccataagaccattgcactcaagcaaaaatccaaatcaaacatttcaaacaacaccgtcacatggttgttattattaatagtgtagtaatataaagatgtcttgcgaactaacttattacaacataaatgaaaaatctagagcagcctggtgatggatcctggttctccatagcggatcctcttacggggaggggataacgccatggcagggacttgaacttcagggggattccgtccatcaagctgagcttccagggctgcgatccttgcgtgtgcatcctccagctccaagtgtaccctagagaagtccagggtagcactatccaggtcggtgttaagacctgccaccacaccagctagggtgttgaggcgatcttctctagctccacctagaacaatgctggtctggctttctccatgaatacgtagaggaagatgcttgtacttcgtgttgtgcagctgctgccagtaggtgtggctgagggaccacagaattcacctagcagcatcgctgatgaagcagcgtaggtggatagcggcgtcagagactcttgagctgacagagtcctgaaccctctatcacctgcatccatcaccctgacatgaatgcgagtgatgtagtagcaagccctaggaggctcatacgctcgccttgtctcatacaggggtcggacatagattcccaacacatgcagaacatcctgcagcaggttagggaagtgccctatctcaaacattgaggtataatgttcagtgacaggccataaccccacgtagtggtcctgctattcttcgttggcttcctcgttgatgttttcttcatcttcttcttcttctttgtcgtcttcatcatcatcaccagagtcatccaattcattgcctccgggagcaacggcttggactgctggtgctggcggtgctgaagctgatgatccagctgcgaaggctagtgattctgccaacgaggtgggcgtaggcagaaactcctccgagctgtcctccagaatgcctccgttctccacctgaatgcgagggagatccatagggatttcctca

SEQ ID NO: 59478 - DNA, 752 bp, Zea Mays
aatagaacaatggcaagaaagacaccttactgtcacagcaattttgatattccgctggaccatctaacgtttttatcatcagcaacaacaaagattataatccaataaagttgggataggctagatatctattgcagaaaaccccagcagtggtccctaaaccctaaccgaatacgaccattttgtttcgtgctctctagaaaatgccagcagtggtgtaggggactcgacggcagacggaggatgcatgccgctcggggaaaaaaataaaaataaatgtctgtatgcttgcgttgtggctccgatgtgtttgagaaagcaaaggggagggaagatgcttgctacatctcgaggaggtgaaggataggcatacctgaatgctccttgatagagaagtcgctgggaagctggtgtagcggcggcagcggtagccgagtcgtccgtcgcctgtgcgaaggggtgggggagaaggaggttttgggaaaggaagttgttttgcttcaatactgtgttgcgcagctacacgggcggaggaagcaaggaaaaccatttccttttgtctgaatctggatgtttcctggatgttctccacttactattcaagattcgtatgaagtgttggatttccatcagatagtcagttattcagacgttgactaggcagattatgttgataaaataaaatccacttcttgatatagcttcacatttgttgagggtctgtttttggaaaggttgcaaacatatgacag

SEQ ID NO: 59479 - DNA, 585 bp, Zea Mays
caagtatttaggtttacccctttctattaagaagttgcctagaagtgtttttctggagctcatgacaaggtggctgataagttacctggtttgaaagctgcgttaattagcccagctgggagggcgaccttggttaaatcagtgcttacggcagtccctatctaccattttataacacttctgtgccccaaatgggttgtcaaggctatagataaattcggagaggattcctttggacaggaagaactgacatcaaaggaggtcattgtgcagtgggttgggctaaggtatgcaaaccagtgaaccaaggaggtctgggtctgcacaacttgaatgttctagggtgggctctaaacttgaggtggctctggcttaaaaaacacaaccggacagaccctggacagtgtttgacatccaaatacatccgtacgcagcagcccttttctcagcctgtgtgtgttccattgttggcaatggtgcttcaactcttttctggacagatcgctgtctccacgggcaatcctttaagcagattgctccttccctgctaagccatatacccaaaagagttcagaattgcagaac

SEQ ID NO: 59480 - DNA, 280 bp, Zea Mays
ctcgacggcgtcgagcgcagccgagctccggcgagcacgtagaccggccggaggaggccaagaccggtgctcagcttcggcctaaaccaaattcatgacctagagaacgtttcccctaagttaattcgaagaatggtaccctactttgccctggccacggcgaccgagggtgttgcggatagatgggtgtgttcccggtgatctaaggctactcagtgcaaattggtggttcagcaagcatcacagagttatgagaaggctcaaacgagggagaggggag

SEQ ID NO: 59481 - DNA, 599 bp, Zea Mays
ggctcgacggacgttttcacagaggattgatgggcggtgggcaaaagggtcgtggtgaattgctcgatggacttagaagaccgctgccgggccacacacctccatggacaagacacgtcgcccctgtgaacaccggtaagacaccctagatcaattcgttatatcctccgcatcgtgtagccaagcgtagaaataagtagcgggccagagggctgtagtgcattcgccagccatggtcgccgccatggtgtgttgttcaccgccgccgcatccgactgggagaagtggaagaacaagccagggccattgatccatgagttaacggtggagattagatcagagaataccccttcgtttcgtcaaaagggaaccgttagattgggatcctatggttcgaaatagatcacacctttattagatatgaaccgcagatccatagatcaagggttgctgttacttgccccttcgttgttatatacgatctatcgaatcaggatctgagggctcagatcggtccatgtgtaaccgccacgatcatattctaaaagggacccttgggttcaggataatgaactcgtcgtccaccgatagtataaaat

SEQ ID NO: 59482 - DNA, 564 bp, Zea Mays
cgacgagcggctgggaagagattgaggggcttagaaagcaagaggcgtccttatatttgtcccttttgtttttgtttgctgctctgtgggggaattatgcccggaagttcgtcccctgttttgagttacagatggtcagtggacgctagcagtcacatgaagctaatcaagaaagatatatgtacatttgtttgtttgtactagttgaatcactaatgctttaatgattgctatagaggagattcgctccaaaaagcagtctctcttttgcgtggccctgaggtccattatcagtgggtgaaagcaatagtatctgttgttttgatattctgtttggtctaaaaaaatggagttacaacttatctgatgtcagacgtaagtaaatcgtatctttttgtttgggatgtcgttagtgcgcgttgtcgctgcactttatggttgttgaaaggaattatatactaagaacaagacacctaggcattttgcttgccttagggatcagaagctaagagggacatggcagttgacaggttttgtgttccgtcgcttttgcaagtgctaagt

SEQ ID NO: 59483 - DNA, 620 bp, Zea Mays
gacggtccgtggcctgatactcaatttttcaaattctgttcactttctgattttgaatttcaaatctgatttgatgctcatatatggacatttcgaccaatccaagggttagtatgcatgcatatacacattatgtatttgaggaatgcacattttcatatcaaactacttagatcaatctaaaatgaaaaattcatcaaaaatacccaataaatagcgtagagagcatatttagaaccgaaatgcaatactacacatgtgcgttcaacctcaagctacatttgagagatcgatcacattcatttcacttcttagagtacaaaatctcgtttcatccaatgactttgtaaaaatatcggctaattgatcatccgtgccaatggaatatataaagatatctccctttcaacatgaccccttaagaagtgatgtcgtatatcaatatgcttagttcttaagtgttggaccggatttgtagtcaattttactgcactttcattatcacacatgagaggcacattcttgaaaataatctcataatccaatagagtttgtttcatccataatagttgagcacaacaatttccggccgatatatattccgcctcggcggtagagag

SEQ ID NO: 59484 - DNA, 344 bp, Zea Mays
atcaacccacggttaagtcggtttttgtctcatccgggttgatcagggcgagttttgaaattgcctacagcacaacatgcagtgcaggtcgtccctgtaccgtggggatcacttgtacagggttttgcgctgggtttggactgattctacgctactggtaataaccactgttttcttttgctgtggaggatgggaccatgtgtagccagcctttttatctttcttcacctcgctagtcgctactagtcatatagcgttcaaaagatagctttagcttgtgtttccctcatttgaaccgtcaatgattgcgatacggcccaagctgtcagttactctgcctcctc

SEQ ID NO: 59485 - DNA, 439 bp, Zea Mays
attatattagacgaaggcaactggaaaagagcaatatcaaaataattttggctgctacagcttcgtacatcgggccgaggctagctatcctgtgccgacattttggaaaaagtggccaggctcctagatgcaagaatggttttatgtgaaggttgatctgagtgagagggaagatataaaaggggtcatttagtgccttatatggtctcgcttcggcatcaggagaccggccattgcagttggaaacgacgtgcaagcgtgccagacagcttttgatatagtgtgtacttacattggcacaagagacttggtccaagaacatattgcttacagaatgtggccacttgctcatggatgcgagatgccgaaggaggctaccgctagctccaaccaaaatggtttggtgtatctgaagtatacctttccatacaggagccag

SEQ ID NO: 59486 - DNA, 445 bp, Zea Mays
gcacgccaacagagggggcgccatggcaaacctacagcaggaaggggcgaccatggaagaaaatctctatgcacagatcagagggggaacgagggggcgaggtcggccaccagggagatggctggtgtccagggcgccatggttggggcatcggcttggagaggaaaatagtggcagaggagatagggagctcctgcgccatggacaactagggttgggcacctggctggggagggaggagatagaagagaggcggccatgggagggacgccgatgtgagtgacagggaggagagggcgctgaccagccatggttgagggggaagaaacttggatgtggggagtgggaggagggagggagcagtagtggataaggccaagcggtggattcgtgaagactccaggacggcggctacagatatggacgaagaggaaaagtggtgggg

SEQ ID NO: 59487 - DNA, 848 bp, Zea Mays
gtgacatttgatgagtctaatggctcgcaagggcatgtttctaatgacattgcaggaaatgaagaaccaccttgtgaggccataaagaagcttgcaataggtgaagtaagacctggagaaaaggatgatgaggaaggaaccttgtggatgactaatgaggtttttgatgtgggcgcaagggtggtgggtgataaatcctccactcaagcaaacccatcaacctcaagtcatccaaggcttgaagaaggtcatcaaccccaaaagatgccaaccctggtggaatgtgaacatgaaagtgtcgatgatgaagtgcctcttgatcaagtggatgatgaggaggagcaaattcaaagacaaccattagtgccccatcctcgagtccaccataccatccaaagggatcatcctgtggacaacatcttgggtagcatcaagagaggggtaacaactcgatctcgtttagtaaatttttgtgaattttacttgtttgtctcctctcttgagccacttaaggttgaagaagcgcttggtgatctggattggataatcgccatgcaagaggagttgaacaacttcacccggaatgaagtctggtccttagttcaaagacctaagcaaaatttgattgggacaaaatgggtctttaggaacaaacaagatgaacatggcgttgttacaagaaacaaagcacggttggttgcccaaggctatactcaagtggagggacttgattttggtgaaacatatgcgccggtagcaaggttagagtcaattagaatattaattgcctatgctactaaccatgatttcaagttgtaccaaatggatgtcaagagcgcatttctaaa

SEQ ID NO: 59488 - DNA, 708 bp, Zea Mays
aattgtccgactcatcatccatcttttcgattctaaaagtttgtttccctggtactgatgttgtgataggtcgggggtacttatatatatgcgctcatgcctaacggttcctagcataaaccctagcgctactttcgctgtaatttcttcctttgaaattctcctacgtcggtggccccgcgcccgattccgcgctcatgagcggtcccatggtgcccaagaagaagaagggggtgcggcagttgtcatccccttattgatcccaatagtcaagtcccttttgcggttactatgcctcccttatttctgaattcgatctgcttcacctcatctagatgagcgttcttcctccgaaagagttgatttcatggcgtgtttggcaagggatcaccgtgcccacagaagacacccacgagtcgttgtttttgttcctttcttgattcgaggtctcggtttacctatctctcccttttttcgtggccttctcgattactattctcttaatttaacccatttgaatctcaattatgttcttcaaattgccattttcatgcacctctgtgaagcctttcttgggattagcccacattttgtattgtggaaatatctctaccattgtatgcccgggatggcgagtgggtagcatcaggtggttgggggcagcctagagctttgttgaggtaagaaagctgaatacctagatatccc

SEQ ID NO: 59489 - DNA, 648 bp, Zea Mays
ctaaaattgaataaaatggagagactaaaaattagtccttaaacaccccctaacctaacacggtaatgtgcaggtgtagctcccttccgtccttgtccctgccatccccgatcccagcgcctacaagcagacgcctaggcatcttctccagcaacgccaaccctattctggtgcaggagatctcgtgctaccttgggctggagctaaggcagatcaagatcgagcggttcgtggacggcgggatctacgtacagctggaagagagcgtgcacggctgcgacgtgttccaggtgcagcccacctgccctccctccaacgagaacctcatggagctcctcatcatgatcgatgcctgccgaagggcctccgccaagaacatcaacgctggcatcccctacttcggctacgccagggccgataagaaggtgcagggggcgcggctccatcgccgccaagctggtggccaacctcatcatggaggtcggcgcccaccgcgtgctggcctgcgaactccactcgggtcagtccatcgactacttcgacatccccgtggaccacgtgtccacagccagcccatcatcctcgactacctagccagcaagaccatctgccccgaggacgtggtggtggtgtcgccggacatgggag

SEQ ID NO: 59490 - DNA, 510 bp, Zea Mays
gcaaggttccacagttataggtgctgcagctgtttctattgcatccagcacttcaaataccaagctttgtcatatgtgcttgggacatatgagtgaaaaaggtatgcatcacttgcacaagagatgttatttaaatgatattggcaaattggaattttgtgaacattgtgtatttggcaaatagaagagagtctgtttctctttatctactcactgcaccaaaggtatccttgattatattcattctgatctttggggtcgggctcatcattcttctattggaggttgtgattatatgatcacttttattgatgatttctctcgcaaagtctgggtttattttctgaagcataaaaatgatgctctcactgcattcaagcaatgtaaagctttagtgaaaaatcagactggtagaaaaatcaagaaattgagaaccgataatggattagaattttgcaatagtgagtttaattctctttgtgctgatcatggtattgctagacacaagac

SEQ ID NO: 59491 - DNA, 600 bp, Zea Mays
cttatcgccatctctgcgaggctcaaacatacagccgttgatatcgcgtccagggcaacagaagcgcgcgctccctgcgcaactcacccgtgaactccgggccgcgggtgtctcctacctcctgactgcgactcggactcgtggctggcaacggaatccgcggacctcgcgcggcagaaaactcccggctcatggggtcttcgtcgtcgttcgtttgctagcaaagctcaacaaatcagggagcaaattccgcgcaagattctcgccaaccgaaccacctcgcttcgttccttggcatataaaaacatatcacgacctcctcccttcccatcctcgctcgtgccatccatgttctctagaatccctgctcagccacgcaaacccggccagcgcccttgctccaacttcgccgcggcgccgtcgtgcgggctgtgcgaatcgagatggtgagagaaaccaacggccgcgccgtagcttggggacgacacacatcgcatctccgggctctggtgactatctgggaaccaggaatccctcaccggcgctttgttcatgtcgcagacccgccccaacccatggacttccagatctagaagaaac

SEQ ID NO: 59492 - DNA, 720 bp, Zea Mays
ctttgaaaacacgctggctccactcagctggtcgaatagatcttctattctgggtaaggggtacttgttcttgatcgtgacctcattcaaagctcgataatcgatgcacatcctcctagtgccatctttcttctccatgaacaggacaggggcggcccaaggcgaagtgcttggtctgatataacctttctctgatagctcatctatctgcttcttgagttcaaccaactctggtccagatactctataggctcttttagaaatgggggcggtgccacgaagaagctctatggcaaactcaactttctgctcaggtggcatacctagtaagtcttccgggaacacatctggaaattctgacacagccttgataatctcgagtgaatctatctccttgctatcaatagccatatgatggcaacctcctttccttggctcaggtgagactaactcagctaccacctcttctcctagtggggacaccaacttaattgtcctcttatcacaactgataattgcttggtacttatctagccaattcatccctaggatgacatctattccctgagtacccattactatgagattagcgggaaatgatatcccccttatttccacacttacattcaagcaaaaactatcggctcgaattctaccaccggctgaatcaatttgaatgggtgtcgacatggtagttattggaagattatgtgcttctac

SEQ ID NO: 59493 - DNA, 989 bp, Zea Mays
cgcgagaacaatgaatttgagcggcagatcgtgatcggtaagaacaaggtgagtcactggtggccgctcaacgtggcttttaccgtggcggcacctccggcgatcaccggacatgcgaagcacggttagccgcgacgtggtaaagcatctggacacgcggcggatgacggtgatggttcaacggcggtgagaatcttatccgagggatcggtgagcaagggggaaggtacgacggctagccggagtggtgtccagctcaacggcggtgatgatccttctacccaagatgttatccacttgccgcgagcacgaatctagacgccggcgacacgaatcacggcggagatatcgttggcggtgagatctctgcactggcagcctgatccaattcaggttactgtaccatcgcatcccacatcagttagcctgacagagcaacttcagggcaaattctctctagatttcgcatgacaactttatcatccctctgcaccaaagttgtagagctacaaaccagctataattttgccacagcagcagtagccaaattcctattgaatcaagcttgaattcatgcccaaagtctttgtggttgcactgtcagtctgaaattcagacttcaacagcctgacagcccatctttgggtataattttctccaaatccttctcaacaactatgcttactctcttaagcaaagttgttcacctttgataggtttacaaatttgatgtggtgacctagggtaaattctcactattttggaagatatagagctccaaagttgagcccatatcactaaatttcagacttagacttatagggtttaagtggtgctttttgcaaatagacccaaaacttagggtttaacttgcaaatccacatatttgtgatccatatggcttaggacactttattatcatggtttttgcactttagtccaaaagtagactaattttgcacttaaccctctagggtttaggtttaggg

SEQ ID NO: 59494 - DNA, 1135 bp, Zea Mays
cttttgttgtgtcaggtagacaggtaggaatcgatgtagaagagatatgttgcttgctgtttgtaggggttattgtagtctgacctggcggtgtactagtgttgtgaggtatccaaaagctagcacgacctgcaggagtgttagctagtgtgcttgctcgacgtccatgtacctccctttcagctttacatgcaagatgaataaatagttcacagaattatattccttgtatgctaggatatcttgaatttctcggtttaacccactcatgaaactatccatagaagcatcattattctccacaagaccacaacagagcatatctatttgcaattcctaataatactcctctatcgttttgttcccttgccttaattgttgtagcttatgcaatagatcacgtgcatgataaaaaggaacaaatttggccctcataacccgttttaatgcatcccatgtttgtggcaatctagttggattctggttgcaatattccctccaccaaactgaagcaaaatcagtaaactctctagtagtagccctaacacatttgttttcaagaaaatcatggcgtgcaagtttttggtctactgctagttccctagtgagatatgcatctgggtcatatttaccatcaaaaggaggcatgataaacttgattttacctagagaatcattgtcatctcatacctctcgtcggtgtggacgattagggtgatgctggcggtgatggtgagtacatatcctattatcatcctcgatatctgcagcgtagtcatcatacatgtgttcgcttgatgcaccaccatctaaggcatttctaggggtctatcgattcctatcgccccccctgcttgatccaacttctctagcctctcaagaatggttgtgagagatggatccctccatcgctacaagcttgttatttgtttcaatctacgtggactcaagttgtccaagtcattcattagtaacccgcacatcctcctcgagtgcctcagtgcacaagttcacttgtctatcaaagtgttgaatggtgcgctttgttcgaggtgagtggtttaaatcaccatctgatgttcctgtcatggttagtgtacaataaaaaaggagactcaaaactcatcctctctaa

SEQ ID NO: 59495 - DNA, 371 bp, Zea Mays
tgaaccaacagtgtgctgacatgacgcaccgaacaataaccaagttttaatgcagcttgacgctgtttcatgcgccccttgcgaagcccaagcgcggcgagagtacgcaggccgtgcatgcgataactacggggggacaaggaacgtacaactgtcgattcgggatctccgtccctggcttgcagaatcttggtacgaccgtacgagcgtgtaaaacgcatggcttctgttgccttccatcaacaacaacgctagtagtatggaattgggcccggcatatcatacggtggctttggtagccccttgaacctgtagaagcgtagtacaaacgtccgtgcatcggaattaatgcagagacaataatgtcctcc

SEQ ID NO: 59496 - DNA, 1101 bp, Zea Mays
cggacaaagaatgtcacaccgtcagggggaggagatgactaggaccctcctcaccccttcagacaggataagggcaaggcagtataccttgagcaacaagggggcaagaagaagaggcggttggatagagccacccgtgcagcagttgccacagcagcagcggcagatcaggcagagcagggaggtcagctgaggatttcctccgatcagatcgccttcctagttcatcgcctctcgtctcgaacttactcctccactgctcggtccactccctcagacccagtcaccactccacctcccacttctccagctcctgccactcacgagaattctaccacacctgctgcgcccaccacctccaccacaccagcttccactgcccctgctcccatttccgctccacccattcctccacctcgcttccgggagcgtgatgagactgaggtgcgacctcttgctgttgatcctcgtttgctcgatctttagagggccacagctgcagggtatgttggttcagacacatgcccgtggactcatggctgccagctcagagggatccagcggctgcgccactattcagcaccaggactaggagttcttcttcagggcacaactgtcagctcagatcgctctgagggctcacccgagattggatctcactgcttttcgttcagcggtcggtgcagagtcagagggtcatatcacttatctggatggcttatattccttgctgaccttcggtggcagatatgttgaggagtggatcagagtgttttatgccacagtttggatcgacccagatcatcagtggatgaggtttaggtttgagcgtgactatgtgactttgcatgctgctcagatcagagagctatttggattccctgagtcgtcgacgaggcttcaaagtatgtgctatggtacttcagaccctcctcgtctgcctcatggtggagtagctcctggcaactgctcacgtcactgctctcttcagacatctgttcttagacaactctcgacgttcccctgcagacttcacccaacggcgaagttcttatatgagcttatgaggcgcaccctgctaccaaggatgggctagagaga

SEQ ID NO: 59497 - DNA, 332 bp, Zea Mays
gttgtgtggcgcaccgtgaggccgagtcactggcggcccgatagcatggacttcttccctgggcctttggtcccagcatttgtcctgctgctggttcacgtccttctttggtgtcgggggtgcaggcttcgtgtggccgatgaggtcctgggctcattcgttggcagtgatgtagatgtctacctcccggaacatttgttctgaggtggcgggtgccatctagaggatagcgcggacgaagactgagtcgttggactcgcggtagaagtcctcgatcacgtctgccttcacgacatcggggatgtggttcctcattgtctagaaatgcctta

SEQ ID NO: 59498 - DNA, 317 bp, Zea Mays
ctgtgattgaaggtgaagatgttgagagtgaagaagactacattattcagatcccaacgaagcctagtcatctagattttgaaaaatttactgtgtctgaagataacaggcttatgatgatgaagctagactattttggagaggctgaaagcaagctcatccgatttgctggagaagagactaccccagagtcgaagaatgatgaagtagtggttttcaagagcttcttcagagcggggctgcggtttcccctgaatgagatgattggggtagttctaaagaacttcgaaatatatcttcatcagctgactcctaac

SEQ ID NO: 59499 - DNA, 465 bp, Zea Mays
cgattggcaaggattttagtgatgagcttagcaacactatgaaccaaacttataggcctaaaatccttaacctgggcagcaccctcctttttagggatcagagtgatgtatgctgaattgagtttgccaaagttgttgaattttctgccccaaactgctgacaccactttcatgaaatcatgtttgattatgtgccaacagactctgtagaatcgtccagtaaaaccatcaggtccaggtgccttttcagggggcagacttacaatagtgtcccatacctctttttcagaaaaaggtgcatccaactcagagagatcatgactgggaatatcaagagcatctaaatcaatgattctatctctgcccacatttgtaccaatcaggttgaagaagaaatgatccactgctgcagccttctcatcatgcctagttaaggtgacatccccttccctctgagaggttaca

SEQ ID NO: 59500 - DNA, 480 bp, Zea Mays
gtcagggttatttctataaaacttgggacccctggtaatattctttctatagctacggactgggggtttattctgcaaaagaagaggggttcttaagcataatgatcggggtgaaggggtaggtcactggggccgttagatcaaaatacgatgactcatattaagttggcttcatgcgaactggtatgcaacctcccccatcggatccaagatctatggttcagaatccattaccacgcgatcgaatcttctccatctgatccggatacaacggctcagattatatccatcgcagaggtaacacgatctaatcgtgaccatccattagtgatccaatggcccaaggctaccttcatcacccgcatcgatcctacatcctacggacagggtcgccccacccacatctcgcacccagccgcagcggtgcgttcagccgaaggtggcgccatggctagtgcttcgccccaccaagaatccgag

SEQ ID NO: 59501 - DNA, 2426 bp, Zea Mays
agcttggccaataaaccataggtttctctaacctgaggtctgataaactcaagctgtcttcaatcttgcatcagagatttgtttcagcaacattatagccaaaacatagtaacagtattaaattcttgatgcgttacaaaaatactgatacatttttttataatccaaaaaaatgtttaacatgtagcttggccaataaaccacaggtttctctaacctgaggtctgataaactcaagttgtcttcaatcttgcatcagagatttgtttcagcaacgttatagccaaaacatagtaacagtgttaaattcatgatgcgttacaaaaatattgatacaatttttttataatccaaaaaaaattgtttaacatgtagcttggccaataaaccacaggtttctctaatctgagatctgataaacccaagttgtcttcaatcttgtatcagagatatgtttcagcaatgttatagccaaaacatggtaacagtgttaaattcttgacgagttacaaaaatattgatataatttttataatccaaaaaaatgtttaacatgtagcttggccaataaaccataggtttctctaacctgaggtctgataaactcaagctgtcttcaatcttgcattagagatttgtttcagcaacattatagccaaaacatagtaacagtattaaattcttgatgcgttacaaaaatactgatacatttttttataatccaaaaaaaatgtttaacatgtagcttggccaataaaccacaggtttctctaacctgaggtctgataaactcaagttgtctttaatcttgcatcagagatttgtttcagcaacgttgtagccaaaacacagtaagtgttaaattcatgatgcgttacaaaaatattgatacattttttataatccaaaaaaatagcatgtagcttggccaataaaccacaggtttctctgatctgagatctgataaactcaagctgtcttcaatcttgcatcagagatatgtttcagcaatgttatagctaaaacatggtaacagtgttaccttcttgatgcgttaaatgacacgtagcttagccaataaaccacaggtcattcaaacctgaggtttgataaacccaatatgtctttaatactgcatcacaggcatgttttgactttgtttcaacagccaaaacatatgttacattcttgatgcgttaaagaaatgtcaatacaatttttatgatccaagaataacatgtagtctgaccaatgaaccacatgtttctccaacctgatatcagataaaactcaaactttgtttaatcttgcatcagatatatgcttcagcaatgtttccgcacccaaaacatggtaacagtgttatattctcaacacgttacagagatgtcaccctaatttcaaccaaagtgaatagtatctaaaaaagaaacatgcctctaaaaacaaaatcatgggtgtgagtacaaaatacataaccataacatccaaaaaaaatatcatgtatatttgcaaggttaacaaatcagagtatcaacaattttaataaacacataagcttgtaccttgttaaacaaaaccatatagagcataaagaaaattggtaagttagatccataagaagttttcagtatgataatgtcaatcctagtagttagatccataagttctcataccatgaagaattacaaggtgtcatatctgaattggaccgtatctgattacagctcttactaatatgctccaggtaatgacagatggcataatacctgttgcaagcacctcattcaataacaggactccttcaggtgtcctattacaagagcacaggcccttaattcttgtattgtaagtaacaatatctggtttcaaaccattatctaaaatggcagcccaaagagatgctgctgtatcaatagaaccaatctcataaaatccatccatcaatgtgttataggtcactagatttggggaacaattcttttctttcatctccaaatatatacaaaaggcatcatttactttcccagcagaacaaagaccatgaattaagatgttgtgcacaattacatcaacctgaatacccgcatcaagaatttcattccaaatacaaagggcagcatcaatcttcttgactcgacaaaggccacgaatcaaagaaccataagttctgatatctggtttaaaacctctctctaacatttcctttgttaagcttgaagcttcttggtatttttcagccttacacaaaccatctatcagagtgttatatgtgatgatggttgggcaacaaccattgccggtcatttcaatgtaaattttaacggcatcactaatcttgcatgctcggcagaaaccatttattagtgcattgtaaacatgagaattcggtttgcaaccatccttcatcatattcttatatacct

SEQ ID NO: 59502 - DNA, 1014 bp, Zea Mays
catgcccgtgatgctaactttgcacaaaggacctcaactatttgaataaccggttaagaacccttgcgcattattcattctctctgatattcacagttaggccctcggaattctatttctttaccgcgccaagtccacgacggtgaatggcgacgagcagacctccagggaacttgtactggccggagaacgcaatggctaggcttttcctttgctcgacacccaattccaatcctggcgaccctaatccctctaccaattgcacgattctagcttagaatccttctatccacgacaatggcgaaaaccgagaataatccgatgtgttcttggtgattcagggcagtctagttcaattaaacgggtctacgagtagtaggagacttaagggaggctagaacatcaagcagagaaacttgaactaacctacagagagctggccacgacgaggtgttcacggtagcgtggaaaccctatttgggggaaagggaaattgggaggctatggtggacgatcagaggcaagagctggtgcactgggtgcataataacctagcggacctggttgatcactcaatttatagaagccaacagtggtagtgtccaatttggagaaggtgcgctggcggccagagagaggggaagttcactggcgcaagctgtcgtggctttcactgaagtaatgacttaggcgatggactggctatctactatggtctattgcaacgtggtgaaacggctgatgacgtgtcatggctgcgaggaacagcggcacgatggcaatggtcgcgcggccacgtcgcggcacaagtgggcacgacgtctaagcaaccacagtgccctgaccatatccacgatgagatattttcatccggagtgattatccgcacattaccgggcgcaaatcacagtgtcggcgcgaatctgagtgcggggtcaccgacggcgaggtgcactgcacctgagatcttttgcaggtactgtaccatggcaatctccatcagagcatctgata

SEQ ID NO: 59503 - DNA, 635 bp, Zea Mays
ctctcgattggatagcaccaacgtccctacacgggcccccccattcgtgcctcataggggagatgaagaatcaaatgctgcattggattgaagaagccgggtggaaatatcttctcaagcttacacaataacacgggtgccaatctttccaagtctgcaaccacggtccgagataactcttttgcacaaagctgacggaagaaatagctcaactctgaaagcgctagccagacatgctcagggacatagcctcgaaccatcgcaggaagaatccgttcaatccatatgtggaagtcatgactctccatccctaggactcgcatagtagatatgttcacccctactcaggttagctgcatacccatcaaggaacatcaacatcttgatccactgaagtacttccttcctctaggccctgcttaggacgaaatcagccttaggccttctccacgtctttccgccacttggcggcttcatctctagttttggtctatcacataacgctgccagatccactcttgccttcacattatcctttgacttatcaggaatgtccataattgttgcccatagtgcctcagcaacattttttttcagtgtgcattacgtcaatgttgtgtggaaggagtaggtcg

SEQ ID NO: 59504 - DNA, 425 bp, Zea Mays
ggtgttacctaacagaatccgtgagtttagatggataaacacacaccgaaagaggggcttaaccgtctgatcaaatcttaacgtggaccatccgcgcctacacgtggatcgtctggcctctcccaagtggcacatatggttctcaatacatgtcccctgccttttgggaaagctaagcgaaccaaaagcacttggtacaatgcattagcaacctgatgtgtaaacatcggttctctaagtatcttgccatacacttggatgataacgctttaggaaacgaccatttaatgctttaggtagctcatcaccatgcaaagtctacgcattaacaaggattacctatgtgactctataaggtccttcccagcttggggaccatttgccaaacttctggtccctgctcctcaatggcaagactgttttcc

SEQ ID NO: 59505 - DNA, 639 bp, Zea Mays
atttggaaaatataacatgccagcatacaccatcatattacattaccaaaatgtagtaattatacagactccatggtacaactcgacttcattacttattttacgtaagtataacatctaaactatactattctagtcttcgtcatcctttgttgcttcatttcctgctgcagaagaccgttcgtcagcaaggttaatggatggagggggcctaaaaaggtccagctccccatcaggtccttcatttgctgttcccgatggtccggctcccattgcagcaatgtcagaaggcacattcaggtgcagtcgagcatacagtacatgtacttcttcatgtaaagtattatagtacacttgcaggctatcgagggccgcactaagctctgccacacgagctcgagcttttgcttcgtggtcccgatctatcgaacgtgagttgatggcccaatcaatggttgaatcccgttctgaaatctcatattgcaagcggctgaagtcagctgacaattcagctatacgtaggttgtcctgctcccgtgccctatttttgtgacatagctctgaccaaagttgttccaccctggcttccaggtctcctattgggtcattgctgccactactactcccttcatgtctggg

SEQ ID NO: 59506 - DNA, 621 bp, Zea Mays
gaaagtggatcagagagttaccttatgtggtttggagactaagaactcaacctagtcgagccctgcatggaaacactcccttcttcatggtctatggatcagaggcagtgttacttgccgatctcaggtttggggcaccaaggctggtcttcgaaagcatagctgaagcagaagcaaccaggctagaggatattgatgtgctggaggaagagcgattgaacacagtaatcagtcagctaggtactagcagaccttgagacgctatcatgataaagctatacgacatcgatcctttgtagtgggagacttggtccttcgccgaattctaacgggagaaggacggcataaattgtcaccactatgggaagggccattcaaggtatcggaggtcactcggccaggatcataccggcttactcaaatggatgacacggaagtggggaattcatggaatatagagcatatcaggaagtttaacccttagcaagacttcaaaagctatcggagcaacgttgtactctgtaattggaaaatacgtcatcaataaaagatttcattctcaaaggcattcaaactgttggttatcaattgacttcgatttgattagacttgaaatcaaca

SEQ ID NO: 59507 - DNA, 638 bp, Zea Mays
attgtgaagcaattttgagttaaagaattagaattcgaaaataaaaggggaatagaaaacaaaagggatggaaaagataaatggagataaaaggaaaaatagaagaaaacattagtgggtctagttctcatttcggcccaactggacaaccctcgctcagccaatacctcagcccacataaccaaccgcgctcaccagggtgcatgtgggtcaccaacatgcgggccccactgggcaggttcccaccgcgcggtctgcgcgcttgtggacgacgcgtgcgggcccacacgatcattttcttcctttgccgcacatgttgcatccagtgactgacttgtgggctccatctgtcataatcttcttcaatagaaagaaagcgagactgatggcgcgatggtcgggatccttgcgtcggccgttttgcgctggccgtggaaatcggctctcggttgccgatctcctccccgccactcgactatataaaccgaaccccgcatcgcaccgagcgcaccatcgccaagcttcaccacgcacctgagagagagtgtgggagagaaaatctatgccgccgtaggttaagccgtgggtaccacaccgacgaactcgggatgatcgatcgggggcattcgcggccgcac

SEQ ID NO: 59508 - DNA, 907 bp, Zea Mays
cgagcgacttgcacatcagtgaatggatgtttgagcaacataaaatgagcttttttggtaaaacggttgaccatcaccaatatagtgttgtagtcctcagacttcagtaacccttcaacaaaatccatgcaaatgtcttgctaagcaccatgaggaaccaacaaaaggctgcaagaagccaactggatgcacatgctcagtcttgccctgctaacaaacttcacactcacgcacaaaattgtcaacatcaaccttgagaccatgccacaagacgaaccatttgacatgctagtaagtgggcagcacacctgaattgttgacttatggggaggctacactagcgcaaaattttttttgaccccatacaaccaagatctactattgttataggtcatgggatttccactagacgcacatggcagcgaaaaccgtctcgatgtagacaaacgtgttgagcagtgtcgtggagtcgtcaacgttcatcacgtccttgcgcggttcgtccaagtgctctagatgcagcacctctaaggtatctacacgtacacggaggaagcatcacgtactagactgctaggtctacaacggcggtgtggcgagagcaagagaattggggcaggacagctggtgtgctggtgggcaaattatgttaaccctaactgcgcctccacccctcattatatagcatcttgatgggcttctgactccgaggcccatcagcttccctaaaccctagtttaattcgtatcttatccaaattaggcttccttcccttaagtgtgggaccctataggttagtgtatacatagacatggcccaattactcttacttagcccaataattgataccgaactttaacaagacatctcaactcttatgcatacgcaaagatcatatcagatgaac

SEQ ID NO: 59509 - DNA, 897 bp, Zea Mays
ataactcaccgttgattccaatctttgtcttctcgccactcgaatattctgcacagaaacaaagagagaacaaaactctaaatccactgcaggttgcacaattcacacaatatgattggtcggtgggtgcaacagctgcttatgtggcacgacatggggcacctgcgtagctatcaccctcgtcagctcgatgcacctcgcacttcaattcacaagaggttatacaggctggaccagtgtctgaaactacacttacaaggctgatgaggatacaacgtcaaaagtaagcacttacaccgaagaagagtctgtgatgggtggaaggcgtagccaaagtggactgaaccagtgctcctcacgcatagaacctacaacacatgagccaaggcgcataagtggggccacctgcaatgtgctaggaatcatacgtcgctacatcaagggtgagaacaccacaactaattaaacataaaattaggggaaactcattattcactgcccaaatgcaactgagaacacagtgagaaccacaatttgtgttgttggaaaaatcagggaatccacctgcacgcggcacatagattggaaactcgttttgtgacaatttttcttagaaagggaagagagagaaaatagaaaagaacacacaaaaatgaggagtggacatgtcagtttagctatctcgattgaaactataatggcatcactcaagatccaatataacccaaaacatagcacagactggaaaataccagacacccaaatccaattaatttggaggcctaatcagagctaaagccaagaaaaatgcacaaagacgagtgcggtgagagcttatgtggggctatagatgtgtagcttttattacatactaccgataaattatatctaaagtcg

SEQ ID NO: 59510 - DNA, 413 bp, Zea Mays
gtacttcatataatagcttctgaacttgagggtaccttatcttcgagggccgaggacttcgctgataaagtaaaccggatgttgtactggatacgcatgcccttcttctgcctgctcaacaaacaacgtagtgcttaccatgtgaatcgtgcaggagatatatagcaacaggtctttggccggctgatcggatgtagctcgacgtggtggcttgagtactggcggtgtggtcagaaacttctttagtgcttccaaggcttcttgagcttctatggtccactagaatttatccacctttttgagcagtttatagaatggcatccctctttcaccaagccttgaaatgaatctactcagcgctgccatgcacccagagagcctctgtactttcttctatgatcgcagtggctcca

SEQ ID NO: 59511 - DNA, 380 bp, Zea Mays
gtcgagggagtaagtggtagtggggtttatctttacaagagagatagattagcgaataggatggcttaaatctatgcaagttcagtttcactagatatttgtatgtgtgtgccaagctgttgacgaatatataagtatttggtatttggtactgcagtttaataactcgaacattacacactggtggcactgacaggtcattgtctttggtcgttttactccaataatacacaccacagaataatctgattgtggatgaactttaccattcgtataactgctaggtgcacgatgagattattcagaagctgtttggttggccaccggtatttgccacaacacagattcgctgtttggttgccatccagtttgacgcacca

SEQ ID NO: 59512 - DNA, 427 bp, Zea Mays
atttcttcaagcactctccatattttagcgacacttataattgtatcaacagtgctagcaattgtcggaatcatataactcaacacccacgctgccaccaaagagtttatagcatctcaatccttccattcagcacttggcttgtctttgggctcaacaacagttcctcaacaacagttccatcaacatagccctcgagcctttttgccttcaacaatcgcatgcctctcctagaccaagccaaataattcttttccccctccaattttatctcatttggcataactctaggttctgaaccgattctatataagcaatattttctttacttgtagaagaagcttcatcctttttgctgacaataattcaaccaacttaccatgaacttgctcaatcccttaattttctctcccattttactagcagc

SEQ ID NO: 59513 - DNA, 505 bp, Zea Mays
tgccgcaagccgtccatcttcctctgttgctcctgcaaaagaaaccgcctgcagggatacttcagcgcaatgactttcctgaaagatacttatttatcgatttagcatattttagagaaaaggtgtaatttgagttctgtatgtgcacaacagttatgtttgaaccgattgttccgcaggtagggtgctgaaaacacccctagcacttgtaagcgaaatatttctgtaacacctctagtgttactgtcactaaagcttgagcataacatcatgagcattagcatatcatgtgtttgttacacctagagtgcatttactaggtaaaaatttcaaataagttgcactgatgtggcttgatgtgtgattaaccctagggtagagtgcttaaccctaaattgggcttatggatataagtgaagcccaaataagtgaaaacctcaaaaggcatgagaaatgatcataagatatcatctttcatggactttagtgacaccaaaaccctgaa

SEQ ID NO: 59514 - DNA, 977 bp, Zea Mays
caaaaattggagaaccaaggcctttaatctactctgtcaggcgatctgatgaacggttccaatggtacagtgactggataggatcagattcggtgaacttcgccgccggtgaccttcgtgcaaggattcgtgctgatcgcagtgattcatgtaggaacccgggcaggatagtaccgggaggatgaaaagatcataaagggagtggatttgatcgcggattgaagcttatcaaccgcacctatagccacgcaacgtggccggatcactggtatcgccgtggtacgccgaagaccccaaatatgccatgtcgtagtcctttaccatgctgtagtaatcatggcgcatctggatttaccacctcaagagctattgcaccggcaagcgccatgactgagcaaccagaaactcttccccctctccggccgccgcgcatcttcccaaattagccgccaccgctcatgaatcctataaattgagcgtgctctcagctccgctaggtatttaagcactcagcgcacctactcgtgtctcaaatcattcaccagagaactccaatttgggattttccccaaatcaatcaaaaacaccgtgcggtgtgagctcactatggctagcttgttataggtccgttcatggcttccttgctcttgtttcagcgtctctatgtgctgtagatggttagccacccggccaattaagctagatttggccaggtcaccgggaacaccacggattgtcctcggtttgcaccgtcaccgtggacagagcgatttagagttagaactctgcaattgatggaggggaaatggttattaggggtcaaatttggtgccaaccacactggagcatcggtagttgagttatccggccagtatgggctcgccggagttcctgctccgccatccacggtcgtggacttcaccttgtgaagaaatagaaaagggaagggtctatttgcatttgtcagtgactcaaag

SEQ ID NO: 59515 - DNA, 445 bp, Zea Mays
tatcaataattatatctagaccaacatatatgcacgtttatcttctccatttctcagcatagaatttgctttcgggtcattgtgaaagtaaaatttcgctaggtcgtactgaggtcgagttttaaaaattttggttacaggttgcagcataaacttgaagtctaggagaatataatgggatgtgatttggtcaacctcaactccaaatgataaattagaaatggatgcatgggataagaccattggacctgaactttatcattgaattcgagaaataacacaatgttctatagtttactctttaattagcttgtagatatattttgggaagtaccattttttgacatactcagagagagagagagagagcaactattctcaaaaagagaacgtagtccatgagtactgctgcatccatactgtactaaaacatagaggatcttgg

SEQ ID NO: 59516 - DNA, 710 bp, Zea Mays
caattcacaacttgctcagggaataaagtatacaaatgcttttcattttaatttaattcaataaatgaaaccaaagaacaaatgaattcagaagatagtattgttgatgtcctggaattccaagcttaacaccctcacaagttgaaagtatattggcatgtagtcctgtagggatgtaaactggtagagatggtcgataaaaatatatttaggcccctttggaaggtaggaatcgtccattaatttcacttgaaccagtttaattttcacacgaaaactgttttaaaggtgaccttaaatgaaaagaatctaggtcggtcagttttttttttatatttgtcatttcaattacttataaacgaaaactgcagtatgggaccacaacagaacaggggaaaaacaatttaacttgtggtctgcttgcacagataatgtattaggattttattttggtgcatgtttcatattgtaccatattacgtgagtatagttctgaatgaaagagatcctgttcagtgttcaccaaagaaataagaactctgctgctaaagcattattcttacctaaattatacagtcaaattatctttcccttgcagtcatccaagttctccatcaatgatagctagggagatgtaagaaaatgcttagtagtccctggcttagtaactagtcagtgggctacataacatgtatttaattcaatcgaat

SEQ ID NO: 59517 - DNA, 617 bp, Zea Mays
gtgcatcctgaattggccccagatcatcatgattcacctacaccgaaggtttagacgttcttcgacctcatcaaagcatcagaagagcctcttcacgggcacaccgatgtgacctagctgatgtcaatcaagtccaagtcttcattctcaattaattgttacaaggagctcatggatttgattagcgaggttcttcctacgggtcacaagatgcccaaagacatgtaccagtctaagaaattgcttgaaggtcttggtatggagtatgagaagattgatgtttgctaggacaactgcatgctcttttggaaggaacatggcagagagaagaaattcttaaaatgtggcaagttgaggtacatggagcttgtaaatgaagatggggagaaggtggtgacaaaggttgcacataaacaactttgatacatgcatctcactcctaaagtgaaacgtttgtttctctcgtggaagaccgctatgcacatgaggtggcataaagattgtacagatagataagatgggttaatggtgcactcatcagatggtgatgcatggaaggctcttgacaactttgatctagagtttgccaccgatgcaagaaacgttcgtatcggctt

SEQ ID NO: 59518 - DNA, 296 bp, Zea Mays
aagaaatctatttgtttgacagagggactttgtcatttaatccttttaatgatgttttctttgcaataatgccatgattggtcctacaagatcaatggcgcgatcagatagactaaaccaacataggacagttccagccattcgtccctttcctccgtaagtatatatatagttcacttgtcacacttatatatgattgcagaacttaagctaaagtttgtgttttatatagtttcgtgttatttgatgatattcaagatgtcaataacttaccacaagtaaagagtatatttgcg

SEQ ID NO: 59519 - DNA, 474 bp, Zea Mays
cattcaaccaccaaaattaattgtaggaaaaggttaaccctatttccctttcaataactcactaataataacacatatatgtggaagtatgagggacccttacaatgcaaacactgttacgagttgcatgtcgagtctatgaaggttcttcattaaccacatgtcctcgaatgtaacaatgaccttttttgcttaaaccaagaaaagcatgttttggtatatatacattggtgtcgatgccaactgaagatacccacatgtaccaaacatgcaaccttttaataccagccaggacctttcttagtttctttaaagtgagtagaggtctgcccgactaatattttttaggcacatttttataatccaccttagttgccttctttatctttacagtcattatctcatccttttttgcaaacttctcatgctcaaccaaattaacagtacgttatgtgaggctccatgcagtcccta

SEQ ID NO: 59520 - DNA, 448 bp, Zea Mays
agacttgtctacgattcgtattgcatcccccttgatagtacgacatacttgtactcaagataaagagaatataactatttgaccacttgagtcttcaatgtcttcatatgccatttcctctcaatatcacttcatatgggattgcaataatctttgtctcatttcttcaagcaaacacaccttgagcatctgacttgaaccacttcaccacatatgagttcacttcattggttcatgtcacttccactaatgatctgatcctcaacataatatgactcttcatagcttgattagttcctcgactcaatgcaagtactctcttcttcaccttagccatggtacctcggttctcaagctttcgcttggccttcaccttcgcttagtatctcaaagctctttccttgctatcttcaccctatcaagccatcctcaagtcgcattatatcaa

SEQ ID NO: 59521 - DNA, 824 bp, Zea Mays
tattaaaaaacaattttctaactcatttattcatttaacacggcactagactgggcctcaaattcataaaaggccaggggctcctgcgcataagccacacagacacaggactaatgcgcagtggacggcgggttctaattcgtataaacagaggggttcaagtgtaaatcgcgcagccgaacgggtatggagctctgctggccgctggattagacgccaagcgcgcagattaaatcacgctgaagtaacagaatccgacccttggatcgatttcctacggcatagatttaaaatacccagacgcgttggtaaccatcggatcacagatccatggtcgcagttctattgggcaaagggcacgtgacgccaaatctgagccatcgatcaacagatggacggctcgaaccctttcttcctcccgggattccaccaaagcgacagggcgtggcggcgccagttcttccccccgacaccaggtccggccgactgcgccatgtccatctcccaccatgaccggctatctggtgcatgccacgacctggcaggagaactccggtcgctagccccgtcgaactcccaggttgcccagcccagcaccggcgcgatgacaccctcaacccgaaccccgatctcacaccacgcaaccctacagtcaagtggcccatacggtagccacccaaacacgaattgctccaccactacagcaatgtgcccaaccccggaagcatctacaagcagtgaacaaggtacacagaggaagcgatggctcaccaacggtgaaggctggtcgaggcgctgcgcgatccgaggtcgtatgaaaccgc

SEQ ID NO: 59522 - DNA, 1058 bp, Zea Mays
tgggtggtggcagatgcgtaggatctgcgccaccgagctcttcagagtgcctggcgttagctcttacaacaccttgcgggaggacgagctgggctgcctcctccgtgctgtcgccgcggccgcggccgaggggatgtcgacggatgtcgtgtggtggttaggtggcgatcgtccttgatgagcaggagcacgagcaggaaggcgagcaggagcgtgaagacgttttcatcccccgacaccgttgcccccgctctctggtcccggcatccttcgccttccgctccgccgccaccgagatatatgaggttgggaagaggtacatactgggggctcatgacgattgcggatccggccaaggatgacggtggtggttggggctcgcgacgattgcggatccggccaaggatgacgggggtgctgggggctcgcgacgattgcggatccggccaaggatgacaagggcgaatgacggctaggtagcgcgggttgattaaaagggaagcgagggtttttttacaaaatattgacgcacgacgaccatcaaaactggtgctttaagtatagtatagacttaacgatgtcttgattgttgattctgtataggacgaaattccgtgtgcccaaaccaatcagtggagcatggccgggcgattttttttcatcccctaaccctacatgactatatacatgaaccaaacatcaggttcttcaaaattccgcgtgtgcaactgcatcgatagagatgcgaaccaaagaaccggattgtgaacccaaacggagctcattttacgggttaattctgtgcacgcagatatacaatctctcaatctagtgcacactgtattttctcgaacaaagagcatgcagcagattatataatcggtaataaatcaaacgggacttggtgatgagttcattctccattgttgaaaatctcattctctagcagccccggtcctacgattttaaggactcctagcgaactcatcgtgcccgtcgaaaataacaatacatttatatcttgaagctaatatgattaccttaacgatgaatagaac

SEQ ID NO: 59523 - DNA, 297 bp, Zea Mays
aaagtgaccgacaagagggtgacgactctaaggaagatcgagaaacacaagatcatagtcgccaaggcctataacaaggaagccaaggctaagtcattccaggatggagatccagtttggaaaatagtcttgccattgaggagctagaatggaaatttggcaaatggtccccaagatgggaagggacttatagagttacacatgtagtatttggtaacaaatatatgttacagacattgcaaggtggtgagttgcctaaggcgctgaatggttgttcctgaagcaatatcatcttag

SEQ ID NO: 59524 - DNA, 552 bp, Zea Mays
gcgtattttgactgcaatggttacataaatcgtcatagcgatgtggtctggtcagtgtggtgttgtggtttgcgatttatccttgtacaattcgatgttaacaactgcatatcaatcgggctcgcagtgtttacgatcatatacacaacaaattatgatccatatggacatgacgtacaaccaacgttttatatcacgtacttggtgtggttcttgattaatgctttttgtaaactgtttacgacactttgcatagttctttacgcttaatatgaacacggcgtaaacaaactatccaactgatcgtgcactgactagtggaccccacagtcccgcaccgctcccccacaggccgaccgagctaatatggtcaacgttcgagacccacccgaccacaatcaattaactccgctcgggtccaccgaaaccctaaaaaaatcagctcctccccatcgccatcactcgctcttacgatcgccatcgacgaccgcccccaccgcttccacccaccgtaatctccatgcttcatcgattgaccgccgtcattctccc

SEQ ID NO: 59525 - DNA, 612 bp, Zea Mays
attaaataactttacccgtaatgaagtttgggagcttgttgagacaccaaagaatcaccactttattggtaccaaatgggtgtttcgaaacaagcataatgaggatgttttgtagtaagaaacaaggcaagactagtggcacaatgttatactcaagtagaaggattggatttcagtgagacatttgctcccatagcaagattataagctattcaaattctccttgttttatgcttgtgcccacaacatcaaactccatcaaatggatgtaaagagtgccttcttaaatggtgagattagagaactagtgtaagtggagcaacctcccagttttgaggaccccaacagacctaaccatgtgtgcaaactttctaaagctctctatcggcttaagcaagctccacacacttggtataaaaggcttagggatttcttgctttccaaagacttcaaaattgagaaggttggcactactctattcactaaaagaatttgtcaaatttatgttgatgatattatttttggtttaactaatgagtcatattgtgaggagtttggcaatatgatgtcaaagaaatttgaaatgtttatgataggggaattgaacttctt

SEQ ID NO: 59526 - DNA, 794 bp, Zea Mays
cacatgcccacaacatgtcttccaaaatctgatttaccctttccgtctggccatctgtttggggatggtatgctgagcttcgtattacgtgggtcccaagtgattcctgcaattgttcccaaaatcgtgccacaaatggtgctcctctgtgtgatactatagtcctgggtatcccatgcaaacgaactatctggtcaatgtagatctctacatacttctctgtcctgtgggtggtgtgtactggcaagaaatgagctgacttggtcaacctgtccacaataacccaaatggaatcatggtgccgagaggtattgggcaatcccacgataaagtccatgcaaatgtcctcccatttccaagatggtatgggaaggggttgcaaagggcatgctgccttcaaatgactagctttgatcctctggcaggtgtcacactcggatatgtacttggcaatttccctcttcattctggtccaccagtataatgatctgagatcatggtacatcttgttgctgcccgggtgcatggagaattttgaaaggtgagcttcatccagtatcttctttctgagctcagggtccttgggaacaaccaatcgatctccaaaccataaaattcccttgctgtcctgacggaagcacttgtatttctctgccttctgctcgatcatttccttgataacctgtacacccttgtcttcaatctgtgccctgactatttgctcttgtaatgtgggctccaccgagatataacttaattcacctgaagaaaccacttccaggttcatcttgcac

SEQ ID NO: 59527 - DNA, 373 bp, Zea Mays
ggaagtcgtagtcctgctctgaaaaaactcttgaaaactactacttcatcatccttcggcactgaggtggtttcttctccggcaaatcggacaagtttcttttcagcctctccaaagtagcccagcttcatcatcatgggcatatcagcttcggatatagtagatttcccaaaatctagatggctaggttttgttgggatcagaatactataatcttcttcatcctcttcaatatcttcttcagcagcggtctactcagtttcgacggcagaagtacgtctgtccgtggttccctctgccacaactagacctgattgtttcataatttcagaaattcgtgctgtctcggtaaccttagcttcttctccttcac

SEQ ID NO: 59528 - DNA, 698 bp, Zea Mays
gggacataaatacccaactacaaaaactagtcgttattgcacaacataatctgtgggcacaccggatcgatgctaagctggcaaactccaaatacaatgttctctaaaagattggttcggtggaccaccggatggttcggtgcccaattccagatcaagcacagcaaaggtctctctgatagaacggtccggtgtgccaccggactggtccggtgaccagcagagaccccaatccattttctaagtgtttttttgaattggtttttaatccaaacttcttgtggacctatgtgagatacctagcactagttttatgcatgggtacactaccacactacatgagccaagcctaggtcaagttactcatccaaaccccctttataatatgtctaaaaagaaataaaaggactatttctaatctaagtgtttgacaactccctcgacacttagaactagcagtccttgaccttttagacatacttccttagccatatctttgatttccattgttcggggtgttctgttaaagtccagcttcctgcattgtgccttaacttaccgtgtaatatgcaaaacatatgttagccacaagtggtcgaccaatgaattctattcttttaattaaggactctatgggcccatttatgcccagagcgagacaatagtcactaaaatccttagaggtaaactctctggtg

SEQ ID NO: 59529 - DNA, 368 bp, Zea Mays
tgatgggaaaaagatcaacatttgtaggcgtataatagcagattgcccatcagaccattactcatgagtaccttggcaacaacctacacacatttacaatttgtgcatccatgatggctccgttcattgtcatatctctaatctatgatttagccactcccttcatctgtttcttgatgcaccactgtgcccatgtgctccgtcgctccatctagacccaagctcctgaatccgccaatcaccacctacagcactcccccaccttctgcctcttgcctcccccttagcttctcttggagcacctgaagctccgcagccgcgccatgctacggcagatcgccaacacgagaaggccaacaacagatcgc

SEQ ID NO: 59530 - DNA, 464 bp, Zea Mays
tgatacaaaaatattgatgcaatggtcatacataagctgcattataaggaggcacgtggctgcacctcaaggagacaataaaaaaatggctataaaaactagttcatacataagctgtcaatataaaaaacaaatattgatgcaatggtcacagatttcatatcctaagatatggaaacaaaattcataacaatatttcctatttccactcaaggatgtggttgaaggacattcatcatgtgtcttcctctgcattggcatcctcatcttcaacgtcttcatcatctgaaacgtcggctacatcatatgtgtcacgtggctgcattttgacaaccaagtgtcatcctttgatcatattgtctttaacaaaaaagacttgagaagcttggctagctgatacaaacgactcatctattcgaaggaggcacttaaaattgacactaacaagtccatatgtatccttc

SEQ ID NO: 59531 - DNA, 341 bp, Zea Mays
gctgaagataataaggccaaagagtcacaggtggaaagagtgatagaaatgccagaaatcctgagcccactggcagcgatagatttgccaaagatgcatagagctcctgctgcaactcccaagagaagtaggatggctaacgtgttggatgctgtgatggagactacaaaggccttgagccctgctcctacgaagaaaatttttgaaactgccaaagcgcaatccgaagccaaaactgggcaagcagaagccaaagctataaaaactcaggctgaagtcgaaggtgagcctttagcgcccgccgcgacgaagactgccacacctgaagaaagaacggtagg

SEQ ID NO: 59532 - DNA, 276 bp, Zea Mays
ggggtatccacggatctcagccgcccgatccacttcctacggttcagattaggtttaggtttaaatgaagcggtatgcagtcctgatccttggatcagagatcgacggtctctactccatctaaccgagaccatcccgcatccatcggattctcgatctacggtcacggttggatgcagtcgaaacggtatgaggatctaatccaatccgtccaaaacgcatccaacggccaggcgtctttctcccctacccagccgcacagccggcggcgcgcga

SEQ ID NO: 59533 - DNA, 910 bp, Zea Mays
tccactagggatcactaattgagcccgaacgccgccctagagcttggtctacgggcacccgcggatttgaagctttcccgacccattcccaacgacattgtgcagtaacatacaaattgggagcacggtaagctttagcaacttaccaggactcaagaatggcagctaggaaggggtgtggagggataggatggtgggtcgatggaggggttgttcgcggcggcgcggagaactgatttgggggaaaatccgaattcgggcgctacggtggatgatcagaggcgagaatcggtgtgctgggcgcgtaacaagtaggcggaacagggggtgcctccaatttatatactccggctgagcttatcacgaattttggattgggatcgaggtcaacgcggcctggatatttttacggtggcccgctcaccgtggcgcatgagagggaattggttcagggatgataaccggttgcttgccatgatctttatgacatggaggatagatcgctgtgtgtcacggtcgacgaaacggtgagctccagtgatgccaacactactaaccgcggcgggtaaggggaatacacgatggccggaccgaccagtgattgggttcacccctccccggatcttttcaccccttcccgacgttatctacttctcacacggcatgaatctcctaggcgagcatgaattgcggcgagagaccaccggcgtcaggttcacgacactggagatctttccatctactttaccatggtgatcttcttcagtccatctaaccgagcaacttgtagagcctcattctcaaatttttgtgtgacaacccactgacctgcatgtatcaaagttgttgtccaatgtaccagttgtaacgttgttacaaagaccttgatcaaacatccactaaatccccc

SEQ ID NO: 59534 - DNA, 499 bp, Zea Mays
ctctacatgtacacatggttatcaatattgctacatgctagctagccatttaagaaccatccaactatgcttatgccttggtccaagccttcacatccatccttcacctctattagtcctttagcaaaaactcacttgaccttctccattattgtcaaatgtctcaacgctcaacactagcacatcacaagacaagagacatgttacatacataatacacacaatgattagttaatgctaaatcaaagcatgatcatctcttagcagcatacatgttcacaatctctggcaattccaagactgagatgaatcaaaagaaaaggataaactataactcatccaattgaccaaaagccaaaaacaagatatttggaattagcaggcttggcccccctaaggcatgggaaatggcttgatgcaactaaaaataagcaaagtgtggttcctaaagatatcagtaaaaactcgacacaagcaagcaaaaatagctagtcctcaa

SEQ ID NO: 59535 - DNA, 562 bp, Zea Mays
cactcaccgaaagatcgggcactccagctctatcaagtggtatcagatttctaggttgatcggtgagtttatcgattgttttttctcctacagtccacaaaaccacataaaaatttaggttagaccctatcccagcacccttttgagcctcgcactttctttcaataatctgcattgttgaatttgtgtgctttcacgtcattagttgctggttgcattgtgtaattccaccattcaaaccctagcgcgccgccaccatattctgtttgatcacgccacaaaccgagtcaacgccgcttccttatttttctccttcggttacgtcaaaaaaaaacagaaaaaaacacaaaccgagtcaacgccgcttccttgtttttctccttcggttacgtaaaaaaacagaaacaaaaaaaagaaaatgaaggagaaaggatacaaagcggttgtgtcatctcggtcgttttaaacatacctttcttaaaccaggcataacttttcgctcggttgttcaaaaaatctgaaatttttataggagcttgttgacaccattctgaggccggcc

SEQ ID NO: 59536 - DNA, 609 bp, Zea Mays
aggggaggctttcaaaagatgcgttcaaggtaagcatttaggtagaagacatcaatatcgcaaggttcaaaggcgataacaaacaagggtatatgaggaaagatgaaggcattagagagccagtggtatgagtacaacaaagaatgaagttgcacccaagcttacacgcggtaaagaagaggatatagccaagagtgaggtaagtaaaacaccgctctcaaactgggataggatattggagattttagagaacgaacatagtgtaattaccaaggtaagatcgagagatgagaaaggtaaaggtaatacccaactagagcacaacataggatagagataaaaaactcgcaagcgacaaagaagaggatacgaccatgggaaaagtaggtaaagtacaatgctcagattgagatagaaaagaggatattttaaaaactggtataagataaacatcaaggtaagatatagaggtgataaggataaaggtgataatggtgaaaaacataatccatggacagagttaaggcaagagtcgcaaagtgacgaagtggagaaaacaaacaaggataagataagtgaggttccgacagaagagttgaagtaaataat

SEQ ID NO: 59537 - DNA, 518 bp, Zea Mays
aagagatataggagcatcttggcgatgagctacaaaaggcgagaggtcgagcgatcgaggcccaagcttgcgtcgaagcaacccaaagggaccgcaacaagctagatgagcgacgaagaaggatcagggtgtcgccgcccatgattgccttgagtgcttgagagccacaacatgtctctaagcatcgggactgaggagtgaagtcgttgagatccaaattgcgattatgaaggggggctcgtcaaatcgataatgaggagagattgctcgctcgtctcaaaggtagattccctactccttatatattgtagggtcaggctctgatggtttgtcccttctattttttattagatatgttcgagaagctttctacgcctggagggaaccttgttgaagtgcaacattgcctggaagagcttgaagaggagctccaacgtgtgtcaagggcggtggatgcacaggggtagtttgggccgtcatgattgttcggggcggagcccctacttgctcgcttcgag

SEQ ID NO: 59538 - DNA, 681 bp, Zea Mays
tcttgatcataccaagttgtgtaatgtggattggggattatggcagcactgttagccgacgaggtggccatcgatttgggtgggatggggtgtgttcaatcaagaaatcttatgagcttggtgatgtgaagatatgggagcaattgatcttgccatagaagataattcttctttgtgagctgaccggtgataacacgttgcaatgacagagggacgaagagaagaacctaagtagttgcctgcatggtagatgatatggtggtggaggaggaggaggtcagggaagctgtggacaccgttagagatatcaccttggctttggtaccatgtgagattgaatgtgccacgccctcaagggctgcaacacctgttgtttatatataaatgaagacaatatcatgtacataatagatgagtagatgcagttgtagttgaggaaaaatagaacaaatttggaacatatcccatctgtatgctaacaactatcaggagattagtttcctatatttatgggataacctagcatatctaacatgcaatatgggcaatactactaccccatgttctaatgatgacttttgtattacagtcaactatagttgacaaaaagttggaggaagaattgattgcgtagaagcacaatattgatgctatactcctagaaaattggttatctaggtt

SEQ ID NO: 59539 - DNA, 383 bp, Zea Mays
tagactgcttgggtctgcatcaggaacatttgctcaacggtcatcgggggtggcggtggcaactgttgctgctgggctgcctcctcctggggtgcctgctgctccggctgagcacgccatgcacctcgacacctgttctcagacatctatagaaagcacacacacatcagatctgactctgcagtctttcagcataagaaaagatatatggaaatcttcatagcactgaacaattgatcatcttcactgacagcttctcagataaagagggaagtggaaataaagggattacccaactaaacaactaactttattaatagcgacaccaagtgttagaggatacccacaccttggtgacaatcattacaaagatccaacttcat

SEQ ID NO: 59540 - DNA, 382 bp, Zea Mays
agacaggtaagttttggcacggatgaggtggagagtggacaagaatctccgttgtggagtctgcctaccagtaccaggcaaagtaatgcatgcgcgcggacaggatggacggtcgaagtggcctccctgcctccaccccgacgacgacgcatgggctccgtccccttcgcttgcttcctgctccagctagctccatcgcctagtgctccgctccgccgcacaggaacggaacggaacggaccgaaccacttggtcgcatcccgatgcgttgccgtctgccggtgtccatcgtgtcggtttcacctctgcactagcataaattccttgacaccaacagcgagcgacatcatcggctcagccctacaagtcacgagtgttctga

SEQ ID NO: 59541 - DNA, 356 bp, Zea Mays
cacggcctttcggtctcacgagtccaatcttcacactggtaggtgcacgaaacgcaaaccctcgctggaccgtgacgtcgcaaccgatcgcggtgcgcgtctggcatcgcatgagtgagatcggccacgtttccggcatctcgtgctgttggcacacctcaccttgctatcacctcagcatcttccagctctaccgattttggaccacccccgagatttcgtcccgtttcctcagctaccacttcctgtgaaaatgtcagcattccgaacgccgacgttggtgcacatgaagcgagatcagaaaccagcgtccagggtgatctggactgaattctgccaaagacgcaataatacaa

SEQ ID NO: 59542 - DNA, 583 bp, Zea Mays
cttggaatcgctcatcgtcgacctcgggccgccgcggaatcgttgggcgccgtgggcagagctcggctcgccacctccgccagtaagaaccaccgccctgtatgcgattcgaatttctctacgtgtaggaccgattggatttaagtttgggggccggaatgatgtgcagccgtttctccgaccatggcgccgccgtgtctgcgttgctccgtcacggggccgagtgggggtgtgttggggagaatcgtcccgttgctagcgaatcccgaccgtccgatctccgtgggcggccaggattagaaggtagcttaccccttcagaaggagagccctgggccgttgatctgtcaaggtacgccccggatcagtggtggataacatcacttcatttaattaaatcagagccatcgaatcccaatccaacgtatagcatctcataccggttcgtaaaccgcgttatctaatcgtggccctcgggaatgagatccaacggccgtgatcccgcgataccccttcgcgggcgcagattaacacaaaggcccctgagttttagagaaatgaacccgccatcctttacactgttc

SEQ ID NO: 59543 - DNA, 380 bp, Zea Mays
ggtttatggttgcacaagatctaatttagactaatttttagctagctggttattacccttgtatcatacatgtccttgcacatcatgggataagctagcataagttgagggaatttgttgacttcctagctgttgtcgtttttcctaaaactttacatgcttgcacaaatcaaagtcgtgttgcggcataggttagctgactcatacttactaaaaaggcaatgttaatatacaatatattagcattgcagtcttatgtaggtaagagtcgactaacctgggccacgacatgacgttgaaaggggcagggttaggtgacatctccggctgagaaccagggtttgttggtttgccaaacttgtcgaccgtcgtggacaggt

SEQ ID NO: 59544 - DNA, 1159 bp, Zea Mays
catcatatcaccatcagttggctcggacagcatatcctcaggaacgacatcctcgagagcctgatcaaaattggctatggataattcttgcagaccaacaagagcagacaaagctggagaaggaatatcgctactccccccactgactctgtaacgccgactgttcttccaaattaaggggacttcctcttcttcttcctcgtcctcgtcaaaaatacggacaataaacggcacagggtcacacccattgggatcagctctggtagggtcacactcactgggatcagctctagcagggtcacacccattaggatcagcatcagcagggccatacccattgggttcagcctaagcaggaccacaccgattgggatcagcatcagcagggccacacccattgggatcagctccagtaaagagttccaccggtacttcttcagcagcaggagcagaagggacaacatcctggtccaaacacgacactcgccgaagccgtctctttttctttttcttcccctcggcaggtgcagttggatgactggcctggtggaggcatttcgggcaagtaccatcaagcttttgagtgttcacggttttttcaggctctgggatagtcgcaacagccattgtttcaacagggaccgagtcagatgaatcctcagccaacatgtccagcatagcacttatctctgcatcacctagacttataggcatctcaaagtgaacttgcttttcatcattgggaagatcaccaagtgaagcaaccagaacctcaacttcttcgagagagggtcgcactctaagacccaaaccactgtcactagtaggaggattggacacaaaatcgaaaaaggacttggaaggtggcaaattccaagcagaatatgcaacaggagcaccaatatttgatactttgcctctaaggatcatttccagttggctcaccaaatccacagcaggaatcctcttgttggtaacccaggttgagtcggtgacaccactatacaaataagccaggtacgctctgtccttcagcggctgaatattcttaaaaacatagtctgcaaccacagcttcagcagtcagacctctctccttcaacaaacaaatctcagcaagcaaaaccttggcttctgttgtctccaagtctgtgggggac

SEQ ID NO: 59545 - DNA, 291 bp, Zea Mays
tgattagcgaggttcttcctatgggtcataagatgcccaaagacatgtaccagtccaaggaattgcttgaaggtcttgatatggagtatgagaagattgatgtttgttaggacaactatatgcttttttggaaggaacatggtagagaacagaaatgcttaaaatgtgggaagtcgaggtacgtggaggttgtaaatgaagatggggagaaggtggtgacaaaggttacacataaacaagttcggtacatgcctctcactcctagagtgaaacctttgtttctctcgagga

SEQ ID NO: 59546 - DNA, 2180 bp, Zea Mays
  misc_feature (1837)..(1936): n is a, c, g, or t
cattaccattcgttgccatccaacaaactcaatcgataaatcaatctcatccacaaagatgaccctatctataaacggaactcattcaccattcatttacctcgccaacaaccctaattaggttgttggtttagattttttttgggtcagtttggtcattatcatccgatgccatcccacaaactcaatctcgataaactgatcccatcaacaatgctgaccctatccataaaccaaatgcattcacccatcattttcaatctcatcatctcgtccttatcagattagtttttgtccagtttgatattttgagcataaatctcgcatacaaactcaaaatttagtgttcttgtactttctggaaatcttagaaaattatataaaacttttttatttatgagatttccagaaaccgtcagtttcaaggagttattgttattgaaagtaaatttgtttgtgatcctaaaattttcggaccaatctgtatttcttggtcaatatatcccaattcctttatccaaaataggcgatccatatatctaaaagaacaggtactcctttgtaatcatacccacgctttaagtgttgtcacatcgaccactattttccaagagcggggtaagacgcttcataatttgtgttccaccaccacccctaagagtagttgtagtgtttatactgtttgtttgttgcctttgtttctgttttgtactaacaatgataggacaaaagacccaaacggacaaggataagggccctaagcctactaatggtgagtgtgcctcccatctagaattgaaggagatgatgcacacattgactaaagcttttgagaatcacaccattgatgttgatttgtctccctcaggttctatatatccatctttctcttcttttgatgcaaatattgcaaatgaatatactgaatgggaagtatgaatggataagatttttgcacgacgtcgtatttgtgataggcaaaaaattaaaattgaggctagtactttaacgaatgatgcattagtttggtggaataatttgcatgactatgagaaaccacgaacttggactgatgtgaaagtactaatgagacaaaaaaatttgtttctatggatgatactaaaaataatttgagtaattctactgatatcatgcctttagataaatctgagttgcctttattataagaggattgtcttgttgttccttgtgataaagaagagttgtgtgatgataatactattatttctatgccacagctagagaacaaacttgatgttgttgcttctgatcctattaattgtgtcaaaattagaacattcaatcctataactagtgtgtatgatgagctgaaattgttatcttctttaaatactttgggctatattgaatttgatgttctatgtaatctaaataatttagaggagaaactttcttttagtgctcatttgcaatggttatctaaacatacatatcatggtgtagaaagatataattggaaaggagaagatatggtacattgagtatatatttgtttaaatatgaaatctccttttgtcatgaaacaatatgatcaattagagggttgtgttaaagctaaccatatctagttttacttgtccttctttatatgttttacaacaatagggtcgacttcaaggaggggagcaagatcggacgacatcaagcactacatcaacaacttttgcaggcaccaacgactttgagtcgaggatgaatcaaaaccaagaaggagagaacaatgagtacattgatgtaaattatatggtcaaggcacaatcaatcatagactccacgtacgaatctctagattcgnnnnnnnnnnnnnnnnnnnnnnnnnnnnnnnnnnnnnnnnnnnnnnnnnnnnnnnnnnnnnnnnnnnnnnnnnnnnnnnnnnnnnnnnnnnnnnnnnnnnttggtcattaccattcgttgccatccaacaaactcaatcgataaatcaatctcatccacaaagatgaccctatctataaacggaactcattcaccattcatttacctcgccaacaaccctaattaggttgttggtttagattttttttgggtcagtttggtcattatcatccgatgccatcccacaaactcaatctcgataaaccgatcccatcaacaatgctgaccctatccataaaccaaat

SEQ ID NO: 59547 - DNA, 573 bp, Zea Mays
gaaatcaataagtcttgaatgccaacttttcaaaagtaataaaattgcttagaaaccagtgttggatcgtcaggactagaacgctagacctaggatgaaaggccttaagagtagggggaaataggtggctaaataagtaggccatataggccagtcttagaatagtagggatgcccttgaagcacccctctgatcggtgagaagacgttctttccagcatgcatgcattataaaacatgaagaaattagaaactaaggaaaagtgcatctaattatgaacttaacaagcattgttaataatggataatgaaaagggttggaatagataaatttaatttaacccacctccttttaacaacccgggaacacgtttctccttaccactaccatgacacttacatctaacccttttcacagatgacttcacccgcccccatcaatggaggagacactcgtttcagttttgactacctttcccacgagggttttccctccatcttgtgggaggtgctctgctccgctggttaccctacacccctctgtatacggtgcaactatacgaggagcatcggg

SEQ ID NO: 59548 - DNA, 1022 bp, Zea Mays
ggtatcatctttggcccttgagtaggcaccaaacaactcatcgctagttgcttcgatggcatccagccaatcatcattcggctcatcgaattggctcctgtacttgaaggtgtacttcagatagaccagaccacctttgatggacccaacagcagtttccttcggcatctcccacccacttgagagcgaccacacactataagcaatatgctcttggactaagtccctagtgcctatgtaggttcatactgtgttataagcagcttagcacgcttgaatttcgtttccaagggcaagagatggtcttctaatgccgaagtgagaccatatgggacattggataatccccttgatatcttctctctcaaccaggtcattctttacatagaaccattcttgcatcaaggctcctggccatctcttctggaatgttggcactggattgcttacttcataatgggttacgaagccataacaactgaaattgttgtggtattgctcttttccaacatccttcatctcataagttaattcatgcaagttgcagaaacatttcgcattcggctcttgtccttgactcctcatggcccaaatataaacccctattctgatgatggctttaggggtaagctgatgatggtagactttgaaggttttcaacacttcaactagcacattatccaaagggaattgaagccccgctttcataaaacttctgtagaaaactacctcgtcagcttcgggcagagggacattactctctcccccagcccgcacaatagaaatgtcacaaaaataccttcccctcatggcatcaatctatccttatttgattgtcgactttccgaaaacaacatggcttggcctccagggccgattttcagcatcctcggtttcactctcagcatcaaagtcttcactatccctggaatcctcagatattccagctaatgtttcatgtgcaattttttagcattagtcctctccacagcttcgtaaaactcaaacaacaccgcgtccac

SEQ ID NO: 59549 - DNA, 698 bp, Zea Mays
ttcctaaattcctttagcacaataaggacacgtcaatctaccatgcacgctccatccagagaaaataccatacgccataaaatcatgaaccgagaacagatatgcaacacgaagattgaatttctgcttcttgaagcagtcataggcttccacaccttgccgtagcttctttaactcttcaatcagtggttcaagcatcacattgaggcgtacgctaggatgctcaggcccaggtataacaagacataggaacataaactcatatttcatacaaagagcaggttgaaggttgtacggtatggcaatgacaggccaacatgaatacgacgcaacggtcatattgaacgacgtgaaaccatcagttgccaagccgatacgaacgtttcttgcatcgctggcaaaatctggatcaaatttgtcaagagccttccatgcatcaccatctgacgggtgcaccattaacccatcttgtctgtccgtacaatctttatgccacctcatgtgcatagcggtcttcctcgagagaaacaaacatttcactctaggagtgagaggcatgtaccgaagctgtttatgtgcaacctttgtcaccaccttctccccatcttcatttacaagctccacgtacctcgacttcccacattttaagcatttctattctctgtcatgttccttccaaaaaagcatacagttgtctt

SEQ ID NO: 59550 - DNA, 528 bp, Zea Mays
ccatagatcatttggtcgtcatcgtcgcatcataccactcgtcggtggtgatgaaatgcctatcactgtcaaattggaccactaatcaatgttgaagcaatcatcaacaccgccggcgtaaagtatgatgtggcaaagatctaaagatcattaccacttagtcattcaatgatagattgtactgtgaagcaatgatgaccataacatatacacaaatggatgattcttcaacgcgattgcgatcatgacatatgaaaggatcaatatgtacatgaattgggctaatctaaaatttcttgcaacaattaaatcctaccaaatatcccacctcacctcttatacttaatattgttttctattcttcacataaaagttttgcacccaaagttacaactctattctagcatggaaattttaataatgtaaatacaataagataattgtatgaaagtaaatgctcaatgtaaaaaaggttagaaacaagacaacattttcttgaggtgctagagagttgacactcctcagtag

SEQ ID NO: 59551 - DNA, 501 bp, Zea Mays
ggtcttaaagccacgggtgagcacgaccgaggggtggctctgacatgcgctcggggtgtgcgtgggtgagcgctagtgcgcgctctagcatctgggcacggtgttgagcacgaggcagtgcagagagaggtcatgttcaagcgcggattggctccaaatctttgagattatggccatgatcccgttgagagatctcttcccctgacattcctttgtcgtttgtgtgtggaggttatgggtttcgctgactggatcaagagatatggaggggtgaagttgggtctgtctcactgctgaactccgagagaagatctcgggtttgacgtgtctagggcacgcatcccgatgccatcttcacacacattgcagaggggttagtttagaacaaaattgtcaatgggggcttaaggatttgagctagggtcaaggtgaacgcgctcaagctctaggtgaaggctgaaattcagaaatctgaatttcagattccccctagggagcttt

SEQ ID NO: 59552 - DNA, 507 bp, Zea Mays
gttgccgggtatgggttacccgtcaagtaacaatacccactcgggtacgggtatgggtaaacatttctacccgcaactgggtatgggtattgtgtcgggtacatttttttgtcgcgggtgcgggtatggaaagacaatacccggcgggtacgtacccgttgccatctctaatatggacgtggcccaatggtacaccttgctaggcaaaccgtcgaaggcccattagaaagcccatggaagatttccatgcttataaagacccatgggatatctatttcccacacctgctgactccaagccacaaggcactgccagaaggacaactcctcgagcatcgactcccactatgcgagctaaactagccatgctcgttccttttgtccatgtaggcctctccccatgggccaacgactgcaaaactggcccatgggctgctaaccatggaacttcgcttgctgctcaagcaggccaaccatcacccacctttgacatcaagcctccataggc

SEQ ID NO: 59553 - DNA, 409 bp, Zea Mays
caaccgtagaaagtgggtactcatgcacacagatcattagcgcaagttcttttctagcaactacttgatcaaaaacatacttctcaaccgcagctcctcccttctcattttttcccaacttcaatattgattgctttaggcctttttgacactgcttagattgacaagttttaagatgactacacaagtgagttgtgccagatttactatctccaacaaaatgctttttacaccaattgcatttagcttttaatttgcctcctactgtcacttgttcaaactctatccatacatcagatttgagctttcttttgcttccaacaaattacattatcatcatccccagctacaaccacattatatatctatacctccatctataggtgttggagtaccaccaccagcagca

SEQ ID NO: 59554 - DNA, 597 bp, Zea Mays
cccacatccagtacactgccagctgaagctcgaccagtaggacctacattctgggtgacatcaatcaacatattttttcgcctgtatcaacctgttctctgaccgacattcttgctggtattgctctttgcttattactgcaacctgattgttcggccaatgtgtgatgctcccccctatagtggccatccatcataacaccgggaccaactatgcgttgatttgcaatcatttcagccctgcgttcaccctcccagctagcaaagttattcatttctcgtgcagcccctacgtcaagcctcatgcgcttgctgctcaccccttgatcaccaccacttcgcagcatgctcccttgtgatttgtttgtcttagcagcagctacgcgtccatgccctatgcttggcttagctgccatttcctcacccttctttgtgtaaatcttagtgacaaccacctgaccattctgctttgccacctctgcctgggaaccttctgtatcatttaatatgtcgcactccactgttcccactatgacttttgagcatcttttgctcagtggctcatctcgcccatcaacaataacacccccttcttctg

SEQ ID NO: 59555 - DNA, 273 bp, Zea Mays
cggcgattggcggcggtctagttcaattaggtgggtcggcgagcatcgcagacacatgagaatacttaaacgggtaagcagaagacatggactgacctgaatcgcgttggccgcggggaggctaaactgcgcagtgttcttgagcagattgggggaaatccaaaattcgagttctctggtggggggtttgggatgcaggtggatgcagtagctgcgtgaatacttgatggagttgaggacacgctcaatttatagaccccgaggtcggtagct

SEQ ID NO: 59556 - DNA, 419 bp, Zea Mays
cagccatcgacgcctcggggtgtacgtcgtcgtgaggatgacaataaggggtttgggaggatcgccgcgacctggagaacatgtttgaagcatcagcatccatgaagagtctcccagcgacgaggaattgctcgttggagtaacaacgctgtcgcgtggcatggacaaggtgcctcgtcacatgattctcggtgaggaactcttacattgattcacttttacctcctcgtcatgtagggctaggtggagtaggaaccggagcgccaagatcagtggtgggtggctcgccggcgtgtgcgccggcgtgggaaaacaacgtcgccgttcagtgccatcggaaggaggacgaagcactgtgttcgttgatcttgtatgggacgaccatgattagatgtgggaaacccctttgatacattaaa

SEQ ID NO: 59557 - DNA, 276 bp, Zea Mays
gttctgccccttgtggtgacttcggtgtggtcgaatgccgaagaccgttgatgcggtctttatcgacatattgtgtcttagtttttgtggggggtttttgtgggtatattacatggctccgccacattaaaaacctcaccccgggaggaaaagattacgggccggaatgatactgtttggtgaattacaagggtgtgttagccctgaggattcaaacaaaaaatttgcggagattatcgatattccaggaatgctctaggtcctcgccggatggcg

SEQ ID NO: 59558 - DNA, 518 bp, Zea Mays
ggattttattattctggatttgattctatccgtccgatctagatcaacggatcaggccgaatgctacggaagggtatgcaatcatctaatctcagcccttgaattctagatctctagcccacggttcttcttctctccgccaaatccacacgacggctgagcactgctcacccacggtggagcatcgccggcgaacgcgcaatccgacgcccggacgcccctaacctaaaattggccggtgctaaacctagacggggtgatggcgagcacggaagggagattcttacccgcgattgaaggagtagcgagctcgtccacggttcggggcgggtctgcgacatgaacagagcgttgttgagggattcccgacgctctggtgacccacatcgttcaggaggacaacgcataggttcccggtgcccagaccatcatcccccacatgtcgtcgaggtcggggcggtggtccaatcggcgttcaaccgcggcggacccaagactggaccggcggccatggtgag

SEQ ID NO: 59559 - DNA, 430 bp, Zea Mays
caaacaacttcaagcacaacgcaacaagtacttcaacaacaaggaggaaaacaaagaaagcaaaacacgtcacaaatgaacttgacgtgagcagaacaacaacaaccaaattcctaaggacctaatcatcaaacacacatactcgtcggctagcctaaaccaatgtaaaccacaccacccccatcgtagcaacgacttacaattgtctccctccattgcacataacaaggggaggaatccttgaagggatgagggaccacccaactgagagtagattaagagttagggagcatgccaatcgaaatttgccgaagaacaaccatctctcttgaagttgatgatgagcaccccataaacagcacatcaaagcaccataaaccacaatctgatgtccttaaaggggaggaatcctctaagggctagtttcgaa

SEQ ID NO: 59560 - DNA, 870 bp, Zea Mays
agtaccctcgggggctgggcagtggcttgcgtttcccacccgagccgagtcatccccggcaacatcctcgggggctgggcaagtgtcaacaccatccttgaggaccaagttctccgcagtagccgcctctaaggctgaaggtccctcagttacttccataagaccaagacgatccaagtcagtctcctgaccctcaagaccgcgctctaaggtcgatgaggcgcgggatgaccccaacccagcgttgaacacatcagcacaaacctccgtcacaccatcatccgctggctctgaaaacagatcttctagaaccatatcttcaagagtctgatcaaagtttgccagggacaattcttgtagaccaataagggcagacagagcaggagaaggaactccactacttcccccattggcgacatactgccgactgttcttccgagtcaaagggacctcatcttcttcctccccgtcgttttcatcagcaacacagacaacacacccattggggtcagcagcagatggagcacacccattggggtcagcagcagatggtgcacccccattggggtcagcagcaaatggaacacccccattgggatcagcgtcagtaaactcaggcacgggaacttcctcagtagcaggaaccgaaggaccagcatcccgatccaaactagatactcgccgaagacatctcttttactttttctgctcatcagcaggagaatcaagttgattggctcggcaagggcgtctcgggcgaacactgacaggcttctgaatatccaaggttataccagcttctgggagaggtgccaccaccaatgtcccagcaagagcagcatcagaagagtcctcagccagcatatcgag

SEQ ID NO: 59561 - DNA, 410 bp, Zea Mays
gggggtggggtttgtacttcctggtggtgttggtatgtgtggtgcggtggatgcggagcggggccgtggatgtatggcagagggggttgctgatatgtgtgcgcgacaactctagggttgtcggctggttgcgctcgtgccatcctatctctggtggccttcgtctctgggtagtctctggtttggtgggcgcagtcttcgccgtggaacaggcagtaaaatcggcgcggctgctgcgcacgtccccggccccaaccacgagttccgttcctgcggccctggggggatattcctggcggcgaggggcctcgccagcggggtgctggttggcgatgttgtgcacttgctgctcattgcggccgtcccgaccggagtctggctacgaaggcctcgtccacgtgcggctggac

SEQ ID NO: 59562 - DNA, 387 bp, Zea Mays
tagtcccgcctgagccaaagaaaggaagttgttatcagatggctgttgatagcagtgaagcagatccacttgagattatcaaggttgtgtccgagttcccagatgtgtttccaaaggacttaccaggtatgccacctgagcgaaaagttgagtttgccatcgagcttcttcctggaactgcccccatctttaagagagcttacagagtatctggacctgagttgattgagcttaagaagcagatcgatgagctgtcagagaaaggttacatctggccaagcgcctcgccttgggccgcccctgtcttattcgtggagaagaaagatggcaccagaaggatgtgtatcgattatcgagctctgaatgaggtcacgatcaagaacaagt

SEQ ID NO: 59563 - DNA, 330 bp, Zea Mays
gttgcctaggagcttcttcattaccgagtagacagctaaatctcaactgccattctggaaaatttgagggagcaaccaaatttctgacgatggaattcggttgacagtgttgttggagtgtcatgaggtctctgtttcctaagtataactaatgttgccacatggacaatgtggttcagttccttggttgccatccactgagaatttagtacgaatttgttcagaataaagataggtagttacattaaagcttccctctaacttcattttttaatgctaatgcccccgcaacctttgaattttagaacaatggagttctgagatcattag

SEQ ID NO: 59564 - DNA, 532 bp, Zea Mays
cggctaacgatacaagcatgcggtggcagaggcatggcaaggaagttcttatacctagatgcgcgaggggaaaaagaagtccgcgtgccagatccccggcgagatccacgcgcgcgataatggtggggcggttacgaccgagctcgaagcggagctgattccaggtccccacccgccagccttagatcagagaagcgcgacgctacagaggctggttggtggccccgcggagctcggagtggccacgggcgaggatcggttgagctcacgccatgattccggggatgcgaccgcgagtctgttttaggggaaagggatgaatctgccaactgggacccgcacgggagtgagaagaacgtgactgacccaggggcccaccagtcagccagccaagcggtcccgccagtcggtgtcacgcgggcagcaggttttacgcccgcgcgcagtgaaggcaagtggagctgggccgaattggaggctgaggcccaaatagcctttttttcttttctttttttattctctatttcctttc

SEQ ID NO: 59565 - DNA, 648 bp, Zea Mays
cttcgggttaggatgtcgaggggtgacatattcaatgagagcacccctcaagcctattcagcatggaatcttcctcccgctgtaagttcactttcctcattctcaaattattggttactgacttatgcttctgtttatgctgatgatgttgtttctttcgtggagagccacatttcccagtttgtgttcgacccacctcgacgtggagaaggcagagccctcaggagaaagacacaaccgaccaaagaagtagaggcagtcgttgctgccaactagtgcctagttgatgtatagcaagtaacccatatatcgatcacacaacccgttgtaagttctaagattgaggctattctagatatacttgcaggggagtcctatgagactaaatatgttgttgtgggaggtgaagccccccatccatcaacaccttcttaactcggctatctctggtcatcgagttaacaagtagaaggtacttgcctgtgtgatcaaagctgagtcactggtcggcccgactaaaggtaatcggtgatctaaccacctgtatggcgttagtgaattgatcctggccactaggacctgcctgttggatagcttctgatgccttttgctttcttgagatccatagcccccaaaattgatgttgac

SEQ ID NO: 59566 - DNA, 796 bp, Zea Mays
cagagaacatatgtccctgttgaggagtccactatggacggtcttcttcaactgtttccctctctcaaacaatcacagagaccgatcaaggtttcttctcttttccggaggacaccaagtcccacaaggacctccacacaaagaattggagtctcttgctaacttgttacaatttgagaatgaggttgggaatgagaaatagactcaagaacaactacaaaatttgcaacaaccgaagaacacaaggcactaagtctctctaactcaaatcgatcgaatatgacacttgtgtggctttgaatgcttagaagatgatgaaatcaatgtatgggtgtttagtgtagctcttgtgtcttaaatgagctggttggggtgtatttatagccgcaaccacccccacatagttgttggagtgaagtggataaatctgcatagttctacatcgcaccggaccttgcaaagtgacggttcggtgacgcactggacccctgtcagtctgctatagcaaggagccattatgacaggggtaggtattctcaagggcactagaccagtccgacgtgccaacaaacctctgccacgtcagtctagccgttggagggaagttgacgattgaacttgtcagacagttcgatgcgccaacctccgaacaacccaaaaacaacttctctgtgcaaatggaccgacgaccaactggatgggtccgatgctccagccgccagagaccagtttcagagccctatgtgcacccggtttggtgcaccaccgaaccggtctgttgcgcctctgtatagac

SEQ ID NO: 59567 - DNA, 837 bp, Zea Mays
gagtggagtaacatgaaatagttttaggctattcatgagcacaggtttatgttggtggtaactgttcctgctactgtgtcacacaagacaacaactaagcgggacctagatagctagaatactgtgatatcctggccggagcgggttttggtatcttggtccacgttttaataggactgatagcgtagttatacaaacatgatttgccttttttggaagcctgcctcaaaagaaacctcaaaattaagtgtgctcaacttggagaagttataggatgggtgacgatccaggaagttctttctgggagaaaaatcacaatcaccggggttcgtatgactgagatattggtctggtaggtcttaggtgagctgaagacggatgggcaatgaaaaattgggggttcggacgaatgatgaatagttgttatgaacgaacgatgaatagttcatatgaacgaacgatgaatagttcatatgaacgaacgatgatcgatgaatagttcatatgaacgaacgatcggacaaacgaacgatcaaaattttggtagcatgatagatgaatagtaatttaatttggacgaacgatcgacgatcgaatgaacaaaatatgaacagttggacgaacgaacgaccgaacaatccttgtgcttgtgtgggagtgagagtgggtgagtgagttgctatgaaatgacttaggatggtatgagggagccccttgcccctttctttataggctaggtgggggattaggggagaagtcgaggattaatgagagataagcatgtgattagccagagataagtgaaatcagtttgtagagcttaatgtatgataccag

SEQ ID NO: 59568 - DNA, 512 bp, Zea Mays
tcccagtgaaaaccacctttggaggagccacccttgcccggatatatcttaaagaaatagtcagactccatggtatccctcggaagatagtgttagacagagagacacaatttacttcaaaattttggaagagccttcagcaagctatgggcaccaagttagatttcagcaccgcctatcaccccagtcagatggtcagacagaaagggtcaacaaggtcctcgaggatctattaagagcctgtgtgttgacgttcgatagaaactgggagtccagtttgtcgtatgccgaattctcatataacaacagccatcaggccagtatcaagatgtcaccgttcgaagcgttgtatggacgaaagtgccagacccccctaatgtggtccaacgtaggggaaaagacactggaaggacctgccttcattaaagaggccgaagagaaagttgccctgatccgcaaaagattacttgaagctcagagtcgacagaaaagttatgcagacaacatacgga

SEQ ID NO: 59569 - DNA, 414 bp, Zea Mays
tcgtgcatgtcaagttataaggagagaatttacctcctcggatgtgctcctgtgatggttttatcctgctatagatcccagatattattattttttatctaacccacccatacggtctaccacccttgctggtatgatgacatccgagttaggtagccaggcttgcagtttaggacccctctacgaaagttggggggtccggtagcctgggggctagttctgaagaatggttactcgtctcctggggtggtccggagctgtgttgccgcttagcttggtgccgcaccctaagcctacacgctccaccactctgtgaccagcatcctagtatctggaacaatagccctataggtccaggaacttggggtccggttctagagaatggacgcacgtcccctggggtggtccggagcc

SEQ ID NO: 59570 - DNA, 522 bp, Zea Mays
acatccatgcaaggcatcggtgcttttgttatgaaggccaaagcaccgggagaacaagccttaataagttaatgagaaccccattagaaccaattgaactcacccaagaggaggggagtccaaatagggtttagggttagactgcacatgcagatacaacatgtgcagatggtacatggaaaccactccaatgacacttcaccctctggtcgttacttatacctctcagctcagcaatataagccagtgaatatggctgcttgccagcggtatggcactacaaaagattttcactgcgccagaaaaactgcactgcactgcgggtgggagtagaaatgggcctgcacgttgggccacctgcattgcctacatctgcagaacacatgattcacgctcgagcacagcacacaccgaaaaggcgaaaacccttgacctcgtatttgggctacttgcgcacaccgagcacagcgggtttatttgtctaatgataatgtttaatcgttttcatcgtcatcgtcgtcc

SEQ ID NO: 59571 - DNA, 418 bp, Zea Mays
aaatgattctaccttatccttatgtatttatcttgttctaataggcatacatatcccactatacagtaacaaccatgatctagcctaaaataaatagatcctatctagttatacctatgatctagatcccacctaatataacatgatctaatccaaattgagatacttaaataagttagataatgttggtgataaaaattagaccctaattctataaacatatcttaccctaaattaataccttggactaactcgaccgtaaacaacaacctaacctacatcataggttgcctaatccagatatcccaaaagcaaagtaaaactctgttcaaacctacctacctcgtgtaccccggttatcctaactatatatccttagccatatgtccttaactcagatgacaactccaagaaataa

SEQ ID NO: 59572 - DNA, 1491 bp, Zea Mays
ggaaatcacaacaagattggccgaaaagacctcatcaacaaggatgatggaacacccctgacaaactgaacaactactaatggagccattagcagaactaaccaaaattgggtgacccaacctctgcaccgaaagaccagcacgcgacacaaaattctccgaaataaacgaatagctagctccagagtcaaaaagagcatgggccacaaacgaatcaactaaaatcgtacctttcaccacgtctccttgctctctgccatcggcagcgggtagcacataagtttcggaaatacccgcagaagaggaagctcccagagtgaaattaacagaagaactccactaagccgacgggtgaggcagacgcggagctccaaactgagacgacataggagtagtcggtgcaagagtaggcgtagccagatattgaggaaaaccctgcatcggcacgaacaagaagtcccaggcacatagaactgctgcggaggaagtggaactgaaaattgctgctcagcgcttgacatcatgttgacagtgccctgagaagaggaggaagtcactggctaccatctgagcttcccattgggattcctcctacacaccacatccttatggtcttgactgcagatagaacacctgccactccactagcactctgcacggcgatgcgcatcaccacaacggaaacacaccagccctagctcgggcttagggacagcccgaaacctctgagtacttcctcccgaagtacccaattcagaggttttgccacggtaggggtggtggcgctggtactgagacttgcccctcttgtgggctggacctccagtgttgcccctcctcgcgtcctggccacgaggctgatcaacacccgaagacttctgtgactccatggtgtactggtgttgcatctccacacccaatgcctgctccactgtagtacggaaatccaccaacggaaaggctccctgggcatgcctgatagaaggtttcaggccctgacggaactggctcgccttctccaactcattataagccacatgaggaacaaagcggaccatcttgttgaagcccacttcatactctgtgacagacttcttctcttgcttgtaggactgcagatcaatcttcattttctccaggaaggtgaccgggtagaacctcctctcaaactgcctgatgaaaacatcccaggacaggactcctggtgaagaggagtgagctgcctgcacgcctctccaccaaatctaagcctctcccttcagcagctgtgtgccaaagcgaacacgatccccaattccccaaacacaatctcgaagacattcatcttatcctccacgtaagttagccaatctgccgcctcgatcggagtaccactgccatcaaaagtgtccaacttcatggccatccactgcatcataggaagaccactgaaggcacctcagccccgcgacctgaagcagcacccgcgggaacagcgcccctaggcactcc

SEQ ID NO: 59573 - DNA, 774 bp, Zea Mays
cggcgatgtagatgggattatggcagcggcgcgagttctctgttgtggcggtaatccaacgaaggccaccccggcatgcgcgcagactggaggagggaacagggaggcctcggaattggggaaggaagcttgaggagttctctctattccggccattggacgaccaaaagggctgcgaccgcgcgtacatatacccaaggatagccaggggcctagccacgccgtgagttctgggcggacgcggagaatcgcaacaaacacgagagaaggggaaaatctgttcgcggcgataaggatgaagatgcagctggatgtgggtcccacgatggcagccgatgtatcacagacaaaccggtcccaccgaatggaaatgcaggcgcgacgtgattcttttccccctgggccgagcgcgagtgtattactaggccaggaccttgggtgggctgcgcgggtggaataggagataaatgggccggccagaaggggtagctgggccaagggagtggaaatcggcctaggtgtaggtttcttttcttttcttttcttttcttttaattctctttttattttagctttcattttcaatttaagtctaggttttgaaattcaagctccaatttagatgcaacaacaaaatattcctagcatgatgcaataatattttattattaatttattattttgaattcaaattcgaatctaggttcaggattcacattcatatgcacaattataacaacacttccgcatgcaaaatataattttatgttattt

SEQ ID NO: 59574 - DNA, 522 bp, Zea Mays
gtggtcgtgacactagcatgcgtagcgtagcgcatgcacatgcacggctcatggttcgtctgaatggatgaaccgctttttctcttgtagggaagcatcatcctgtttcatccggtgtctattctcgtagggaatcgccatcccatttcgctcagtatctatttttttagggaacgggcatcctatttcattgcgtcgagtgtgcaagcctgaaagaaatgcctattcttgttcgacttgtacttgcttcgatctgtatagatggtcttcagccttttgttagttgcgactttaatccacttggctcctactttttctagtaggtgtttttatctatatggattgcagctgaatattgcgaacagtcgccttacctaggttgtactctctatctcaaaaggaaagatgggagaagtcatacagtcaccgaaatgatagagctgaactcaggagtttctgaacaaagttcccaaacaagcggagctcagataggttgtttatctgctaagcggcaaagccata

SEQ ID NO: 59575 - DNA, 884 bp, Zea Mays
gcctttgacgaaattttaagtgaccaaggagacttctacgcattcgctggcgcactgggggcgacgtcaatcttagagaaagctagctgcgaacatgctaaggctatagttcagccaggatttgttttcttggcggatgacctcgaagacccttcggctgaagcttctgtgctaggcgggagattttactctgaggtgtggatgaagggcggccgtgagatagctgatgaagcgattagaaaaaatgaaaaagaatctcacgatgctcaagaagaagctaaatgagctaaagaagatgtcgagcgtgcaaggattgtaggtacctttactgaggtttagcttcggaatttgttttcagcttcggagttaataaacattttttatgatgtagctgaacttttacctccaccggagccatataaccccgaagctgacccggccatgaaggaagctgtcgacagactgctaaacgaagccgctgagaaagtgctgaaagaacactaaaactttgtatatttgagagcttaatgcttgtatataggtttcgtcttttgtaagaaccaaacatcatgtttttgtatgtatattaatgtaatgtatttcttttgatgcatgaaaccttcgtacgtaacttttttgagctattggcgaaaaaacgccttcccttcttatcatgcttcacgaagaaaaagattctcctatgtcactgctgacgaagattaacctcctgtgcgaaaatatatctgttgaaggcatatcttgtgctatagtatggtctttcataatccgaccaactttttcgaaggagcaacttttctttgtttctccacatctctttggtgatgcaaaatgatgtatgatgcgatgctatgcgatatgatatg

SEQ ID NO: 59576 - DNA, 388 bp, Zea Mays
tacacttcagatacatagaggatacccgttcataggtgatccctccaccggttctttgtcgtcaagtgaggccggtggccttcatcatgcgctgccgcagccctgtcgctatctcctggcgctaccatcgaggccttctaggcccgagtgtgcccttctacttctacgctagcaggcatgttccaacttacggttagcagtcgacgaacaatgggttgtcccaacatctactaaggttcggagttgaagagtcgctaaaaaacttgaaaccaaattgatggaatcggtatgttccagcatattcagattccgggaaaattcagctatggaagagaaaccaaattgtcgatttgactgaaacttaaattaagacaaaacgattgaaaca

SEQ ID NO: 59577 - DNA, 393 bp, Zea Mays
gaaggagcaattcatccaagtaaaggtgtgtaacctaaatctcctaatataatctatgcatagttatggcaatttcaattcaagtctgacccactagcaatttttatggttaatacctaaagatttttcactcaactactttggtcacatataaaattatatgatttataaacatgcaattttagtagatgtaaattatagtaaacatttaagagtgaatgatatatgaatctgttttgacaacaaatatattaccacaggttttataattaatatttaccatatttatggcaccgagtaagacatggatgaatctagttgacgagcgtcttagtactgaatgtttggatggcctgacttcaaaaaaaatctttatttagatggagtcgccaa

SEQ ID NO: 59578 - DNA, 539 bp, Zea Mays
ttgccggacagcaagtatcttcaagagcatgacaagctttaggagcatctccggtcttaccagtcttcagttcttctgttagaatacacctaatagaataaatactaaggacaacatcaaaaaaggagcatatattatgtcaagtgtaatattcccttctaataatacaactatttaagcccggattaaccattcaaagtagggaggcccaccggcattttcttcaaagatccttgtgattgcgatccatttgttgtcaggggcacacgtgctggtactgatggtgtcaccatcgtcgtcgtcattagcataacatactccaacctagacggagttgcggttggacggaccagctcgtacaaacactgctcgtacaaacattgttcggagtccatctgttgatgttagccactactaaatatccctgctatttttcggaatgacaactaccgattcagaggccctcaaatccaccataatttaatttaaattaaacagcgacaacagcatttgaactgctccacaacctgtattttttg

SEQ ID NO: 59579 - DNA, 444 bp, Zea Mays
gctattcattttgcgcttgcacatcaagccgcaaaagcacataagttcttttcataagaaccataagagaaagagagcttctcatttcctccaaattgaagaggtgaattaccatatcatgcaaaaaatgaaatgaacatatccaatgaacattggggataattaagtccattaggcgagttcatcaaactctattaaataattatccttcaaatggcttaaccattttctgatgttgtaatatgccgcaaaatatatcatatcattatatgttggagaacactaggtatcacataaagtgtaccaaataatttttgaaaattagtgtacacaacgtagataatctccatgtaatgaaacaatggagtagatctcccagtagtgggcaaaacatttgctgcctgaaagcatggtctctgggctgatatattcaaagaacatacc

SEQ ID NO: 59580 - DNA, 516 bp, Zea Mays
ctatttttaagcagcaaccagaagaacaccttgtgtttaggttggcatttagatttccacaaccaggaaaagagggggtgagtcggttggttgccgatcaagtgagagtaggccttctgagaggaaaacaaattggaagaggcaatgcagcgccatttatcattgtgatcatgcaactgaagatttgtcagaatgtcctgaagtgcaagaagctgctcaaacacttcgacagagaggggagtgtggaacatttcatttggtgaagccagccttgcttgattaatggtgatgtctctaagagaggcaaaagaccaaagctccgggaatcttacagatttgcgcagaccatcccaatgatcatgccacggaagtgtagtttttccatctccaatctccacccggtctaattccttaaatacgtcttggattttgagaatatctttccaccagaacgaaccaactggtttaactgaaggtaaagaattgctgtaatgagtggcccagataatgttaacc

SEQ ID NO: 59581 - DNA, 499 bp, Zea Mays
gcaggtcgggagatggcacacgggcaatcaaggtcactgaaatgacagaagaggtgagcacgtattagtcacatagtcataagtatatgaaatgtgaataaatacatacacaagagaaatatggcacaggaaacacaagatgagacgatcgagaagtcaaacgacgtgaaaatgacgtttgaacgataaatagtgccataggaggtttggaattcgaattgagacacaaaacgacatggaattgagccaaaacttcacgaataggtttatgagggtgaatatgagtgaagtgtgtgctaggtttgaatttaggcgaagaaaaagagatttgggcactcggctcggaaacgatcgcttgaaacgaggaatttggtgaaatttaagcctggaaactcggattggcgtgaaatttggcaaggatgttgctggaagtgttgtaaagatgcctgaaaaatttgggttcaattggagcatttttggctggtttgggcattttacc

SEQ ID NO: 59582 - DNA, 535 bp, Zea Mays
ttgaggacaagttgagtttcaaggagaggagaatgtcaagtatctagattggaatggcagctcatctacacaagatgcacatgagacgatagatgattgtttgctctgatgatcaaggactcactgaaacacaagcagcgaaggatggtgtagtcggaggaaagcatgcaagttcaagaggaggagcgcaacacaacacaacacatatttgggcctggatgggatgtgtaatgccctgctgacctgacctgtaatatcatagttaaagcatactacactgaacagagaatacacatcgaacaagagaacactaatccaattctgcgtctatctactccatttgcttctacttccccttccccatgacatcagcgacgaccgatcaatcccctacctgacgacgtcgctaacaagtatgcgtcgtaccatccgagcttgtttgagagataagggaatgaagaggattaaagcatctccaagtgtctttctaaataccactctttaaattatcatttggagggtcatttgcataaaa

SEQ ID NO: 59583 - DNA, 353 bp, Zea Mays
atttagggcagcaacctaaaagtccatgacattaggctgccgatgcgggaggaacaagaatttgttcacatttctaaggaacaggagttttgggtgacctccaacatgcataggtactataggtaccttaactctttgtctaggataaccgttctttcaaagggcggagaacgtccttgcggagagtcggattctccttcttctccttgctcccaacagccttgcccgcatcaacgtgtttgacatgatctaggaagagatccttcatgctttctggtctccactcaaagggtgtctccatgcaccctttatcatgaagatgatcgaagtagtcacccagactcgcttcgaga

SEQ ID NO: 59584 - DNA, 691 bp, Zea Mays
tgattatggccgcttaaaaatctcaacacatagcctctgtaacaagggcgtccaactaatgttcatgagcaggcatgtcgtccaaaaactattagcagacagtttatccaaatcataacacaaagaaataagtagcaacagacaatttctccaaacttcataacagataaaaatacgtagcaatagagagatggcattttcgtcacctttactacctaaatcataacagtgaagtaaatgtcgagcagcacaagctaaaaaaatcaaacaagataagaaacagttcgtcataaattattctttagaaaaaaaattgcttggaactgtacaagcactcctacaattagcaacctttgaagaattgtacaaattaacgtttacgtgtacccatgacaacatcacacattagacccttggaagaagacatagcatgcttccaaatattaggttgaatgtctgaataaaagaataaaatattattttctccaacaatacagcagcaagtcatcaatctatgaaaactaaaaacagcagcaaaacacagtaacaagaggctgtaacatgatatggttatttcctactttaagttgcactttagggtttaggaattgatgctgaagacaaagatgatgacgtgttgacttaacaaaaccagtggcataagcaccagtttattttatcttaatatgat

SEQ ID NO: 59585 - DNA, 823 bp, Zea Mays
aagaaatatgttgcaaagtgtccttgcaagctatggtgggtaaggataatgagaacaacatggtgataagtgcaactatgagcaaacagactttagtgatgttgattgactcaggaagttcatcaaatttcatcagtgctcacatggtgcatcagttggagttagtagaggtggtctgttctccagttaaggtgaaggtggctaatggagaaactatggtgtgtgatagaatggtaagaggagtggaatggtgctctcagggtttttcattttgtactgatatgagagtcttacccttgagtgcttttgatgtcattttgggctatgaatgacttaggcagtttagtccaatgcaatgtgactgggaccacaagatattggaattcatgcataagggagtcatggtgaaaatcaagggggatagttctcagcctcaaacttttatacaagatgtgtccgtattgcaagtgcataaatggctgaagggacatgaggtctgggcatttgtcgtgctagaagtagtgtaagatagagaggattgtgatcagaaggaggagattcaaagcttactgttggagtttgttgatccgtttgcagtaccgcaacaattaccaccctccaggcaatatgatcactacattcccttggttcctggtgcaatacctgtgaattctaggcccgacagatactcaccttttcataagaatgagatagagaagaaaataaaggctctcttagaagcaggacttattgtgcctagtgtaagtacctttgcttcaccagtactattggttaagaagaaggatggaacctggaggttttg

SEQ ID NO: 59586 - DNA, 663 bp, Zea Mays
attatccaactcatgacttagaattagctgttgtggtccatgcccttaaaatatggcgtcattatctgctgggaaatatctatcatatatatacagatcataaaagtttgaaatacatttttacccagtcagaaataaatatgaggcagaggagatggcttgagctgattaaggattatgaattagaaattcactatcacctaggcaaggccaacgtggtggcagatgcactaagtcgtaaggcttcctgccattgtcttacagtaaagacttctgacatcacattatgccaagaaatggagaaattaaacataggaatgattcagcatggaaccttaaaccaattgaagcttgagtcggttctcctgcaaaagattattgatgcacaaagaaatgataagggtatgaaacatattcatgagaaaataaaagccgttaaagcaaactgtttcagaaggaatgatcaaggcatagtatggtttaataaccgcatagttgtgcctaaagatgatgatgtccatcagcaaattttggatgaagcacatcttagtcgatattccatccatcctgaaagcactaagatgtatcatgatttaaagcaacattattggtggacaaaaatgaagattgaaattgcacgctatgtggcgaaatgtgacacct

SEQ ID NO: 59587 - DNA, 1023 bp, Zea Mays
tttcgacgtaccggctatgagtggaatggaactgcataacgcgacgcatgtgccggcgccgaagtggatggccgatcaagtgtgttcatgtgtttgatagcagctgttcaaagacataacgaatgtttggttggctatgcgaaagggaaagagagagattggctttaattaaggccatattcaacccaaagaacgcataatatcagtatagactttgtgaaactgcaaaacgttgggtaacggggcctcgacgtcaacaccatatatggctaaccggtcactgccacatctccgcgaaaaactaacagggtcgtatggaagggaggatgccactgccacatctccgcgaaaaaggaggcagcaagcgcagcaataggaccaatgagaaagcagcaagcacgcaacaccatatatggctaactggtcactgcgcactgcgctatgcgaaccacatagaaacacaacaacagtactgctagctagatgtgcaaaacccatcagtaaggaaggctaacactttacaatgatcttcctcaatgggttttgggtatttattgtgttctgcctttgtaagtaaagctccaatttgggtgtgctatattaacaaattttataagaaacaaacaacaagttctatggagttttgttcatttaaagtgaggactggtggaacgactacctcaaccaactgaagttgattgagcctaactgaaccgacaccttaataaaaatcacagttctgttttcagttctgtgttcaggtgttttggaccaaaggcacctgtacaagacaactcaggttgaacaggacaaccaaccgaaccaagagatttctgcagggatgctcttagtatctcaagaataggctatgacacggaagacgataattgggcagatatttctcctcagcaagtaaacaaactggatattctttctctaggtttgcctaggctaaccacaggtagaaatttgtgcatgctttatttgttatgctcttattcttctttagatatagatacccag

SEQ ID NO: 59588 - DNA, 399 bp, Zea Mays
cggaagggtattagatgtaaagattatggtggaagaaaaataaagagcctagatggtttgaaaagaagcgggttagctcgaatttttacttctttaattcttaatccttcaaattttataatgcatgcatgctgaaaaataacggctcctctccgaaataaagggtgctcccaaggcatcctttaaaaatctaagtactggcccacagggcctacttacttaggcacctatttctcccactatccctaaggcctttcgtcctaggtctagcgttctagtcctggcgattcttatcagtttctaagcaagttttagattttgaaaattggtatccatggtttattgttcttctctgtggtggtatttgctttgataccagctatggcggaaccgcccgaa

SEQ ID NO: 59589 - DNA, 480 bp, Zea Mays
gccagagtctgctcaaattgctttcgatgaactcaagaaggctatggcatccactcctgttctagctttgccaaattatgaagaaacttttgtggtggaaacagatgcatgtgacaagggcattggtgatgtactatcgcaaaagggacaccgagtggctttctatatcaaggcattaggggtttccaattgcaagttgtcaatctatgaaaaggagttcctggccattcttatggcagtggatagatggagatgttacctacagaggaaaccttttgtaattaaaactgaccacaaaagtctgactcacttgcaggaccaaactctggtcactgaattacaaaggaaggcgatggccaaactgtatggacttcagtttcagatccagtacaggaaaggggtcgagaacaaggctgctgatgcactatcgagggtggcacatcagttggagtttgctgctttgtctgtgtgtactccaat

SEQ ID NO: 59590 - DNA, 458 bp, Zea Mays
ttgggggcgggtgctgaggtattcttggggccattcaccgagttggagtaagcaagtcctgatgccttcaactgggggcagttgttcttgaagtgactggggtctccgcagtgccaacacgcattcgctggtggttggttgcttgcaaccgagggggcatgaaaggagctctgactctgctgactgaaccgtgacggagtgggtccagctggtctaatgaagcttggtctcttgggtggaaacccaaaggatcgagttctctagtgccggtcttgctgctgagctcggaggacttggaatttcctcttgaggtggcctttttcttcttcccttgacctttccacttgcatggctttgttggagaggtgcgagaagctgaggaagtcttggctggctaggatggtcttgagttctggtctgagccccttcaaaaagtgggccatcttcttgacttcggt

SEQ ID NO: 59591 - DNA, 468 bp, Zea Mays
gaccgcgctacattgaaccggctatagtgcctgaatttggcggtgagacctcttcggctactgaagccaaaggacctaccctcacacagaggattgaagagccggctgcaatgctgaaggctggtaaaattgaagaaccgagaaccgaagagacaaaaacatcagaaattctaagcccttcggtaggggtggaggcgccgaagatacaaaaagatctagcagcaacccacaagagaaaaaaggatggccaatgtgttagatgtgctggagacgataaaaacttcaagctctactccaggacaaaactgaccgaagccgaagctacaatgagccgggccgacgttgaaactgggccttcagagcccaccaaagagaaatcctcggaaattggagaaaaggcagcggaagaagaagctatagaacaaattttgcctgaaaaatctgccgctcctactcccgaagctttga

SEQ ID NO: 59592 - DNA, 844 bp, Zea Mays
agcggatgctcttgctgcccgtgcgaagtcggtgaggctatcttctgaactagaaaaactaaaagctaagtcgactgagggtaatgctgaagtacgtggcagggtcagcagagccacacactctaatgtgaggcttatggcgagtttggagcatgtactgcttcacttgatgaagaaggggctgagcttggcaagttattaattggatggattgaagaagaacttggcagccttactacaatggttagtagcatgtactgcttcacttgatgaatgatgggcataacccatgaaggcaccttaaatcttcgtgtgtgaaaaggctaccgacactttgagccgcttgggtacatcgacaatgacttcgatcgtagtgtgtacaatattgaggttgatcacatggtgggattttctgtagacatgttgctagaccgcatgtggggaccacacggtatatctgtggtgagaggtcttgccgggacatcgaacatgtgaccgggacatcaaacatgtgattaagaccggtttccacttttatactagtttcccttgatgatggtattgtgtggtctaaagttttgtatttgttagataggcgcgattggaagcagaggctggcgggttggatgactcagacacggagtccgacctactgggggcaatggctggtgcaggggcagctgcgcaagcatcaagttcaaaggcgcctgagtcttcgcaccgcagtgcagatgtctcgaaagatttagagcaggttcgggtaacttcaggttggggaaagtttcttttgaggacttttgctgagagggcaagagaattgcaactaacaaactttctaggtgcc

SEQ ID NO: 59593 - DNA, 774 bp, Zea Mays
gttttgttgcattgcaattgccctttttctgtatctttctttcagaattcatgattatgctcaaagttaaccagatcaatccgtacagaaataacattctctttagcatcatcgtattttttttaagtttcatcccagccttgcactgtgttcgtttcgaacatgtattacacatcattggatttccaactccactttcagcattctttccttccattgaacaattcaaccatttacaattctttcattccctatatttcttcaacggaaatccaacctcatatgcatatcgactataaaaattataagcctcgtcgacattacaaaatgtcataccaactttgggtatcaatcttatataaatattgtttggccatgcacagaaatttaacatttatgaatcaatgacaccccaaatttactgtggtgttgctacagcaatacaaaagtatgtacgtaactgatattatgatcttatcggaacttacatgactttgtagaatgtgaggtgtgttttaatcatgcgccccaatatgtctcatggggatgtgttgatctgctcctaccatctctgccgatcttgtgttgtcatcaatatttccaggtgccctcaacgccgccgatggagtaacagctacaccgtctgcgtctccggtcacagcatcaggtacagctacgatacccatgctagtagacgtacctggttgatttatgtcctctgtatgtcctcccgccgccattaaccaccgccaagagcacaagaatatggtcctt

SEQ ID NO: 59594 - DNA, 756 bp, Zea Mays
cggcagcaagaaactgagcggcggggcttaccggcggtggtagagctctggtgaagtggtcagtgaggtcggggagactctagcgaacacactggtggtcggatgacagctagtgatagtaggagtcgttcggtctacaactcccggcggtcaaagttcgtcgacggtggcgatccggctagtcggcgatggttgggttcgattcctccggcggaaaatcttcacggggtgtcggggagacgattcctcgagggaatttgactgggttggctgaggaagcgagtccacgctcaccgacggaaaccttgctccggcgagggtgattgcgtggctctggcgaggtggagcgcaggccggggttttggagagttctagggaacctaggtgaacagggtggtggttctggttagggtggcatgtgactggagatggtggttcattgtgaccgagcttgggcagcaatggcgggcgacggtgttcttgctctcggcagaattccagtgaaggctggtggggcaatggttgggatggaaaggcgaagggtggagcgacctttataggtgcgagcacgagtgacgctgcatttccctgcctcagctcacgacaggagctcgggccctggttggcgagcgtggagcggccaatggcacgctctacagctcacaccaacggccgaacggttcagtctgtggtgttttgtcacttacaaacgcctataggtcgcgaatcaggctgaatttggacgcaatctctttg

SEQ ID NO: 59595 - DNA, 424 bp, Zea Mays
cccagattagatcattcatcttaaatgctcccacgctctctaccgaccgttggatcataaatcgatggcaccgattaggtcttcttctaagtgaactagtacgaaactaggtccaaccgatctccatcccacggttcacattagactgagtgaagaggtatgcttcaacttgatccccaccgtctggtgatagattgacgggccaggaccttcatccccctaaaccagtcagacgcggcggtgctgccgagcgccacggtggatgcacaccggcgttaggtgatccggcagcccggccttcccacgcggatacagacaagggctaaacgaagcggggagatcaacaatgcaagcgaggtagcccttaccggacatggtggtggtagtggccctggccacgagctcttgcggccagatggcgaat

SEQ ID NO: 59596 - DNA, 500 bp, Zea Mays
taccaaaacccatttctttattttcttttattcggtttactgattccgggaccatgcgccaaaaacagaaaattccaggggctatcgcaaaagaatcctaagactctagctacacccggaatagaactgtgggtcgatttcagtataatgcaggggctcttctacaaaatgtagttagtgaaggggtatgagttggtctcatctggtcgattgagcacgaacggactggattagatcgaccctggatacagtttcgccttcactcaccatcgttagatccgaaatccacggcacagccccgtccacgcataacgttcatcagggccgatggattgaatcacgacggtcatggtttaatgtaccgaaacgttaagctgtttctaatctcaacccttcgtttagcatccgacggctagcacataatcccttccctgagtcacccccaaatcccaacggcacgctcatcgcggcggagcgccatgaccggagtagtgcgccca

SEQ ID NO: 59597 - DNA, 1125 bp, Zea Mays
tgttcttgttctcagttttcttacagccggtgaacgccgtcaattcgccggtggttccaacaatctggtatcaaagccaagttggtgtatgagcggatctgtgagtccgccgagagaaccaccaaagaagaagagaggtattccgcatcgtcagcccatgagcgccatgagtgaaccagggaaatcaagcagcagcatcagagaaagttctctaatgtgaccaatgctcactcgcgacaactatgcagagtgggtgatgctcatgcagtgcaattacgaatccctagagatttggggagtgatcgatcctgggatcgcccccaaacgttcgcaagatcgtcaagccatgagtgccctactgcgatctgtgccaaaggaaatgtggcaatcgcttggtgcgcgcaacaccatgaagcaagcctgggatgccgtgaagatgatgtgtccgggtgtcgatcgagtgaaggaggtgaatgcatagaagcttctccaagaattcaagaacataaagttcaaggacgatgagtccgtcgaggatttcgacatgcgcatcagcaaccttgtcggaaatctttgagccctcggcgaagtggtggaagatgtccgcatcgtcaagaaattcttgcgcgtggtcccagcgcgttcactcaggtagtgattaccattgaaatgttttgtaatttgatggaactcaccgttgatgagctggtgggacgtctgcatgagacggaggatcggatcgacgacaaggttgaccaggtcactgacaagataggccgactccttctcgccgaggactggcttgagaagaacaagcatcgactacgctccaatccgaaggagggaggtggtggtttcactagaagattcaccaagaacaagtaggcgtcgcgctctgagggcggtgcatcgggtccggtcaagttgacctccgagggcacaccacggcaaaaggggtggtgctggaagtgtggcatctacggccactgggcggtcgactgcaagcgctcgaagaaggacaaggaacagcaacagtcggaggcgaacgtggctgtgacagttcctaatgatgtttgggtacttgatacaggtgccagcaatcatatgacaggaacttgaacaatg

SEQ ID NO: 59598 - DNA, 691 bp, Zea Mays
ttgctcgctctaatgcaagctacacagtgccaacgtactggaaaagatggcctggggcctggatggaggagtggttttatgttaaaaatgatttgattgaaaggaaggagatcaaggaaatcatccagcgccccatctggtctcgcttcggcctctgaaggccgaaggtggttattgaagatgacatcgaggcatgccaaaaggcctttagcaatgtttgtgcctttattggcacaagggatataatccaagagcacatagcctatagggtgtggcctcttgtggatagctgggaaatgccgaaggagactactgctgaatctagtgaaggtggcctagctagtttgattgaaatataccttcagattcagagagaagtttgacgaaccaaatgatgactggttgaaatgtattgaagctaccagcgacgagctgcttgggacatattcgaaggccgaagatgatgccttgtctgcaccctttgggggtcgaggcaagaaaagattaaacagggtatttgatgcaattggcttcgtataccctgattatcactacccattgcgaaggcaaggaaagaagagaaaaactgccgcttcagccaccactgctgtgtcgaagggcaagaaaatgaaggttctgacccaccggccgtgatatattgaaccggtcgtagtgcatgaatttggtgtag

SEQ ID NO: 59599 - DNA, 804 bp, Zea Mays
atatgcacatgcatgggcttcgttagctgctcacatttgttgacactgatgtccctatgtgacgcgactatacaccgtgtcgcaactctagcgcaacgtccatcttcatttgcaccattctcaagctcgaacatcccgcgtgatattattagccaatagggcatttcctccctaaacttagtcttgaaacctcagttcctcctgaacctagtttcaacatatcaccgattatattctactttaagaaacacctgcacatgaataacacacacaaccgtatacgagcacaagtctgtgacttgactaaggttaatccacgtcacaccactccacctagtatgatacaacaatatcaaaacacatgttaacacacatacacaagtttacattaatcaaaaccatatatctacacgcatgcattatatccaaaagcatgtttaatatcaacaaacactatgttttcaccacatatggtttcactcattctaacaagacaagtcaattgaaaaatgacaggctcacagctgaggaaactttttatagatgaatatagggctataggctagtaccaggagtgtagaagcttgtgtaggaaatgatggcctagaagttctggctatcgcatatctgtttgatccggtcagatttgaactcaacggtaaagatccccacatttaaatgcatgaaaacggtagaacaagtataatggaggctagtcagcgggctgcaaacctgcaatatgctccacatcaccaaaatctgagcaggaggagagagaatgcatgagagagaaagaaacgagct

SEQ ID NO: 59600 - DNA, 274 bp, Zea Mays
ggggtgggtagatagctccaagggatggaatccgcagaaagtggtcaacccgtgcagagcaatttcctcgattgtgtcctcagcccggtatccaaaagactcagagtccagtgaacgtcagcctggctgcaggggatgaggctccagggtcatcctcaccctacagcggggcactcgatgcttctcgaactgctgcaccgcgtactgaggaggcgtcgtgtatccggccccctgaagtacctcccacaaaatgcggggaaagccctctcgtgca

SEQ ID NO: 59601 - DNA, 667 bp, Zea Mays
aacagctttgacctcctcatcatatgatgcaattagctttaccatctcaagaaaattactttggttctttgaattagcagactcatcatgtccacgaaagggacaagcttgaaatactaaccaacggactgcatcaattgatgttctaagccgcaatctatttgccttgacttcatcacttgtttgcttctcaagaatcggttcaatatggtataaccgattcttcaaattatcatagcatttaacagaataccgatgagctgacccactctctcctacatgaattttgaaggcacaattatccccacttttaaccttcttccaatttttaaatcctttgacagtaaacacatcagatcctgcttttcctactggcttcttagataaaaagcaaggaaagcaaaaggttgcatcttttgttggcgagtattctaaccaagaaaaagtttcaaaccactgtgactgaaacctccgtggatgattctttggacctgaaggtgggtatacatctctaaaaaattggtatgggccatgtttcatgtatgctctaataacttgttcttgcttatcaggggtgtaagaaaaaatctggcaacgtaagcctgggtctctttctacaaccaacacaccagtatcttcaaaatttactcgacgaaccttaggagat

SEQ ID NO: 59602 - DNA, 1009 bp, Zea Mays
gtcgtatccgaacaacatcgatatgatggagatgatccgaccatgaatcattgtagattagtatatcatcaatgaaaactagcatgaacctgtagagaaaggggcacagggcgtcgttcatgaggctttggaatgtcgctggtgcattggtgagcccgaacgccatcaaactcaaagtggctgtgatgagtgaggaacgccgtcttcttaatgtcattcacatgcatgtggacctaatgatagccggagtggaggtcaagcttggtgaaaaatcgagtgtcgtggggctcatcgaggagctcgtcaacgatcgggatggggaagttgtcttttggcgtggcatcattaagggcacgattttcaatgcagaagcaccatgatgagtcatgcttcactaatttaatcggtgagtttaaacttcctacattcatcaactctgtctgaaaaattatatctacacgtaaaaaagttgagttgcatcgttgagtgttcctcacttatcctcggttcatctagtgtgcttcatctgttgggcttcatcttcaccaagtctttaattgcatcagtgagtgctatctcaccatcataggttcaactggtgctctaatctttctcagccactgagtactagatgcaccactgagtatattctatatgtactagtttaactgttgtattgaatttcttgagtttgctcctctcgacttggtttctttatgtgatatttgtttcattcattgtactcataaactgagaatgtgcatctagacaagcttattattctaaatttttttatcagccaataatcaccaaaacaatttagcaaaatatggcatgagaggccatcttcgctacacttggaaaagtgcagaaggttaccacatgtgaggcaatgtaaatcatccatgttcatcatcatctccttgaagttgtaggcttgttaggtttattttctcctttattcttgccgaatttcctatgaccaagtttgtagtgaactggacttagc

SEQ ID NO: 59603 - DNA, 471 bp, Zea Mays
agagaaggttagagagacaaatagtaattgaaaacatcataaacacagggatatgacaaaataatttatttcaaacacttttacccttcttcgtcttttaatatcgtaaatgattacagttatacatttggcttcggctttacaaagaagagtacgaaggcaaagcaatacatattcagaggcggagagattcaattctacctcatcccagaggtgagatttgtgcatggcactgttttcctatttacagtggtggaatacaacttcgtataaaattacaaacatgcccacaaatcctatacatacgaactacaactcttgtagggttagcgctgtattttccctccactgtcgtgctggccaagcttctggattcttctcacccacttttagtccatgcatcagtaccaccgaaccaaagttttttctctccttggttcatgtccatgtgttaatctcatggagccgaag

SEQ ID NO: 59604 - DNA, 588 bp, Zea Mays
ttcgcgcttgccaccgccctctcttacgccagtctacggttgggagatacgtattcgccgcggggcaggtgctccggcaatggcggcttccgcttgggtcactctcgccaccgtattcaatggttagagatgggagatgatctggtacccgctcatcggaaaatgaacggctgggattcgttggcgcatacccattcaatgcattaaatccttgacgtcaaccagcgatcggacggttttggagtcacgtgatgctctgaccgtggatcccagatccaagggctgatagcgcataccggttcaatgaaagtagcatctaatctgggccaccagattttgatcaggcggccaggaattgaggatacctcttcgtgctcggccttttgcataagatcccctcgctaacttcaaaataaactcgcagtcctgtctatgggaatcctgagtctcatgagtttttgcgtaataacccctatgtctctctgttatttgcgcccagtccgaaagcttaggaaattcaggaaaataatttagaaaagggtttttgtgtataaaaatatatccagaacttatttaattcatagaaat

SEQ ID NO: 59605 - DNA, 958 bp, Zea Mays
caatgggcttctattctatccattttgtgaatttgtcgatggcaactagtatgtgagtatatcctccttgagctttcttgaagggcctgatcatgtccagcccccagcatgcaaacgatcaggttacaggaatagtctgcaactgttgtgtgggtagatgctgctgttttgataagaattggcacgcctcgcacttctggactccaagatcacaactaatcagtcctatgcgaactagagacgagagcagaccatttggatagcctcttacctaggattatgacatagaaccccgcgaccatgcaccatggtggaagttgtcctccggcgagcgattggtaggtccagacatgccgctcggcactggttagttcatgaatgccttccctggatcctagcaaactccatagtgcgatcatcaagggctcgacgacggcatacgcgcaagacgccgacagtggctcccactggcattcttgacgacgacgctctctcctactcctagcgatatagcttgctctccctcttggtaatgagactcaagggtgtgggcaccgacaccttggggaaactgtggccggtgtatatgcgcagaggagtttggattatggtagctggcattgggaactacggcggcgaatactcgccccttccttgctgacgacggactacagcgttaaggcagagatgtgggcacacatggatgaggagagggttatgatcgtcgagcttttatagcccgaggagcagcggtccgaccggcctattccccgcgattcccggcggcgggttcgacggtgtccgttaggtccacgcgaggaagatagacatgacaccctggtcccaccaatcaatgacgatgcagtttcgtttcacctgagcgcgcagataagtgggagacgaccttgacgcgatggacccccatgtaagcgactccaggtgagagaggtggcgtttg

SEQ ID NO: 59606 - DNA, 747 bp, Zea Mays
cgcaccattaccaaggaagggatagatccgccgctgtctaattcgcgttagcgccgcgccaggggctttgcgctaggagggaaagcatcgtcgggtttttgggaaactgccaatttctttcgcagaggtggtgaaccgcggggtggcccgtaatttcacgtcgaaactcgacgtctgccgccgctcgtggtcggcttccattactccacggtagccggtaagaaaccctgcaaaccactcgtctagcatgtcccttcaattatccacgtccggttattagtttgggcactgggaaggagtttggttggtgctcaccggcgagagctaccatgggggctgggtttttctccatgtcgcgactcggaggaagacgatggccttttggtcgttggatccgacgttggcaatcgcgatcagatgataggatacccttcgcgtgattagatcgtggtcgtaggattcatgacgggcggccgtgattagatcacggcgtaccaattcactctatgggatctagagcgttgatgcggtaatggacggtttaggttagatcagggtgggatcacccttcatccattgattccggatcggattgtgggggctagttacccgttttataatgcaacgatctagtctggtgcgtcggttttagatccgatgaccctgaacgactgataccccttcgaccctggaaatatgcaaaagagtcctcgggcttttagtgaatcaacccgcggtccagcgcgg

SEQ ID NO: 59607 - DNA, 382 bp, Zea Mays
ctaggaggggtctaggccccacctggctccactacatcccgaacgcatggaggaagttggtttccctcttatggcataccgaggtgatctccttcgtcgtggatctctgagtcgacgtggaggcattctcggatcgggttgtatgcttcctcactagtgttgtatccttccgagctctcgaaaagcatctcgtcgcatgcatataggaattgcaacatggactcaggatcttgtagcctagagaagtctaggccaaagctcagaccgtcctcctccttggagtctaaacaccttgagggaaagggaagtccggcatatagccttgtgatggagctggtgtcgaaacttggctagaagggatagggttgaacacagatggttc

SEQ ID NO: 59608 - DNA, 569 bp, Zea Mays
caaaagccttcgaaccctctcgtttatacctcactgcactgcatgttctctgcctgtgcgctatctgcagactgcaccagcgaagcagccctgtgggccccatctgcatgccgaattcccactcccacgattcccttgccgtgcatttgccatttgcattagaaaaagaaaccacctagtgaaccccacgtccccacctcgcatgcaattcattgaccaaacccccactagtgcatgtaaatctccaggtcacacgtgcatgcatagcagcatgcctccccaaattgaaaactgcccccacatggatcttgtgcgcctaccactttgagttcttggtgtggctcgctgctcgtattagatctatgatttgttaattacgcgcgaacttttgcgttatacgtctgatccatttatttccagttatgttacacattaaaaatattgtttcatcatgtccatgctttgggtaattaattaaatgtttctttaactaatgtttattaaattagcgtcccaactaaatctaatttatagttttaactcgtgcttttataaatataaatgttaac

SEQ ID NO: 59609 - DNA, 702 bp, Zea Mays
aaagactccaaacatattgttaacttggagcaattgggtataagtagggccatggcgacttccctcgtccacaaactgacccggcttcccaacatcgacgagcaccgcgagggaacatcaccggagcaccgccagtcctcaccatcatcacaacttcaccaagcatcgcgggcaacccccatattcgcctccgcggtcggtaagggcctacccatcgtgatcgttatgtcctccgcctcgtgtagctgctccggaggggatcctttgggctcagaatcgtgggtttgtggggtccggtgatgccaccgccatgtggggtgctcggttcgtcgtggatctcgccgaggggagaagaggtgccttggccattgatccatcagcaacggtcgagattagggctaacataccaattcgtctgtaggtgatcctggtcgttgattgcatgatcagcgcataagattagatcctcatttcataaaatcctaaccgtcggctccaaatcttgtggctggcgctgcgtaccgattcataatcacgccgatctaatctgagccactgaaatttgattggttagctcacaatagaagttaccctttcgacctggtaaaattgttaaagaaaccttatgtttttgttgaatgaacctgccgtccattataggtttaatagtattacagtaaggtcctggaatttacacagaac

SEQ ID NO: 59610 - DNA, 353 bp, Zea Mays
ggaaattttacaacgacatctgggtaaatggtggccgagagatggctcacgaaattatgaagaaaagtgaaaaggacattcatgacgcccgagtagaagcaaaacaggctgaagaagctacagagcgtgaaaaacgtataggtattgtttcgtggcctttagcttcagcatttgtttttatggcttcggactaattaattttttccttctttagctgaattatctccgctgccggaaccgttcgatcccctggccaatccagaaacgaaggaagctttggagatcattaatatggccgaatatattgttgacaaagtcgtcaataaattgctcaatgaagttgcggagaaaat

SEQ ID NO: 59611 - DNA, 694 bp, Zea Mays
catttcccagctatccacgagtggccacaccctatagcctatgtgctcttggattatatctcttataccaatgaaggcacaaacttttctaaaggccttctggcatgcttcgacgtcaccttcaatagtgaccttcggccttcgaaggccgaagcgagaccagatggggcgttggataatttccttgatgtcttcccttttaattagatcattttaacataaaccactcctccatccaggccttgggccatcttttccggaatgttggcaccgagtaacttgcattagagcgggcaatgaacccgtagcaaccgaagttattgtggtattgttctttgccgatagccttcgtcttgtataatagctcgtgcatattgcaaaagcatttcgcgctcggctccagcccctggcttcttacagcccagacaaacacccccatcctaattatagcttcgggggtaatctgatgaagaaagatctagaatatatttaatacctcaaccacaaatttactcagtgggaacagaaggcctgccttcaagaagcttcggtaaataacaatttcattttcctcaggcacatgggcagtgatgtctcctccaactctaacaatagacatgtcacaaaaatatctccctctcatggcatcaatatgacttttttgatggtcgatttcctgaagatggtatggctt

SEQ ID NO: 59612 - DNA, 567 bp, Zea Mays
aaccatagccgaagctttctacactgcgctttcaagcgaacacttcatcgtttaaggttaatttcgtcagacgggttagcttcgtcaaactatgaaaatccatcaaaatggccagagtgcgatcaactgcaagggtgtctcgtgagggggaagaaaccgaggccactgaaacagcaccaatttcagaagtaatgaaacgatcaggtcttgttgtggctgacaaaggtacttctaatgtcaacctgagcagactgtgattgagggtgaagatgttaagagcgaagaagactacaatattctgatcccaatgaagcctagtcatctagatttcgaaacatctactgtgtctgaagacgacatgcctatgatgatgaaactgggctattttggagaagctgaaagcaaacttgttcgatttgctggagaagagactaccccagagccgaagaaggatgaagttgtgattttcaagagcttcttcagagcggggctgcgatttcccttgaacgagatgataggggaagtcctaaagaacttcgaaatatatcttcatcagctgactcctaa

SEQ ID NO: 59613 - DNA, 566 bp, Zea Mays
aataaatcaatgtataatcaaatctagacacgcaataaatgaacagagcgagagaaaaacactaattttgtataaacatcacatttaaacatcaagataacaggtaatcaagataacactaatttttgctgctgctggtacctggatcgttctacaagaaactcttcgccagcaactccttgaacctatagttgtatcgtcacacagctttgaactggctgtcccaggtaatctctataggccggccctgacttgcagtgctctttgaagatttacataggggcacattgaaaatagggtttttacatgggtgaccttagttgtgaccaggtgctcaattttgcccctagtccgaggaactcctcatttctaccctcccacgcgtaaaaaacatcagaacactgctcggccatcgtttccgtgactctgataccgttaccgtgacctgcatgtgggccccgcgacccctctccatccaaaattccccaaatccaatctgtactcgcctgccccgacgcccctccaagctccccaccgtcggaggcacccgacgcccttcatctccc

SEQ ID NO: 59614 - DNA, 470 bp, Zea Mays
caattcttgaagctctaggtttctctccttttcaaggatgagcaagtcttcttgagcgtcaagagttgcttttcttttatctagcttctccatcaatttagtaattacattgtatccattcaaaccaaattctttaatcattttatttttcatgtcaatttgttcatcatcatcattagtgaagtcatcactaaataaagttaccttatctccttttgccatgaggcaagtaggggtgtaggagtcgtcgaagaggttggtgaagagttgagaggtcgaagtggattgaatggcgacattagccacctcttcttcttcctctgagcttgaactctcttcgtcggagttccattcttcacctatgtgggcttggccatacttcttcttcaagtatcccttacccttgcctcccttcttcaacttgtcccttttgtaatctttcttggcatcttgttccttcttgtttggac

SEQ ID NO: 59615 - DNA, 323 bp, Zea Mays
tgctggattagatttgtttgggttcagtttaattctgtccatccgcttccatcctacaaaactgaccctatctacaaaacaaatcctatctctaaaaccgaccctatccacaaaacagatgctatctctaaaaccgaccctatccacaaaatagatcctatctctaaaaccgaccatatccacaaaacaaatcctatctctaaaaccgaccctatccacaaaatagatcatatctctacaaccgaccctatccacaaaatagatcatatctctaaaaccgaccctatccacaaaaccgaactcccacccttccaacacctcgc

SEQ ID NO: 59616 - DNA, 752 bp, Zea Mays
ccatccgccgtccgcgcgccatcggggctgccacacgcatggtcaggctccttcaccaacatccgtcgatggtaagcacctctactgaattcgcctaagacaccactacgtgtagggctgttctaggtcagggattgatcactgggggggcatcgttgtggagctggccgctgtggttggagcatggcgccgccgggtgtgcgtcctgatggagaagaagtgcgctgaccgtcggatctctgtgggcggatgggattagcttgggcgtaccgctttaggcgactggatccgtgccgtcggatcggtatcctgtggatcgaaatagatcgtgtttcattaaagttgtagccgtcgatctccgatctagcggccaccagtgtataccggttcagggtgttgtgtgatctaatccgaaccactagatatggatcgaacggcccatatacagcgataccccttcgcgtaaccactatgcagaaaaccccttataagtttagagattcaacccgcagtccattggccactgttccctgagtctaggttatcttgcgcagagacccttgagctttctgagaattgatgcccagtccagaacctgtttaaaatgaataaattaattagtaaatgtatttttaatgcaaaaacaattgctagaacttggaaaattcatatctaattcattttaactccaaattgaaccattccaatttctaaaattttgtaataagattctctatcatttagtatcactg

SEQ ID NO: 59617 - DNA, 582 bp, Zea Mays
ggggaatcaccgcagcggatgaactcgaggcctttcgcttgggcgtcatctcaactctaacgatgaacagagcgggagccgaattgcaaaaggacagagaagatctggaggcaggaaagcaagaactagggcacgaaaagcagaggcggctgaaagcgcaatacatatgggatattcccgagttagatactgtttccaaaaagcacccagtcatcacccggcaattacttctaaaacgctggcgtgccatgtcatcacccggcgactacttctaaggcaccggtatgccacatcatcactcggctattatcctcaaagtggccgacgcagcccgttctaactcggctgttatttctaaaacgccgacgttaccatcattcactcggcagttatctctaaaacgccgacgtcgtcttcagtcgctcggcagttatctctaaaactccgacgtcgtcttcaagtcactcggcagttacctctaaaacgccgacgtcgacataagtcactcggctgttacatctaagagcgtcgacgtagtcatcagtcatttcgacgttgacgtggcttcgtcatcactcggac

SEQ ID NO: 59618 - DNA, 557 bp, Zea Mays
ttgaaatgtatttgcgttgttctatacatgacaatcctaccaaatggaagaaatggctggctctagccgagttttggtacaactctgcatatcacactacactactttgtgttgctccccttttaaagacttatatggttatgaaccagtcctagctgctgctcctcatctattaggagacactgatcaatctgttcaagaattgctacaggagaggctggcttattctgagttgctgaagacttgcttagctgctactcagaatcgaatgacgcatcatgctgataagttcagactagatagggaatttcaggtgggggggtcgtgtacttctgaaattgcaacctatgtccagggttcagtggtcaatagagctcatcccaataatgcttttatgttctttggccccttcaaagtgctacaacgtgttggatcgattgcttataagctggacttaccttctacggtcttggttcatccggtgtttcatgtgtctcagcttaagccgtttacgtcaaaatatacaccaattttctctgacatctctcggttggtcg

SEQ ID NO: 59619 - DNA, 1074 bp, Zea Mays
gagtatgttggctctcaacataagcttgtgacagagttcttttatttttaggtgtgtttccatagggataaacaaaacaagattgcgagaacaaagtggtggaaactgaaaggagatacatcaaaagtctcaagaaaagggccatcaaagaagacacttggaaggaagaagatgacataaacaacatgtggaagaagatggcaccctatatttgcgaggtgtgtggagcaactaaagggagtggatgcgaagctaaaggtacttggtagtggaagtacatggatgatttgatacttgtcaatacagtgtattagcgcaacagtgtttttcagcctctcgcaatagggtacagtgcgggggtatttataggtaaccaggggacgatttcaccctctcaaatacagttatgcccctggttacctacgttatccctgaaatattcccctctcaagggttattacaagtcattacaacatgattaggtatttcacggacggacacaccattaactctacccacacagtggcttacaagtgggaccaggcggcccagggtggttttacacgggcccaccgtcttaacaatgcgctggtggcgacatgaagccttcgtgctccatgcgccaggtcttcggcagtcggagaggccttcgttgtttctagcttcgacagggatcgacaaggcctttgcctgcttcgtacgctccttccgtcttagggccttcgctccacgagtcttcgtttgcctttgcttttcctctgtcatgatttatccctgtcatgaaatggtcgaatgagggggcggtacgccttcgccccaacacttgccctccgaggggctagttcgactaagtgagctggtattgaagtctgttgagagatggtcgaaacgcttccctcactcggttgaagtggccccacgggggtttttgaaatatgactgttaaaaggtgatgttttactgtgggtctgttgagttctcgaggcgttttcccttgcctataaaaagctgcacgcacagcactgtgggtttttaacatgaggtagcacggacaagacctccggctgtgatgaa

SEQ ID NO: 59620 - DNA, 442 bp, Zea Mays
ctctcatggctatgttttcaaaaagctccgcattgttaggctctagtaatgtagcaccaacatcctcatcgttgcccctgtcaccagcatcgtcatcgaacaaatcgtccatagtgatgtaatcatgatgatcaacatctttgtggccagcaatggctgtgccagctagcccacttgcattcgtcgttgtcgacgagtttcctccaccatatgatgaaccacttacactagcatttgctctctctcaccgtggaaagtctagaccgtgtagtcctcgacaaaaccaaacctgatcaaatgagatagcaccatgacgtcttcatggccttttgtgttcttgcagtgagcacacaagcagttggttctcatttgactcactctctcgatgtttcttcgcaacggcaacaaacatttttacctcaagcatcgagtttcattctat

SEQ ID NO: 59621 - DNA, 521 bp, Zea Mays
gaatgtttctaatcattaacaattatgttgctttgttcttgatgtataacattcgagaacaaggaccaacattggcgcccacctccagtgaactcattcgaccaccttcggcaaacatcgacttttgcaatgccgccgaagaagacaacggtgtcaggggctgccctgcagccactggacactaatcaggagacgccatgagaagctaggagccagaagaggaaggctactagcccaacaccttaggaggaggaactggatcaagagatcagggatttggaagctatccaccaacatgtgcaaaggaagagggaaaagatgcttcgactcgccgaccttcagaagaagatcgacgaagccgctgaagaaatgcgtcatctcagtcaggatgaccaagaccaaaggccccagcacagggagcttcaccaagaaagcttattcaatgatgatgaatggtacagtgactttcatcagggcaattttgcttttgacgatgcttctcccttggcagcagaattgca

SEQ ID NO: 59622 - DNA, 338 bp, Zea Mays
cttgcaatgtataccaaatgttgttgtgaattttgttgcctacgcacctataaaatcctaattaccttcagcatatgcagcacaagtgatgcctaaaatactaatataaaggttcacagttgcagatggcagatgaaacgcgccagcaccctagaggccatggtgagactggtggaaaccagcaggcaccacccgtgccgcaaccgccttccatggaggcgatattggccgctcagacggaactgctacgacagcttgtgcaaaggcaacaacccctgccaccacctcacaatgggcataacaaccaccaactccaagtggcaagctatcaagatttc

SEQ ID NO: 59623 - DNA, 541 bp, Zea Mays
tgatttgatgacttgaaaaattcctaagttgattaggacatatgtaaaggcgaactaccgagttgttatactaaagtcggcttagctgggctgtaaagttggtctggtctagatgcaagggcatctcatcttggttttggcacaactagacttgaaaaaatccctaaaaaaaatctccaaatcctccgttttaaattggattgaaatgaaacttgacatgtagcttcacaaggaggttagaaagatacgtggagaattttaacccgtcccatccatcgagtcggtgtgaattgatcaaaccactctctagatcggggtcttctccacaaccgacaaaaaggaaaacttcatgcttgtgtgagatcttcttaaaccaccttgcaaatgtgatcccaagtactcatagcacgtaaagaagtccaagaaattggcccaaaatacccatgcaaactggagcaccaaaacaccaaaaacaagtgaaatcgaacaccgaaatggaaagagcaataaaaaaataagcaaacaactcacaaaaaatgag

SEQ ID NO: 59624 - DNA, 330 bp, Zea Mays
tatataacaggaattcatatgtggtttcaagtatgtgaaatagtgatcctaaaaagagtggtttaaagtagttgaggcttgcaggtcggttttgatatagccaaaaaaatactagatggatctaacagaaaccacgactttgtattaaaaagggaacctaagtgtattttgacaagaactcgaatttagatggcctgggtgtatatatattaacgtcaaaatcatgtaacatgatgcaattataagagggagtaattgaaaggaaaaaacttcaaacaaggttggaggaccaaaactgttgagatgcacagcaacaacagtctacaggct

SEQ ID NO: 59625 - DNA, 340 bp, Zea Mays
caaatcacacatttagctgaagaataagggttacaatcaaatccacttcaatcgacaaaaatgcttcaaaaaatcgacggcaaactcgatgtatttcaagttggattacctggaacttcttgaatcgggctccaatgctcggagattgaaggaggttagctggattggaacggcgctggattggagcggcgctggattggagcagcggaaatcgcctgacgagtcgcctcaaacgaaaggaaagactgtgcggccactggggttttcttcctatcggcgcgggtttgcctcagttgattgcgcgaagacggttttagaaaccggaaacgtgggagacgtg

SEQ ID NO: 59626 - DNA, 552 bp, Zea Mays
ggcacaagggacttggtgcaggagcacattgcttacagagtgtggccacttgcagatgggtgggaaatgtcgaaggagactgctgctggctctagccaatgtggtttagtgtacctgaagtataccttcaggtacaagagccaatttgatgaaccaaatcacaactggatagatgccatagaggcgactagtgatgaattgcttggagcatattcgaaggctgaagatgactcctgcttctgctgaagctcctagcacagagggtaaagcttcaaagtaatctggcgatgccaccatagtgcaaactatttccgaagctggaccctcggaagttcccaccgaagccagaccttcagaaagcacaccaataatccaagaaaaagagggggcttctaaaaaacccacatttcctgctcctgaagcacctgctaaagagttagaattcattgtgcgacatgcttcagggaaacaattatcggaggagcaaattgctaaagcaaaacaatatgccaaggatctaaagtacccccgaggatccttggtgtatagtgg

SEQ ID NO: 59627 - DNA, 319 bp, Zea Mays
attgatactagtgtaatgaatgaatgcttgttagtcaaattgatctggaaaatttctcaagggtcggatggtttgtggtgcaggtttattaaagccaagtatataaaagatggtaatttctatggatctaagatcaaaggagcgtctcaattttggaaaggtctccataaagtcaaacatctttttcgttggggagggataaaattcggtgaatgatgggaagggaacactttttggaaagatacttggctgggggatgtggcgttaagtatcaagtatcataagatttttgatatctgtagggagaaggacgccttgg

SEQ ID NO: 59628 - DNA, 591 bp, Zea Mays
gtgggggttgttgtcgcggcgtccttggcgatccggagtctccgtcggcgagtaattcctcaccggaatttggtgtgcctggcggatcttccctgcgtcgtcactggggtcttgcggcttcgaaaaccacggtgagaaccccctcatttgattcctggttgcgcatactcgtcgtgggacatgtggattgaagtttgggctccggtgtgcggcgattgggtgactccggtgagtgcgccaccgctgacccatggtggcgccgccctggtttggccatcagcggggaggggtttcgatggttggtgctgaccgtcgatcatggggtgaacggttgggatggctctgctcgtacccctttcgcataggttaaccgggaccgtaggatcggaagcattcgggtgcgattggatctaggttaattaaatctgagccgttggcgcgcgatcaagcggtatctgggagcgccagccctgaaccagggaagatctaatccgggccatccgcgcctgatcggacggccgttaacacttcgtaccccttcgtttgcgcagttgcggaaagaaccttatgattttagagaatcaacccgcg

SEQ ID NO: 59629 - DNA, 293 bp, Zea Mays
ccgtcggacggtgatgcgtggaaggcatttgacgagtttgatcctgaatttgcaaacgaccctaggagtgtacggcttggtctatcgacggatggattcacccctttcaataccagtgcaagcccttactcgtgttggcctgtcttcattgtgccatataatcttcctcctgagttggtcaataaagaagagttcatgttccttgcactagtcatcccaggccccaagcatccagggccaaagctgaatatgtttgttcgccctttaattgaagagctgaaacaattgtggag

SEQ ID NO: 59630 - DNA, 458 bp, Zea Mays
gggtaatccatttatttccactttcctttttatctgagaagctatcagtgaagatggtcaattgttcagttctatgaagattttctataaatcttttcttatgctgaaagactgcagagtcagatttgatttatgtgtgtgatttctacagatgtctgagaacaggcgcagaggtgcgaggcgtgctcagcctaaacaacaggcaccccaagaggaggcaaccccgcagcagcatttgccaccaccaccaccgatgatcttttagcaaatgttcttgatgcagacccaagcagtccaagcaactggacagaccttagcggcaatgcagcaagtgcagcagtagccaccaccgccttagcctccagtgctagtccagatgccacaagtgcctagagataagcgggcagagttcatgaggggccattccctagtctttgcccactctgctaatcccatgg

SEQ ID NO: 59631 - DNA, 741 bp, Zea Mays
aaagtttggtgaaccaaggttggcctgtttgacactgtgggttgggagaaaattttgctccaaatcgagctatcagtcaagggagggttcagtcggattcagtagtttcagtgttttgggtcatgaactatgaataggtcttcgcccactgccgtgttccagtggtttctggcctagttgcagataagggaaggcgtatgctggggaggtagcaaagggtaggtttgacgttcatgtgcctgggtctggaggcttgatattatccactatcggtgacctctctgcctatttctttgctgtcgtctgtgccattgttcaattgtggatatgaacttgcgtggtacctatgcatggacgccgcgtgaccatgctcaagccactgctgacagcgcaccaccttattccttctgtgtctagcctcaccggaaccggtgcccgccagtctccttatctctatgtcccgcgatctctgagtttggcaaaattcgtcgtgtccatgcatccatcacccaaattgactgcgcagcgtgctttgccattccattgcgcccgtttagcctcataattgtcgattgtctttccccgagtcctctgtgagacgtcttgccccgccgatcgtcgtcgcaccatccaacctccgcctcaccgcggccaaggttgcacgacatcgttccatgcctttgttcttgtgttctggattcccttgcttgtggtgaagctcatagacctgttcgtttgaac

SEQ ID NO: 59632 - DNA, 548 bp, Zea Mays
ttgtgtgcgcgtccggctgcatcgtcgaggagttacagatggagtagtccgtgcaaccgtaccttttgcgttcgccgccagaaaaaattgatggtagatcaaattccagaatggaaagagtaatgttcacatttgtgcaatattttgtttacagtgaaccaatctatattactgtaaagctatgggttctctaaataacaacaaattccaaatcattcagtggcttacgttcttttcaaattgataacgtggtgatgaaagatcgggtcatgtgacttgtagttcaatatggccagcaactccagcagggtgagaaagatcatcatcaggttctaaaggatttctcaaagttgcttgatgatcaggtaatgctattaaatagaaatatgtgcaaagtcattagttcaaactccctgatctgctttaacttgcaaactttagcttctctctagatatttaacttgctgattgtaccatcaacatggtgaccaagacggtgctactgatctaaatgcagtgctaaatgatgtcctttgctttgagctttt

SEQ ID NO: 59633 - DNA, 979 bp, Zea Mays
aggtctatgaatgtcgagcgatacagtggatctagaagaaatgcagatgctctaatatcggggctcctgaacaaaagagagatgcaatgagcgttgcaatgactcgattagagagatgtataaacggatacaaatcacacatttagctgaagaataagggttacaatcaaatccacttcaatcgacaaaaatgcttcaaaaaatcgatgacaaactcgatgtatttcaagttggattacctggaacttcttgaaacgggctccaatgctcggagattgaaggaggtcagctagattggaacgacgctggattggagcagcggaaatcgcctggcgagtcgcctcagacgaaaggaaagactgtgcggccactggggttttcttcctatcgacgcgggtttgcctgagttgattgcgcgaagacggttttagaaaccggaaacgtgggagacgtggctgggctgacatgggaaacggtgtaacggcgccgtcagtggaaatccaacttcatatgcataccttttatagaatttatatgcatcatcaacatccttgaaagtcatccctaccgttggcactatagttggatcaatgtttttttcctgcaaattcattgacattgttgtttgtaccatggaatatgttcataacaatctaatcaatcaagaatcaaatacaacaattggacttacatgtgaatgcagtatttgaggcgtatccatctccctggagctaatattggacataggaggtcgaaccctttgttcttcttcccctatgctcatctcgtcgatcacaggacccagtagagcaggaggtggtgtgaccagtgagttaccattaactactccctctgtctctggatcaagacgaacaccatctcctaccatcaccggcgactctccagagccggccatctccacctccaaatagttatgcaggctttgtggtgttttttcggatgaaaggaaatcacagat

SEQ ID NO: 59634 - DNA, 275 bp, Zea Mays
tgcattatgtgtggaagggcgagtggatgtgcacaataatctctttaaggtagatagataaagatagagtaaaaataaatctaaagtggatagagacaaaattggataggaatagattaaaaacaaatctacgtacaaggtggagaagcacgtaacgcgagatggtgcattaaagagtaggatgaatgtgtataggacaagggaatagaaaatcattgattaatgagtggtgtatgcttggacttaggatcacacattctcaaaacaagttttcg

SEQ ID NO: 59635 - DNA, 448 bp, Zea Mays
agagaaaaaaatttatacccccaaattcagagtattacatgtggcctctgaaggtccagccttatctgaatcagcaaaagtactcggagcaacggtcgtcgattcactagctttatccttggaaacttttgatggtgcaggtgtcgccatcttcgaaggtcttaaaacagcctcaagcacattagccattctcctaccttttttaggcattcccgctagagcggttgtaatttgcggttgtgctggtgccttcggcaactcttgaacctttggctgatctagcagttccaaatgaataggattctgggcattcactgcagttgtcgggaggacccctttagtttttttggtagtctctttttctaaagtccctgtggtaggcagttgcacagccctttccaagaagtacgacttcggtcggtgggttaaaaccttcaccctcttttgc

SEQ ID NO: 59636 - DNA, 457 bp, Zea Mays
acgataatcccaacagtgttcctgataaaacattcgacccacctatttccatgacgcagaccacatcgcccgcgctaaacacctctcgtttttctgtgcacgtactatgcggccccaatccggatccggcagcagcacccaccactcgaacaacactgctagtcgtaacagcccgcgtaccagcatgcgagcaacatccctgccggacacgattgtggctggaatcagtattcagtaatctccaatcaaatcaattgtcacacttcaagcttgcgttgacgcacaatgataattaggcccaacatggtacacagctgtaaattaagatggattctacggatttgtcgattcaggtgatacagcagcaagaagctagtacaccagaggccacacacggctagcacacatcaaagatgccaaaatgcagtagggtagtttggaaacttatttgatgtcg

SEQ ID NO: 59637 - DNA, 972 bp, Zea Mays
attgcacaagggtatgacggtaattacaaggggctaaccccaaaaccctatacatggctctaacactcatgctctacactatacccaaggaagacactcataagactgtgtagtcaattttgagtgctcgtgatttgcaagcacataacacacacaaccaaaaagactaaggctagatcaatcaggcatcttgccaaaaaggcgctgaaaaggaatgtcatctcgaagagctgaagaaggctgaatgttagtcaaataagtggcagtagagataacctcagtccaaaagtgaggggaaacagaagaagcaagcatgagagcgcgaggattttcaagaagatgacaatgcttgcgctcagcaacaccattttcgagcatgagcactaggacaagaaaagtaaacaaacataccttgcgtatcaagaaccttgcaaagagctccagaaaggtatctcctgcagaatcaacacaaaaacacgaataaatgtgttgaattgagtgttgaacatagtagacaatatcttatagatggataaagcctcactacggtttttcgtaaaacaaatccatgtgtggctagaaaaatcatctataaaaataatataatatagatgacccccttttgaagcgaagggagccggggcccatacatctgagtgaacaagatcgcccatacatagactcactagaatgataaggaagattaatctgcttgcctaatcgacaaccctaacaataagctaaggacttatgacctgaaaccaaacctaggaaactagacaaatcaaggtagacaaataagatccacaaagatgacccagacaatgatgtcattgagcaaaatatgacatggatgaagcaactaatgcagagccgacagaactggcaggtgtcgtggaaggaagatgaagccaatcaagctcccaaaggcgatgagagtcattactcacgacgccgagggccagtaccaac

SEQ ID NO: 59638 - DNA, 751 bp, Zea Mays
cgactatgatccagtaattgtttggttatggttgctatatcaaggttgtagctggatcatagggctacaactttgacacaaagagcaggtcgagtcactacatgaaattgggaacaaatctccctgcaagttgctctgtaaggctgactgaatgagaatccaatggtacagtgcaccgaaaatatccccaatccactgaacctcgccgctgacgagccgtgcgcccggattcgcgccacccgctgtgattcgtgcccagcgcatgtggataacgcagaggagtaaaaatcttagcgctcggattagctcgagctcgctcaccgttgtgcccgtcgtacccacttggaccgcgactggtcgggatcatcctcaccggcgttagccgtgcaacgattgtgcgccacgtgccttggtgtcttaccacgtcgcagtagctcatattacacatgtccggtgatcgccggtgagcccgccatggtgaaagccaccaatctcttgcgatagtgctcttttcattctccgactgccaccgtgccatctcaaattcatgggccaccgctcgaggatcctataaattgagcatgccatcggttccgcaaggtagtcaagcacccaatccatcaactcgtgccttcaattgttcaccagagcccccgaattgctcacttcccccaaatcggttttccgccgccgtgagaaggctctcaccgtcgctagtgcgcttcaggtccgatcatgtcctctactctct

SEQ ID NO: 59639 - DNA, 414 bp, Zea Mays
gttatcgctgcttgcagcaagttatcatggtttctttgaagctagttatctgaagattgatcctacgtcgtgaagatcgggcatcgtgacgcatcattagccatatgagccacataaggcaagcattaatgccccatagagcccaaacccgtggatagagacaatataacactcaaacacccacatctatgctagaccaaagggttggtggactaccaccagccgccattgacatagtaagagaggagatagctggggtgttccgagataatctcggagttagcatgatctctgggggcagtcatatcggaaactctatgacaaccgatttgataatcacatgtaccccccatggaacaaggatacccgaattcacaaaatttttgggtgaccaaagtaagatcacgcacgagc

SEQ ID NO: 59640 - DNA, 701 bp, Zea Mays
ctcggtcaggccaactgatggagggttgccatggtacagtgcattgggggggaagataaggatcagcccctcgccggcgataaggatcccaccgcggctcgggataggtcatcggcggccgcggtaaaggtcctcggcgatgtggcagagagttactgaggtggcaagccccggttaatcggcgaccactgtgccatcaccggaatctgctgcgcggtaagcacaccagcgcaatctgaaatccgcgatcctcatccaattccggtcgacggcctataaattgcacccgggttctacttcttcaccacatcccgcacctcagtgactgagcaatcggctcaatttcaccggagcactcacgcagcccccaaatcccctttctccctgttcttaactccgccgtgaagaactccaccgtggtcagcgctctttgggttagtaacttctcaattgctccctgctctagctcgtttgtagactcctattgctctcagtactgaccaattgaaattcggccgaagcctttcaccggaacacgcacctgctctgtagaacgccgctgtgacacccccactgtcgacccactcttcgattcttattctgcccaaaccaaagcgtgtacgtaaaccctggtgaacccatgaacctttccccaacatcaatttggtcatccatgccgtcgtttggtccgaacgcgttca

SEQ ID NO: 59641 - DNA, 501 bp, Zea Mays
ggtggtagcaattatttggattaaatggccttttcatgaagtgttggcaataggtattattgtgcatctttcaaatgggtttgtatttttctctggtggcctatctcattattgatctagcaaaattttatttgcccattattgcattattttgggttactcatgatttatttgaaatatgactcactatcatgttctatttatttaccctacttaaaatgatgggctgaggtgtttattatttttgcagtggtgttttggtggttacaagtccactggatttttattaacaaatttgggtctggttttctaactccaataattgttttctagttggaatactgctaaataaaacatttcactttaattctgttctggactagtggtctttttatttttcctaggttccttgttacttaagtgggctaggaaaaataattgcactcactgttcattattctctaatgcctttctgtttttcctaagttttgggtaaaaaat

SEQ ID NO: 59642 - DNA, 378 bp, Zea Mays
gcccaacccattcaccctagcttttggtcagtttctctacagcccagttcctctcgcgcgtgttgcttgctatgcctggtatctatgatccacctgttcggcccacaacattccccatgcttgtgtccttgcacggttgcttgcattcgcgctcgtgtccactcctctcttgcatgcttcaaaccactgtcacactcgtgccctgtgtttcggtgtagtggaattcccagtgtcattgtagcagtaacgccttccactagcattgccgcctcctcccctcaccttcccactccagtgagtgattactcgcgcactaatgcccttccgtatccactatgacccctatgagaaccccagagctccgacatctttccccgc

SEQ ID NO: 59643 - DNA, 532 bp, Zea Mays
tgcttctacttccaagcgccttgctgccgccgaattggaaagcggcgatgggtatcgttagatctgttcatgtgacggggtcggttcagctttggttgggtcaggcttgagccataggttgtttggaacggcccatgtctgacttgtgcttagtgttgtgtcatgttaggttgactcgtacctctctattggatgtgctgggttttttgggttaggtcaggctttttagatttcagttggatttttttgggctggatcgggctttgggtaaaaaattatgacccataccttgtccatgaattatcgtgggtcaaaaaatatggctcgtttcgttagtaggtctaggtagcatcgtcgtgaggcggtcgaggagtgcctaggtggtgatggcgctaaaggaggagctagagggcatccgatcgcggtttcatcggcggcagaccaagctgggacctcgggctagagatctaagtccccttcgagtaaagaccggtaacagatgtcgcctatttctgacaactctacaacggag

SEQ ID NO: 59644 - DNA, 553 bp, Zea Mays
agctaggggtaacacttcctgagatgctctatatttcatgaattctctatttccgtgccatccatttgagtaagccgatatgatcctggccgagtgacttctgctaccatgaatggcccttcccatagtggcgacaatttgtgtcgtccttcccctgttagaattcggcgaagtaccaagtctcccactgcgaaggatcgatgtcgtatggccttaccatgatagcgccttagggtttgctggtatctggctgactgaattattgtattcaaccattcttcttccaatacattaatatcttatagtctggtagcttctgcttcagctatgttttcgaagaccagccttggtgccccaaacctgaggtcggcaggtagcactgcctttgagccatagaccatgaagaagggagtgtttccatgcaaagctcgactaggttgagttcttaggctccaaaccacatacgacaactctttgatccactttccttcttgtcgaagactttcttcctgagtgcttcctgagtgcttccaatatcattccattggccctt

SEQ ID NO: 59645 - DNA, 347 bp, Zea Mays
tgctttgttgatactattagtattttctatacaggataaacacacgacttaactcaagaaaataattgcactcattcatgtttaggagtaaagacaactatttgttattctttaatactaagggaaatgaattcacaattttgaaccagttgattctaccttaaaaatttgaatactcaaacctggtgaccttggcggtgagcaggaaaataatgtttttagatggataaaatgattttaggtagctacaatgtactgtagaaggtatcaccctccagtaggtattactagtatgccaaaatccattgctggccacttaaacaatcatcatatatggtggcttcctc

SEQ ID NO: 59646 - DNA, 614 bp, Zea Mays
tttctatgttgttgcaacacatgtaaatgaaaattaattatttcctgatgctgctctgtgagttgttgtcttgtcagtacccttttaatctagaaacatttgtattcatacatctacttgtagttattcaaccttttgatctcgagtcataagggtattgatttggagataatgctgctcggacttctttgaactgaactgattaagtcagcaacatatccaatattaatgtgtgtgttcattcatctgataggaaggtacactgaagggtcaaaggagcaagctcggtattgaagaccatgttctctgagttgagtatggcaaaagttattctaaaaaaactattctctagatcatgatgaggacacaaatacttgagcaaatgtttctagatatctccgtgcgaacaggtagttgttgcacgccatatcaggttgtcgttaaatccaatactgtcagagctactgtgcgccatgcatggaagttgttggagaatggtatttgtgaagatctcaaatatggttagggagatactaatatgagatattgggatctaaatagatttgttagagatgctcttaattgctagaggtcgcaaacgttttgaagtctgt

SEQ ID NO: 59647 - DNA, 686 bp, Zea Mays
tttttggaggaacatggcagaaagcagaaatgcttaaaatgtggcaagtcgaggtacgtggaacttatatatgaatatggggagaaggtggtgatgaaggttgcatataaacagcttcggtacatgcctctcactcctaaactgaaatgtttgtttctctcgaggaagaccgctgtgcatatgaggtgacacaaagatcgtatggacagacaagatgggttaatggtgcacccttcatatggtgatgcatggaaggctcttaacaattttgatctagaatttgttgttgatgcaaggaatgtttgtatcgtcttaacaactgatggtttcacgcctttcaatatgattgttgtgtcatactcatgttggcttgtcattgccatcacgtacaaccttccacctgctctttgcctaaaatgtgagcttatgttcttatgtcttgttatccctgggcctgagcatcctgacgtatgcctcaatgtgatgcttcaaccactaattaaagagttaaagaacttatgggaaggagtggaagcctatgactgcttcaagaagcaaaaattcaatctacgagttacgtatctgttctcgattcatgattttatggcgcatggtattttctctggatgtagcatgcatggtagattgacatgtccttattgtggtcaagatacaaattgtttttg

SEQ ID NO: 59648 - DNA, 914 bp, Zea Mays
gaaaagtgcccccgcgcgcgcccacgctggcagatttgcatagaggcccccgcttgcctggataactcgttaagagccctcagccactattcatcgtctcactgacaatcacacataggtccctcgacttttgtttcttctccaatcagacccatggccacggcgcgctcgccgtcgatcaccccgcggctcgtactagccatgaccggcggcgactgtccaaattagctacggggtgagcattaccgacccaaggcgactcaagaacagccttcaattttggtttgtacacttagagaacgtcctacccacgcgcacggcggaaaccgtgacgtcgagcccgcgttcccattcaatcacgcccgaattggtcaaatggctgctacgatgagcttcacgggtatacagagctgctaaaacaacacttgagaagtgcagagccataccggagtagtccggccatggagcgcggagaagttgtgctcgctggtgacagaaaagggggaaaatggcgccgcgacggttctgggtggaattgggaggtgagattggggctacacggccgtaaggaactatagtttcactgtgcactaccaattttgggagaggtggagtggattccacgaatttgtacttcaactgagctcacaggtggagatgtgaatacctcgccgtggtccatggcgctatttatagccacggcggtccggctaacgatcaacgaccgcggaaggctttgctcacgcatggcaaccacatatagaagaggtagagtaagggaggagcaaggcatggatgacaccgcggtggaattgaccgagccacggcggccacaggtgaataactccggacatgcccggctgaactcgcgagatggtgccacgttcgaagctatcctcccccagatcgattcc

SEQ ID NO: 59649 - DNA, 317 bp, Zea Mays
cttggagcagatagaaccagatgcttcactctcgtctacacatgtttgtttaactgctttcaagatttggatcgatagggtaaatattatagaatcctaggagcaaattattatacaaagcgtctttcggttggaatgttacgttagtggacgtaacaacagactgcagctgctccaattaaaccccgtatctgtccttggcatgttcagatcaacctggttattcgtgaaatggtgccttcagaatccatgggcaagctgacagaaacgtccttttcccgacgaggaaaaccgcccccagttgtcgattcagcggc

SEQ ID NO: 59650 - DNA, 286 bp, Zea Mays
ggccggagcgaaggcggagattgggaacaacagaacaaatcgtgttctctggaggcaagacgttgagagagatggcagaggagagcgcgcggcatccggcggtgtggggcgagggtgaggacggagttggtggcggcagaatcaggcaagaggaggcaggggcgaatcgcgatgacttcggggcttgggcggtgggatcaggacacgggggtagaaaattgggtgggcaggatcggacgactgagattgtagaacagtagaatggacggctgagatcgcagaacga

SEQ ID NO: 59651 - DNA, 886 bp, Zea Mays
ataccttgtcgattacgtgcgaggcgtcgtcacagtggtgcataaacatcgccgtcgtcatcgtcgtgcacaggagagtgagctggggctggagttggtggggggggacgagcctccagtacatccatgcgtgtaacaagttcagcaactcgtcgatcaagctactcataggatgtcgccgcagagtcctagtattttttttaaaagctcaatcatcacgcgcatcatctccttcaattctagatgagagacacactcatcgtcgttaagcttaggccccttctccttgtccatttggttctttggtcctatcattgttagcacaaaacagagacaaaaggcaacaaacaatgtgaaccctacaactatctctcagggtggtggtggtggtggaacacaagttatgaagcgtcttaccccgctcttacaaggttcttaccagcactgcgggtggcaaacggtgaccggtgtgactgtccaacgagctgggtgtggttgcaaaggagtacttgttctgctcgagagaaagctggagctctgggaaggctgactaaatataaataagtggcacacaagtcaataacagatagcaatgctgaataagtgttccaagtactcgtcctagttgctggcctagaaaatgtaatagaacagttggaccaaggcacaagaaaggaggtacaagtatctaggtgcagcaagaaaataggcttggggcaaaataatcgtagaggtgcacagaacactggtgtttctgcttatgtgctactcttttttctctttttcttgcgattttttcaaatatttttttaatatttttctcttttgcagcagcacataagaaggaaacacaccaagtttcagatttttttggtgcaaagacgcg

SEQ ID NO: 59652 - DNA, 1038 bp, Zea Mays
ccaagtcagaatccttttaagtggggtagtgttcctggcagacttaaccgtcttgccatccaagggaattgatgtaatcctagggatggattggctaactaaacacaaaggcatcatcagttgcgcaaacaagacagtcctcctcaccgaccagcagagaaagtcattgcttacgcatcacgcctactcaagccgcacgagcagaattaccccacccatgatttggaattggcagccatagtgcatgccttaaagatatggaggcattacctaatcggaaacaaatgccatattttcaccgatcacaagagtctgaggtacatattcactcaacctgatctcaacctccgtcagcgaagatggttagagctgattaaggattatgacctcgaaattcactatcaccccgggaaggccaatgtggtggccgacgctctcagtcgtaaaccattcggaataaaagggaccaactttctagaagactggaaggaagaatcagcacaactaaatgcatgtctgggaaacaacggcagtctcaaagtcaagccaatgctagaagacctcatctgcaaaactcaacatctagacccagagacggcaaggcttgtggagaaagcccgcaaggaacaacacccggacctcaggacggatgaccaaggagtcctttggttcaaacaccgtctgtgtgtaccaaaaggggaggcccgagaagccctactcaaggaagctcacgactcggcctactccatccaccccgggactaccaagatgtacctggacctcaagaccagatactggtggaaggggatgaagaaagaaatagctcagtatgtggcccgatgtgacatctgccaacgaacaaaagtcgaacaccaaaaacctgctggcctattacaacccctcccgatacctgaatggaagtgggaagaaataggcatggatttcgtaaccggactgccccgaacacagaaaggaaatgattccatttgggtaataatagaccgcctcaccaaggtagcccatttcattccagtaaaa

SEQ ID NO: 59653 - DNA, 937 bp, Zea Mays
tgtaccatatgggtaggctccttaacacacggtagggtcacgatcgaattattgcaggtggaggaaagaagaaaaaacaacaccctcaaaatagttacttctgcaataatctgactgtgactattcgttgcgttttaatgcggctttaatccgactgtgactatggattctacaatatattttttctatgaattgtagatgtatcgatccgaactgataagatacagcagctgctgccagagggcagccgatacacagtacatcaaagctactagcgacaagcgaggtcaccctgctggcctggcgagactgtacaatgtgcagggcctgggccagcatgtacatgactactacattcacctttttcttggcggttagcatcggatcgaaggctacctacctatgcctagcttatatgcggtgaccaggaccagatcacaggtttcaccggccgtgccttatcaaaacatactaggcggcggaaacaatgttgttttatggaaacgatacggtcgcttacgagatttttttgtttttttacggttttgagccctaaaacttattagctaccgatttggtgtgtgtgtgtgggtggatggggtgtggggggggggacttgaaaagaaagagtggaatcaaaccgctttgtttttatctacttttccaaaatataaacttagtatgcaaggctatcatatcggatgtgttctcggaaaaggaattttgcacgaggccaccggtgaagtcggctactgactacctgacaatgtatgtatgtatagcaaactgtctgtcatctccgtcgtgccatgccatgccagccagtcggtcgacggcggtggttacggtggttgttgcgtgggcgctttcggccctttccgcgctgattcgcctcacatcagctgttctgttcccttggctcggtacctccctctcg

SEQ ID NO: 59654 - DNA, 325 bp, Zea Mays
ctccggtgagcttcccccttcccctctctgttgggttctagtcaaattagtgtagctcttgagctccgccacttcaccacgagcacgacacacctttttccccttgccttttccacccgttggcctcgccggtggtctcaccaccgcggagcctacaacccgccgtggaccggccaccccaggcatccaccggccaaattgactccacctctgtgaccccctaccccctctcgttctttgccaccattccgtccactcagaactggaccaccggcgaggaaccgctgttgggttcaccggcgaccggttctcctcgccgcggacc

SEQ ID NO: 59655 - DNA, 382 bp, Zea Mays
aacgtctttaatcaatgctaattatttaaccgtatgtagtaacaggtaggtgatgaaatggaaatgtcgatgcacgctacggcggccagcacattcaggcaagaagcagacaatgtttctctttctgggcggtgcacgttcctgatgctccaacggtgagttttccgttttgggcactggcatcatctgccgatacaagacatgcatgcatggtcgatgaaccaggtgctgtcagaatgaacttaactaaacaaagacgactaaactaattcaggacggcaatgcatcgagctgtactgaatggaacgcttttgcaccctccgggagcatcggatcctctgtgccacactatgctgtgtgctgttccactgctcaattggac

SEQ ID NO: 59656 - DNA, 511 bp, Zea Mays
ttttccgccatcgtgatcaagctctcaccgtggtcagtgcaatactggtccggtcttgccctctactctcttgtttcggcactcctacataccactgatgctcctcaacccattcaattaaactagaacacgctagattgttgggaacacccttgttcatccgttgtttacactgcctccgtggacagagtgatttagagctcgaactatgaaattgatcgaggggaaacgtttgttaggtgttgaattagatctcagccaaattagagcactggtcattgagtgtcgtagccgatacgagttcgccggagcttggttcctcgccgtgcgacgtcgtggacctcgggttgtgaagaaaaaagcgcgagggtttatttgcaaacgtcagtgactgaagcaacagtgtcacagactctttcgggttgtttaaaaagccagggtctttggtgcaaaaccgccgtgtaggcgtgcgcgtgtgggtgcgttctgcctaagctgggccggcttgggc

SEQ ID NO: 59657 - DNA, 828 bp, Zea Mays
gcaaggtcaacggacggaacatgagcgacaacagcgaggtcgagaggaggcaggaactacgtgggagggtatgggagacggacacgatgactgccgagaggcgcgttgaagaaaggtttttgggtccgaggcctcgagcacacgtcggcacatgtgcggccgagaacgagtgaaatgcggggaggcgcccaaacacgagcgtcttttaatactttaaattgggtgcagcagggtggtgttgggctttatggttatcaagaaatgatactgtttttgtccagactcgaccgaaatcctttttgcaggtcctttttaggggaacttactggcttcggttgtggggctaggttgcagcgaaatgaagatgaataacgggtggttatcgttgcctgccgacatggttggccctgcgtggctaggatttcatttcctgcttcatgagactttattaggtgcaaaaggcttatgttgcatggattgtaataaatgcggtctgatgctctccttgtgggagatgaagccggaaacttcgtttccattattaaaaaaagaacttactcacgtatgatggattcagtttcgaacttgttgtttaagacaaagtcagattcataaatgtgtctttgagatttgttctgaaatttattgttaagcttagtaacataagttagggttaatctttcatatgtacacgtacgtgttgttgaacgtaacccaacagacgtagtagaatccccaatttctcatactgctcagtcatgttgctttcggttacgtacagagctgacatacgtaattaattgtgacagccgaaatagagctctgaag

SEQ ID NO: 59658 - DNA, 601 bp, Zea Mays
tgcggccgaccgaagaaaccaagagaatcaacctcgggttcgcagacgagcgcaagacggtcgtcatcagttccagcctggatgacaaataggaaggcgcgctcgtccagttcctgcaagataaccgagacgtattcgcatggcaacctgcggatatgccgggagtcccgagaggacttgccgagcacaaattgaaggtctacccccaggcgaggtcgatccaacaaaaattacgacgcttcacacccgacaagagagaggccatccatgcagagttggctcacttggtcgcagccggattcattagagaagtgttacaccctgagtggttagcaaatcctgttcttgtactcaaaaagaataaagtggattggcacatgtgcgtcgactatacggatctcaacaagcactgtccgaaggatcccttcgaacttcctagaatagaccaggtggtagactcgaccaccggatgttctatactgtctttcttggattgctactccgggtatcatcagatcagcctggcaaaagaagacgaggaaaaaatagcattcataaccccatttggagccttctgctatacctccatgtcgttcggcct

SEQ ID NO: 59659 - DNA, 565 bp, Zea Mays
gacatggcatgcaagctcaacaagcccctctgtggtctaaagcagcccctgagcttggtacaaccggcttgccacatatttgctctcattgggctttgctaaggctaagttggatacatctctattcatcatcggtgtgatagtgacactatgtaccttctcctgtatcttgatgatattatgctcactgcctcttctttgggcctcctacaccggaccattacaacacttcagtatgccttcacaatgaaggttttatgtcctcttcaccactttcttgggattgcttttgagcgttgtccggttgatatatttctttagcatcgacaatacaccttggatatcctagagtgccctaacatactaaattacaagccatgtgcgacactcgtggacacgtagaccaaggtcttcgatgactgtgcctctgtcagcgacctcagtgcctatcggagtcttgccaacgctatttagtatctcaccttcactaggcccgacaacacatatgctatccgcgaggtctatttctacaaacacgatccttaggaatcacacctgacacaac

SEQ ID NO: 59660 - DNA, 391 bp, Zea Mays
tgccagcagccagaccgcagagatgtcgcagaggccaggcaggcaccagaggcgggcgtcgcagagcgtgttcgtgctgccggagaacttcgcgctggaggacgtgccggcggccgtggccgagggcggcggcgtcgagcagcggaagcccgcggccgcagacgcccccgagctgcaggcggcgaggcaggcggggcgccaccgccgggccatgtccatggccgtcgcctcccgggacctggagatgatctcggaggacattgggattggggcctacaagtacggtgcgtagaggtcgtgtgtgcttcgccagcttgttggctgctacatgctgctcccgtcctctggaccggcggtgcttctcgggccgtttagctaggagcggaagcga

SEQ ID NO: 59661 - DNA, 589 bp, Zea Mays
ggtgatcaatttggccgagccgtgctggcggccggagatgaagaagaacacgatgctgtgaattcgtgtccaccgtcgtggcaatctccccggcgacgatgggacagcaatagggagtcacggcgacgcggtggaaaggctcggacacgcggcacaaggccggacggcggctgtcgccggcgttcctatccaattccgccgcggtgacgcttgtacggtggccggaatattttactggccgaagttatccacggcgaggatatttacgcgactccgagtgctatccggttaccagtgagtgcgaatctcaacggcggcgacgatcccggcgcaaagtcatcggcggcgaggggcgcggttgatatgatccatttcaggtcactgtaccatggcaactactcattcagtgcacctgacagccaagttctagggcagttttcctcccaaattcctatggcaacatctccgagtatctgcataaaagttgtagtgctacataccagctacaaatcgactatagtgactgagctcatttgataactagatcatggttgaattcaaccccaaagatggctctgttacactgcaa

SEQ ID NO: 59662 - DNA, 411 bp, Zea Mays
ccagaggctgctgtccaccgtgggcagtgctcctgtgcgggcaaaccttggtgaagatccttcaactagtctcgcccttgtctccatttcatgtagcacggttacgactagaagtttgataactgcgtaactcaggccgaatcctggctatggggaaatactggtgccgtcgtggccagctgctgagagaggaaggagatcggtgggccgttggatcccggtcggacggtggagattagatctctggttaccgcttcagagttgagatctggggcgttgatccggagttcaacggggtagattagatcgtgttaaataaatttacggccatcgatcgaagatcctatggtcaagaataatccacgtatgactgtgaagcatttaaaccaggtccctataatttgcaaaatt

SEQ ID NO: 59663 - DNA, 573 bp, Zea Mays
tacgcgataggtgacatggtactggtagaagaagctaggcaattctgcccagggacacggtagctaggctaggcggttaggtccccgtcgctttgaagctcttgctttggtgattcacctctccacctactgagttcctcgccatgtttggacaacagagaagttcgttttttttctaccgcgcgcgacattgattgcaacggccgtggagttgcgtagacggcatagatgaagtcaccgactgaaaaaattgtagatttaattactgctctgcgtcatgactcatgaatcggttcagtggatcctggctcagtactcatcactattcactagtgcgtgcttgcgacggaacatgcagcacgtagtgctaggccacttgcatcgtcacgcaatgctacttgcatcgttacgcaatgttcttggcgttgccacacttctatccgattgtgttgttgcctatgccgacggtatattggcatttcatttcattatcccccgattagaatattttcctttcgatcgtgaaatgcatttggagcccgggccgggatctgatgccacaccaccatatat

SEQ ID NO: 59664 - DNA, 705 bp, Zea Mays
gtggatacatggtcatttgtcgggggcgatgaggtagtgggtgggttatctacatttggacaataaaatgataaattagttaatgctgatatgcaccagaaatagaaatgttctgtaataaaataatggttatacatacatactagaacaaactacatccacataatatcatggtgcgtaaaacaaaatgatagggtgcatctaaaatcaaatgaaaggtattggtgatgtagtaatacaaatgaatgcataagtaatatataatatgttgcataaaataatgtatttaaaatcgtatacctaaatacaactttagtttgaattatccgtgagctgaataatgttttaaaaaataaacataactattaataccttcttgctgagtatcacgctgtgtggcagcccttagaacttcgtcgatcatttcgccaaatgtctcagatagttcaatctgcttagcaacaagcatctgatggctctactgaagagaagcacagtacttatccacctctttgtcatgcgcatcaaacattgattcgaacatggggcgatgctgggagggcagacatttcagcttgttgccaatcaaatgctttatgcgtggcacatatatgttgaatacttcagaaaccggacgttctggtgcaatgacataacatgtctctgtgcggctacgaaactgtttaaatccaagttataactgtt

SEQ ID NO: 59665 - DNA, 421 bp, Zea Mays
gcctagcttgggatcaacccccgaagctgagtctagagtcctaagaataaagtatgaagttcttagttatgtgtggtccctctaaaatgttactcaatgcctctcttttataatgcaaggaggagagagaggtcacatcaaacttagatttcattggctaagaccaactatcatgttcttatcttgttcttagggccataccaaggcccttgcccctagtcatgacataatgttagagatgtcctttcctaggcgtttgccatacctaccacagaggcatatatgatatatcacgtccacgagcgtcaggacttgtgttgtttggtcaatatagcattttgtacttaataatactacatggcaaacttaatgtcccacttgtggctataggattgatgcacttatcttcttgttatctcga

SEQ ID NO: 59666 - DNA, 357 bp, Zea Mays
acaggtggaaagagtgacaaaaatgcgagagatcctgagtcctctaccagaggcaacactgtcgacggtgcaaaaggcttctaccgcgactcccaagaggagaaggatggtgaatgtgctggatgttgtactggagactacaaaggcgttgagccctgctcctgcaaagaaagtcgctccaactgaaaccaaatcgcaggccgaaatcgaaactaggcaagcagaagccgaagatatacaagttcaaactgaaaccgaagctgggccttcagtgcccgccgagacagagcttgccgcacttgaagaaaaggcgacagagcaaactgctccggaaaagattgaggttcctgcccccga

SEQ ID NO: 59667 - DNA, 567 bp, Zea Mays
ttgaaggtgaagttgaagcctttgacgaagttcttactggtcggggagatttctgtgcttacatgggtgcacggggagcggtgtcgttgctcgaaaaggttgttgtgagcacgcaaaatatgtgattcaatcaaaatttagggtttcggctattgatatcaaagacccttcggtcgaagctatttcactaggggaaattttattccgacatctggcttgttggtgggaggaaaatggtggatgaagctaccagagatagtgagggagagttccctttgaatgctaaatcttgtccttcaatttttgctttgatgtttgtgtagtatttttaagaaattgtattttggttttacaggctcatcgagccaccgaagcgattaaaatgcggaagaagctttgtggctggagaaattcataggtacactattttgctctgtgagttctagtttcgttataacttcgatatatgacatgaataactttttgtacaacggccctttccctaccaccaggaccgtatgatcctgaaaatgatctagaattgaaagatatccttgctgaactcaa

SEQ ID NO: 59668 - DNA, 1801 bp, Zea Mays
ggcgaaaccactgagatactggttctcgtaagtttttcaatttttcgactgtttgtattttcaaataaaatggtttttatgtcagcgttcttactagaggaagaacactgaacggaaattataggcaagaagagacgaagaaggaggattgagcgtgagctttggtattctgttatttccaaaactgaatgtcttttcctcccactctcctatttattctattacaaccactattcaatatgggccttaacgaatccattcagcaccagaaattctggagttgggcttcctagtgcgtcgacccatcatcctgtcttgtggcccttccatcgttctcccctgctccatcttcagaatgcccttcagccattaaaggagagctgacattccctcctcctcgaaagaacgcttgtccccaagcgttggctttaggaaattttgcacggagagcttcttcatcttcccatgaatccaatgcggcatccgactgtgaccacctgacaagcatctgctgcactgggctgcctcctcgtgatatcacctgtcggtccatgacttgaagaggaacttggagagaactgtcagtaccaggcaaggtagcactgacctgattgtcacctttggaaagcttgagttgcgatacgtggaagatgggatggacagtggcacctagcggcaactgaagcttgtaagcagctttaccaattctctgtagcaccacatatggcccaaaatatttgaaactaagcttgtgatttgcacgagccgctacagatgtctgaacataaggttgcaatttgaggtaaactgaatcccccacgttgaactctctgtcagttctgttcttgtcggcttgtgccttgatgcgttgctgagcccggagaagatgttggcgaacaacacggaccatcaattctctatcattcagccagtcctgaagatctccagagacaggcgtgtcattcagagtaattccaaaatgcctaggaagatggccataaaggacttcaaagggcgttcgtcccaacgaagaatgataactggaattgtaccaatattcggctatagataaccatgacaaccatttggatggacaggcgtgtacgaagctgcgaagaaaggtctcaagacattgatttacgcgctctgtctgaccatcggtttgtggatggtatgatgaactcatcttcaatgtggtctctgacagccgaaagagctcttgccacaagtgactagtaaagatcttgtctcgatctgatacgattgacagtggtaaaccatgaagcttgtacactgaatctagataaacttgtgccaccttgagggccgaaaatggatgtaacagtggtaggaagtgagcatatttagaaaaggtgtccaccaccacaagaatagtatcaacattacgagaacgaggcaaaccttcgacaaagtccaggctgaccacttgccaaacctattccgggacaggaagaggttgtagcagccccgggtatttactccggtcaggcttggcttgctgacacaccttgcactgagcaacataatctctgactgccagtttcataccagtccatgcaaatgtttgtttgactcggcggtatgtgacaggaaagcccgaatgcccacccaaaggactatcatgcagggctgcgataattgtcttatggagaccaggatctgctcccacccatactcttcctttgtatcgaataataccagattgcagcgtataaggtctagatgctgctccagtgatagacaaagcagacaacaattgttgcgcctttgtatcctgttg

SEQ ID NO: 59669 - DNA, 769 bp, Zea Mays
gtatttccatgcagggctcggctaggttgagttctcaagctcaaaatcacatagggcaattctctgatccactttcccgcaaacttttcatttttgtcgaacaccttcttcctgagtgcttccagtatcattccattggctctttccacctgaccattggctcttgggtgtgctactgatgcatacttgatctggatactccgttgttcgtagaaatcaaagaattcagagctagtgaagttggatcccaggtcagttatgatgctattcggtatcccaaacctgaatattatgtcttgtatgaattccactgccttggctgaagttagagaagcaatgggtttgtagtctatccatttggtgaatttgtcgatggtggccagtacgtgagtatagcctccctgagctttcttgaagggtccaatcatgtccaatccgcagcacgcaaatggccatgttataggtatggtctgcagctgctgtgctggtaaatgttgttgctttgacaagaattggcaagcttcatatctctagactaactcggttgtgccactctttgctgttggccaatagaaaccagacctaaaaactttcccgaccagagttctagatgctgcatgtattccacactatccggcgtggatctcatctaatagttgtttcccagtaaccgaggaatgcacttcatgaggattcctgtcgcaccccttctgtacagtgcgccccctatgagggtgtagtgggccggctgtctcgcgatgtgttctgc

SEQ ID NO: 59670 - DNA, 414 bp, Zea Mays
agaattcggccgtctgatcctagttcaagcgttcagattagatctgagccctgcgaaccggtacacacatctggccatcgaatcaagatcctatggtcccgattttatgtttgcccgatctgcccagaaccatccgatagaagatctacgactacgatcgaatccaccgaatcggtatgagggtcccctaatctggaccattgacgccgatccaacggctctaaccccctcttccccattcgacggcaatggagcacacatcggcgacgtacatggtggtctacgatggatgcctgccccgcgcaccctaacagactgattcgaagtccctatgcggacgcggcgggatgctaaacagagaggagagtacatgaaatctagacagactagtattaccacaaattagggcgcctg

SEQ ID NO: 59671 - DNA, 473 bp, Zea Mays
ggacgctgccgtccgctagatatatcggacagaaggctttacaggagcttgctggaggtagccttacggcccttaccacatatatatcaagattcgtgaaagccacggaatgagaaggagaaacgaggaaggtgttgttgacccatgcgaatctcgaaacagttttagacagcctcgcgctcccgaaacctagaatcattgtttgcgagacctgacctccaactccaataatgcagcaccaaccaacaacagtgcatctggtaatatcttcgatcatgttagatcgtgggacgcagttgagaaggggagcaagattcttgcgtctgaaccaccattctaacgatcgtaccgacagcgatggccaatggggcaatctgcggaaactgtagactttccggtaaacgaccgattctcaaatgaggtggacatcgaagttctgtcaaaattcactgcggcgctcgcggagcccaggc

SEQ ID NO: 59672 - DNA, 493 bp, Zea Mays
tctgctcgcgcgattgacaccggtatgatagaaatactgtaattagccatcgttcctgtaccacgctagattagggcgtgcctcatatcggggctggggccgtctgctcgccgctcgccgggcagcgaggaagagagaggaataggaatagaagggcgcaaggaggaagaagcgcgggtggccgtcggatcctcgtatggacggtccggattagagggagcgtatcaattgggttgggatcacgagcgccgtccgatattaatccggtggtccgcagggagcgctcctttttaaagaaccgtgatctaaccttggcctctggatctggatcctacggctgaaattggagaataccctttcggttgcgctatttgcagaagaaaccttatagatttagagattagaacccgccgtctagggaccctgttctctgtgtctaggatatcttgcgcatagccccctgcactctctggaaaatgacgcccagtctaga

SEQ ID NO: 59673 - DNA, 565 bp, Zea Mays
ctggccgcgcgctctgtctccacctctgtctctggcgatttcccagcgcccgccgacgacctcctctctccggcgacctccgtgctccggtgatcgtgtgcccgggctcgccttctccctctcggtgagcagcccattcatctgtctctttccctctgtccctttccctgctgtgttacagtaaccacccttttccacctcttgtgattctcttcaaaacctgtgaaatcttgtgaatccaaacagtggaatgtgttcaattgtccccattatgtctccctgtaggttcttagctccttcgggagggttttcccacctcaaatagccgtttcaccgaaaccctaatccttcgcacgccacgtgctcggtgaaatgcccaaaccagccaaacttgctccaattgaacccaaatttttcaggcaccttcaccacacttccagtaacctacttgccaaatttcacaccaatccgagatcccaggctcaaatttcaccaaaattcccgttttgagcgatcgtttccgagccgagtgccctaattcctttttcttcgcctaaattcaaac

SEQ ID NO: 59674 - DNA, 435 bp, Zea Mays
tttaccgcttctgacgaatttgaatttttttttctcgttcaaggactgggcgctcgttgcacggtgcacagacgacgtcctgaaagcctaccctcgcctccgactgagtcatggacgaaaggttgcattgcaccccctgacaacctgttgctcttgagggctggagatgaaactaactgctgggagatgcaggttttagaagttcgtccgatggtagactggaacaaggggaaggctgtggagttcttgctggactccctggggctagctgactccgacgaggtgctccctatctacatcggagatgaccgaacggacgaggacgcgttcaaggtccgtggtcaatttggttctttccttgtcatgttagaaaatggacttcgatgctttaaaacctgcaggttctacggggaaacaaacggggtttggggattt

SEQ ID NO: 59675 - DNA, 595 bp, Zea Mays
cctacaatggtggcaaatacatctatgggccactattatatgccctcttgtctcgcgcatgtcaggagcatgcatgtatccgcctgatgaagaggtagggcaggcacggttaccccacgctagccactgtaaggcacgttgccaccacacactatctcagatgacgccacagtgcgtcagaggggtgacagagtgtctctggccatgggacaagacgtcaccatgtacagcctctgtatcccttgactatgtccattgggtcccgctaggcgtcgctacatagaacatcaacaccggagtccctacagcaacccgtgtatcgggtagatggagcaatccgccatactaggtgtacaactacgcacgaacccaaaggcaacgtcaggaaaaccacattagctagactactgtagataataggtcgcaccctacttctgacacaaagtccccttgtaataacctctcccttgaactataaaagggggacatccagcttgaattctcgactccctcattctcacacttgcacttggtgcgatatcctagccctggaggattgtgatatcctggtcaaggcttaataggattaatagaa

SEQ ID NO: 59676 - DNA, 337 bp, Zea Mays
ctcttaatgtgtcattttgttattgtagaggccctttacagagttcatgtccaatccacgtgttcaagacgggagctaaggccatagagtacgaccttcttcgaatgagattgaggccctcatcactgtgcacaggggtttccctaaagacgagaaacagactcacttatagatgcaacctattgctgatgatgctaaggtgaacgcaattctagatgtactagctggagagtcatctaagtctgctatatatgagtcagtcgatgtttttatcgggcatgtgtgcggtggagacaaaagaatttgcagccctggtagcgcttgtcgcaagcgaaca

SEQ ID NO: 59677 - DNA, 741 bp, Zea Mays
tcatggcgaagtctaccaaacacgccaggccgcgaagggggataacttctgccgatggcttgaagatttggaaagcagcagagatgacccacgacgcctacattggtagacttcgctacaagatgcgtctatgtaacagagattaccatcagcatggcccacctgtaagtgtggctcgggagtgtatcaattgcagtgtaaccgagaaatctgtacttggtcatgtaattaccctgttgtacaatgcatggcaggaatatagttggtagcccagggcattacgttacttattatactaacccacgactaccttataaatactccgggcctgtaactgtccggacacgcttggtaatacaatctcgccaacaatttgtcgcttgattgtgctactcgctccccctgtacccgagagttgggttacggattcccgtgtcaacatttggcgcccatcattcgtgctccgaacagctgccatgatggtcgtaagaaagtgaccaccggaacaacgtcctctctgtacgacgcctccagggcagccctcgcaggcaagaaaggcaaggcagtcctagcagacaacaccctgccagctgcagttgagactgacaaaatcggtccagcaaacaacgaacaccatcgcaacgaagaccccccacacacacctgaggacaacatccacacatacaccgaagagatcccccttggagacacaccaccacgtttcccacccatgggacccac

SEQ ID NO: 59678 - DNA, 362 bp, Zea Mays
gctctagtagtctgggtgagaaaattacaacatgggctgatcaaagtcctcaaagcaaagggtgaaggagatggagtcattgggttattttccagtggggtttggcaggggtagaggtgcggagatcacaccacgaccggtgggcaagttggtggtcttcgaaagtcttttcagtgcggtacttcgattaccctaccatgaaattttggtgaaagttttagagaaatttagggtccaactccaccaattgtctctaaatgctatggttgccctaagcaagtttgtgtgggcgatggctacttttgggggacttcgtcagctgaggtcttcatgaagcattattgtttacactagcagaaaat

SEQ ID NO: 59679 - DNA, 294 bp, Zea Mays
gagtcgacgggggacgcccacaggttcccgcagcgcccgtcgacgacccttggggggcacggcttccacaactactgtcgggaggggggcaaagggttttcctacacccaaggtccactcccgcacaatggtatgcaacctgaatctgacctcattccgttcatgtctttagttcctcatcatgatacactagctggatcaatgtacccccaaacttcacacctcctcggccaattgcctaaagtgccttttcctccctttgatggggacaatcccaagctgtggcaaactcgc

SEQ ID NO: 59680 - DNA, 1028 bp, Zea Mays
ttcagattctcacttccattatattatactaacttcgtgagaaaacgatattataagattatactcgatatatggccatagtatatgcaaaacttcaagctcttggcatacagcctcatgattttcatacaattggaaagcaagtatttttttaacgcaacaattgaaaagcaagtataaccaggacaacagatgcatgacagtaactgaacataaatattagtcagagaatatccatttgttaagacttcccaggacaataacgtgattggaggatcttacagtgataagagattggtaagatttccaagctcctttgggacaggtccagatagtgcattgatgcccacggtccttgtgatttttcaaggaaaagaatgtaaataagattgctgaaaaactgggaactgcagcacgtttttttatttcagggtattacattgattccagagcagttagttctccaatgaatgctggtaatggcccgtagaagtaattttttctgaagtccctgaaattttaaggtgcgttaatcctgcaagttcaagcgataactggactggttgaatgcagctactgatttttactatcaacatgaatctgaaaaacttcatgtgcactggagatttcgagtcgccttcagcttcaagttaggtatctcactaatgcctgcctaaggaaaaaacgatcttaaccaaacaaacattacgagcacggcgcaccccaagtgtgaaaagagaacatacatgcgttatcatggacactgaccaagccacacacaaaaaaatcagcaggcaaacaaattagccagtgtggttgtgggcttgtgccgctgaagggaagcatacggtacagacacaacggtgacttgaactactatcctaggttaagaatgagctaggaattgcggggaaaagctaccgagcttgaaatcggaatacgagcggagcactcctcgtttctccgacgggcaagtgagacacggccgtctgcgccgtcgaagagcaatggtatgcgcccagcggcgg

SEQ ID NO: 59681 - DNA, 2908 bp, Zea Mays
gacctggatatacaacatagagaatctcatagttcccaaagactgatggttttaaagaaacttttttgctccacaagctttcaaatgctgaaaatgctgtagcattgtcgaacttcacttgcactggaactagatcaacaagaaccattgttttgtcaggttgatcacctgcaacgttcgcacccattacacggacctgcctctgtgccatgtttacccctgaagctacctcttcagcaaaatcagagaccaatggaaaaaatgagtaaaggtcaacgcttagacgaattccaactctgattggtagcacacatgcacatggtgctcccgcaggtggatctgttagaggctctgggcatgataaggaattgcaatctgcatttggcaggttaaacatataagcaagcacaaatatcatacgccatacagttattaccagatcgaacatgtaagttttggattgacaaccaaatgaggacatctacagaaaactgtacctatgcttccattatcttaaaaagtacagaaaactttacctgaattaggtggtggtggaggtaatgtccaaataggatgcgctgacggtgcttttggctctggtaggggagggattgaaggaagagtaggagaaatatgatttcctgtggaatccagcagttctgtaaatttctattgacaagaggaaaagacaacaataagtgaagcaaagagacaaggcactgaaagtacttttcttcgcgttcgcaggacccctcgatgaggctggtgaaggggatggggagtgtacaggaaagctagggtgtcctggacagaaaagaacaatgtgaaagttgttagtaagtgaaatgaatgcaatctttaaacccgcatgttagcgtagattaccttgagggaatggtggaggcgcatggtgagtatagtttttagtcccagtctgtcttggggttcgtgagacctcgggccctgtaatgcaaagtcttttagatcaatgttgagaagtgacaatatttaggctgccgatagaagttcattgtcaaaccttgagcacgaggcggtggataagatggggcatgtaatctatttgttttgttattgggattactggatttccatccctgagcatgagatctaccagtgggtgccaattctggagctatacttggtggtgagggatgggcatgtggcactgatgaagcattcttcgggattgaaggcatgtttgtgttctggggcaaaggacttgttgcaggcgcagatcctgaaacaagtagttttggttgtcaatctacaattctacattgtaatgttcaaatggacacagcctaagtttaatagctgagattacctgtaactggtgatttgtgacctgggacagtttgaccagtggatccctttggaggggatgcatgtggaacatgatgcttcttgagatttgtaggagggtaagtatttgctggcggcactgcgtttcctaaatattcatccaatattaagtacaaaagggattaaaacacaatcagatgtatgaaactgggtgattttatcctcaccgttcttataatctctacttggaggatctgctcgtcgctgtggtgcttgtgcaataacaggtgatgtggctggaggtgggactgctgttcaagaaatgggaaatgacaagagatatatgttgcctgagtgatttgatgtactttcagagaggggaattttacctgaagtggcaggaggaatagcaggaaaccttcctgaaggtgggtatggtggaatgccatttgccggagggggcgatgcagggggtggataaggagggactgcagaaatttttcacaagtgaattgagatttttttaaaaaaagaaaagtttcatgaaaatcaagaaccttaatcacttctatcaatcagaaaatataccagacccaaccggcctacttggttgattattcgcaggtggaggtgacaccacgactggtggattaggcttgagaacgacagatggagcaggagcctgaacataaggtagcaatgcaggtgtcccaggaagaattggagtgggatttccaactgcagcttgtggtggagctactggtggaggaacctcatcggtgggatcagtgggtgcaacctcaactggaggaggtgcactatactctacaataacataaagtttgcagtgcagccattaggactggaagatcatatctgactccagggacaacagcagaatcggaggaagatgagttacctttaggaggagccactggagccggggcaattcgtggctccgtgggagcagcaggacttacagccgcggctttctccggggaaggactcgccgatggagtggtcggcgctgaaacgaagcaatgcagtaaggcgttacactccagtgctgattatggtctgacagcataatgtcacaaacgcataggaagttcagagctactaccagttggaacagctactggaccaagagcaaatgcagattgaggaggactagaagcctgtccttggtttgcaggagaatcagtggcggccggagaaggggacagagtggtgcctagatcgaagtaaagaagacgagttcatggcaaggattgcaattatgtacgctgccccccaccaacaagttttacagtcatcagtatactgtaccgtaccgcagaactggtgcaatgatgatgatgcaatgcaagtacggggcacggaaatgcccgtcacatttatgcagtgtagagcagataaatagacacgcagacatccgaagcagcgttttcagttagaaagtcgcagcaaagggcaaaagccaaggaggagatggagaaacgcccagccaccgacattgcagcttgcccatctctgactggaaattcagaaacataaatcccattccagttgtatcaaatccaga

SEQ ID NO: 59682 - DNA, 561 bp, Zea Mays
ttccaagttctccatgcaccctggtagcaacaagatgtaccatgatcttagatctttatactggtggaccagaatgaagacggaaattgccaagtacatatccgagtgcgatacctgtcagagaatcaaagctagtcatttgaaggcagcaggccctttgcagccccttccaataccatcttggaaatgggaagacatttgcatggacttcatagtgggattgcccaatacctccaggcaccatgattctatatgggttatcgtggacagattgaccaagactgctcatttcttgccagtgcacaccacccaccgggcagagaagtatgcagagatctacattgaccagatagttcgtctacatgggataccaaggactatagtctccgaccgaggagcacctttcgtggcacgattttgggagcaattgcaggaatcacttggggcccaggttatacgaagctcagcataccatccccaaacagatggtcagacaaaaagggtaaatcagattttggaagacatgttgcgagcatgtgcactacactatggaaaggattg

SEQ ID NO: 59683 - DNA, 1252 bp, Zea Mays
gaaagttaagatatttttatataacaggtagggagatcatttgacaagtgggtctcaccggtgggcaaagcgacctatcaaaacaattatgaaatggtcaaagggggtattttatctggttttgaaaaccgagggatgtaagttgtttgttgttcaagttcgagagggacatctaacgttagttcatgggtaaattattagatatggcgctcgtggaaggcgtgcacgtatgagggccgggaggagatagctcgatgatgcactgttgtgtacacaagtagctcgtgggggtgagtcagtagacatgagctagctgaggacaaagacttcactgttggcgtcagtagacaggagctagctgactacataccacagtggcacagtgctatgcgtacgtgttggggacttgatcgagatcagctcagcatgcagatgatgactggccgggattatattactggtacaatccaattgattaagctgtacacaggtagtagtagctgttagatcgagtatacgtacgtgaccaaataataatactaacattctctcgatctcaaataaagcagtacatgtgcaacaaaattcacatctctctgacacacacaaacgtagaggtagtaggtgactacagagagagcgacccagtggagcaataaagtgtaaaatattccatggattatggatgcatggccggccggccgggggtctattattttcttgcagttgcatgcagtagccagtagagtattgtgctgcatgctgtgatcgacgagtccaccacatgcatgcaccaataatgccggatcggatgccgtcggagtaaatgcgaagcacctgggtctggagcgcccgcagcgcagcgcagcgcgcacggacacgtaaataatgtcactgtgatccgtgccgatgcatgcaactggcctggcgagatcttcgagtggtcacgtgtggtgtggcatggcatggcatggcatgccaggatgtcctgcttgcacttgctagcaacgagctacaggtacccaaaaatatattgtttctatcttgtcgtgctccgtcggtatgggctctgcatttctgcgatatgcaacatgcacttgctagctagctaggtgttgttgtttagttcacgaaaggtagtataaatggtaatggtaatgattcatgctgggataccaggggactccagcctagaccaagcgcaatcaactacatgaatgagtctcttgaccatcaacgaactccaaatcac

SEQ ID NO: 59684 - DNA, 473 bp, Zea Mays
tggatactgaatagggtttcgtcggagtgggaagagagtgggaggagatggcggcggcggcggcggcggatggatgtatggcaggatgtaggggttttttgaaaggtagcactagcagcctgactagttggaggaggagagggtggggtgaagagtcgtcgtggaccggattctgcgctgattgggcccgaagaaatgggctttgctgaacaggcgggagcgatatcgttttcctgcacttcgtccaaaaagtgaagaacgtgtgtacgtgtgcatgcctgggtgtatgagagtagagaatgccacaaatatttggaaatatgcctcttgtcgtagtaataagtgatacactagcaaacaacgacattagtttaaataaccaggttgtttatcaaacaacaaaatctaaacttaatgatcaatccatttttcttacacccaagatgatcagttgcaactacgtaccaaacaag

SEQ ID NO: 59685 - DNA, 347 bp, Zea Mays
gctcacacggtcgccgtccgactacaattaggccaactgggtcaattgcatcttggccaacgaataatagtgtcctcaccacaatttatttggtggatttactagaggttgagtgtgggttaatttacaaaaccgactcaaccaaatcacttccagacctataaccttccctaaatctatcaaacaaattacactcacacataacacactctcaaaactaacgattcagattgttagatcaccgtacttgtctcttacttatttaaattcaataatagctaatattatccagatcattcttctttcctcatctcttacacacattagctcctgccaacccccgcgac

SEQ ID NO: 59686 - DNA, 946 bp, Zea Mays
tatgtttcttcgaagctttctggtcctccttgacagatcgggtagcttgcctacctagaattctgacaactctttttcttttggcccctccagccccttcatcaagcctttcatagtcaagatattcaaagttaagagcatccataacacagttcaaccttcatttcggccgggagccaaaggcggcagtcatcaactggtcttccttcttcatatagttctcaagaatctcgttgcacattgtttctatcaattctagccatttagtgcatggctctttaaatgtcttctgaaatttgaagcggtaagggagtcggacaagttcatactttttcccttcttccttcttccttcttctttggcattccccacccactggaggttaggacggttctgtttgccaagtattcttgcaccaaatctctagagctaatatgcccagccaccaccctaaattccacatcggctagttggcagggtgagcctagctaaatattgcacaaaggtcgagtcatgccgaagctcagtttcaaaggactcattaccatggtcacgagcttctcccttttcttctcatcagccttcatgtaaaaccattcactagtccacccggttggccgtttagtgcggtagccaatcaccggggccttggtgtccttccgatatgaaaaattataacacccgaagttcttgtgcagaccatcggctctagccttcgtctgatagtgaagtccatgcactcggcagaacccttcggcgttagcactttttccttggcttcggagagcccatatgtgaacactgagcctaacaatggcattcggggtcagctgatggagacatatttcaaatcttttcaaaacttcccctatcatatcgtacagggggaaccgaagccctgccctgaagaagctcttaaacacaacaacctcatcttctttcggct

SEQ ID NO: 59687 - DNA, 613 bp, Zea Mays
aaaacacctagctaatcatcaagtgattctttgatcactcgggtgtctagagataatgtgtgtgagtctcaacatacttgtatattccttagcttccacacttctcaaatggttagttttggttcttatttatagtcccatggaataaatcaactgttgcaatgcaacaggcctcactatgcaccatcgaactatttatttgaatacaatgcctcacatcggctactatgttagtacatcttcaacactatccatagaactatttatttgttgggtgcattcataccgtctaaaacctaccgtcggaccaatttgatatcgcatttcctctctagaaccttttgcataactgccgaactctactgatatagcctgacaagtgctgaacaatagggtgggatgcctcttgtgggtgtgaacagtaagactttttggtataacacccttcccttaatgagtctgaatgtctgatgcttgggtctcatgactcctgttctttagtcggttagggttagcttctagggtatagtccgatatccctcaggatggtccaacgctctagtatcatgccctatacacccttctcttgcttcgtttcttaatgatcttcgtg

SEQ ID NO: 59688 - DNA, 501 bp, Zea Mays
caagaacgccaggaaatgcgtcaggaatgattggaaatgcgtcaagaaatgaggcaagaacggttggaaaggcaacaacaaccaccactacctccaccaccaccactagctccacctagggataagcaccgggagtttatgagtcacaaacgatcaacattctctaactccgtggacccactgcaagctgatgactggttaaagtctatggacaagatgctcaatatagcttagtgctttgacagagaaaaggtgctatatgcatcgggtcgcctgaccggacccactacggattggtgggatgcatactgcgctgctcatgctgctgtcaacacaattacctgggcagaattctccactcaattcaggaattaccatattcctgctggactcatgaagattaaaaggaaggagtttctatccccgtaagcaaatatagagacaaatttatccagctatctcactatgctcctagggaagttgaggatgatgaaaagaaac

SEQ ID NO: 59689 - DNA, 540 bp, Zea Mays
gaataaccgcagcgatagaattctgactcttccgcttaggcgccatctcaatctcgtcggcgaattgagcggaagcgagatcaaaggtaaacagaggaagtctggaggcagaaagtaaagctagggcttgaagtgcagaggcatgcggcgacgcagtacaagtggggttttcccgagtcaggcaccagttctaaaaagtgcccagtcatcactcggtcgttatttctaaaacgctgacgtggctcggcataactcagcgattatttctaaaaacgctgacatcaccaatcctcactcggtcgttatttctaaaacgacgatgtggcttgatgtgacttagctgttgtttctaaaacattgacgtcacccctaatcactcggtcgttacttctaaagcgctgatgtggctcgaaaggactcggctgatacctctataacaccggcgtcgccaaaaaccgttcggctattacccctgaaaactccagtagtaaaccagaccgttcttcctccacgtaaatctatacagaattaaaatacgac

SEQ ID NO: 59690 - DNA, 516 bp, Zea Mays
ggcgcgcaggagcagcaggccaaccgctaatcaaactttggccccacctgcaggctcgcatcctcccctgaggcgggcctgggggccactgtcggtaccctgaatcaggggtaccctcttctacactatgaagacgttgcacccgtatgacacctccaggccacacggagaacaacacccgaccccaccacatgggtaggtttaaaggcaccatgtggcaaggaaagataatacatcataggatgcatcgttggttctggacctccacagagagacaccggacccctatacgtacaagtccggagctcccaaagaaggcatgtcgggtccctcgggtgggccccaggtccctctgagtaaggtccgggccttggcaaggtcctgggatggggaggaccccgacatgagtaagggtccggtgctgacacgtgtccaggccttgccctacgctccccgctcaggcggagacccgctgctgccgcgtggcttgtggcccgtgacataagccaatgggcc

SEQ ID NO: 59691 - DNA, 1093 bp, Zea Mays
gaagcctgtcattgagtcccctcttaaaacaattctttttcttcagatttgtattcaattggtcaatggcatactgggagagatggttgaatttgttgagatactccattacagtatctccccttgctttaaccggataaactcttcttgtttcatatggagcactccctctggaacataatgctcccaaaacgctagcttgaattattcccaggtaatctgatgcccaactggttggattgctaaaaaatttgcccaccaagtgctggcaggccctcttagttgttgtgcagcaaataatggcttttgtgtctccatgcatcgaatcaacccaaacttctgttgcatcactgttacccactcatcggcttctagaggttcttctgctttaatgaagagcgggggttgagtcttagagaattccaaatatgttgtttcacgtggtccttgaggaggagcccttcctccgtgctgttggagctgattgcccgccatttcgcgcaagaaacgcgtattatcagcggtggcattgaccagggcagtgatagcctcggccaaagtcggtggtactggtggcgggttgggagtatcctccctaccgcgggaagtccctgcaccatcatgtgcgcgagtccgtgatggcatctgaggcaaagaaacatttggaaaaaatatgacatgccagcatacaccatcatattacattaccaaaatgtaataattatacagactccagtgtacaactcgacttcattacttattttacataagtataatatctaaactatactattctagtcttcttcatcctttgttgcttcatttcctgctgcaggagactgttcgtcagcaaggttcatggaaggagggggcctaaaaaggtccaagtccccatcaggtccttcatttgctgttcccaatggtccagctcccattgcagcaacatcggaaggcacgtccgggtgcagtcgagcatacaatacatgtacttcttcatgtaaagtattacagtacaattgtaggctttcgagggacgcactaagctctaccacatgagctagagcttttgcttcgtggtcccaagcgattgaac

SEQ ID NO: 59692 - DNA, 564 bp, Zea Mays
caagaaagtcttggtttggacatgttcagccgataaagccaaaggaaaaatattatcattggtgaccctcgcgtgccaaatctatcacacagggtggttactaggaaggctctggatagaagaaagtctaataagaccattggcgccaaggggcatggtgcaccaggtatgcccaaatgtaaatgttttggaggtgaaggtcgtgataaacaaaagggtaaaaagccaaaggttacttttaagcaacttctggctaaatatcacaagcaaatcaaggcaaaggattgttgatcacactagcaatgctaagtcatctagagcacctttgaagccatcaaaatcacctccgaagcgtacatctaaagatcaggattggcgaggagaagagtttcatgcatcaggaacatatcctccttttgggctgcaaataccaatgcaatacagttcagctccttcacactttcattcttatccatcttggtgctggtatgatttaaatgcatattcttcttcacattttagaccacataacatagaatattcagctcattccaattctgattt

SEQ ID NO: 59693 - DNA, 695 bp, Zea Mays
acaggagcgcgcccacgcgcgcccgcgcacgcgacgacgactttgcgaataagcccctgtagatttgaataacccgaaggagtccaaaacactatttaaaacagtcactgacactttgcagaaataccctcgcacttctatttcttctccacaaacatccctggccacggcgcgctagccgttcatccctgacgcgacccgtaccggccatcaccggcgatgactgctacggctaactaacggagaggcataactgacctaggatgatctaagaacacccatttatttgacctaaaccctactgggaacagtctgtccacgatcatggcggaaaccgagttcgtgagcacgcattcccgccaaaccatggccgaattgagtaaacggacgccaccgtgagcttcacaagcgtgcagagtcatgaaaacaatacgtgaattggacagtgtcttaccatgggggggctgttcttggtggcgcggcggaccgatttgggggaaatcggtgattcaccgactatggtggctaatcgagggtgggagtgggtgcttcggctttgcaatttagagacgaagagctgtgctcggttgatttgaacggagggggtgaggataaagtgaatttataggcgcagtgagccactgccatggccatggtgataaccatcgccggccttagctggcgatcaacggcgg

SEQ ID NO: 59694 - DNA, 657 bp, Zea Mays
ctctaccataatggttaaaactttagagcagcacctttagatcccggattcaatctccttcgggaaccggttacgtcctgcgcgtcatccttcctgacagagtttttaatttgggtaccaacccagacctctgttcaaaagttcctatcgttttgctctgtttgcaactgtgtttggttgtaaacatttcatgaatttccttgtgagcaattcctgatactttcttctgctgcctacttgctggatgcctaaggagagaggcaaggtggccaaatttggtttcccgtttcctcctatttcccttttctctgttaaagaaaagccaacaacattcagaaaggtctcatctcccatgcattgaccaccttctgcactgctgcactatgcagggaccttcttctgatgcacatgctgtgttgctgacatctgtttgcttctagacatcctccaacaatccgtttctcttttcgcctttctataaaatacgtccacatcattgttgattctgatcctttgtggctttgtcgtctgcaactgccagaagatatagcagagctgcagaaggcactgccaggatcaagggatggagttgaggggatgcgtctgccggatcaagagctcggcgcttgagcttctgtccatggaggaggatctgac

SEQ ID NO: 59695 - DNA, 433 bp, Zea Mays
ctcaacctcagacagagaagatggcttgagttgattaaagattatgatttggaaatacaatatcaccctggaaaaacaaatgtagtagctgatgctttgagccgtaagggtcaagtgaacaacatcactactcatttgatgtcacaagaattgtgctgggaaatggaacgactcaaccttggatttctcaataatgtagaagcaacggtgatggaagttgaatctactttggaagaagagattcgtaaaggacaagagtccgatgagaagattaaggaaattaaaactttgattagtttgggtaaagccccagatttcacggaagatgaacaaggcacagtatggtttaaaaagagaatctgtgtacccgaaattgaacacctgcgccaacttattttgagagaagctcatgattcagcttactctattcacc

SEQ ID NO: 59696 - DNA, 392 bp, Zea Mays
actaacttgacaacttttgtatattcatatattgcaatttttagaagggattggagagcatgtatcaatccaagttactgaactgcagggctgtttgaaaactcaaatatcctcctgaattgaagggaagtaagggttagtttggaaaacccgtctaattggcacaaagcccaaaccacgaggtgctaactcacatttagggctagtttgaaaactcaaacccttatctccacttggaatttgagtttctaaactagctcttaaagcgtttaccgtcacacgcaacaaccaaaaccagcgccaacaaaagacagttcattatatgtccagaaggcttatgacagcacacaggctgtgatgatataaatatgcctcagttttttaggcttcac

SEQ ID NO: 59697 - DNA, 577 bp, Zea Mays
taatcggagcagggcgcatgtgtaggttgcggcgtatgctgacgcgctaccacatgtaggggtgctaaggcggcggcgtcctgtcttctccgcttgtctcccgttcgccttggtaacgtgcgggctacagtgggagtcataatgacagcaacccaagcggcgcagggagtcaatggtcttgcctggtaatgcgcgagttactgtgcgacctgcttgctgcagacgcaccgtctgccattgggtgggcaggtatacatctcgtccgcagttaatgtagaggtgccttatacttagaggttgacgtcaggctttcctcgatggcttacatcacgtgtcgtagaacacgtggcagcaccggtcctcgccttgtgtggggagcagtgactgagatcgcccttcctcgtgacagctatggaccctcttggctcggggtccgtatggtgttcgaggaaggtcccgtctcctccagcattggccagcatgtagcagcacctgatctccttaagacagaggtctaggtggcccgtattgaggattggggtcgttcccagggtctggccctcgggcgcaggagtgg

SEQ ID NO: 59698 - DNA, 298 bp, Zea Mays
aaatgagtgcgttgctccagtatcaaataacacttctgcaaggtgggattcgactgagaacgtacctactatcatgcttggtgtttcctagactacttcgacctcctattggttcagcctcccatggttgtagcgtgtctgaccattgttgcctgctccttgctgagctgcattctgtcttgctggggcattggggttggttgttgttgagccatcttcttcaggcaatgcatcgcccagtggccctactctccacagtggaagcatcctctgcatcctccttgcacagaggctacct

SEQ ID NO: 59699 - DNA, 466 bp, Zea Mays
cgagggtatagtactaagtgttgatcttgagttgtgttcaagatcgatctctagcttgatcacggcttcagaagtgcatcacagtaggggtacaacagtaacaggcaagacgattaaccacccagtcacgcaactcgcgcgtgacatggcgagtgggtcgtatcatgtcccatcagagttgcccatgccaagagggatcatgatggctagtccttccgctacgccaccctagtaagttgcgtcatgtcaagtcaggtaaaaaccaaaacacgcctcaatctcccgcgtagagcaaggggtgggatgagcaagctcctagagagccgcaagctaggtaaccggctcataggccatttgctcagctccacgtccaaggttgtacctcacattctccctcggtaacccagctaattgggtggccacgaggacccctttggtcggctaggccgaccaactggtcgaaacg

SEQ ID NO: 59700 - DNA, 433 bp, Zea Mays
cagatcagtctggcaaagaaagatgaggagaacactgcattcctcacaccgttcggagcgttctgctatacctccatgtcgtttggcctcaaaaacgctggagcgacttactaaagggctatcccaacatgcttagccgaccactgggcaagcgagtagaggcctatgtcgatgatgtagtcatcaagacagaaaattcagataacttcattgaagatttgcaacaggttttcaatagctcgagacgctaccgatggaaactgaacctagagaagtgtgtgttcggagtaccggctggaaagctactcgagtttatcgtcagccatcgaggaacagaggcaaatccggaaacaattgaagccataatgaggatggagccaccgcgatcacagaagaaagtacaaaggctcactggacgcatggcagcgctgag

SEQ ID NO: 59701 - DNA, 596 bp, Zea Mays
ggcgagccgggggcagccctatgggctcgtcgaagatagcgccatgctgccgaaggaggacgtccatgaggggctgctgagcggcatcagagatagccgcaacaagttgttgaggggcaggtggccgtgaggcacgcacgccctgctagtggatacgttggccctggtgcaggaacgacagggtcagctcccggaagttccactagatggtccccagcgtctttaagaagtccacacctaggatgaagtcgaagcagccaaggtgcatcctgacacatgtgatggagaaggccttggagtcgataacgatggggacgtcacgggcaatttctgtgcacggtaggcggtcaccattagctacagtaaccttgaggtgttcaccaccctccataggtagcccgaggcgacgcattgtgtccccattgaggaagttgtgggttgatcccatgtccataaacgccaatagtcgctccccttttatcatgacggaaatcagcagggtcttgtccgcgtggatgcccgcgagggcgtgcagcgaaaccaccatcgtgttggccctggcagcgtcagcaaccaccggcgcctccaggaggtca

SEQ ID NO: 59702 - DNA, 2187 bp, Zea Mays
tctcaatctgatggtccgatctcgcaagaacttcctcaacatagagagatgaaaaaccgggtgtagccctgccatggaatccggcagttgcaagcgataagccaggctacccactcgggccaagatagtgaacggtccaatgtatctcgggctgagctttccggagacaccgaaccgaacaactcctttagtaggggataccctgagaaggacttggtcacccactgcaaattccaaatcccgcctcctcacatcagcataactcttctgacggctctgagcggccaaaatgttctgacgaatttcccgaaccttttcagaattctgctgaacccaatcaggaccaaccagggatctctcccccaaagtctcctagcacagaggggagatacaccgcctgccatacaaagcctcaaatggtgccatcttgatgctagcctggtagctgttgttataagcaaactctgccaatgcaagatgatcctcccagctacccttccatgacagaacacaagcacacaacatgtcttccaaggtttggatcgttcgctccgactgaccatcagtctgagggtgaaaagcgacactaagtgaaagcttggttcccaatgcactatgaagactctaccagaatttggatacaaatttgaagcctcgatcagaaacaatggacttaggtaccccgtgaagcctgactacttccttcatatacaagggaaccaaatctgaagctgaatttgtggtcttcatgggaataaaatgtgtagacttagtcaagcgatccactaccacccatatagcatccctgccccgaggagaacgaggtaaacccaccacaaaatccatggtgatatgctcccatttccactccggaatttccaatggcttcagtaaacctgcaggtcgcttatgctcggccttcacgcgctgacatacttcacaggcggccacatacttagaaatgtcaaccttcattcgcttccaccagaagttttgcttcaaatctcggtacattttggtttctccagggtgaacggtgtaaggcgttttatgagcttctctcaagatatccatcttcacctctgatttctgaggcacacaaagacagcccctgaaacgaaccaagtcattctcatcaatggtgaactcccggggtttaccatcaccaaccctctttcgagcttcctgcaatagacgatcctgctgctgagccgcatgcactctctccatgagggaggattgaataagcatccgagtctcctcactagcggtgccgacatagcacaaagcgatccccaaatggtccagatcagcgatcaaaggcaaggccacttttggaaccccggacctgctaagggcatcagccaccacatttgccttccctgggtgataatgaatggacaaatcataatctttaatcaattcaagccatcaacgctgcctcaaatttagttccttctaagtgaaatatacttgagacttttatgattggtgtaaatgtcacaagcctcgccataaagataatgcctccacgactttagagcaaaaaccaccgcggccaattcaagatcatgagttggataattcccctcatgcttcctcaactgcctagagccataagcaatcactctgccttcttgcatcaacacatagctaagaccaattcgcgaagcatccatataaactgtgaaacgcttaccgctctcacgcaaagctaggataggggcgtccaccaacttgctcttcaatgtctgataactgacctcacaatcgttggaccagacgaagagaacacccttctccaagagtctagtcaaaggattagcaatgctggaaaaatttggtacgaagcgccgacaatatctagtgagccccaagaaacttcggatgagacactagagggtctcttccactccaccacagccgcaacattcttgggatcaaccgcaatgccctgctgattaatcacatgccctaagaaagccacttcggacagccaaaaggcacacttcttcaacttgccatagaactgattcttccttagggcacccagaacgagacggagatgatgctcatgctcagcctcagtctttgaataaatcagaatatcatccaggaacacgaccacaaagttgtccaagaactcatgcaacatcctattcattgcttccataaaagcagcagggg

SEQ ID NO: 59703 - DNA, 969 bp, Zea Mays
gcagccggagtgcggaggcgatcccgcatgaacatccatggaagtacaagagggagaccccgctcggacaccctcgggggctgggtcatagtttgcgctacccacgtgagccggatcatctccggcagtaccctcgggggctgggcaatggcttgcacttcccacccgagccgagtcacccgcggcaacaccctcgggggctgggtaagcgtcaacaccatccttgaaggccagtttctccgcagtggccgcctctaaggctgaaagcccctcagttacttccatgggaccaagatgatccaagtcagtctcctaaccctcaagaccacgctctaaggtagatgaggcacgagatgacctcaacccagcatcaagcacatcagcacaaacctccatcacaccatcatccgctggctctgataaaaggtcctctggaaccatgtcctctagagtctgatcaaaatttgccagagataactcctgtagaccaacgagagctgacagagcaggagaaggaactccactactctccccactagcaatatactgtcgactgttcttccgagtcagagggacctcatcttcttcctccctgtcgttttcatcgacaacataagcaacacacccattgggatcagcaccgggtggggcacacccattgggatcagcagcagatagagcacacccattggggttggcgtcagtaaaatcaggcacaggaacctcctcagcagcaggaaccgaaggaccagcaccccgatccaaactatatacttgccgaagacgtctctttttctttttctgctcatcagcagaaggatcaagttgattggctcggcaagggcgtctcggacgagcactggcaggcttttgaatatccaaagtcgtactagcttctgggagaggcgccaccaccaatgtcctgacaggagcagcatcaggagagtcctcagccagcaaatcaagcat

SEQ ID NO: 59704 - DNA, 1039 bp, Zea Mays
gttacagttaccgttcttaagattgatcaactatggtggtatgagtcctgtagaaagtgcctcaagaaaacaaagcctcatggtgatgcctacaaatgctcagacgctggttgtggccatgttggtccgcctaatccaaggtatgtgatgtttcttggtctggtacatctatgcctgctgactccttaatcatacatctgtgactgctactttatgcgcagatacaggttgctcatcacaacatgagatgagacaggcgagactgattttatactatttggacgtatggcacaactcattgttaagaaatcacttgacatcttgatcacagataatccaaccggatttattctcgatgaaataactaggctgatggaaaaggtgtacacattcaacgtaagcttcacagacagcaccattgctttaggcaatgtgtgtttccaggttaacacggttgtcaccgagattggtgattgaggtcaggttccaatttcacccagtggatcccaaccttcatcaattccgtctgcgtgggctgcatccaagtctacatcagcagactctgtcctaactaaaggtacctcttctcaggcaccatagagcaccaaaaactacggcaaggataaggtaaccaatgctttcgaacactcaataaatttgttgttgccaccaactcaagccaccttacaaactttatgcacttcgatgtagcgtgcaaggtcgccaatgccaccatcaaaaggtgggtccatagctaccaggcaggttttgaggaagatattgggaggcttagctgataaaactggtgatggcgatgacttggcttccgtcattgctgattctaggtacatcctctgcctccctgtgccttcttggtgtttacaacatagtctgaatgccactgttatcaaataggttttagatttagttatggccttctttgctcacttttcttttgcctctgaaaaaacgttgtttagttgtgatgggcaatatttaaattagcaatgagctaaagtgacaagctgcatccctttca

SEQ ID NO: 59705 - DNA, 457 bp, Zea Mays
atttctcgggaccatgcacgatttagatcactgcggcggggtttggggaagaaccgcggcgagcttgtcgccgtgtggcgtgccgcgccaccgcgatgctgtgccagggaagaagatgaatgcgtggccgtggatctcgcgatggatggtgtgaattacaggaaagggtggaagaagccgagaccgtaggatggtaaacgaatggattagatcagattccgcgtaccccttcacaccgcgggatccagatggttggatcgtaaacgtgtggtcccgatctgagcgggatttcataaagcgcgtacctaatccgggccgatggacagagatcggacggcctggattcatccataccccttcgacctggccatctttcaaaagaacccgtgcatatttagaaattcaacccgccgtccaccgtgggtagatctgagtctaggaaatcttatagattaaa

SEQ ID NO: 59706 - DNA, 325 bp, Zea Mays
cgggtttattgaagccattggaaattccagagtggaagtgggagcatatcaccatggattttgtggtgggcttacctcgttctcctcgaggcaaggatgctatatgggtggtagtgaatcgcttgactaagtctgcacactttattcccatgaagaccacaaattcagcttcagagtcggttcccttgtatatgaaagaagtaatcaggcttgacggggtgcctaagtccattgtttcagatcgagactccaaatttgtatccaaattctgggagagtcttcacagtgcattgggtaccaagctctctcttagtgtcgcttttca

SEQ ID NO: 59707 - DNA, 385 bp, Zea Mays
cggcattaaggattccactaaggatgagtctttttcaactacttccctctctcaaacagtcacgaagactgatcgagttttcttctcttttccagggacctcaagccctacaaggatcatcaaacacttacgtgtctcttgctagctcgttacaacatgagaatggggatgagagcgagagcgagaattaaaaccaaaataatatcacaagaacttgcaacactcaaaagcacaaggcactaaatctctcaaacttgaatcgatcggatgtggcacttgcgtggctttgaatgcgtgggagatgttgctttgaatgtttgaaggcttgatgtagctcttgtgtcttcaatgtgttggtttgggggtctttatatccccaaccgcc

SEQ ID NO: 59708 - DNA, 836 bp, Zea Mays
taaagtggaggatggagtgggtcgcgctcatcggatccgctgtggatctaagcctcaatcgcaaaccttgctggggatagagacccaccaccacacgaaggcgaggtaggtatcgagttctcaccagatctatccatgccactagatggtgcatgcatggcccccctgtgtccatcatgaggcatggctctactgcccttgccgaattcgccttaatgccacccccactgcatctggccttattggattcaatgcatctggcccaccactacgtttgtgagagggaggaaactgtcgcataagggagataagggcgccgtgcctggtagagaggggtgccacgtcggggatcctctttggttgtccttgactcttttcccttttcacttatgccatttctagaactagagtccgagatcgcgagccttcacaagggtgcggacaaggtggtcaccttcgtccgggcctagggtaccaatcaacgagagcgccttttcgatgtcaccaactaggtgcgtctggtcgtccatcgcggcacccatcgtggtgccgttggggctctagccttcgtgcaattttggtcaggctacaagcttggtactggagacctgtgagaggatgtgactgccagcgccctagaggactttgaagacgacttcagcatagccgtcgaagctgtcgtcgacatccttttgctggaatatgtgatcaacagatctccctagttagttcgcgtccgcgcctatgcttttgtaatggtgtcgtttctttctaaattgttggtgaaatggttcccttccctttcctgtccctaatattttcttagcgtttagtgc

SEQ ID NO: 59709 - DNA, 502 bp, Zea Mays
gtgcaacagtaaaccttgagcttcctccagtcatggttcgtgcaccatatgacaaagggtttgttgttcttagcatcttgctgcagctggcgttcagctttggtggcttgatgtaccaaatcaataagacatcggtacggctgaaactcaacaatgcgctgaatgctgcggtgtaatccagccatgaaacgtgcaatggtttgctcttcgtcttcatacacattggctctaatcatggccttctccatctccttataatactcctcaacagagaaacttccttgcctcaaattctgcaatttattaaaaagatcacgccgataatgcttcggcacaaaacaaattctcatttctcgcttcatctcttgccaagtaataatagggtcctctccatcttcttcacgagcacgaagaagttgctcctaccaaatcaggtcatatccttcaaactcaagagatgccattgcaagtttcttctcctctgaataattatgtaagcgga

SEQ ID NO: 59710 - DNA, 563 bp, Zea Mays
ttgtgttctaatcttttgttccaatctttgtgttcaattttttgaatctttgttgcaatattgtgtatatatagctcattgagttctctaatcaaggaccaagtgttaatgcccgaccacatgaacaagggtgtttctcaagaacattcctatggtgaaggatatgaaatgcctagcgacctagcatagatagggccactcggcatgagttgcaacgtgaccctatttatgatccacaagagtgtgaggtaaagtacacatatttagtttcgtgtgtgtacctaattagctgatttcacaatgtctattacacatgcatgtttttcattttattacatgaataggaggtcttgtctcaatatcgtgcgatactcgatgaagccgtggcacaataccaagacgcaccggagctgaaccaagacaaagacacactggtaccaaccgatacaaccaccaagaggtcaaggaaaaggaagcagagcgatcggaaaagaggttataaaggactaaacaagttttctaataaaacatataaaatctgagatgtgagcctgaaaggtcag

SEQ ID NO: 59711 - DNA, 409 bp, Zea Mays
gtagcgactgcggtatggcttagcttgttggcacacggtgcactgagccacataagttttgacaacggacttcattccgaaccagacaaacatttgtttaactcttctgtaagtcactgggaagcctgagtgaccaccaatgggactgcatgtaaggcaacaaccacattctgtttaatgtcagtattgtcactaatccataaccttccttatactagatgatcccgacagtcaatgtaaaatggcattttggttccttaatgagagacaactcagtgagaaattatagagaataaggatcatgggcataacctttagcaacttgtagcatccattgaggtgtgtaagaagagatattaaacaatgcaacatcagcacaagggcgtcgagacaaggcatcagcggcacc

SEQ ID NO: 59712 - DNA, 567 bp, Zea Mays
tcaatgagtacacacgcgcccagagatatacaagctcgtttgtggtgttcttccccaatagcaaggtaagtttcctttttcttcatttaccaaaccctataaatcacattttatttggattttggaagttttctttgtactggtactggagtttgaatggacctagagatttgggagcaatctattttcgtttttcttgaagtagatcgggatatttgggaataacttgtacgggggactctcgtccatccgctacagattgggagatttgggaaggagccgcactcgtcacctgaacgcacacacggacggcctgcaggtacaggtagcggatctgcagcacctgctactcgtccagtcacccgtccggctccagcagcactcttctgccgccaggaggattgcacacaccaaacatatgtgtgagatgtagaactgcccatttgtgtttggccaaaacaattttaagacgtttaatcctacaacttccagagaagaaaaatccccacttttcagtatggagctaccttcatgatcggtggtcacatatttgtcacttaatattca

SEQ ID NO: 59713 - DNA, 756 bp, Zea Mays
caggaacttggtcatagtgaggtggccccgggacaaaagaggtagatacagtccaagtgcttatcactggattgcttgaagcatttgaggccgaaggcaaatgtagcctcaactcctatgattggggttggacatactacaggacatggtgaatagtacgaagatgtactgaacacttcctttgactaggaaggttgagcagctaacgtagcaagttctttcagcttcttgattgtatggttgtaggttctgattgtgtggcccttttcttcaccgcgaacaagcaaaatggcttccatggaggcacatgaatctaccaccgaagcttcgaccaccccttccccctctcggagcaggcaggcgaaatgtgctatgggaaggttgctgctgagagcttatctgttgctgatatgactggccctgagattgagctgtcttttcctcaacttggactgggttgtgaatgcttcggacatgccttgggttgattcttcctctaaagcccctagcaacttcggtgtatctgtaaattcctcccttcttcattcttggctcttatgtattaatccatcttctgttgtaatttctccagagagtgttggggtttccttgcgaagtattgggtaactggtcctagacttagtcccttgaccatgacttctataacaatgccatcttgaactattggtgcttaagctcgaagacgaagaaaccttcgaacaaacgactgaaggtatttctctagatcctaggtac

SEQ ID NO: 59714 - DNA, 469 bp, Zea Mays
aaaagaagcaagcggaagacgtgggaaataatagtgaagagtctgcatgcaaggattggggaacaaatcacgtccctgaaatttgcggaaggaagaggcttggacgcgggatgttgaaaattttgggaaaagcaaagggagctgttagaccagacttttttttgctttgaagcctaaaaccggttttggggtatgttttagtggccttttggagttgctcttactcctattttattttatcatggatgcactcctatgctacacattgttttcgaaacgttgacgcaataagaaagactaccctaacgtaagcatacacaatcattttatgtaggcgcataaaaaaatgttccatctatgtaccagatggttgcccgcttttgtatgcactgcgtcggatcgagcaccaaaactgagtcaaacagagatgaatcgacgactccgatcggactcgagtgatgtctgatga

SEQ ID NO: 59715 - DNA, 291 bp, Zea Mays
tcatgatgtgtgtcaatgctcctgatgatgagatatgtagtcttaaccatgcgaactcgaactttgttttctagaaagaaatatggtcccaccaataagaccagtctagtagaggacccaaggcctctatcaatgcctaggcaaggccatacacccaactactgccaagatgcattcaaagatcctagtatagaaagctaccatggccccacctgctagaccaccacccctaggctagtgcaagtaattgacactatgcaactttacattaaggagccccaaaggaataac

SEQ ID NO: 59716 - DNA, 505 bp, Zea Mays
cttgaggcatcccaccgggagatccaaccccactccgctcaaacgtcgtcgcccaccatccccgccccaccttcctccctctcctcaaacactatcacccgtctgtgggattcgagggcgccgcgtgcgatgccccaatgtcattctgttttaggaagtcgaggtcaggagagggggccgagaagttgggagagaaggagccaacgggagggggatcaatggcaaaggagatggagaagcgaaagaaggtcgcgtatctttccgagcaggcagagtgatacgaaggtgagggatctcattcttgtgtctcttctcaatgcatgtacgctctagtgttgttcttggtgcctgcattcaggggaaatttgtggtctcttcctacagacctaggcgggacaggaattatgcatctttggccccgtgcaccatgctaagtaacatgtccattagagatgtgtgccaacaagtgcctgatgagcctacaccaactcaagatcaacctcca

SEQ ID NO: 59717 - DNA, 1140 bp, Zea Mays
cttggaagaatcaaccatgtttccctttccttgattcgagttcccaggagtctgctgaaagttggatttattttgcttcgggtatgggcaatccttgatgaaatgtccagacttcccacagttgaagcaaccactggaggaactgggaatagcagggaaacgagtaccgggggcactcggctaattggtaggagcgggggcagtagtgggacgaataaagataggctgcttgaatggatatgaaggtgggcgaggcgaagaacgattttgattaaagggtcggatcaccaacctggttctcttctcaggtccttgattggacctttcacctccaaacccctttgattttccatgtcctgcatttttggcttccactgccagtgctatacttacagccttactgcaggtgaggtccaagcatgttgccattttctgctgaagcctgtcattgagccccctcataaaacaattctttttctttatgtcagtatccacctggtcaatgcatactgagagaggtggttgaatttgttgagatactgcatcaccgtatctcctccttgcctaatccggataaactcttctagcttcatctggagtactccctctagaacataatgctctcggaatgccaacttgatctcatcccaggtaatctgatgtccaactggctggattgctgagaaatttgcccaccaagtactggcaggccctcttagctgttgtgcgacgaacaggggcttttgcgtctctatgcatcgaattaacccaaacttctgttccgtcactcttacccattcatcgacttctaaaggttcctcttctttaatgaaaagcggtggtcgagtctcagagaattccaaataagtagtatcacacggtccttgtgggggaactctgcctctgtggggttggaattggttgctcgccattttgcgcaaaaagcacgtattatcagcggtggcattgacccgggcagcaatagcctcggccaaaattggtagtactggtggcgggttaggaatatcctccccaccatgggatgtccccgcaccatcatgtgcgcgagtccgtgatggcatctgaggcaaagaaacatttgaaaaaatataacatgccaacatacaccatcatattaca

SEQ ID NO: 59718 - DNA, 907 bp, Zea Mays
gctaatccatagtttttccaaagactcagttctccaccagagtggactgcgggttgaatctgaaaaagagcaggggctctcttgcaaagtggtggccgaaggggtatgactagatcttggctgatggattttgaatctgcggtcaggattagattctcgttgtaatgaaccggtacgcgagtatagacctctgatcacagatctaacgaccaccaggtacccgaccgaaacatcccctaccctagatccccaccgtcagattaggatttgatggtcgccattcctcgcaacgaaggggtacgttgtaacacccagtgtcacctagggtttctctcagtgctaacccaagaatcaacatttcatgtgagccaaattgagcatgaagcatcaaattaacttaagaagaaaagatctactaagagtatatctaaagaatcatgttccaaacaaataagattttcaaaaagggaaaaatgttgaaaccctaacaccaaccctaatcaagctatctaagaagagataaagaaaaggggtaaaagaccatgaaaaatataaaatcatggcttagtccaattataaacattgaaatatactaaataaactacaataaagattatggaagcttggccaaaatagtttaataaaaactccaaacaagcttctcaagtgagggttcaatagggatttctgaaattcagatttctgaatttcagcccttgagccaaagaccgagcgtattcaccttgatccctagctcaaatcctaatgaccccattgacaaaaatgtgcctaactaacccctctacctcatatcagaagatggcatcgggacgcatgccttggacatgtcaaacccaggatcttctctctgtgcgcggcagtgagacaaacccgatttctcccctct

SEQ ID NO: 59719 - DNA, 555 bp, Zea Mays
gaaaagtaaaaaggttaaacagtaatggcttaaaccagcccaactcagcccacaaactggggaaacgcgcgggcacccgcgcccgcgatatcatcttttcacagaggccctcggctatttgaataaccagttaagaaccatattcattctctctgtgacattcacagttaggccctcagatttctatttctttaccgcgccaggtccacgatgatgaatggcaatgaacacacctccggcgaacttgcactggcctgaaaacgcaatggctaggcttctcctttgtttgacacctaattccatcctcggtgaacgtaattcctctaccaattgcacgattctagcctggaatccctctgtccacgatgatggagaaaaccgagaacaactcgatgtgttcttggtgattcagggcagtctaattcaattaaacaggtatacgagtagaaggagacttaagggaggctagaacatcaagcaaagaagcttgaactaacctgcagagaggtagccatggcgaggcattcacggtggcgcggaaacccgatttggggg

SEQ ID NO: 59720 - DNA, 551 bp, Zea Mays
agctcggccagcttcttaggcagccacctaatgggagtcatgcctggtgttcaactgttggataagccagttcgagtgaaagttgctgatgggagattgttatggagcaaatatatggtacctgactgtaagtggctctgtggaggcattacattttcaacccagttcaagattcttccattgggaagctatgatattattttgggaatggattggctggaatgtcactgtccaatgtcggtccattgggcacagaaatggctggaatttgattatggtaacagaaaagtacatctgcaaggagtccaaccaagggtagaagtttgccacaccttgacaggattacaactggattctctcatcaaacatgaagctgttgaacaactgttggagctccaagcagtggacagtaacctgtctgatcccattcccttgcccatacaacagttgctagaacagtaccaacatctgttcaccaaaccaaactgtctaccacctaaaagagttgtggatcatgctatcgacctaataccaggggcatcatctttcag

SEQ ID NO: 59721 - DNA, 593 bp, Zea Mays
aaaattctcaatactcagactattctgagttggatggcaggttttttacagggttttacagggtctctttagcaaatattacatcacgaaggggtacaggtagaattcagtcgttggatcggcatttgagggctcggattagatcaccatcatctgtgaaccgatactcaatccgggccgcaggatccgggatccatggtctagatttcatgggcgaagggttatgtggtcgctctaatcacacccgcacatcgtccgatagacgccctagatctaactgtacgaaggggtatccagatatctaatctccaccgcccacatctggatggacgacagagagatcatcttccccgcagccctccatagccaccgcggcgcgacccaatacccgacggcgccatggccgaggcaatccgcccgcgttttctaatgcccgactaccatgcgaataggtgcctaccgaaggcacatcataccgaggattagcatgctgacaaggctgtccacgcaccatggcggagtttgcacgacgatgagcaattccggaatcgcaacccaccaccaagacccaaacgaaacttagacgcgatcct

SEQ ID NO: 59722 - DNA, 664 bp, Zea Mays
gccggtgcttccctcgccatatctaggaatcagacctgttaccggacatcgggagcagagaaagacgtgatggccgccgtcgttgacccatgtactcatcggcggcagggcctcggtgtccactttggatgcttcacctcatcacctggatgtgcccgtggccgagacagggaagatcggccatcgtaggcaacaccaattactcgccggggctaggcgggcattgttggccgccattccccatggttggggcttgtcgcagcgcaatcacaagtaagatgactcgtataaagctcaccgtttccccctcgatgtgatgcacccgtccgtttgtgtattggggcactagaacccgattcctgtatcgccggcgatgccgccgccgtggtggcgttgggcgccaccctgctccaccgttgggtaaggaagaggtcctcggaccgttgatggtttaagggccgcgatcgaccctttggtcgatacggtcggggtggtgttgggttcgttggatatagatcaggcgcccgagatttgatcgcgctggtttaaaatatgtaccgttgatcggcaatccgatggcccggataacataccagttcagattgggaatctgtcgtgttcgtttctaatcggactgttgtggattgcccataccccttcgccg

SEQ ID NO: 59723 - DNA, 349 bp, Zea Mays
tttcgcctactatacggatcggaggccatgaccccgcaggaaatcaaacatgggtccccgcggacaagtgcttcagcagtacccgacgtcgacgagccaacttccaaagacctcattgacgaagaccgtgtcttctccctgcaggccctcgacaaatatcaagcccaaatgaaggcctggcgcaactacgcagtcgtcccaagagaattcaacgaaggggacctcgtacttgtccgcacaacccagacagagtcacggggtaagctggaaccaaagtgggaaggaccatttatcgtcaagacgaagtcgtctcccagcgcgtacagattaacaacacaatctagcgaag

SEQ ID NO: 59724 - DNA, 314 bp, Zea Mays
tccagaagagcttcagggtgtcattacttagaagcttgtttcttgaaatatgtaaatttggtaaataatctctggctctctgtcatcaatgtagtttgaagaaactaaccttatatggtggccacattgtatgaatttgtcactaaatgagcatttacttcgattctgaagtgttccttctagtatggcttcgcatccagtcactttatcaagaagtgatctgccatgattctatcttatgcatgctaaacacagcattgtgtaccatttttgcgtagtgttgctgcatgttggttcttgtgagctaatattac

SEQ ID NO: 59725 - DNA, 732 bp, Zea Mays
aaaaatttggcttgagcctcggagccttataggagatagatatcccttgaatcctcataacatgaatatatttattgggctgcccggtgggctcccgaaagaatcgtccagcaggcatactattgggccgtccccaggcagaacagatttctccaaagaaggtgacacttagagctagaggcaatcccgaagaatatggcgcaaggcagttatctgtgcgtacccgtcgcagaaagaattgctgataatcggaaggcatactttgcgcataatgtggaggataactcgggcgactagactccgcaagagtcggcacatccgcacatgatagaagtagatagactcagatatgattagataagtagttacaatctgtaaagggacgtatcatcggctagttatataaggctgaaggggtagacctacaaaaactctctcgacattccactcatcacaaccacgcccaccattagattgataggagatcccatccatcaccacccgcaaatcatctgtaatctatgcaccaccagcaaactcaatacacagcaccaaacaggacgtagggtgttacgcaatcaggcaacccaaacctatataatccccttgtgtactgatgtgctcctgcacgtaccatcgagtcgcgatcaacgatgtcatcctctccaaaagcactgagtgagttaccctatagtgcgcagtcggaacataaaaaacgacagtcggggttca

SEQ ID NO: 59726 - DNA, 479 bp, Zea Mays
tcctcggatctccgggagagtctggctgctacaaatactattctcgagactgccgatggtgaggtggcaagtcttcacgcacgtctggaggaggccgatcgctgcgtcacaggttagtggtgtcttttgcctctatggagacttcttttgtctatattgacctccctcgttttccgcgtctttctcctagagctttaggtagttttgagggcgatccgtgagttttatcgcacgagcttgtggatttttgacttttagcgatgcttaagatgaccattttcaccttcatttgtctacgcgcccctggagggaatgggagtgtcatatcgggagtagtggagaacggttatatcgttgcctgggcatatttctaccaggggttcactgttttgcttgtttgcgcaggagcgccctctcggaccgttcagtctcccatacgcgaatctaatccctgagctcttcgttcgtttataatggac

SEQ ID NO: 59727 - DNA, 1001 bp, Zea Mays
gcagctgcgagggcctcaacccaatacttgggtggcatggacgcatgaaggagcagggtacacacagagttgttgagggtacagagaacacgttcagccttgccattctgtggtgaagtgtggggacaagaaagattaaaaatgatgttgtgggcagcaaggagatcatccatggcattgttaacaaattatgtcccattattagcttggaagcacttaatagtgtagctaaactgtgtgcgaacgtaaggaataaaatcagcaatgtgctgacggaccttagacttgtgcttaaggggaaatgtccagcaaaaatgagtgaaatcatctagtagaaccaagtaatatgagcagccagagatactagtaacaggggatgtctagacatcacaatgaactatctcaaaaggggaaatagtgtgggaagtagatgtactaatgggtagacgtgcatgtttgcctagctgacatgcatgacaaagagtgtagtctactttattacatgaaattaaatttttttctcttgagactagctaagactgctggaccggggtgacctaggtgacgatgccacacagaggaggaggctgcaaggagggcgctggcagtggactgggcggctggtgaaagtgtgtagaggtcgcccgagctattgcagcgaagaataacacgccccgtcccgggttccttgacagagaaaccaaaagcgtcaaattcgatagaaccaccattatcacaggtaaattgatgaacatatagtaaattacgaactatggaaggagcgacaaggatgtttttcaggacaaatttagcggagttgatgtcaaggattgatgagccacaagtcgtgacaggaatacgtgcaccattgcctactatgatcgaagaatcagcacttggaagatgagaatgaaggatacctttagaggagtgcatatgtgtagaggcaccagtgtccatcacccaggcgtcaccttgcagcgacatttgctgcagcgccc

SEQ ID NO: 59728 - DNA, 578 bp, Zea Mays
ctttgaaggcccagattcagtctcggcctggctctttgcagcttcggcttcagttagttttgtctcagcctgcgtttttggagcttcggcagtttttcctagagtagagcttgaactctttatcgtctccagtacatcttatacattgaccatctttttcctttttggggtcactataagatctttttgtgccttcggcactgttacttctgccgaagggctcagaactgatattttgtcttcgactccaggctcttcaattttgttaaccttcggctttatagccggttcttcaatcttttgtgtaaacacaagttctttggcttcagtagccgaagaggtctcaccgccaaattcgggcacttcggccagttcaatatatggcggccggtgagtaaggaccttcacctttttcctcttcggcgcgggctcgcttggagcagctggagcagcatccttcccggaagtggcactcttcctcttctgcccccgcgacgggtagcagtaatcagggtacataaacccaatagcgtcgaagactctattcagcctcttcttcttctggcctccgaaggccg

SEQ ID NO: 59729 - DNA, 763 bp, Zea Mays
attagaaagagtacttagctgtgatcctagctgtccagcaatggcggccatatctccaacaccatgagtttgtcatccttacatatcacaaaagtttaacccaactcaacgagcagcgcctccatataccttggcaacataaagttttcaccaagttacttggtctgcaatacaaagttcaataccgtcctggttctgagaatcgtgttgccgatgccttgtctcgttgtgtgcctgctgacatgcattatccatggtggtaccttaatggttattggacgttcaggcaagctatgatcacgacgccgaggctcagtctctcctgtccaaactagcggttgaccctgctgctgtcccaaacttcactctgaaggctggtctgctccggtataagggtcgggtcgtatatggcttggggaggatgaaccattgcagcgcaaaattgtatcagccctacattgctcggcgattggtggtcattccggcgtcccagctacatacagccgtgtcaagagtctcttttcatggacacggatgaagcaatatgtgaagacattcgtgcagcaatgccaagtgtgtttacaggcaaagccggaccggtcagcctacccaggcaaagtacagccacttgaagttccgctttcggcctgacacacggtgtccttggattttgtcgaaggccttcctcgttcgggcaccgcggattgcattttagtggtggttgataaattcactaagtatgctcatttcatcccattgcctc

SEQ ID NO: 59730 - DNA, 299 bp, Zea Mays
ctgtggatttaggtaatcaagctattcctaaactgccatttccaaaattctcagagggagatcctgttgtgtggttagatcagtgcaaggaatatttcactgtttaccggatacctgaatctatttgggtttctgtggcctcgttgaacttggagaatattgcatcacagtggtggaagactcataaactgagacatgggattggcggatggcaggagtttgtggctgcggtgacagctaagtttggtgctgctgcttacccaaaggctttgaggagattaatggcgctcaaacaaaca

SEQ ID NO: 59731 - DNA, 569 bp, Zea Mays
tgttcgctaataaagattggtcgagggtcatcaggtgtaccaatattaatttcctccaactcatcaacagttggctggtttccatcttccatttggggagaagttgttgtagtgtcaattggctcgatagaggtcatatgaaccccataacctagcccatattttgtttcctttaaggcttgatcttcatgtaatgcatcaagttgagcttgggacatcatcttttcaaatggcgcaagctgccctcagccatcacatagtgaagggccagtagatgtatcatagtccatctgttgcatcatataaagcactctattatcatataaggcgataggtaaagtttcatcatccttatccaataatgtgacttgtgcaaccaccttatttttatcgtgtttctcaattttcgcttgatttattctatattgtaccaaaggcggtaaaggtgttgggaatgtagtacctttatagttgcgtgctttatttataacatgaaatattggatctcctttttttctttggtcgcttggtatgtattgatatctcttttgatttactgaagacttccc

SEQ ID NO: 59732 - DNA, 524 bp, Zea Mays
gagctcacgacatagagttccaacctcgcacggcaataaagactcaagcactggttgacttcgtatcagagtggactgagcatcaggtcccagacaacccggagactaccgaagtatggagaatgtactttgatggcttgctgaagttgcagggattctcttcattgctcctggaggtgaacaactcaagtatgcactccagctattatttccagcaccaaataatgcggtagaatatgaagcactgatccatggattaaacatcgccgtatcactcagcatgaagaagctgatggtatatggagattcgctagtggtcataagccagataaacaaagtctgggattgctcgactgattccatgggcaagtactatgcagccgtccagaaattggaggacaaattcgaagggttggagttccatcacatggaaagagaccgcaacacggcagcgaacgcgttgtcgaagctgggatccagtcgggctcaggctccacccgggatcttcgtccaagaaatatcac

SEQ ID NO: 59733 - DNA, 1005 bp, Zea Mays
gtgtcaatttcttcgagccgagttgtctcttcttctgcgatgtcttttaacatcagcctttgtgccccaaatgctaaaacagtaggtaatactgccttcgacccatacaccatgaagaatggcgtgttgccctgtagtgcttgactcgattgagttctaagactctagacaatgtatgggacctcctcgatccatttcctagctaacttcttgttcttgtcgaagaccttttttcttaatgcatctaagatcagaccattagcccattcacttgaccattggtcttgaatgtgctactgaagcatacttgataagtattcccttctacccactgaaatcaaagaattttacccctgtgaagttggatcccaagtcagtgatgatgctaacgggcactccaaatctgaagattatttcctagatgaactctactacttttgctgttgtcaatgatgtaattggcttgtactcaatccatttggtgaacttgtctatggctactagtacatgtgcacttccaccctgtgcttgcttgaatgacctaatcatgtccaacccccagcatgcaataggataggaaacatggatagtttgtaattgctgcactggaaggtgttgttgcttggccaagaactagtagacttcacatcttttgactatgtcttctgtatcttgcttagatgtagaccagtagaaccctgctctaaatgtatttcccactagtgtcctcgaggttgcatgaacacattgctcgacatggatctcctccaactggtgcttgcccatgaatgtgcaaatacatctcatgaagactctcgctgcactacgctggtatagatcagtaccaatcaaggtgtagtttgctgactgcatggttagacgctctgctgctactttgtcatctggctctacttcattttttataaacatgataatgggtgtcctctatttagttgggtcttcttctatgagaaacaattgatgctctaccaccttgcattcctc

SEQ ID NO: 59734 - DNA, 279 bp, Zea Mays
caaatatgaggtgtgaggcctcaagtgtgccctggaactggggaggccgaatcagctgagcaaaaatgtgacatagatagtgggcatacgacagctgtcgacgggcatgcagaccatccaaaacggtgtcctcggtctcacaaataaggaaatccacaacatcaaactcggagtgagataccagggcaccaaggagccagagctggatatgtgtggtagcctccttgtaccccatccgcggcagaagagtccgtctcataagctgaaataggaactttg

SEQ ID NO: 59735 - DNA, 681 bp, Zea Mays
aaacttaccagccgacactccaaaagcacatttacgtgggttcattttcaaaccataccgacgcatcttatcaaaggctttgcgcaaatcagctatatgagaactaaacgcagccgattttactacaatatcatcaatgtagacttccacagtgtttcccaacagctcgtgaaagatcaaattcatagccctttgataagtagcaccggcatttttcagaccaaatgtcatgacaacccactcaaataaaccaatgaagcctggcatataaagtccgttttagatgcatcttcttcggccataaaaatctgattatattcggcattaccatcaagaaagctaataattctattcactgacgcattattgattaatgtgtcggctatggcatgggatattcatctttaggagttgctctatttaaattgcgaaaatcaatgcatactctgagcttacttgactccttctccatcggcacaatattagatacccactctgcgtatctgtaaggtttaataaaattagcttctaacagcccgcgaatttcgtccttgatttgtgggagaaggtctggacgaaatgttctagctttctgcttgaaaggtcgaaaaccgaatttaatgggcagtcgatgttctacgatctcacggcttaatcccgacatctcagtgtaattccaag

SEQ ID NO: 59736 - DNA, 847 bp, Zea Mays
aattaaacaagttctagggatttgtttttacattaaaaatcaatttctcaattagtttccctgttatatcaaatatctggactgagcgtcatttaccagagagctccagggtaaaaatataaaaattctacagactcagactgcgcctgcccaggactgcgggttgatatgccaaaagttggaggggctctttacaaattatcttggccgaaggggtatccttcacctagagtcgtccgatcacaaccgatcggatgggattagaaccatgcgctatataacgttgcaacctgccctggcaacccgatccaatatcaacggatgagggatgtccacgcccccgatccgatcctaaccctgcacccgcgatccaacgaccaagttttcgtgtacgcgcgttctaacatctcccatgcgatctagggctaacggttaggattcagttacgtgcgaagggttacgcatttctaatccggatcgcccaaaaccaatcggacagtcctgcattcctgagtcaatcggtacgcgttgccctaatcccgaccgtccgagggtcatccaacgatccaggactgtctcccttacccaaccaatgatccgatgtgaacagggtcctcgccacgacaccgttcttgccgaagttgagcgattccccctaccaccgacacgctaccccggcaaccaatcctgactaaagcgatggtgatagcgaactagagggacattgttttaccttggttcacggtagtgaagacccaaccgaccacgtggtggcacaattccgcgacggagctccttccacagcgccggtcattcgtagccacagcgcctccctatgcaacgcccg

SEQ ID NO: 59737 - DNA, 460 bp, Zea Mays
atgaaaatttggttgtaccgagcgtttccatccgtgaagctgaagatcttgtgtctgacgaccacgttgactaacacttccgtaacgagcacagggtattcatccttaagtgtggccctattgaggtttttggaatccattcagcgtaccgacatggcctgatgagccctgtctccaacatcttttccacctctttcttgacctcttgtagtacttcatctttcatcaaccgtgctcattgttgaaaacgttgaaaccctttcttcagcgggagccgatgttcaacaatgtccctatcaagccttggcattttcgtgtaatcccaagcaaagcaatctaaatattcctttaatagtcttgtcatcggctcttgtaactctgggtccaacctcttgctaatgaatgtgggccacgacttatccatggggccaatgctgaatacttctagttcgttagctga

SEQ ID NO: 59738 - DNA, 280 bp, Zea Mays
ccacttctttgcgcttgaggtctgccctgtcctactcattgacgaagaacccgacaaccgttgtattcgcctcctctcctgcaaggtatctttcgacatacaaaacttcatgcttcaacaatggcggcagttgtttatttctgcgagtagctattagtgtctcgttgatacaactatttagttttgcttgcagctagagggatcactgctcatggaggcgcataatgagaaattcttaggtaaggttcgttcttgatattagtgttgttacggttcttgg

SEQ ID NO: 59739 - DNA, 962 bp, Zea Mays
gccgtcgctgccttatagggcccgtgcgtcagtgcgctctccttctccgcaacgactcacgcgaggatcgccgccatcgtcggaaatcgtgggcggcctcctcccatcccgaaccgagaccctaggtgataagtaggaacaccccctgcgtccctttcctcccctgaactaacctcttgcgcgggcgaacaccgaaaccaaatcgccagtcgtgtctagggcggtcaaagcacgccaccgtcgaccgcgtgctacgctgtagccatgacctggggataccgcccaggaggttcgccttgttgtgtcgcgcgtgcgcgaccaccttgggagggcggaaaccagccgttcgttcctcaattgctcgccgacgccaaggatccctgggctttccgtcgtgcgtcgtggtcgggtcgtctgagtgcataatccgcggtatagccaccaccttgttacccgccactttcccctctccgctttccgcataatcacgtggcgctcgtgcaggattcaccgtcaatggcgccgccgtggtgggtgttctccgtcaccgacggtgtgtcagggagagaagacccttccgccgtggatcaatggatgaacgattgtgattagaaggcccgcgtaccctttcgtggtcagatctatgtcgtctgattcaaatcatgtgtatggggggcaatcttagtactttaaactccagggccgttgatctcagatcctgcggtcataaaagggtaccggttcacacgatggctgatttgatcttggcggtccgatgtagatcgatcggctcacagcagaaaataccccttcgccctaaccactttactaaagagaccctgtatttattcgcatttaacccgcagtccacctcgggttaacctgagtcttagaactttttatgatgtagcccctgtattctttagtaattttgcgcgcagtccagggaacaaagaaaatag

SEQ ID NO: 59740 - DNA, 560 bp, Zea Mays
gtccaatatagcgaggggacaattgcccttgactttaaatctcctcattccacgaagtggtgacatcttgaggtacacatgatctccttcctcaaattccagtggtctccttctattatctgcgtagctcttttgcctggtgtgagctacccttaaattctcccgaattatacgaacttgttcttctgcctctagaataagttcaggtccaaagaactgtcttcctctagtctgatccaatgtagagaaatcctgcatttcctgccatataaagtctcgaacagtgacatcttcagactggcctggtaactattattatataagaactcagcataaggtagactcttgtcccaactactaccatgctaaagggcataaactctcaacatgtcctccaatacttgattagtcctttcagtctgcccatcagtctgacgatggtaggccgaactaaaattcaacttcaaaaccatattctcacgacaacttttccaaaatctggaggtaaactgtgatcctctatccaaaatgatcttcttcggtacaccgtatagagacac

SEQ ID NO: 59741 - DNA, 378 bp, Zea Mays
ctgccttacctgattccggttagactcagcccatgggtaagcgttgattagccggtgctagttgtttccgaaaccagtccacgttcccgttttccatttctttattagttcagccgcgcgctcgcatcatcatgacgctagggtgacgccagcgcatattttactcgtttcgtggccagcggctggacccataccgtcagcctcacagcctgttcatgctcttgccgtagatcccgccgcgcgctaacagcacacctcaaccacctccgcgcccgtcggccgagtttgctgggtccgttgcgcccaccctcatcccgacctggccacgcctataaagagtcgctgtgctggctccgtctcccctgtttcagcgccgcc

SEQ ID NO: 59742 - DNA, 371 bp, Zea Mays
gcaatgtgggtcagtgggagtgtttggaaacctcaagtgtgctcaatgtatgctaggaatggccaagagagctcccacacacgatcaccacttatatttacctatccactcaatactagttgttatgggcaagttgccccctttttgcgcactcgcggacagtccatgacctatggccggacagtccggcgtacaagtaacgactagtttttccgtttgaaaatgagttagagctgttagaaaaggcaggtgtggatggcccatgacctggaaacattaactccccgagctctgtccacctgactttaatacagatgaacagtccgccaaacatggccgaatagtcccatgacctgggagttaatactgtc

SEQ ID NO: 59743 - DNA, 513 bp, Zea Mays
atcaaagtttgtcttcatcacacaaatcactgtgcaggagcattcttgcagggaacctcgccagtaggattaccataggaaaaaggtttgctcacaccagcagatacatcaagaatgtcagcaacgatgtcctcaggcaccacagcaccaggtcttctcatcaggattcgcccggcacaaacagccttgtccatcactttgtcacacattgctttcataacaacatggtcatcctctaaggccttaatgttgtgaccaacgacttccaactcttgtgtgacaagtttcttcgaggtgcacaactccttgatgacagaatccttcgaagccagtagcttaccaagtcatgacacttcagtctgggaagccctcaactcatccctgtgatggtctagttccgacatagtaaagtgatggctcctctccaagatagtgagggaattgctagcatcatggtacaagctatctagattgtcacaagaatcaagaagcgttcgcctctcctcctacaag

SEQ ID NO: 59744 - DNA, 458 bp, Zea Mays
taacttttgtaggtattttggtgtgctacaacttttattaatggtcaaagtcatgataatgtaatcactatagttttcttgcctaattctatttggggttcaatctgctctagaatgggaagaatttagggtttggttactttctcctcccttgttttgcttaatgtggctaaggtaggtattttaggatgatttacacttaattagggccttggttcctaagtatggtgccttttgctcaagttaacccacatgtgataatacagcttgtgactttgctgagtaggaacccttagtaacacggggtgttatagccctcccccttaaaagaatctcgtcccgagatttgagtgaagatcctcaggggtgaggatgcaagtaaccttctgcttaaataaggatagtatacccactgagttgtcttgggaaattggttcttcaatggtcatcctctttgc

SEQ ID NO: 59745 - DNA, 1623 bp, Zea Mays
cgacaagggaaggaagcaaactcgcaatgcaaccattcatgggccaccgccacatcctcttcagaacattggataggaaacacactagatttctgattatttttatgcagacctgaggctgctccaaataagcctagaatttccaaggtagcagcaatatcagaactagaaggatgcaagaagatagccacatcatcagcatatagagagatccgattatatctatgtctgctagatagctcctgcagcaaaccatcctcctcggctttagataagagatagcccaagacatccataactataataaagagcatggggaaaggggatccccctgacgtaacccccgcttgtgcacgataacatctcctagtaaaccattgagcatgacttgagtcgtggatgaggccaatagcccacaggtaacctccctccaaatcagcccaaagcctaacttctgcagaacctcaataagggccaagagaccgaatcaaatgccttggtaatgtcaagcttgagaaataatctagcctttttttgttgatggaaggctctagcagtttgctgcacaagcatgaagttttcctggataaaacgtcctttaatgaaggcattctggtttcatgagatcatattatttagccttttggccagtctcgaagccaacaacttggtacagagcttggcaaaactgtgcacaagactaactggtctgaaatctttgacttgatcagtcccttctttcgtaacagaataatgtaagctatgttcactattcagttttccaagattgctaaacttacgggacccaaatggctgaaacagcccccataacatccctcttgatactccagcaagatttataaaaacgcccattaaaaccatctggaccaggtgccttgtcggaaggcagcattttaatggtatcccagacctcctgctctgtgaatggggcatcgagctcagaaaggtcaaaagatggcatgccaatttcatcgagattgatagtttgatcccagtccaaacaagagcccatgagattggagtagaactgatgaatcagggaggctttatcttcatgaccagtgacgattctatcgccatcaactaatttagccacaaagttctttctttttcgatgacgggcatgcaagtgaaacagcttggtattagcatcaccttccttgagccaagaaatcctcgatcttaaacatgctatagatcgcttgatggatgacaaccccaaaatatgcttctttagtctagatttaagccagttctctgctggtgttaactgtctttcatcttgtgcaacctcaaatttatgaagaacctcccgcgctagtgccaactgggactgaacatgaccaacctgcttggcactccaagcatggagacccctggcagtagcctttagcttcaaattcaaggtttgaaaagggcaatctgaagttggaaccgagccccaagccgactgaacaacatcgtagaaaccctctagcttagtccaaaacgccgcatatcgaacctattgtcctgaacctgaaggcccaaaagaagcggacaatgatcagtcttcagaagttgcgctttgaagcaggacattgggaaagagcccctcccaat

SEQ ID NO: 59746 - DNA, 597 bp, Zea Mays
ccgcgcgcgctggtggctttgcaaaaacatcctcggggttctagctaactagaaacgtgttattttactatttctatgtgtcgctgacagcttgcagaaatgtcccccggtttctaattcttcacagaggaaggtcctcgacggcgttcgcgcacagccgagctccggcgagcacgtagaccggccagaggaggccaagacgggtgctcagcttcggcctaacccaaattcactacctggagaacgtttcccctaacttaattgcacgaatggtgatctattctcttcttcccacgagaacagcggagactacggacatttgatcgtgttcccggcgattggtggtctctcagtttgaattggtgactcggtaagcatcacagagctataagaatgctcaaacgagggagagaaagggatgaactgaccggaaagggggctggccgcgatgaggttggtttcgggtggcggaagcttgatttggggcgaaaccaaaattctagctctcggatgcacggttgctagcgattcttggtggcggggtggatgatgaccttgcggagctggtgggggcttcaatttatagggagagcgagc

SEQ ID NO: 59747 - DNA, 414 bp, Zea Mays
tgctggtcaggggccgttcttccctcgcccctcgttgacccgaacgaaaaggcaacgccgccgtgagaggagtgctgtgaaagtccagatctcgcccgccgccgcaattctccacctcgcctccgatctacgtcgggagtccagtgtagtgggagcggggagaaaggtggaacgtgccccaaggaattgcgcacggatggaccgtgcattggtcagaatttctcgccattgacctcatctccgccatgaagccgctcgacgccgtcgccaggtgtctctgcgccctaatcatcggtgcgtacccatccttcgtgttcgcgtgaccgtcctcttcatttaacgctcgtagaatcggtggttggtgcttggaatttctgggcagggggagttcgctggcataatttctatggccgg

SEQ ID NO: 59748 - DNA, 956 bp, Zea Mays
aagaaaagtgacattgggcaaatttgaacccttgtaatttttaatccgttagggttttggaataagccagtatagcaaagatgtatagctgttgtagtagtgttaaattgattaagtggcctaaccctaaaactatatggaacctagtgtaaaacatccccagtgtagggctgtcagactaaaagctctactgaaataaggaatctagtgacatttccctaacttcggagccattttgtgcttgatccattgagcaaatgactatgatcattataacaaagctggagccattacattgatgaataaacttcttacaagcatctagatctagtgttgtgtgatttctggagaaaaaggcttccaaacgtggtctataagacaagccaaaattgtgttcatgcatgaacagtaactaaagaagatcagattcatcccacctcgccgccggtgatcctcgcgcggtgattcgtgcccgggttaatatgtgtgctctttggtcgtgtggataactgagggagggtaaaagatcggcgaggaaggaatttaggcacgggttcagcttgtccgctatgtccacttgccctgcgcccaagccgagctatcgccgccggacgcaagtgcatgttcaccacatcgcagtaagtgtgcgagactatgacacacgtctcagagcccttcgattacccgcgtgccacaaagaccgagcaccagtgaaatatcctgccgtcgccccaaatagtttcatccaaaattcgtatcatatgtaacttgtctctttaaattgagtgcactccctgctccgcccctctgttactcgctcagtccaccctcaaccacctcccaccatttaccatagcttccagtcacctgaattccctgagaacggtcactagcgccgccgtgaggagcgccaccatggccagcactactccagttagttcatactcttattggac

SEQ ID NO: 59749 - DNA, 602 bp, Zea Mays
cgcggctgagccgttggatccggaattgatggcaccgattagatcttcactaggtgaaccggtacgccatcgcaacccttggatccagaatccacggccgtggttttatggaacgagagttaatcctatccctcctatcagatcggacagcccacaacagccgattccaatcaatttactggcacaaatctgggccgcccatcacaaattgaacggccagatggtcgtctcctacctaccgatctgaggacggctgcgctaccagtgcttacgcggcggtgccatggccgattcccccccaaaaatccataacccggacgaatcttcaattcgaacgttgctacacggagccttgatgatcacgagcacaaagaaataagtctcaccggttatcgcggcgtggagagcaccggccacggtgcagcacggcccacggcagagcagaggcatcggagagcaattccggcggctatagggtccttccctctcccctgacgcccccataagcttccctgcatattgccgaaccccaccgtgcaccaatcgagcccctagcaacggtatgtctccaattagccgatggcggcgcgacgacaacccat

SEQ ID NO: 59750 - DNA, 277 bp, Zea Mays
agagtgcagagtgctttccaaacaaaggttgatacttgtatcacccttagcacaaatatgactgttttatatatcgcccttagatgttggataaccgatgaattgaacatcgtcactacttagcacttttatgttgtcatgtttatgcattattcaactaaaactatggtgtatatgtcggatatgcaaaagtgttgaccctgccaaaggtgtccaaagtcagtcagaccatcccctaggccaaatgtgtccaatgttagtcagaccatcccctaat

SEQ ID NO: 59751 - DNA, 432 bp, Zea Mays
cagaagcgccaatagaaggtccgaaagcgaacttatcaaaggatctgttgcagaagcgacgaatgtaggagtcatcgaaggactcttttttgtctcttgaatacaaatgatgtcactgctagtgtccataatgttattgcgtaaggaattccatttaatatcagagttaattcctctaatattatgtgacagaattttcaaggagcggtgcaaattctgagggccggaagtcatggatgaacaatagtcttcgtattaagaaacctcggtatgcatagcatacaccaatagttcttcatacaaaaatttgcccataaacagaagtatccagagaaccagaaaataagcatgacgcgagggaaataaaacttcaaaggggccaaactagaagtttccaaacggagcccacataacaaataacagaagttccag

SEQ ID NO: 59752 - DNA, 431 bp, Zea Mays
gcagtctacactgcctccttaatagttagtagagatagttgttttgtaaactaaatcgcccaaaaggaatcgaaactatatgatgtgtccattttagaatttgcatgattcacagagctggcacaatcagataaagacataaatatatagatagtttcttcagttatatttacccatccctcgaaatttaaaatgtccaagatgtcataaataggaagcaaaaaaggtaccaacatactcactggcaagaaaaaaacattgaaaccagtagacattgcttgtgtcgcggccacaaagaaacctaaatccaagcaacacattgatatatacctgataaaatctaatatatgttagaaaaaatatatacaagaatttataataatttttatagtgaaacaacagcaaaaaagaatataatatgacaaaaaaga

SEQ ID NO: 59753 - DNA, 519 bp, Zea Mays
gaagctagccttgaccaaagggcatcccgaagtctttcctctggcccgttgaaatcaccagcccacggaaggcacgaaaggtaaaacataagtccagaaacctgaacactcctcgatgaaaagggaacccataccccgaataaatcatgcgctctttgagaggcctcagcactgggggacgatcctccactggatgtttgcccggatccatgaggaactgggaggaggacgctcccctctcgatgaaaggggtagaacgaggtaaggcaaggccacctgagaggactattaaaaaagactagggcacaactgaacgacacattccaacgaccatcaccacgcgtggaaataaggcagtggttcaagttcgaatgtgtaaactgtgacagattacattaatgaaactagcaacaagcccgatgcgccccaaagtatagcgatcagaagacaacatagatggagcaatctccacctgacccaggcaaagccaccaaggggagacactctcccctcaagggc

SEQ ID NO: 59754 - DNA, 410 bp, Zea Mays
ggggcgtcagcaacacctgccctcccacccacgggtcgggaggagtcagatgctccctggagagacatgggaggagacgaaggagaactgtctgtgttcaaccccatccccttccaaccatgttttgacaccagctacgacaattagatgtacgtcgggctgccgttcccctcttggtgcttggactccgaggaagaagatggcccaaacttcgccctggacttctccgggctaagagaccccaagtccatgctacagttcctatacgcatgtgacgagatgctctccaaaatctcggagggttacaactctggtggtgaagtctacgatccgactcaggagtgcttccacgtcgactcagcactccctaaggaaggagatcacctcggcatgccactgaagggagacca

SEQ ID NO: 59755 - DNA, 353 bp, Zea Mays
aaaaagatatcacatgtttgatgcctgttttgggataactagccatatgtcgatcacatataacgatgaatataggaaaagaagctttgctagttggtgtcgtcgttgataaacaaatgatccatatataaatgaatgttcgtttatcaaagtaaaattacataatatcctttgtgaatcagtcacgtctcaagaaacaagtttagttacagaaaaataccgaaggtgaactctagtggagtgacaaaatgcacccacctaatcataagaacgaggggcagcctagggttagcatgaggagatgcaagaacacaagaacacacaagtgtttagagtggttcgggccatcggag

SEQ ID NO: 59756 - DNA, 761 bp, Zea Mays
gtttaatcttactcatgcgcatgctattcccgagggtgctccaattatgatgagtgggtttcctgtcaccgaccatcctgcggtgactctattcgattcgggtgcatctcataccttcatcaatagaccttttgttgtcaaacatcagctaccgttggaaattggaaaagatactttttgtatacaatcccgtggagggtgtaacaccccaggtattactagggtttctgcttggcaccttcactagccttatcctcacaagtagagtaagaaaacaacaagtaaagtcatactcaggaattaagaccttaagtaaataccaatttatcatgagtcctcaccaaatttttcttatgatcattagaaaggtaaagtgactaaaaaccctaaaataccataccattgatcaaaagaaaatcaggtgaaggaaattaattgagccttactgtcatgacatggaccagtgacataaaaagcgtaacccaccaaattgctcctacaagttagtctgtaaatcatcaccaaaaataatggataatgaaccctaaacaatccacaaaaaaggagagaaacaaagaacaagttatgcacaccattttctgaattttcaaacctgattagaacttccctgtgttcatcacgaaatccacctcaaatccagtcacttcaattgacaaagccgtgactaattacctaacctaacccatgtcagaagatggcatcgaaactcgaagccagacatgactaaaccttgaccttgc

SEQ ID NO: 59757 - DNA, 421 bp, Zea Mays
ccctttatcattatttctacagttttaactatcaaatatctcttatactttatcttcagcatccatccaattatcgatcatgtccgagaactcaagaattatctttggcgtattgctgaagacatcgtggtactagaacttttccattagaccatcatcgaagtggctgatcatgttttggtcagaatgtccattagggtaaagtgaattttggtgaagcatttgtagtagccacatatgctttttccatccttctacttgtagttttgaggatcgtgcttattggccaaacgaggccatgcactttggaagttgtccatgatttctttgagagagctagctagctatcgatggccgctcaagccaagttagtggagtagcttcaagtaccatcaataagtagatcaccttgatatcttca

SEQ ID NO: 59758 - DNA, 682 bp, Zea Mays
ggatttggtactatagcaccatttggagcgaaggtttggggcgttggaaaagcctaggaaattttccttgggtggcagtttcatagaaaatctggaggatcgaggtatatcacgagctaggtgggacctaagtcagctaatgcatagacgatcaattatattgcagatgatgttagcaaatacaaatttggcatattgtctttaaaaatcctgtgtttttcctcgagcctatccaaaggactattctcacaaaatttctctattttacaatccatgttttacacttgcattcctatcttattcgtgtatatttcctattcctaggtttttccaatcctttgattttagtttaatcttgcgcagaagtgtttgataatttggttaactagtcacaatttgtctcgagaaaaaaatgtatctcttgcctgaagaaaaccacgaagattaaaaaacattctacctcctatagtaggttgtataattgtatttatatacgataaaaatagctcttatcgtagcttacaaaaattgtataattgtttggcaagtatttgtatgcaggttcataagaatcaacttcagataaaaggtgcttttgcaagcaagagttgagctaaaccataaaactaagttggagagattaaagaaataaagttacctgacttagattagttgaacagtc

SEQ ID NO: 59759 - DNA, 712 bp, Zea Mays
acaatactcatcaacataagctacatgtcgacaaacaatgaaacacaacaatcgagtttctctagcttaaccgaagctaatatgaacaataaactacaatcatgcatgatgactatatttttcctaagccagagcatacaccaatccattaccagacttagacttactagaactgtacatttaagatttacaataaggatagaagcattttattagttttctcaacttaaatatctaaaacacttctatgcagaacaagcttttcaattctatactttggaactcaagcataaggcacttatatcacgcttattaccacaagaggactgaatcaacttaataatatatgtctactaaaccttttccatattattaagttcactattaccacacaaggcctaaataattactagttcactaacattcatcaaagcatcaacgtccttcctaaactcactaaagtttaaagtaaaccttaagaaagaaaagaaacctccacatacgacaagttgtgatcaaacaagagtcaaaaattaattaaacttacttatccaaataagagtaacttcaagatatcaacttaatgcttgcttattttggacaacaacacatcgattatttgtttagcacactcatgcaccgaattgtcagtcgagctgtgggttcagggtagattgcccacacatccttagcatggtcaactcgatccttc

SEQ ID NO: 59760 - DNA, 1174 bp, Zea Mays
cacctggtgattatgttcgtgcacacctgtgtgacaggtagcgagggaggatgttaaggaggttattatgcgtcccatatggtcccgctttgaccttcgaaagctgaaggttgaaatcgatgaagccgccgaagcatgccagaaggcctttggtactgtatgcttcttcattggtacaagagatctaatccaagagcatatagccttcagagtatggccgcttgtagagaactaggaaatgccgaaggagactgtcaccgattctagcgaaggtgacctggttcgactgaaatatacattcagatatggagataaatttgatttacgaaatgactactagctgaaatgtatcgaagctacaagtgatgaactgcttgggccatattccaaagtagaagataatgcattatccacatccttcgggggccggggaaaaaggagattgaacagagtttttgatgccattggttttgtttatcccgactactgctacccgctgcgaaggacggggaaagaagaggaaaactgctgctttggccaaaactgctgcttcggccactctagatgagcctgcgccgaagagcaaaaagttgaaagtccttacccaccggccacgttatattgagtcggctgtggtacctaagtttggcggggggagacttcttcagctgctgaaccaaaagagcccattcttcctacgcagaaggctgaaggaccggccataatgccgaaggtaccctcagctgagctagctaagtcgaagactgataaagataagaccgaagagccaaaaattgaaggatcaaaaatgttagaaattttaagcccttcggcagaagtaacagcgccgaaggcacaaaaaagttttgcggcaactcccaagagaagaaggatggctaatgtactagatgtgctagaaacagtaaagactttgaacttgactcctttaaagaaaattgccgaagcctcgaaggcgcaaactgaagttgaaacagagcaggccgaaattgaaactgcagtaattcaagctggtgccaaagctgggccttcagagtccgctgaaataaatcatgcggaaattgaagaaaaagcaacagaagaaaaaaacacagagcaaatttcgcctgaaaaggttgccactcctgctcccgaagctttgaaagagagcattgat

SEQ ID NO: 59761 - DNA, 404 bp, Zea Mays
ctcgggatcgtgggggaggggggttaggtggcagtgtggcacgaacggggtgtgcgtgcgtgcgacccgtgcgtacgcggcgagaaggggggagagaagcaggctgcaagagcaatagtggcgggtgataggcggacagccagtccgggtccgtggttggggttggtcggccggggtttgggggaagtggagactggggaggagcagaggaggggcattttatatacacacgccgcggtggcgcgtccggcgtccgcccccgtcctggtcatcttgccttggacttttccggtcagcattttttcctttcgctcattcgccgactcgccgtgagagagattattattatcagtaggtggtctatggcggaggcggaaggtgaggtgagcgccgagaggcccgag

SEQ ID NO: 59762 - DNA, 848 bp, Zea Mays
aaaaactccctttatctctaaataaatatattcttagatcaaagatttttgtctacaaataaaccaatcccacaaaggttgaatgcttcaccaactcatttatttttctcgaagtctcctcatatttggtcttccgatatagtaatgagtttctgtagttgaatgtgtttaataaatgcaaacagtgtattgttggagcaattaccgattaatatgtaaccactctagttaatagaggataatatgattttttttctttgtccaaaacttgctatggatctatttatttaggaacagtgagggcaaggtcaattatcttttaacaaaattttaggacggggggagcgcatattttgctactctttttttaggttgccatacccctaactcatggattcactaattcaagacacgctttagacctcaaaaaagatagtcacgtgttggcggttagacaatgctgctagcgctgctcaatgtcccatggtccaggctattggtccctcacaccgatccttgtagatatgttggccaatgctgctagtgctgctcaatgttccacgatctaggtcactggtggtctcacagaccaattcaggcgcggtgccaagcagggtagggttggggccaagggcgagaccgaggtcgacacggctagtggtgtgcgctaggactttggccgataccatgcttaggctgagcgcagcggtagccgcgcggcctcccctctccttgcatgtgggctacagacatgctcctacgcgcgcagcgctctcccctggaagcccctctacgcagcgtaaaggaacaggagcacgctgcagatagcgtgagtccctgactccccc

SEQ ID NO: 59763 - DNA, 385 bp, Zea Mays
agaagttgcagtgcaactgtattctgatggattctcgcattaacaccttgtgtgatgagttgcgcaagatgcaaattgaagtgattttttctggttctttgtctcacatttctgttgagccagctttgcaagaccagattatcatggcccagctcagtgacaagggagtgcaagttatcaagaagaatctccatcagaaggttgagaagtataattgtttccaccaggatgaaaagggtgtgttatggttcaaaagcagattggtaattcctaaagaccaggatctcaagaggaaaattttggatgaggctcatctctccaaattctctatgcatccgggaagcaccaaaatgtaccatgatctgaagcctttgtactggtggac

SEQ ID NO: 59764 - DNA, 485 bp, Zea Mays
ccggggctggtgaccggaaaaacatggtcgagttggaccattgatccgtgtgcatgtggcctggatttgaacttcgtatcctgaccgctgatcgctgtgtgggcgagctaggttagatttggcacactttgaatctggtgtgttcatctgggatcgtgcggtcaggggggcgtaccgattcaggcgcgtggctgataagatctgtgcggtgtgatgatgatcggacggctaggattggtcgatacctcttcggcgggtgattttcataaagagccctgctctttttcgtagttaacccgttgtgcacataggtaaatgtatccttgcatccaagtccttagttttacgctctctcagaattttgtacccgacgctcctagaccttagtaaatcatttaaataaatctagaaaagtgattcttagtagaaaaaaaactcataatcttgcataattcatatcttctccgtttttactctgatttgac

SEQ ID NO: 59765 - DNA, 549 bp, Zea Mays
ggacgcttgtctcctggagtgacccagagctatgtagccgcttagcctggtcctgtaccctcagcctacatgccccgccactttgcaatgggtgccctagtatttggagctgcaatccaaggggtccgggcacacgaattggcttcccaagtctaagtcctacaggtcctggggcattaattaaaggatagaagataccagttggtgggtcttatgggtgcagtactaaaactttctagccaaggctgtgtgcaggttcgagtcctagtcgagtctacctcctgggggtcaagtcaccaattctctcttaagtacgctggcatctagcctcgacgcgtcgagcctgcatctcagggggcccaagtaccagggagaagttggtaacgacgcacacaacagagacaaatggcatacagataagtgctaacactgcttgataaatagtactcaaaagtatcttacagaaccaaaaaatattacaaagccgcttcccagcgggacccttactctctctctctttgcagatctaactactcatcatcggcgggg

SEQ ID NO: 59766 - DNA, 446 bp, Zea Mays
gggggatccgagcagggggcacgcccggcgaattcggcggattcagttgcaacaaccccgatctgagctcggtcacggtagaagatggagctgacgaagatggcccgcgtgcaagtggctggcgcgaggtaatcagcggctggccaaaggggcccgtatgtcagcgctaaggtgacccaaattagcccagtgtaccgttttaagggaaagatgggccagcgcgggagagatggggaagtgggccgactggcaggccagttctgcggaagatgggccagcacgaggggaaaatggcccaaggcgccaaatggggtcttctccttttttatttatttctgtttgcattttctccactaaatttcaaactctagtatttgaattcaaacttgtttgtgagttcatacacaggttgaattcccacataaggttctagtatacaaaattat

SEQ ID NO: 59767 - DNA, 918 bp, Zea Mays
attatatctgatcgcgacaaaatatttctcagtcttctgtggcaagagctctttcggctggccgatgtgcagttgcgcatgagttctgcctaccatccgcaatcagacggccagactgaacgtgtgaaccaatgtttggaaacgtttttacgttgttttgttcatgcctgtccgcatcagtggagccaatggttatcagtagctcaattttggtataattcatctcctcattcagccaccggtcgttctccatttgagctgctgtatgggtgccagcctcgtcagtttggtatctctcctgatgcggtgattagttccacggatttggatgtttggttacaggagcgtcatctaatgtcagaattggtgcgtcaacatttggaacgtgccaaattacgaatgaaaaggcaggcagataaacgacgttctgaaagggagtttgctgtgggagattgggttttcctgaaactgcagccgtatgtgcagtcttcggtggctccacgtgcgcatcagaagctagctttcaagttttttgggccgtttcgtgtggtgcagcgtgtgggagcagtggcctacaagttgttgttgccagatacgtccaaggtccatccggtatttcatgtttcgcaactgaagaaggcgttgggtgtcggtctgaaagcttcacctactcttcccactggtgattttgctttcaatgttcctgaaatgattttgcagcatcgtacagtagcgaggggtactactgcttgtgctcaaattttggtgaaatggactcacatgccggcagaattagctacttgggaggatgtggctgaattgcgtcaacagtttcctcgagctgctgtttggggacaaccagctttcaaagaagggggaaatgttgggctgcatcaggagaccaagaggcccaggaag

SEQ ID NO: 59768 - DNA, 372 bp, Zea Mays
ctggccctaaccacgtcgtcatcacagacctagaagtctagtacgtgacgcttcctccttgcacgtgtggatacctcataggtgctgcatctggagcactatggtgatacacgcaaggacgtgaaggacgtcgatgactacacgacactactcgaagcattcgagtacatcaagatgacttccgctgagtggtaatcccgtgacttataacaacaatagatcttggttttatgaggtcaaaaattttgttttgcgctagcgtagcctccccataatcctacatggcctatgtatcccaaccctgtcatctcagtatgcctataagggctctactcaagtaagcaaaaggtcaaccctgctgcattacgacaa

SEQ ID NO: 59769 - DNA, 349 bp, Zea Mays
gcacttaacaagggaggaagtgcaagcccatgtgaaccagtttgcatgtgatacacaaacctatggtaaattgcacaattgaacacttctgcagaatattgttttaggaaactttcatattttcctaagttgctacttccatagaatattgatgtgatgcataatgaaaagaatatgggtgaagccatatggaacacatgttttgacataacttaaagatcaaagataaattgaaagctaggctagatttgcggggtatatgtaatctgatttctaactaattcagcaaacaaatttctaactatagtcaaatttctaactaaattaataatacatatttctaactaat

SEQ ID NO: 59770 - DNA, 522 bp, Zea Mays
attttgagtaggtaccaatctaaccttggataggcttactaggtggttgtaaagaataacctagaatatatgtgaagaattaaggatatgttcctagtttatggaggtgagaaagatcttattgtaaatggtcacgctaatactagcttccaaacataaagacatgacagtcaatttcaatccggatttttgttctgccttaatggtggaacaataagttgaaatagttccaacttccaaccaatatacaatggctaattctacaatagaggccatgcatatagcggcgtcagaagttgttgaggaggatgtttggactagaaagtttgtttcggagttaggtgttgttacgagtgcgccaaatcctttggacatttattataataataatggtgccattgcacatgtcaaggaacctagatcgcaccgaaaatataaatatatactttagcgcaatcaccttatttgtgagattgttaatagaggtgatgtgaagatttacaaagtacactcagatatgaa

SEQ ID NO: 59771 - DNA, 339 bp, Zea Mays
gccggatgggcagtcgcgaccacattttggcccatctcagccgtcctcgccagcccaacagcatgcaccgctggtgttactaatgtgcggacccgcctgctgctcacttcacgtcgctgacatgtgagaccatatcaccagtcgtcttcctcctctgaagtcgcatgcctcaacagaatttgttggtgaagatcacgccaaatctgccgagaatctcccaaccgaaacacctgctgccatgtgggcccggttgtccagaatcatccccatcccctccatgttcggctcatgacgtttgaaacagactccgcaaagctggctccctcgggccgaatccta

SEQ ID NO: 59772 - DNA, 497 bp, Zea Mays
ataaacagcaagcgatcagaagatgtgtgaagacaccagcaaggcatgcagtctatttatagaggccggaagcaattgtttcatctcctaccacggtcaccgaatagtcgcaagtattcaataagcaattcaaatcgtctggaagcaagtcaggcaatagacgtcgtttcacgtaacacgacgccatttggactgaggtcaactgcttggacgatatgattacacccagcggtcacgtcaagttactactcaaggacagtttgctaaacactctgtttaccaagtcgtccctcggttacacccattggggaggggacatccaagaattttcaatagattttcccaagcaagtcacatccatatagtatacgcactgaatgtatcaagacagaagaaagatatcgatggagatcagaggaaagccaaatatagttgctgaagtacaagtctaatcaacagaagcattgaagcacaaagtgaaatgaaaaccagccaag

SEQ ID NO: 59773 - DNA, 678 bp, Zea Mays
tgcaaaggaaacatctaactagcatcatgttctttatccatgcacatgggggtgtggaatgaaatgtggttttaatcaatatatgtgttttttcgtgcatctatatatgtcgtttcgtgtctgacttaactgagtcatgcccacccgtcgggcacgacctcggcccagaccgacaacaaaatattttggatcacgttgtgtctgagccatgtttttttcatgcttcgagttagcttattatagacggccctaatgtacaactatagtgggaggaatgaggagtggggtatgggagacaagatagacaatattggtttctgagtttgccatgcaccaaaggttttaaaattggactaaatttatagagggaaatatttaacatttccacatcaaagaagtaaacaatataatacataattaatctaatcatgctaatttattattattattattatttatgtaaactagactgtgtggtcgtcagttgcgaaccgtgagtatgcacgcagctggtactaccctgcgaaagcaagcaagcaagcgcaggaaagcggcggcgacagttactgtacctaacggaaatcacaacaaaaatgcggacgaaaatcttcctgtttccttgtggtggcgtggccacgctcacctcctcatgcatgtctcgcacgcgactcgatatga

SEQ ID NO: 59774 - DNA, 1247 bp, Zea Mays
catgctttgaccggccgggcagcagtaccactccagtggtgatctttatcatggcctgggagacccccaaaaccaccccaccctaaggtaaggagagagaagtttggtcgtgtagcacgcaccagggagagatggggtcgtcgtcgggggacaacagtgtcgtcgtcgatgcctctgtttggtaaaaaaagacaggccgcgcagttaccgcgcgcgggcgcatacggtaaaatctaattcaaaggcccgaaccgattttttttcctttatcagtggcggggttcagtcggcaggacggggggcagggaaatgttgctatacttggcaaaacagtttggataaccaggcctattaatggacggggaagcaagcggaagcgcagcaggaggctggcgattaccgcagaggatcctaatcccaaggattggaattccaatgaagaggcagcggtaaaacctccccccgcagctttttttgccatttgggttcgagactccggctcccgcagcgccagcatatccggatggattagttgctgctgcatgaaagtaggggggaaatgcatggctgcagctacaagacaaagctacggagagaaagaagaagggtttgcatgccccgggtggggggatttgaattttcgaccctcctcctctttaactcccgaaaatttaaaaaggaaaaagttttgccatgcatgcatatatattttataaaaaaactaaaagcatgtaatggctagctcgttgaggaaacagttgcatgcaggtcgcgatgaacgcccgggtactaattccaaaaaaaaaatgcaagggaggtcggagtagataatgttccgtaacgagaatttttactgccttgtccttgtttgttagtactacgtacatacacaggatttaataccccggtcaggcaggaaggagcagacgaattatattaattatagcgatgaagaagtagcactgctccggagtcctggagcgggtgcgaaaatcatggttgggattgctgttacagtggcgcagattaggactcaatcagcgcctcctgctggcttataaaccctaatcaagggagtggcatgcatgcatgcatgcatgggtggaaaagggaatggatggatgagctcatgacccaaccaaaacaaacctcgcaaggcgacaaggcgctgcgcgcgcgaggaatcaagtacgtgcaagttttgcaacaacctgtactgcctctgcctgcctgcgaggaagggagag

SEQ ID NO: 59775 - DNA, 608 bp, Zea Mays
gttagtttgtttgacttgtgttttatcttgttattgtttgtgttctttgattcacaaatagggattagctttatactcaatcggattacgcacggttgataaccatggtaacaagcagggtaaggtagtagcagtcagcagcccgcgaggaggacagtttttatttggtgtcaggcattttaatgaatccctgacccaacgtcgtacactcgccggaagttaatcaccactaactacactcccgggccggggggcccagctagcagacctgacctggatgtcgatctcatcctcatctctccccggcccggctgcatgctacacaggaggccggccacacgcaaaaccactgtatggctgcactgcagcaggccgccaagagcttgtagcagcagatgcatgcatgatgcatcgatcaatcaacagcttggactattatatataacccggcctatcacgtacagtaccactaccacacttgacactgcagctaccttcgctcgtcttgcattgtgtgtacgccaccccagaccagcagccatcttctctctctctctctgccaatctctctatcactcccatttttaagtttcaggcgccattttaac

SEQ ID NO: 59776 - DNA, 814 bp, Zea Mays
gaagacctacaaatccaagcaaaagccgcctaagggtgcagccggacatgcacaataagtgcgcgacatcaccctaaggttgagaagtcttttattataagacaaatctgtgcaaaaaccacctaagggcacagccgagtacgcgtcataagcgcccgacatcgctgtggaaatcaaggtccccgttccatttaagtgccacgacaacacgattacaagtcgagacaatcttacaacaagcgcagcatgtggcatcatcatagtttacatatacacaacgaagggcccgtcagccacatcgcataaataatacaaatcacatcttgttgccctccctctctattgcgagccgggggagggcagcgttttcactcactaccgcaacacgagagcgatgacaacaaacatgctacatcggcttagccttcggaataaggcctgcctctcagaagttaaacaacatcatcttcaactcctcgccctaaaaaagattctgcagatccccctcctcaatacacgtcccggacgttgaggatagcaaatctcgttggccgcccagatctagtcgaagacgggatcgttcccatccccatccgtcgatgcctcccacttcgtgacaactcaccaacatagtgcttcgacaccacccttcaccggcgatgctcttcggctatcgccccagccgggggagtaaacccttcgcgcacttcaggctgcggcaaagcctccactgcggccacatccaacgcagcaaaataatctaaatcttcatctgaagactcctcaatccataaaaatgggctcccaaaatcac

SEQ ID NO: 59777 - DNA, 378 bp, Zea Mays
atcggaccgaggtggagacaacccaacgtggacgtccatggaggcgtgggaaagagagcccacctgaacaccctcgggagctaggttgtatcttgcactacccacaagagctggatcactaccagcaacaccctcggggctgggtagctgccggcaccaccctcaggggctgggtcttctgcagtagccacctctaaggttgagggcccctcagccacctccatgggattcggatgacttagaccagcgtctcggcatgggagactgccctccaaagtcgacgatgcgcgagacaccgctcgggttacctcttgcccagcggaatcaagcaaggaaggcccatcgtctaggacctctgaacagatgaccgggatatca

SEQ ID NO: 59778 - DNA, 442 bp, Zea Mays
caaaaggagccctaaattggtgacaacaagtgctctcatggcaattcagaaaaaaaacaaaggtatggagaatggaactatgcaatttcattgaaaatcttgaagtttcattgattgtgattacagctatgttcttacctttgaattggtagtatcttggcttaggtgctctatacgttaaaatgttgtttctcttagtgtacctaagaaaccttcttaatgatggtgtgcttagacattgcactttatatgcatgatcttgtcgttttcaattggtatatgtggtgcaatgatcatcatgtgtgaagcatgcctaggttgcttgtaaaatgttatactccttgaggcatgcattgttgtattaagtcaactattcaattggtatctttttgtgaatatattatgcctagaccaaggtatgttgtgatcccctctagttctg

SEQ ID NO: 59779 - DNA, 442 bp, Zea Mays
gcatgggtgtaaaccatcaggccgggtttatgagggcagacctcaccgggctggtgtacacatatgcgaaatttaactataaaagaagaagaatttaaccccttagagttgcttctatggattgaacttacagagataggaaggggtacttcttcagctatagcaaagttggcatccccgggttggcatatttccatcgccttgaggggttcctccctgctgggggagaggttgcggaccccctcttggttcagtactttgccgcaggattaggtcccgaccctgggttccctactatgcacgaaccgtcggccatagtacttgagcgcctggttgcgatgtgcatttcaggttgcaacttgacatctgagtccgccgcttgagtccacgtccttgcactgtagtggcccctacacaaacccatcgaaaggttggacccgtg

SEQ ID NO: 59780 - DNA, 505 bp, Zea Mays
gtcttcagctttgggtcgtcatcgtctctagcttaagggaaaaaagatattcagttgggcactgttgctcatctggcacactcggagtagtcacactttcgttagcggaatacgattacaatttcgggaccaattattgcttttatcattgatagaagcttggatgacgtcgttgacatgcactgatttacaaatatttcaattggctcttggcaggatcaataatgagaaaaaggacttcatctcaaagtgtcagctctatattgcaacttgtgaaaatacagtaccattcgtaattggttcttctattccaagtcaagctccaaatgttgacaccatgcaacaacgccaacaccaataccatccccatagactaatgaagtggcaattgatgttgacattgatgatctaatggatgaagagcgggcttagctttctggcaagaggtttaagagatgcacatggattctctggaagtatttcatcgagaaaaaggagattgtag

SEQ ID NO: 59781 - DNA, 835 bp, Zea Mays
gtgataataaacccggagattttagtctgtctggctttgcttgctgacaaatactacaagtctgcacaaaacgatgaatagcttgcttcatgcccttccaatagaatagttgtttgattcttctgtaggtaactggagctcccgaatgtccacccaaagctgaatcgtggagggctgatatgaccttattttgcagctgcacattagtgcccaaccaaatacgacctttatatcggataattccatcctttaaggtgaaatccgagttagctatttgtgaagtcaccgccagttgactcaacagctgttgagctgaatcatcttgttcatagccttgcacaacctcctgtatacagattggtgtgcagtgagacacatgaaacaattgtccctgggtatgaggatatcgtgagagagcatctgcagcagtgttctctgatcctttcttatagatgattctatattgtaaaccagctaacttgtaaatcaagaggtaacaatttggcattcaagaacgtgtgcgaagagccagaatcaattaacaccaacaattcctgattctgcaacattccctgcatccgaaatgtgctaggactatccagactgacccaagcagccatagataaaaccatcattatttgttgttcaggttcaaaaacttcttcagttatttcttctgaacccaatagttcccagacttcctcatttgcatgcaattgcaccgtagtagcacatctgtgaccatgagaccatttctctgcacatcgatcacataagccccttgctcttcgataacatttgagtgaagctacccgatcaagcatcgaagtgtgtc

SEQ ID NO: 59782 - DNA, 1352 bp, Zea Mays
tcttatagcatttaactttctatttcaaatgttccatacattccacccctccaacccttaaaatacaggtttcttcccgccagtaacaaagtaatatatcgctgcttatactcaatggtaagaaaaaatgttccacccgctggagtggtatagatcatgcgatcaggatcacaaatttttgatatgtcaaaatgtaagccatattttagccatcatgcacggatgacctcaatcccacacccaacattttttagagaatgattttcagttccatcatcagatttatctaagtatatggtggcttttttactcacttctatatccttgatgatctgaatcgatcgcacctcaaacaaaagaccatctaacagatcagttattttccaggttttctaaaagatgaatatagtcaatatgtcttttgcttagaaaacctgaaaaatatttgatctgttagatggtcttttgtttcaggtgcgaccgattaagataaagaatatggaagcgagtaataaaaccatcatatgcttagataaatctgatgatgaaactaaaaatcagtctctaaaaaatgttgagtgtgagattggaccatctgtgcatggcgcctgaaatatggcttacgttttgatatatcatgaatttgtggttctgatcgcatgatatataccactctatccggtggtacattttatcttaccattgagtataagcaacaatatattactttgttactggcgggaagaaacctgtattttaagggttaaaggagtggaatgtatggaacatttgaaatagcagtgtcaaatgaaaggtacatgctacgagatgtcactgttatatattgcagaggactatatgtttctcagtccagatacgaacgttgggcaaactaggatgagacctgatgctctaagagattcgttcgagagtctatacaagtgctaaggaaaaaagtacagggatatcaaacgtgctattggaatcttcacagttcatatttctgaggcagtacgtatccaatgtgtctacaaggccgtgtgcagatcatttttgacttctgaccagcctacattagttgccacaatcgaaaactcattcgggaatatgagtattgtggtaaaaagaatatgaaagatataaaaaacagacttgtaaggttagcttcttcatgtgtagaagatcttgaaggtgctaacgtaagaacatcaatattagtttttagagagatcaagatcattctacgagatgtttgtactaaagatgttgatgaggagaagcctccaatggttgagaatctagacgactattataatagaatgaaattctctgaagtgtttaaagcaggaagc

SEQ ID NO: 59783 - DNA, 615 bp, Zea Mays
cccatggagacgaactagggcaaataaaacctttttctaataattcttctatttgtttcttcagttcaattaaatctttgacatccattcggtaagctctttttgaaattggtgcggttccgggtaatagttcaatagaaaactctatatcacgatcaggtggcatacttggtaattcttccggaaatacgtctgggtattcacacactattctaatgtgctccaaagatttctcttccaattgatttaccattgcctctactattgctggcatacagacactgacttcaattctttctcattgcggactggttaatgtaaccattcttttggcacaggatattactccatcatacttggtcaagtagtctattccaagtatcacatcgattccactcgattccaaaattatcagctctactagaaagcttaggcctctaatttcaatcttagtatgagggcatgagtgagtggctctaagttcacctcccggtgatcgaattaatagtttcttcttcaagggatagtttggtatattatgtttttccacaaatgactttgttaagaaggagtgagatgctccagaatcaaataaaactgatgcaggtatggagt

SEQ ID NO: 59784 - DNA, 412 bp, Zea Mays
ggctgcgtcgccgcaggccgtgcgcaacgttggccgggggctcgagttggggaagatgcgcgtgagccattgatttgatcataggtggatgagattagatcctttgagtagcctctcggcatggtatcttggccattgatctttagggaatggtccggattagaagtcgcatataccccttcacgccataggatctgagccgttgtaactagatcgggatgggggtatttgatcactcggtaatggattctagaccatagatcctggatctcacggcctcaagagtgtactggttcagttttaggtgatctaatattggtcgtagactttagatcgtgcggcctaggctcatggataccccttcggccatgggacaattgcatatgagcccctgtcattttctataatcaac

SEQ ID NO: 59785 - DNA, 398 bp, Zea Mays
gctcgtgcggacctgctcgaatcctttcccccacgaaaagctccgctgaccgaaaccaaccgatggttaaaaccccaatcggccccgcctcctcctcaactacttcgcgccacatctcccctatcttccccgttctctatacccgatccaaactaaactctagcgcccgtgcggtgggagctgtgtacaccacgaagctccaatcccatccaccaccgacgaacggagttctgtgcttgcgctagggagccacgaggagtcgctggtgaagcgtcgtcgccagccgtggggagattgtcacagtggtgaccagaattcgtgctcggacaccaaggtccgaggcactccgtggacaggatctccccgacttcgatccgcggtgagcaccttcagtagta

SEQ ID NO: 59786 - DNA, 702 bp, Zea Mays
ggggtctgaagctagcagagcaatctatatgaaggaatagagaactagggaaggaggggagaaaaggatgaggaggagtgcaaagctagaagaagaataggacatgaactgaatgccctcccccttgctgatgtctctcctcttgtagttgctgcgatttgttacacaggcgaatgggccatggcccacacgagaggtagcccatttgatgcaaatacctgtcattaccctcttcttgagaagctgattgccccaagcagctgtacgaaaaccttggagatatcttgtcttaaagccggtttgcagagacatccattgttacttcaattgtcccctggatatctctattgtttcctggtatgaaatgatcatgccttagttccgatccatttcgtatggcgtcactggaacacatcttgaagacgtcaaatgaatcagcacgcaaaaagtgcacaagtttggctcctgaaccccatatgattctggacaggtcaaggcaaaattttaatacgctaactccagtgctcccctttgcttccatactgatcaattttggagtaccaaaaggctcacaggacgaggaatatgtcaagctcaaccaattcgctccagactgcagttccttactggtacgaaagaatccttcatcaagcggcagcagtttccagcatatgtcgaagggtgcatcaaggtcccaagtat

SEQ ID NO: 59787 - DNA, 525 bp, Zea Mays
acgtggagtaaggttaggggcattttaccgagacatggagtgcggagactctagtgcacggtggcccgaggttttgcggcggaggcgaggcatcagcgagaaatccctgaacaaaggggaatcaatcctaaactcggttgaatcctacgtgttctcaaagtaaagatagggacgggattattcatcttatcggtgatgaaacagaacagagggatagcgacgaagtttggcagctccatgaaggctcccgggctccagtgagcaatccaggcaacactgtcgtcacacgcacccacacgatgctatggaacaggtccctggaatcgggcgaagacccccgacccaaaccggaagccacaacggcggtgaatcggagtctcctcggcggcgggtcaccctcccaatctctcccctctcatcggcgaggcacacactaagctatggagaacttgaagcaggtcacgaggtatggagagggagaggggcgcgggttcaagtagctggttgcgtggacgagtcggtcgc

SEQ ID NO: 59788 - DNA, 349 bp, Zea Mays
tagccatagaagcagcttctgtgatgccaatcaaagctagtgcgggcccggtagaagagccgggaccaaaggaaacagtagaagaacagccgaaattgctgagttgctccactgtgacataattgccgaagctatcagccactgcaacaacgactccgacgaagaggatgatggctagagttctggatgctgttttggaatccgtgaaaatgccaactcctgtttctactgaatcttctgcaggaaaactgaaggtgcaagagaagtggtcgctgcaagcgcttcttctacccatgctgaagcgggatgttccgaagctacgcaagtaaagctggtgggagaaaatctt

SEQ ID NO: 59789 - DNA, 580 bp, Zea Mays
cagtagagggcacctgatcaagctttcgcttcttagaaattgttgccttcggatctggtgctgtttttgctttctttggggccttttcatcttcttttatagaccgggcagctttcctacttaagatactgacaacttgtttccttttcacccccctggccccttcgtcaagcttctcataatctgggtattcgaagttcaatgcatccattactcggttcagccttcgtttcggccggttactgaaggaagcagttattagctggtcttctctttgtataattgccaagaatctcattgcacatggtttcgatcatttctaaccactcgttgcatggctttttaaactgcttctcaaatttgaaccgataggggagccaaacaagttcatactttttccccttcctttttcttcggcatcccccagccgctagaggttggaaatgtcctatttgccaaatattcctgcactagatccctaaattcaacttcggccagctagcacggggagccaagttgcatgtggcacaagggccttgtcattccgaagcttaatctcatcggactcatgaccatagtc

SEQ ID NO: 59790 - DNA, 409 bp, Zea Mays
aaataatgctcgcaagcctaacaaattcattctaccacacaccagaattaaacatcaggcaccgatcgctaaaaatatgtatttagcgatatagcattggcctgtaaaaaaaatgccagatcatcggccactaaaaatgatttcaatgactacacatcctagttcagcgtgcacaatctaatgtacttgtgtatgttgtttctccttttgtgaatatagtttaagtcgtgtttaattgtgccaactacttagtggtgccatatttgtgtcagttcagtgtgcacaatctaggcacgatattgaacattgtgccatactggtacgagcactatgtagattgtgtcgtaccaaagcactacagatcatatcgtgtttagtatcaacctatttagggggtgtttggatcctc

SEQ ID NO: 59791 - DNA, 476 bp, Zea Mays
tttaaatcaaaagattcaccagactccagctacacctgcacgaggactacgggttggttatgtggaaggccagggtctcatacacaaaattctctgaccaaatcggtactggccgatctcaaccgccgatcagcgatgtggggtcacgattagatctaggttgacccacaactcgcacacggcgactgccctcgaattgtggattcatggtcaggatcggtcacacgaaggaggtatcgcgccgttaatcacgaccgtccatccgatcacctacagtcacggtcaaaactcccattagccacccaacattaacccgacgaccctgatctaactcatcaaacggggcaccccagatcaaatctccaccacacatctacaaatctacggtgtacgcgttatcctctccctcgaccgcgacggcacaacaccccggtggtgctgtagccggagtaatctctcccagtgatccactgttc

SEQ ID NO: 59792 - DNA, 426 bp, Zea Mays
tgtggccactcgtggatagctgggaaatgccgaaggagactattgttgaatcgagtgaagatggtctagttagattgaaatataccttcagattcagagagaagtttgatgaacctaatgatgattggttaaaatgtattgaggctaccagcaatgagctgcttgggacatattcaaaggccgaagatgatgccttgtccgcagccttcgggggtcgggggaagaaaagattgaacagggtgtttgatgcaattggcttcgtatgccctgattatcactatccacttcgaaggcaaggaaggaaaagaaaaactgccgcttcggccgccactactgtgtcggctgtgtcgaagggtaagaaaataaaggttctgacccaccggccgcgatatattgaaccgaccgtagtgcctgaatttggcgaag

SEQ ID NO: 59793 - DNA, 706 bp, Zea Mays
cttccccctaaaacagactcgcggtcgcatccccggaatcacggcgtgagctcaaccgatccttgcccgtggccactccgagctccgcggggccaccaaccagtctcagtagcatcgcgcttctctggtctgaggcaggcgggtggggacctggaattagctccgcttcaagctcggtcgtaaccgccgcgccattatcgcgtgcgtggatctcgccggggatctggcacgtagacttctttttcccctcgcgcatctaggtataagaacttccttgccatgcctctgccaccgcaagctcgtatcgttagccgcaccttgcatcgtgccgaaacgctagaaccagagagagagagagggccgaggaagtcgctccgcgccatcgtcaatcgtgggtcgccggtcgacttcgtggctcagctgggtggtttcagctgggtggggagaatctccatgggctaccattgtggaattgggggctcatgaacccggagaccatttgtcgctgaacgaacaccaccgtgctgcaccaccgtccgcctggtgtcgtggccgggaggaaccactccgagatatcctgtgagaaccttctacactgctaaaccatgtccccaatttcgtgttgcgccgtttaatttgagtttgggggtgtggagcgccgaattgtgattcctccggcgaggtcgcaatcatggccaacgcggtg

SEQ ID NO: 59794 - DNA, 376 bp, Zea Mays
gaagcagggcccacaatgcctgttgagacgaagcctgccacaacgaagcagagggccgaaggaataactccagatagtaatatagcgtttgagaaaagtgcggccaaagaagccgaatcccttgctcccgaagcactctccgaagattttgattatatcattcgacatgcttcgggaaaaagattatccaaagaagaaatttttgaagccaaacactatgcccgggaactgaagtatccgaagggggccttagtgtttaatggtacggacgaagatgatttcctgtactgcctccaagacaacaaagaattatctgtcttccgggagacggccagaagtttgggttttccgaagctcgaagctggcctctgtgcca

SEQ ID NO: 59795 - DNA, 371 bp, Zea Mays
agttgttttatagtgatactgaaaaaaccaaagctgcaatatttgaagtgaacctctctcaaataggccctaaaacaagcactaaatttttaaaatagttttttgcgggaacagaaatattacatgccaatcttaaaaatgtgttgcttgttctaggttctacttctaagaacagaggtaatcaaattgagatttaactagggtgagtggaggttgaatttggactgcgattcagtaactacttaggtgtttataggttgctacagtttttatgtatatctgagtatagagtataaactataaaaacgtgtgttatgttgtttaggcggatgtgaacgtgggtttaacgctaacaaacatgtttgaatttg

SEQ ID NO: 59796 - DNA, 627 bp, Zea Mays
gaaagatctttggcaagagatgaagatggggcactttggtcgctctatcaccgtacccacttgctggcgacgtggccgagcggccatcgccagggtgtacgcctgtcgtcatgattgcgccacgccgtgaccctttcaccacgtcgttaccagccgtaatagctcaccagtgaccgccgtagctcctcagccagtgactgccacggtagctcgcgttagaggccttctcctttctccggccaccagcacgccttctccaaattggacgccaccactaatggattctagaaattgaagccccagtgagctccgctaggttattacgcacccagtgcaccagctcctgcctctgatcatccaccatagcctctcaatttcccttttcccacaaattgggtttccgtgccaccgtgaatgcctcgccgtggccaactctctacaggttagttcaagcttctttgcttgatgttctagcctccctcaagcctcctgttgctcgtagaccaatttgattgagctagacctcattgaatcactaagaacacctcaggttatctttggttctcaccgccgtcgtgaacagacgaattctgtgccggatttgtgcaattaacggagggcttaggg

SEQ ID NO: 59797 - DNA, 666 bp, Zea Mays
attctattggtagcaaagctggtaatgatgtattttctgcagtctgagatagtacaataatagacaaacatatttgtagcatctcagattttaaatatgttggatccatcaatagcttatgtgttgatttattgaagttattggtctatattcagttttggatgataagcaaaaggcttgatgcttgaacgctctagttcacgtacataagtgtgataggaggctaatattttgtacatatttgtagatactacatatgtgcaagtagccccgcttcgtccaagatcgaaaaggataaagaaagtctctgtcaagggggtctatggaaacattagatatttcttttccctcatatatgcagttggactgcaaattttctcaaataacttggagtatatgtcaaaatttgcagtggtttgggcacctaaggtctgatgtgttttgctgaccagactacaaggatatttgttgatgttttggtggttcatattggacaccatgctgattcatggtggttcatatgtgattttgttgatgtgttttgctggttcatggtggttgtaatatgttggacaccatgcttcttcacttgattgatgtaatatgttgtgggtagcccttgactccttgggactatattatggatatggactacttttaaattag

SEQ ID NO: 59798 - DNA, 345 bp, Zea Mays
atcagtttaggttgaatggggtctaggcatgaccagattaatctagataagatctacttattttattttaaaatagattatgtcggtcacaccattatgagataagcaaagtggtggagataagtatgcttattaggacaagatgagtctctaagaaaaatagaatcttttgagattggttagatctattgggataagatgagaatcctttcgagaagagatgagtctaataaagtaagagagtatcttttaagataggatggatcattttaagataggagagagtcttttaagataagcaggatctctacgaaatagatacattttcatggaggataatctaag

SEQ ID NO: 59799 - DNA, 979 bp, Zea Mays
gggtgtgctactaacgctccctagccgaagctgtgttcaggtccaggtcccagtcgaggctgcctcctgggggccgctgccaactcttttaggtatactggtatccagcctcgacacgtcgagcctacatcccacgggggccaggtaccagggaggagtcgacaatgccacacacaacagggacaaatagtatgcagataagtgctaataccgctcgataagtaatactcaaaagtaccttacaaaaacaaagctattacatccgccttcaagcgggaccctagccttatgtctacaggtatgacctactcgacatcagtagggtcgcactgaaagcacgcggctgccatctacgcgacatcttgtacgacctcttgggtggcgtcttcagcagccgggccagcagtcaccgttggaggcggcaccgaagccattaaagccaaagagatggaggcgcgaaagatggagccgcagcttagctcgcattccatcttcacaaggctggtgaacatcctttccttcgaatgctggaggaagaagcgggaagaagcgtcacccccacggacatcttgcggaggtaggcgatgatggccgcctgaaggatgaagcagggcgtgaagtgctgaggttggaggccgagctcctccagcagcagcacgaagaaagacaagatcggcagcgccaacccgctggggaggttggagatgaagagcacaaactctccggcggcgagatcaccgtgaggagagccaccgacacggatctttccggcgaacgccggcacaccccatccgagcaggttgtgcaccaagttgagtaccacctcgggctggaggcgcttgggagggtctagcaaggccatggcggctacgacggcagaagagcgcggagaactcgagggcgaaagggcgctgcgagtgatgagaatggctaccgcgctcgggggaatccttttttaaagaaagattcccccactgat

SEQ ID NO: 59800 - DNA, 580 bp, Zea Mays
ccggaggtggaaattgatggcaatgttgaagcatgtcagaaggcctttagtactggcacgagggatttaattcaagagcatatagccttcagggtatggccacttgtggagagctgggatatgccgaaggagaccactgccgattccagtgagggtggtctggtccgattgaagtataccttcagatttagggagaagtttgatgagacagacgatgactggttgaagtgtattgaagctaccagtgacgagctggttggaacatattccaaggccaaagatgatgccctttccgcagccttcgggggccaggggaagaaaagattgaacagggtatttgatgcgattggcttcgtataccctgattaccgctacccgttgcgagggcaaggaaaaaagagaaagactgtcgcttcagccaccacagttgtgccgaagggcaaaaagatgaaggttctgacccaccggccgcgttatattgaaccggctgtggtgcctgaatttggcaaagaagcctcttcaactgccgaagcaagacaaactgctccgattgtgcagagcgttgaagagtcgactgtag

SEQ ID NO: 59801 - DNA, 425 bp, Zea Mays
ttcaataacctaccaagccgaccatagcaaagttgttgtccatcatgccagctttaattttgttatagggttcttgatcatacctccactcgatcaagcacaattcagctctcaagttgatctaatgccactgtcagtctaaacttcaggccaacccccgactgacagcccaacttccaggccattttgctccaatttttgtacaactctagggctcactgccttaatcaaacttggactactttaatagatctacaaatttgttgtagtgccccatgcaaaatccccatggatcaagagatacagggatcaaaaatcagcacaatatcattgtttttcagagttaagcatttgggtgcctttgggacctttttgcaatttactccaatttgttccataaaacatggaaatctccaaatataaaa

SEQ ID NO: 59802 - DNA, 520 bp, Zea Mays
tagaaccccggacgggatttaagttttcaaattggccggcgatgtctatgtggtcacataacatgtatattcttgtattagtttgtcggtcaaactcgatttttgacagtcgaaacacgccttatatttctggatgatagggagtagtgttgattaaggatatttgacaattgacactatttttgcgagcacttgaaacttgtgtgtctacctgaaatggcgggacaataaatatacatgttctgtgttgaatcttgtctgctatgacgaatataaagaattgctgtcactactttgtgctttggtagaaaggcacattgggaacttctacatgtaaatctttgagaccttgaagcaggtatagatgaattacctgaactgacgacatatatctatgtatatacaaaaaaaaacatctgaggttaatgtcaccacgtttgagagcttaaaagttctactgcaaatgtgtaaaccaggttttccccccttctctaaatatgatttaacactttggatcgag

SEQ ID NO: 59803 - DNA, 330 bp, Zea Mays
caaaagcgcattggacatctatctttggcagaccatagtcatttatgttcccgccactattagcaaaggcatctgagagtttgcgtatcaggagggacatgagttgttcctacggtatgttgtagttaggatttcccagtgtatctctaaattgtcgaccaatgtcatctgtaaaagatagccagtatgtatcaaataatgcacgaacgttaccaacaggacagaacataactacggtcacaaaaagctgtctaagctggtacgaggacgcagatatgatcgcctcgtcaaacaacagcttccactcattatcgctctcaagcaacccac

SEQ ID NO: 59804 - DNA, 535 bp, Zea Mays
tactccatggctccattgccaacttggttgttttagggcattgtcgtcctagtcttaagtcttatttgaatccattagctgatagtatttagctatctgatttggtcctgctactgagatggttgtttggttccaaaagagataattattaagcaagacaaggaccaacaacatttaggtggggcacgcttcatagaagactaacttgacagattgagccatttgtgcgagatatgttgttggcttcctcgagcgtcttgtgatttgagcatctctttctcttccgagctgtgcgccttgtgaaacagcagcctctccaagttattcttcaccttttctagacacaaatcttcctttcctgttgggcacagcaggctccaccctagcattattgctacctgcctcagtagcaatctcatatcctttaaacagtttcctggaagcatatatttgtttcttaaccggacagaatttggaaaatgtatttttggcgaagattacatcaggagcacctccccagcatggcacagcccca

SEQ ID NO: 59805 - DNA, 605 bp, Zea Mays
gtcattaagtagtgagaattaaagaataacataaggtatatatactagacaacgtctgattagttcataagcaagtatttccattttaaccaatatatctttgttgtcaatttcagcaggcttagcatcaataactacaattgcttcctcaaaatataactttataaagagaggattaaaaaaagaccccacagggttacggcgcgccggcttgagcacgacgtcgagcatcttgcacatgtcttccccgccactgcctacgtgaccgcaaggcgaaggttgattaaggcattggataggccgattcatggaaccgaaggagacgagaccgggggcgtagttgtggcgacgacggtggtagacgaggacaacagtggtgagggagggtgacacgagtgattgctcgaaggtggccttgaggactactaaggaggaggcctgacgcatgagcggctaactaataggtcattgaggatggagaggatgagctgctcgagcctgactttaatggtgagcaggggatattatgtggcctcgagacatcccagtgcttctgcgcttatgctcgttttagcgtcgcgataagcgtgttcaacaacggcggc

SEQ ID NO: 59806 - DNA, 1332 bp, Zea Mays
attatgggttgtgggctacgattagggacactagagattggaattgatagttgtcagccagttaccagcaatgctataacctatgggacatagaaagaagcacgaggcacagtgaaggaagccagcaaggtgtgagcaacaaaaatgggaaggagttgctggcgtcaagggcgacaacgggaggctctatggatgaacctacaagccaaggtgggcacggcaaggagccgtggagcacggaaaaggatgccgaatgcaaaatatattgggccacaatgggccttgtaagctaatcgttgtgaggccgagtggaatggtagcccagcagacgtgtcgcagagtgcagcactcgtgagatagtacttgagacctctgacgaaactgaatgggttatgcaataactgaaaaacaacactaccattctcctgttcttcttctccaagtatcttcttccctttccttctctacctactctctcgaaggttaacatttgatatcagagtagttcatcctggaggacctaccaccaattccgggtcgtcgaccacgctcgacaccaaccctagccatggatgctacgatgcagcgtgtgctcgaccaattggtgcagatgggggccaactggcgcagatggagggtcgcctcaccgatgcgatggtcggccaatgcggcgacttagagcagcggttcgtcgaggttgagcagaagtcggaggcacgattcatctctctcgagatggatctggcgcagttcgatggctggcgtccggaggtcgagaagaggctcgacaacattgcgctagaaatctcttgggcaaacaagttcatggaacgtggatccatggcattagatttcgccaagcctggtctcatttcctcctcgatggtggcaattgggcgtccacctgctgaaacccacagcgtcgataggcctgatggcacccgcttcgatgattaccaccgggagcgtgggtctgggcgagttccaccccaaccccatggcccggtcaagggtaaacttcctgagttttcccatcctgattttaccgtgcgcaatgagtttcacatagatgttgagggatttggggttcctgagggaaatcatgagggttggggcaacctgccacgtgtgaatttgccttgcttcaacggagataatcctcaactgtggaaatcactctgtgaaaattactttgacatgtatgaagtacatccaactaggtggatcagggtagccactatgcattttttgggtagagctacaggatggcttcagtctatccagcgtcgcgtccatggttggtcgtggtctgaattttgttctcaaattcag

SEQ ID NO: 59807 - DNA, 399 bp, Zea Mays
cggtcagctgccggaacactaggatccaaacagacccttggttaaactcggtagcacctcgttaccaacttgaacatggccgagcgagcctcctcagttaaggccacttcacgaattttgcccagtgaagaagaagaaggggggaaaaagtcagggagctagaagaaccgagtgtttgtcactgtacgcagatgggctaataggttggagccctcaagtactggcatagcaaacatgtgttgctgttgtagtgttgtcccagttccacaggctgaatgacaccaccaccaccaccaccacgacgacgacgtgtccattaggaaccgaaaaaaaagtacagacgacctagtcatttccacggaccaatctaccacagtggtggtgtcgagaacgagcgag

SEQ ID NO: 59808 - DNA, 664 bp, Zea Mays
attatgaagaataccgagggctcttatgcaagacatgcacagcgaaggggtatggcgcgatatcggccgtcagatccgagacgtgcgcaccagattagatcttgccgcccgcgaagcggtacgccgcacgacccgtccattctgcgatcaacggcgcagatctaattactccgaaatctcccccgatctgttcgatcaagtccgacggtcaggatcaaacgcgcgaaggggtatactacagtttaatcttagccgtcgattacgatccgacgacctaattctcccctagccgcgtcaacagacaccgtgggtgactaggtgcccacggcggcgcaccagtgaacgacggcggagctatagccggagtgcggcgatccagggctctggtacgctgattcatgcgtaaataagtgcaacacgcagaggtcactaaggcgaaaacaatagggggtgtattaccggatggcacggcgtggaggtaactgctctcagctagatgcggcggagtgaggattgcatcccgacggcgagcgattgccgcataatcacaaccccgcgcaccaggagactcccctgaactcgatcagtattcccaatcggacgaccctgaccacccagcagaccccaaccgacggcgagggtgggggacagcgtcggggcggtg

SEQ ID NO: 59809 - DNA, 643 bp, Zea Mays
cttatatggtcttgatctagcttgcatccttttggcatacactttatcatcagttgggtaatttccttaaagaaaatttatgatctctatcctccaatctttgttgcacatatgggaaactgttaggattgcgctttccattaatgatactgaaggtgcctttagtatttcaaataacccttcgggaggcaaaatgagcccctgggccgtagacttagccattatgtctgtgtgttcattatctagccttgggatgttcttcatagagaaacctttgaaggaagcttaaatccttcgtaccatatcaaggcacttctctagagatgggctctttgctttacttgtcttgtcaatataacctatgatgacctgatgtcagatttaaagattgctttctttacacccattgccttaagcttcctcaagcctagcatatcagttcagtaatgtggccgatctgatctgagtcgtccaggttcgatccagcggtccaaacgtaacgatacccctttggccgagacattttctagaagaacccctgttgttttaataaaagaatccaccgtccttctctgtgtaaagagcatagcagagtggtcctaaatttaacggtttaaaccctggacttttagaaatacttagc

SEQ ID NO: 59810 - DNA, 804 bp, Zea Mays
gcgggcgtgagagagagcgggcgactggaggcagaaccgtgcaccaaaaagtgtgtacgtctacactatcgtcttatagagtagtaaagatttgcttctttggtctgccatccttgtcacttggagcatatattctcccatactcttcaaacagctttgtgagtgtttcgttcattttaatccaaaccacttctccatggacctcaccaaacatttctaaggtagcgatcttggtgtaatttgaaagtttgtaccttggatcaagtgcaacagccacaaagatgagaatattgaaacttgtatgatcaccccaatacttgttgtactttgctaacattctttttgccatttcgttgcgcaaaggatcacttctttcacaccaagaccgcaataatatgttaagttcagcaacctcatgaaagaatatgtgagatgtagggcgaagagtggcagaaacacgaatggtcaacttgtggaagtgctcaagaaaatcggccatcttcactgcactagcccaatcatcagaatctggcactccaggctgtttttcaccatttaaatcaattgcatagtatggatcatcttctgcatacctctcaaacaccttctcttatgctactgctaccttgagcatattatatgttgagttccagcgtgtgacaacatcaagtgacaagaaagccttggtgttaaccttctctagctccacacacttcttaaatttggcaatcctagaaggggagctcttaatgaatttaatagctgcacggacacacttgatagatatgtcaagctctttcaaac

SEQ ID NO: 59811 - DNA, 348 bp, Zea Mays
ttaagtttgattcaagaaataagaagttcttctctagcaaaaggaatcccatctctaagatgggctgctataattgtggagaactcggtcatcttgctcatcaatgcaacaagcccaagaagaacaagttcaagggcaagaaagatgatgacagtgatgatgagaagaaggaaaagaaattcttcaagaggaaggaaggcaagcacaaaagattccataagaagaaaaatagaaaagcatatattgttggtgactggctcactgacattgaatcctcaagcgggtcgtctttaagtgaagaagagaatgatgaaaaggttgccgccatcgctggggatttttcttcac

SEQ ID NO: 59812 - DNA, 344 bp, Zea Mays
gtgaaagcaactaatcccgagcgccagtaaccttcttcctcttcggccaccagcgcatcttcacgaaattggacgccaccgctgtgggagcctataaattgccgaccctgcctgctccgctaagtaattgtgcaaccagtagagcaactcgtgcctcgaatcatccactagagctccccaattagggattccccccaaatcacccaagaacaccgagcggtgtgacctcgccgtggccagctcgtctcaggttcgttcatgcccactgtcctcttctttcagcacccttacttgctcctgatactcgctgacccattaaatttagctaggcggtgctagatcac

SEQ ID NO: 59813 - DNA, 516 bp, Zea Mays
ggccaagggccgttacatgttgctgctaatcatggtgacatattattgttgggcaatgatagaccctcaaactaaatgaaaacagtgacgagaccaaactataagaaatggcttagagccatgggatttgaaatagaatccatacattataatctggataaatggatttttaagaaaaaaatagacatagaccaaaatgctcgtacccataagatatgattggttgcgaaaggtttgaagcaggttcaatgtgtggattatgataaaacctctttgttcaatgagcgagccatgcaacgcaagtttactgtttgcagtgtttcatacatgcgaataccaccacagggccacctgaatctaatgtttatccagatgatggcaaatgccatttttccttcttgggcacgattataacatcgaatggaaaacccttcctgaatatttgtgcggaaattatgcctcatctcattggtgatcctccaagtccaggaggctaagttgatatgggttgaacca

SEQ ID NO: 59814 - DNA, 388 bp, Zea Mays
tgacgaactggagaacggagaatacaaccatccagcgctgaccaagattgtcgcaccctgtccaatgtccatcctgccagatctgacgccgctccacagcagtcaagagggtagtgcgcctccgctccttttactgctttctttcatttcgatttctcacgttttggttcctagctacgcaccatccccatagtcacggtaatgtgatcgatgcgttatgcggaaatcgagcgtcaagtgcttacaaaaaatgtgcgccataatttgatttgttcaatgtttactgagcacccctccttgttttgagctaggtggagttagtttatcctgatcatgtatgtaagccctggccagtggctacataggaatttttcagcaacaaaaaaat

SEQ ID NO: 59815 - DNA, 677 bp, Zea Mays
aaatctagataatagaaacaagccactactatactactatagtcctccacgtccttagtcgctccagatctactactagcttcaagagggcgatcatccatgatgttcatagaaggaggggctccaacgatgtccagctctccatagggtcctccttcacctgctttcgctgcgccaacacccatctcggtaatttcgggcgacacgtttggatgtagctggtcatataacacatgcacttcctcgtgcagaatgttgttatacacctgcaagtttttccaaggctagactcagctcatccactcgggcttaggcagtcacctcacaatcctaggctatggatcgtgaactcacaacccagtcgatagcctgatcacactctactaactcccgctgcagacatttgacttctcctgacagctcatcgatgcagcaaatagaatgcactcgctccctacctctatggtgcaacgccacagttagacgctcgactctagcctccatgtttcctatgggatcattgctcccactgctgtaacacccctggtgttattataactaaaatttgagcatggcatcatatgcattgacatgtcattatgtttgttacacctagaatgcatctactaggctaaaacttcaaaacaaatgtgatgtgatgtcttgaagtacttctt

SEQ ID NO: 59816 - DNA, 381 bp, Zea Mays
gcggaaacgggagcgggaggaggagcagtggaagtgggagtagtggaggtggtaggtatggctgaggtggtggatggcacaggagtgactggagcgggcgaagtgggaggtggagtggtagcagtggcgggtgtggtagcagtggcgggagtagaaggtgtggaggagcgaggccgagaggcgagtcgacgaactctgtaagcaatctaatctgatgatatctgtagctggccacctctctctgcctactcaacggctgctactactgcgagagctgctcgggctgctatatccaaacgccgcttcttgcggctttcctgcagctccaaatagacggtcttgcccttgacctgactgaaggggcgaggagggtcctcgttg

SEQ ID NO: 59817 - DNA, 559 bp, Zea Mays
tagttacaaaaaacagatttgacccctcagacttgctttatggatagaacttacagagatgtttcagcatcggggtaaggcactcctccggtcatagctagatagctgcccctgggtcagtgtattcccgttaccttgaagggtccttcccagctgggggagagttacggagcccttcttggtttggtacttgtcatagggctaggtcccgaccctgggtccccacctgcatttgacacgggagcccttgtctttggttgtggtcacttctacgtgtacatgttggctgcctggatctgcgggggatccagaagggtttccgaaggaaggcatccttcagctccatagactggggagcacgaggacccctggggtccgcctagttgtcttcaccggagtaggagcctccggcgaaaacatccttcaggtccccttcgggcgactgatacccgagatcccgctcagccgcggccaccttgccatcatccaccttttctttgccaggtcggcggcgaggtggggagccgtctttggaaaactgctcgtgccgctcactgat

SEQ ID NO: 59818 - DNA, 356 bp, Zea Mays
ctaggaatgaattggctttgctggttgcattgtagttgctggagtttagtcgagtccgatgtgactcagagttggacatggaactcgaagcacagtgcacgcactatgcctgaactaaaaaggtaggttgatacatgaatggcaggtagaggaggagagacaggtggtcggctagtagcaatggacaggtggtagagagacaggcggccatggccatggacagccagctagtagcattgaagaagccgctggcaggagcgagttggaagcgacatgggtaatgctacacatctaatagaccaatgtatttttagtaggctgccaatttttccaaacagaaataggcagtccatgta

SEQ ID NO: 59819 - DNA, 379 bp, Zea Mays
aatcaccagcagctcacaggatctccctcttctctccctcctgtcatccatggcgggtacgatatggactagctctccttcctcccttcccgacttaccgaacatcaccggtggtctgctccatgcctccgtcgtcagtgtgctcccggcacgtcttgtggttgtggatctcctcccaggcagttaagtagctaaccctaaccctaatccctaagtccctaacctaaatcgcactcagcttctcttaatcctccgtcgttttggtcaagtcaccatctctgctggccagatctccatcttcctctcttctccggtactcctgctgcgcaggtattcagtattctccatcttcttcgctactgctcgactggtaatccct

SEQ ID NO: 59820 - DNA, 466 bp, Zea Mays
gtgctgcaaattctagagggagtcggattctcgggtgacgaggtggaagggattgtctgacgtactcatataacggtgaaatcaatccttaccacagatcagactacctaggcgttggaaatgacctcgggatggctgggcgcgctgccgtagcatgtgagcgtgaggttgaatacaccagggtgccccttgatcctgagatggacggctaggattagttgatatcataccccttcatcccagagatccctcaccgttcatctgcgaatttgtgagcacgattgcatcgcgggtgtataggatccgaaccgtagattcaggatcccacagataccatggtgtcctgtttcagtagggtcgagatctaatcctgcacgcaaaacatagatccaacggccgagggatcacgataccccttcgtcgtgcatattttgcagaaaagcccctctgtttttagggaaccaac

SEQ ID NO: 59821 - DNA, 329 bp, Zea Mays
gaggaaaggagcatgtggtgacctacctaagtcggaggctggtggatgctgaaacaaggtacacttttatcgagaagttatgcttatgcctattttatgcatgcaccaagtgtagatgttatttactgtctagtcattgcactgttgtgagtcaaaccaatgtgattaaatacatgttgcaaaacccgattatgagtggtaggattggtaaatgggcttatgcacttagagaatatgacttggcctatgaaccattgaaatctatgaaatgtcaggccgtagcggattttattgtagaacattagatcgatgatactcataaactagac

SEQ ID NO: 59822 - DNA, 721 bp, Zea Mays
cttgcatcggcttcattatcagctgaattaattaggagaactttcctggtaaccaaggacagtccggagtctttactcggacggtccgcgacctggggaattggccctgcaccggttatcagattttcagtgttgtgaaatctccctcgctttattcgacaacctgatgcatcttgtgccaaattgttagctctatgattctcaactctagagatataccgaatactgaattcgtcaaaagaatgaattatgccccaacatttttcaaggtaactatttagagtaccatcaaaacattgatattcttctaacacatgttggacgaccagctgagaatcaccaaatgccttcacatgttttactcccatacaatttagaagttccaagccgaacaaaagggcttcatattcggcttgattgttagtgcagtaagttttcaatcggctagagaagtcgaaggagacattacttggtgaaacaagcataatgccaattccttgcccctcattgcaaaccgatccatcaaaatataaagtccaaggagaaacagtgaggtatgatatgtctaatttatgagtgtcattaatctgatgttctataataaaatctgctatgacctggcctctcatggatttcaatggttcataggccaagtcatattctatgagtgcataagcccatttaccaattctaccactcataattgggttatgcaacatgt

SEQ ID NO: 59823 - DNA, 363 bp, Zea Mays
ttatgtagcatctagtaaagccaaattagatagttttgcatttaaaatcgataaggccaatattggtcgagctagcgcatctatgctaatggccacttttgttactaatttaggtcaaaattcatgaagcggttatggaataatagtgaatagagctttggcagggtataatgtgcttcttcctaactgaccaaactcacatagccaaaatcctatgcttaataatgtactcatagctcctattgttgattttaatgaagcttaaatcgatttaaaaatgagatgtctaaatccattgagattagcttgggtgtatagattaagcctagtagaaatccttaccacaaaatgtagctcttttac

SEQ ID NO: 59824 - DNA, 934 bp, Zea Mays
gtgaactaagaaccattaagctaggactctcactataaccataggggaagggagagctaggaggtcatgacgctcagttgatacttgagcacgtaaatctttttcacatttgtgttcatcaatctatcacacaaacaagaagatataggatattatgtgcactatggaccaaacctctttaaactaccttcatgccactaccttgttgcacccaggttcaacacacattcggcctataccctcggtctatttgctacacttttaatgttttgggtaccctccataacccggtgttgtacctagcacgccacgtagggagaggcattgttttattcttagattgatgtgtctactatgtaatgcaaccatggcaccaccagcacgctcgtcagctagagcagtctcctttgacacctatgctagcaactttgatcatgagccagaacacgtgtgatgttagaatcttgtgcaatctttttccaccactacctttagtgagaggcatgttgtagtggggacacatggtgctatttctgtaggccttgctttcagtatgtgctccatttggagtgtaccacccctaggggtgtcacactgtatgcctcctcaggcactagaggagagctaccactaagtgtgcatcacacccctagtctcatcttaggaccatggcgaggtaacctccaagcatgaaggttcctcccaacaatggtaatcctagcaagctcactagcaccacaactttggtgttgattacattgttggccccttaataccatggaatcccttccctgtgacccatcgacacctgatattagagaagcaatctctaaacaatggcaaaaagatgtcgctaggtccatagccactgtcaaggttaccctaggtcttctcacccactaggttcatagccactaccaaggttaaccctggg

SEQ ID NO: 59825 - DNA, 589 bp, Zea Mays
cggggtcgtcctgattcctcgctacacccacctcatcgccgtgaatcgcactgctcgtgtggacagccctgtcggcctcttcattctcggtaaggaatccactacctgcttcgtcctcatccaggaatcgcgtggcacatgcccctttcaaatcaggacaccatagcgccgggcgtggagctcgccgaagtacagaggaggagtcgtcgtcgccgatacctgcatatccggaccacatagagcaagcatggggccggggtgattcactgtgccctcggaattgcactcatatgcttctcggatggggagctgggcagcgttccgtgcgtggtgtgtggtcaacagaccggttgccggactggcgccactgggggatggccctgtgccgctgtgccggtcgcctggggagggagatgatatgtaagccatggagtggtaaacgaacgactgggattcagtcgggggtgtagttcggtgggatccgatatccaccgttggatcggcaatggatgggcaaggggtcgcggaccggtgatccatccgtgaacggtcgagattaaaacgtcgacaccgttttgggtagtgtgac

SEQ ID NO: 59826 - DNA, 792 bp, Zea Mays
caaatcaccctgcgaaggtgcatcgggagcaggtgatgtgggcttttctggtagattttctttcaccagctctactggcgcagcccccgaaggccccgcttcaacatgaacaggagatgcgcttgcatcgactactttccttgcatcttcaattttatcatcaataaattcagtagtagttggagcgggcaacttagtggattgtaaaacagcatccaaaacactagccattctcctcttcctaggagttgttgttgcagtagttgatagctttggcaaccctatcactattgggggactcaacagttttgactgttcttccgatgttttctttgttcccaactcttctaccggatcgacactaacttcaactggcatagcaagaattattttcgtagctaagaggataacttcgacactttcaacaaacttcacattctctgtcgtaggcaatacaacatccttttctaaagaatgtagcttcggcctatgagtcaggaccttagctctcttcggcttctatgcatcggaagaggtcgaaatggcaatttttctcttccctccttgtttttgaacatgaaaacaatagtcagggtaaacaaacccgatcacatcaaaaactctatttagtctcttttttccttgagcaccaaaggcaatggtcatggcttcgtcttttgccttcgtgtaggctccaagcagctcatcactagttgcctcaacagcctctatccaatcatcattcgactcatcaaattggcttctataccagaaggcgtatcttagataaac

SEQ ID NO: 59827 - DNA, 315 bp, Zea Mays
gtttacttttcttccctccttatattaggacctttacatgtttgttgggacttgggagctgagacaaggaaagctctgtgatggcagggattatgggagcgagccatgagattaagcgctagaaacaaaagaaggatagatgcaaaaaggcatgcatagcaggtagcagccatgcgcaaagctgtagtagctactagctataactagatcaacgaacaacctaggctgccctctgaactgaacgggcgctggtccagacagaggccaggccaggccaggacatggctctcgtctagcgtttctctgtgaatctcg

SEQ ID NO: 59828 - DNA, 531 bp, Zea Mays
aaaggttgagaaccatagatttttaatagtgtggcggtgattagatcctgggctggaaaaatcgccgccgtggatcttctaatggacggtcgtgattatatcaactaataccccttcgacactttagatctgggccattgattgtcgatctgacggtccgggggtgataccacttatatgcacgtgcgggcggtggtggggatcttgtgtggatcggatcccgtgtgcctcaccttgtgcaccggggtgtggcatgatttcagccagtcgcagggtgccatgtgtcctggtataggagtccgagatcagttttgcaatggagccctctgctttctaaaaaataaacccgcagtcctagcaggggagttctgagtctgcgtaagctttatgctttagtccctgaccttggtgatattagtagccgcagtccgatagcaggatgtaattctgaatttaatccgaaaatcgaattttagtacaaaatttaattcaaaagcttagtaaatccataatttctttgtttcaactcca

SEQ ID NO: 59829 - DNA, 425 bp, Zea Mays
cggcgatagagcgtcggtatgatccgacctccattaatcatgaactagtgttgatgggtcaaatcctagatgacgtggatgacgtgcatgatggtctagaggatctctttggttccactacccctacccctaccatcaaccttggcgatgacaatgtcgttgtcgagggtgaggctctcctagatggcagtggtgttgctactgctactgcctccactacgacaagcacgggtaggaagaggaaatgcacatccaatgtctgggaggacatggataagattttcgccactgaaaatggtgtgcaggtaagagtaggagctagatgacatttctgcaagaaataacttgctgctcgttctaccattggcactggccatttggctcggcacagggaaaaatgtgaatgactccatggccaaactggg

SEQ ID NO: 59830 - DNA, 386 bp, Zea Mays
gtccgatttatgtaccctggtcgtcccgggtagggtttagttattgggccttttttaacccatctacagtataatttagagcaccctctcctgttctaacctagccgccaacacagtctccagccggctcgtctcctctcctctcctttcttggcaccgcccctgtagtcctgaactcctgatttgtcggcggctacaacaccctgctgcagtccttctcttgcagtcttcaggaatcaagtgttcaagactcaagaggtaggtctgcaaggttgatggacagatggagagatgaagaattggagattatgccattatgggatgtcacatgtcaagttcaggtaagtcacaaatcaaaatgaagcaatatgttactttgtttatcc

SEQ ID NO: 59831 - DNA, 542 bp, Zea Mays
tattgatgccagattgcgtgtctccggtgtgccatcaccgctgctgcacggggcgccgccgccaggcatcgtcgggggtaggaagaactgctctggccgttgatgttgaatgggcggctgggattaggccggggaaagggttctgtcggatctgattgccaccgttgatgtgtggatcgatggttggggattgaatccggcttgattgaatctgggtcaaggatctcgagatcaacggtgctcggtgcatcgcagctcacataaggcaagttatgatctgggccatcggtttgtgatcgtgcggctcaggtttgatcataccccttcgtcgttgacattatacttaagagaccccggaaaacatgctattcaacccgccatccatatgtgggaatctcgagtcttggggatttttgcagatctgcccccgagctactcattattggatgcgcagtcctggggaaaataaaataagaaattaattatagaaattgatttttaatacaaaaataattttagaaacttgtgaaattcatagttaa

SEQ ID NO: 59832 - DNA, 524 bp, Zea Mays
ccaggaactcaaaaacatcaacccaccgtcgcatgggcgctggctaatccttggtgatttcaacctaatctaacaggcgaaagataaaaatcattccaacctcaaccgccatttaatgacctccttcaagttcaccattgatgatctgtggctgacagagattaagctaaatgggcctcggttcatttggagtaatgagcaacaaaatccaacattgactcgaattgacaggctgctatgcactcctgaatgggaactgctcttcccagcatgctttctacactccctgccttcactcatgtctgaccacacacctctcctgcttctagggaatttggagcatttccacaaccctttcttccgctttgaaattttttggacaaaaatggatggcttcctccaggcggtataggaggcttgggataggccagtgtccacggcgttgcccatcaagcggcttcatatcaagctagccagagtggccaagaaccttaaaaatggaaaagaggaaaaataagaaacac

SEQ ID NO: 59833 - DNA, 418 bp, Zea Mays
aattgatgtgttcattatggcagatcgtgagcctttccgcaccacgggtaaaatctggcgaaattctcctccaagcacaataggtttgccaccaagtgggatgttcgcattttccgctctatgttccgaaagaatatcacgcatagtcctgtctagggcatcaaagcaatgcctataggtcatcggcgcctcatcccatatgacaagagaagtccgttgtataagttcagacaacatggtacctctcttgacaccaaaaaacaccactctcatctagatcgaagggtattttgacacatgaatgagcagtacgaccttttggtaatagtagcgaagccacgccagaggacgctacagcaagcactattttttgtcgggacctcaaatgtgtgagtatagcgttccacaagaaagtttt

SEQ ID NO: 59834 - DNA, 843 bp, Zea Mays
taagaaactgcgaacatccttcacatatttgggtttgggccaattctaaattgtgagaaccttctttgggtcagtggctattcccgaggcactcacaatatgacccaagaactccaacttctcttgtgcgaataaacacttggatctctttagatgcaactgctgctagcttaatagttcaaacacttgttctaaatgtttgacatgatcctccacagaagcattgtacaacaaaacatcgtccagaaaagccactatgcacttctgaagtaatggacctaccacatgattcatgaaaatcttggaaggtagctggtgctctagtcagaatgaaaggcatcacatgacactcataatggccatggtgcgtttggaacgctgttttgtactcatcaccctctttgatccaaatttggtgatacatggaatgatgatctaatttggagaacactgaggcacccccctaactcatctataatgtcatcaaaatttgcattggatactgatttttcaccatgtaagcatttaatcatggtaatccacacacaatcaccattcgccatatttcttctttacaaataagactgtcgatgtaaacggactagagctatgttgaatggtgccattgtctagcatttcttgaacttgtttctcgatctcagttttctgttatggtacgtatctatagggttataacctgaagggttgagctcctggtattaataggatggcatgatcaacaatgcgttgaggtggtaacttatggggtttcagaaacataggttggtataaatctaatagttgctgaattggttcaggtacaatgcaggctaaaatctactc

SEQ ID NO: 59835 - DNA, 415 bp, Zea Mays
aaaagctttaccgaccagcatgtggaatgaggaatgacttccgcactcgccaccatggatctctgcgagcaacttgcgaccctctacctggaagatgcaccgcatgagaatgtcattggtgccatggcattatagatcccctccaccaccatgtagcatttagccaaccacactatgtgctcagcggacacatgttctttaggaagtatgttgtctttcaggtagtcctggatcttgtagatcaatgaattgggacccccttaagtaactagaagtggcactaagagatctctaggatccttaatattacacataatccttggtgtgatacatggatggagtgccaccaggatcgctagcttcaaggtgctagtctaacccccttcgcccagctcgataggctaggcggaaggtc

SEQ ID NO: 59836 - DNA, 350 bp, Zea Mays
tggaggccggactggatcgatgttagcgtgcggttaagccgcgttggggtcttggatggatgaatgtagtggtgagcattgtattgaggctgactgagcttcctctaggccttagggttagggttcgtgatggtcgcagctgataaaaattcgtatctagttgggtgtttatttgggattaagttggaagctagctcaatctgacgtgctgcttatgtaccttcgcttaagtacctgggtgatgtaagtttgatgcaatgccagatttaggtagtgggagtgttctgagcgttatgaatgaagcatgagccatttggttgtgtgccttgctgatgcttgttagttgggaa

SEQ ID NO: 59837 - DNA, 407 bp, Zea Mays
ggtagatccagttgatttggccttaatttctccccatttggcattaagcaccaaaacggagaaactagtgacctaaaaacctcattgcctcaccaaagagttgcgaattaagagcaagaaggcaatgaacaccatggaaacgtgaacatagtacaatggtaccgttatgcactagaagcttgtttcattatccaagttcaccatttccctttcaactcacctttgagactacttcaaaatcacataagcaaacacattagtctcaaagggtcaagttgtagcatattctcccctaaacatatgcatcatttgcacaaagacttgtgaggtccgaggatgatgttttacaacttgaataccaaaatacacaattaagctcaaaataatatgattaaaacataaaaaca

SEQ ID NO: 59838 - DNA, 669 bp, Zea Mays
gagggctttcggcacagtctgctctttcatcgggacgagggatttagtccaggagcacatagccttcagagtgtggccgcttgtagagcaatgggaaatgccgaaggaaactatcagcaaatctgatgaaggtgggctggttaggttgaaatacacctttaggtgtgaagataaatttattgagccagatgatgattggctgaagtgcatcgaagctacaagcgacgaactacttggaccatattcaaaaacagaggataacgtgttgtctgcatccttcggaagccggaacaagaagaggctaaatagagttttcgatgctattgggtttatgtaccctgattaccgctacccgctaaaagggcaaaagagaaaaagtgcaacttctggaaaaggtgatgcttcagttgctttaagtgagcctgcgccaaagaggaaaaaggtgaaggtccttactcaccgatcgcgcttcatcgaaccggccacagtgcccaaattcgacagtgagacctctacggctactgaagccagaggacctgctcttacacggaagaatgaagagccggccatgatgccgaaggctgataatattgaagaaatagaggccgaaaaaacaaagatattagaagctacaagcccttcgacagaaataacagtgccgaaggcaca

SEQ ID NO: 59839 - DNA, 431 bp, Zea Mays
cagaaatgccatgttccatcgtttttgtactaaaagtactagggaagcaaaaggctgacacggtgcactatcagcccaaaatccaacatctctaaacttgcttctcaatttatgttttttggaatgggggaatacttgtatggcctggaattcactaggatggatcctggaaccaatggtatgtggttatcaaaaggtcgaggtattggtagctgtgatggaatagaaaaaatatctttgaattcctctagtacagtttgcaacccagtatcagtggaagaatggcttgtctcagaaacagacttaagtaatgccaaagcccaaatgtcattgccctttagccacttttctatctgcatagtggacacctccaaaacttacccactttgcccaacattccccatcagacacactttctctccctcatcttc

SEQ ID NO: 59840 - DNA, 794 bp, Zea Mays
gtccagccactagtttattcatatgcagctgcaatcacaattgggctaggggttgttgggcaggaactcgatgggaattgatcctagggttctagaaccatggtactgaacatgagtttccaaacctttgatgggtccaatcccaaattatgcaagcatcgatgtgaaacctattttgagttttactcgatgcatgtggagatgtgggtgagactagccacgatgcatttcaagggattcgttgtatattggttacaatccatggagtctaggattcggactatgatctgggatgagttgtgcatggctctgtttactcgattcggtcgagatcagcataatatcttgatctgacaatttaagcatattcatcatctctgtttgttagtcgagtatatagaacaatttgatcagtttttacgtcggcttctagcacatgagagttatcgaactatgattactgctcaatttcttgatggcttaaaagattatattaagtttgttgtcataatttagcgaccccttgacttggatactacttgctctcttgctctattataggaggatgtggtggccgaccttgggcgacaggtttctagaagggtggacacatgagggtggtccaaatctctaatcaagtcgactggtgcaccgatttctatggtagcgacactaacaaacaagccagttattcagtctaaagaccagtggggtgtagtggatttgggtcaatctaaggacaacaaactctcgagtagacctgatcatgggccacccaacctgaccaactcgac

SEQ ID NO: 59841 - DNA, 856 bp, Zea Mays
cgggacgcgagcttgtgggcatagtatgcaggaggagctgtcaattcaaaacgaacttatgttacgggtattgaacagaaatctgcagttttgcactggaaagtacataccgattgacacagagcgagtgcagcatgaatacctgaaaaagaacatcggacaagtgagttgagcaagaaaaaacaagatggcagggaagggaagagcatgcttacatgtagcacaagttatatgttagagactgcagagcatctgcggtgaacttgttgtcatctcgtagcacatggtaatgcgcaggacggcttgttccctgcaattccacgagcagctataatcttcagattctgaattagttgtaacacatgctacacacataccttggccccagcatggctgcacaggaagaaatcaaattctgttgggtggcagatattattatcaactacggtgcctgcaaattccataaacgtttcagcaaaagcattgtagaaaaaacgcaatagaaaaaacagcaaatgcgcctgcatccctaaccagctcgaatattcccactcttgtcctcgtattggctattgctggggaagagccttgtgtggtgcctcttctgcaccactacgaaggtgatctttggcttctcattgtaaagagctgtccatgcctgaagaaagtataaatgttatactaactgagggaacaacacttgatgtctcaaattgtttctaccttctctatctcatggatttcttgctccagcacttgtttgaattggctctcacttacgccatccctaacggtgaaagagggagtcaattaccattgcatgtcagtcagaaaagcaactggaagatactactaa

SEQ ID NO: 59842 - DNA, 671 bp, Zea Mays
gatttggacattgaccatccaagggatatgatccgaggttcctctaggaagcgagagtgcagaggtagctggaaaggtgaccgaccaagcttgtgagacaaagcaccaatcaagtttttcaagaagcgggtgacgttgcatatttgaccaagtgtatacttgtcctttgagcggaatttcctgtagccccagttgactgattgctagattaaaactcatcattctgaggtgatccccacccggtttgttgcggttgtcaggggatctaatcatattaaaatcaccgaggaagatccataatttgttatcctcaatctcaatgttggaaaaccaagaaagaaactcatctctcctgtgaggagtacaaggggcataaatgttggtgagccaccaggtttgattggtaagctttgtgtggaattgaattgtgtggccgaaagaattttgatcaataatctccccatcaaaaagagagcctttccaaattgttatgaagcccccagaagcgccaatagaaggaccgaattcaaatttatcaaaggatctgctgcagaagcggcgaatgtaggaatcatcaaaggactcttttttgtctcttggatacaaatgatatcacatttagagtctgagatgttatttcgtaaggaattccatttagtctctgagctaat

SEQ ID NO: 59843 - DNA, 701 bp, Zea Mays
cagaaaagtacgcacttattgtggaatttgaaactgagttggatgaaatcttttgtttctatgatgagctcaagacaccagtggtaatgacatgtagaaccatgtctcctacaaaacacagcagcagtaacacagggtctattcagcccttcacccgcgagactcggcggaggagctcagatgttggtacgcatgagtcatcacatcgcatgacccactcgagtgcaatgaaatatcttagacagaatgatattaaaggcgattctgattagtatgctatagctaatgaagtacttaaagacaaggcaaatttggatgcattcgcctggctgctagacattaaggaaaggatgggtttcgtgcttcgaacctggaacgtaaaggtaagccaggcatctaatgtgttcatgttttaatttttcagctgcatttgttcaaacttattgttctcaaagcaggtgcatggtagcctgaacgcaggggacatgaactcttgagcgcctgcctgctggtaagccaatgtcttgctagcatattttccccctactgatcctttgctagtatttaggttctgcagttgcagccctaccatactgcagctcatcatttgtttcttgccgctttcttagttcctttgcattttagtttcattgatgattagtagctcagtgctttggttgatatgtaggccaagcccttgg

SEQ ID NO: 59844 - DNA, 323 bp, Zea Mays
agcaccttttgaccggtaaaacaaaaacctattgttataactttgtcttgagcattcaattccatctcctcatatgatgaacaatgggcatccataagtgtagccaaccatgataccttttaccatttgtccatagcatgaagttcctccaccatcatcatcaagccacttgatcaatagcccagatcaacacatggcttgataattctacaatgatatgatccactccatgttatcacatggccttcttggttcatcaatctcaacatagcttgctcttcaccattgctttatgtccatcggtgttaggtccttgctcttgc

SEQ ID NO: 59845 - DNA, 1027 bp, Zea Mays
tctgcacacctgtcctttcactttgcatcgtgattgaaataaattatggcgctgtccttgcttagctgcaactaattgtgttgaaagaacacgacataccaccaaagaatgatgcggtgaaccaaaaggagatgataaacattcagattgcagcgagtgataattgggctgtgatgtgcttgacaaatcatgtgataatggaaataatggtagttcagtaccaaactctggagcacaaatgacttcttgcactacttgatccggtgcaacagctacagtagtggtcttgtggctacctgaaatgtgatagggtgcagccagtaatgtgatactccaattattagagggatcagtagaagattcatggtgactagcttctggtggagaaatatgagtgtacaaatcaccaatatcagtaagtagttcatcaaaatcagcacaagtaatttcttctagagagctaggaacaatagcttgagtcatgtgcttctcagcaatacaatgaacttgtttcagtgctaaacaattcaggcccaattcgcattcaccatcctctgcttcatactcaaaagtttccaaattttcatcatgtatattggtgtcatgggttacatcctcctcctcactttgtgaatcatacgaaccatctgcaagtgctagaataacatgccgattggggcattcagcttgcttatgcccatgaccaccacgcttaaaacactcaatattacttgtctttttttggctgctgcagtagaggagttgtactgattagaactcatagctttgcctttcccatcagattgctttccagaagctgaaactgagcgaggggttgcacgagatggtgtagaagctgcatgagatgaaggcgtgtgtgccctcgagccttgctgttgtgaattgcgccatggagtagaactattttgtgctgaaaaagaaacatggcttttataagatccagcaagctgtcgttctgcccttttagcaaaatgaaccaattctgttagatttgtgtagttcgtca

SEQ ID NO: 59846 - DNA, 485 bp, Zea Mays
attgattatcttcatattatgcatggacagtataaacacaaaagtcatgttcacctgggccacagtttcaggtcggtacttgtcagtccataggtaacaggcaggctgacaactgcaatagaaattagaaaacatcatgttatgtggagttaaagatttgaagattaaaaaaatactaccagttattttgccaatacatctatttgaattcatatttggctggcttgaagtttctgatgaataattaagtggactctgacagggagataggagcgtatagtgttagaacaagcgtgaggaaagcgagtgcctgtaaattgattagtgaggtacagaccagttaaatctgctataaataaaacaaagctgcaacttcatttgactacctttgtttctcgaatacgcaggagcatatcatttcattaaaaggatgaagggaaaaaaggtacattcgcccaaccaaaggctaaggcgcgggcgcgcgc

SEQ ID NO: 59847 - DNA, 380 bp, Zea Mays
caaaaggagaatgtaggagagagtgaaaacaataaaagctcaaatgatcgtaagaccttgcaactctcaaatgcactagccgctataactcccaaacataaattgatcaaatgtggtgcgagaatggttttgaaagtgtggagatgttgcacttaatgtgtagtaggttgagagaggtctcgtatcttcgagtgctggttggaggtatttatagcccccaacaaccaaaagagtcgttggagaaaagctacaaaaactacaaaatcgggtggtgcaccaaaccatgaacagtacctgtctgatgcgccaccggcccgtgaatagtgccctagctggtgaccattctgaaatggcaggtggccgttcaagccttgtcgaat

SEQ ID NO: 59848 - DNA, 824 bp, Zea Mays
acttgtaatatttagagaaatcgtagcaacgcacgggcaaataactagtcaagacataagagcatctccaagaaaccacgtaaagactccccaaaaccagtttcagatgtgaaaccttgttttttgtgctccaacagacctccccctttgtcacccgcatttatacgtgacccaaaaacgaggcatcgcgtgccacaaatatgcgtgagaaaagtactctcccaatcgcttcctcgcacatcctcggcatcatacgcccgtgcatcctggaaacgaggcatggtgcccgcgcttttttggcttgctagctagctgacggattgagtccagtactcaagttcttaaaggaaggaggacatggttttcattccagcaaagacacagaaagaagcacagagtatgtgaaccataaatatttgtgaactaaaacataaatcctggcgttggcgtcacaattaatgacggggtgcgttggacgattactgttatagcgagaagcaaaaataaaaggggcattgacatgtatcaatgggctagccatagaggcaaactgggctggcgtcaaaacctaaaatttgtaaatgttggcccagtttcgtttcagccttttattttgggaaactgctggagtatttgttttttccaccactgaaaaagatttaatatgtccctcataatcagtttttggggaatttttagcacaaactcttggagatgctataaaagaataggtggttactcgttctgtaataaacatgccatcacaaagaatgtgttgttttccctaaggcccgtttagatccttggaatggaattccattcta

SEQ ID NO: 59849 - DNA, 486 bp, Zea Mays
tgaggactaactatttctgtttggttgcattttgttactgaccatatttttaaggaccaaacgttgctaatttcaaatcatcccattttggtttctcactagagtttggtcataatttgggtgagttcttatttttttatttttcttttggtccatctctttgtgttggtgttaacaatacatccatcaaggcagaggttgcgtacacatggttaagatgtgtccatgttgtttgttatggtgagtaattattaagtacatgatcaactttaatttagtgttgactgaccttagcgtgagtgtggtgttgtgtaacatatctcctgacttatggtggacatatatacagaatatggactattcacgacaatgtgaaggacaagcgaatttgtgctgatggactaagagtggtgatagacggacaccatgagtcttggattgagggactgatgaggctagtagagtgatagtgtatagttgacactt

SEQ ID NO: 59850 - DNA, 423 bp, Zea Mays
ggtcagcgaacattctaatgcgttcccggtgatctaaggtagcttagctcaatcgagttggtcgaggagtatcaggggcacacaagaacactaaaacgacagggcagagggtatgagcggatctaagacgagctgaccacggtgaggactctttcacggtggcggaaacacagtttgggggaaatgagcaattcgtggtctctggtgaagaattggaggcaattgctggtgctttggatgcgtaattatcctacggagctcatggcgtgctcaatttatagcaggcttgagcggtggccagtgaatttgaggagagacgcgcgacgactagagaagaagaaggttacttgcgtggtgattcgtggcctattaccgtggcaagctctccggcgaccaccagacggctaacgtgagtcacggcgg

SEQ ID NO: 59851 - DNA, 402 bp, Zea Mays
ttttaagacgaagatcatcctaggagaaggtaataggaatatgggagcatttggtcctgatgtagggtacttggacacctacatgatgtacccctctctgggcctctttttctgctatttattactaggttcaaagcttgacccctagtgatggggagaataagcttctccatggaagctgacgaagcttgatggcttgccatgcttttcatcgcgatgaagctcatcgtggttgtaagatcatcggaggtgggtgccaatgttggtcacttgtttccaattgttacatggcatcaaaaacaaggcaacacaaaattgagaaatgagaaccttcgtcctcaaggtaatgcaccttcggtgtaacgagtcgagaacgaagattccaatgtataacaaaagacg

SEQ ID NO: 59852 - DNA, 573 bp, Zea Mays
tctgtaagtcacctcatggcgttcggctttttgcgctcgatgttctggtcgtctcgggcgaaaaaatgggtaggcgggcggccgatttggcgatcaccggcgtgaacctcgttgtggtcatgggggcaccgccgcgccgctgaacaaggtagggggaggttgcgttaaccgtggatcgaatcgcagacggttcggatctagccatgcgtgccttctcgcacgatcatatccggaccgtaggattttaaatgggcggcgtagatcaggtcttgtgtaccccttcgtctcgaaggattcgggcggtcggatctgaatcatgctgtttagatctgggccctgctttcataaaatcgggaccatcgatccgtgtttctgcggctagtgatgctcaccatttcactagggtttagatctaatcctaggcgtagaatcagatccaacggctgtagtcgcttcataccccttcgtttgccttatttgctaaagagaccctgacatgcactggaatcaacccgcggtccattgtgactattcactgagtcttaggaatcttgcgacttagcccctgccttc

SEQ ID NO: 59853 - DNA, 809 bp, Zea Mays
ttaagatgcattgacattcctattttccaatagtcataattgttcccatcaaaatgtggtggcttcccaatgtgcacattgttgttactagccattttgtccaactccgggatgattaaattcacaaaaaatggagtccttgatttgataccacttgtaggatctaggacactagctagagggggtgaatagacggtttaactaaaacaaaaaaacactagagaaatttaatcaaatcaataagagatataaatttactagccttgataggtcaacaaaatatactccctccaggtctaaaattcttgacgtttaaggctatgaaggggtggatcaaaaattttgacgttttagctttgcatgcaagtttagccgtttttgcccctagatgcgcgcttagcctgcatggttccaatgttgctcatttaactcccctgggctgcatgtggctccttattttctctgcatgcatgcgtattaaacatgctggaattgtggagcatatggagaaaatcgatcaacctcttgaggtcccaaaaaatgcgagagtttagtaaggatacactgaagataaatttttttctaagccttttctacgagtaactagcaaaggtcgatgaatattctagttctaattcataatatggcggatgcagcaaaaaatccatcgagaaaaagggcctcaaatgcacgactaggagtcgaaccgaagactataggcttcaaaaatgtcgtcacaactgcacaagctaagagaatataatgatttccaatgccacatgacttcatttaataagggtaaaatggga

SEQ ID NO: 59854 - DNA, 556 bp, Zea Mays
atttggaggtgcattaccatcctggcaaagccaatgtcgtggtagatgctttaagtagaaaagcccagtgcaattgtatgaatatggatgcaagaatcaccaccctatgtgatgaattatgcaagttgaaattagaagtcgtttcctccggtgccttgagttatatttcagtggagcccaccttacaagagcaaatagtcatggcacagatgggtgacaagggtgttcaggttatcaaggaaatgatcgaacagaaagcagaaaaatacaaatgcttccgtcaggacagcaagggaattctatggtttggagaccgactggttgtccccaagaaccctgagctccgaaagaagatattggataaagctcacctttcaaaattttccatgcaccccggcagtaacaagatgtatcatgatctcagatctttatactggtggaccagaatgaaaagggaaattgctaagtatatatctgaatgcgacacctgccagagagtcaaggccagccatctgaaggtagcaggcactttgcaaccccttcccataccatcttg

SEQ ID NO: 59855 - DNA, 819 bp, Zea Mays
gcaccagctcgttggtggtgcaagtttggagatgcgccgcgggaggaagacaaaatacctcaacagtcctctcaaggtagcattaaagggtggcgccttgagtggtttattgtggaaaacaactgcaagtccctcccccctcggtcggggagaccgccagatgtacgtactccgagctgggttgagtctccaacttccttggaggtaacagaggctagagttctgcttggtgagatctgtctgctgaaggagagaggtctgactgccgaagctgtggttgctgactttgttttcaagaacattcagcctttgaaagacaaggcgtatccatcttacttgtacagtggtattactgactctacccgggtcaccaacaagaaaattcctactgaggatctggtgagccgactagacatgatcctgaggggcaagatatcaaatgttggtgctcctgttgcctattctgcttggaatctaccacctcataggtcatttttcaatttcgtgtccaaccctcctactagtgatggtggtctgggtcttagagtgcgaccctctcccgaggacattgaggctctggttgctccccttcgtgatattcccaatgatgagagacataatcactttgagatgccagcaagtccagatgatgcagaaatagatgctgtactcagtatgttggctggagaatcttctgactcgacccatgctgaaccgatggctatcaaggttggacaagagcttaacaaaacagtggagacccaaaagcctgaaggtacctgtacgaagcgtcctcgccaagttagccgtccgactgcg

SEQ ID NO: 59856 - DNA, 384 bp, Zea Mays
acgggcgcgggcatgccgcggggggaggcggagccacgaaagtggtctacactacgctcttaatagttgtagagatatttggtttcttcctccacgcctgtccttacatcatggctattggggtttcttattcacaaattttagctccaccttgctgctttgtgcctaaaatatttggctactttcgccatgttagccctcacatctctaaatcattgtgaccctacgttccaatattattaaaagttttcttgtttagccccaccaactcattttgcccaaaggtatctaggtgcttcaccatgttacctctgtctactactgctagaacttgaaggtttctaagttatctattaacggcataaattatgttaccttgttttc

SEQ ID NO: 59857 - DNA, 558 bp, Zea Mays
ttgcttaaaaaaggttttgagctttgctttctcttcaaagtatgtagacacagtgtctctagtgagggttcttctagatggcacattccaacgtgggcaagcaattgacatgaactttctaaagccagccttttcagcacatgcaaatggttgctcatcttcaatgaccatttcacaaaatgcttttctaattgcttcaggatcaaacttatagattgcaacgttttcaccatgagataattgtaaattgctttgatttgggtctctatttttatgaggattgcacttgcaaatattaaaatgagcacgtagggcagatgtaccattcaaatttgggtcacacttgatctcacggctacaatacttgcatttccctttcttcaagtgtccatcaacacaaatcttgacaaagtgagaccatacttctgatctaggtgcaatctccttccttttcttcgcgttatcttctttcttttcctcagtagtgttgccggcggtcggtgttgattccttggtggcatttaggacctatattatagtggccacacagacacaaat

SEQ ID NO: 59858 - DNA, 580 bp, Zea Mays
tgagagatcgatcacattcatttcacttcttagagaacaaaatctcgtttcatccaatggctttgtaaaaatgtcggctaattgatcatctgtaccaatggaataaatagagatatctccctttccaacatgatctcttaagaagtgatgtcgtatatcaatatgcttagttcttgagtgttggaccggatttgtagccaattttaccgcactctcattatcacacatgagaggcacattcttgaaaataatcccataatccaatagagtttgtttcatccataataattgagcacaacaatttccggccgatatatattccgcctcggcggtagagagagcaaccgaattttgtttttagaagaccatgaaacaagagatctaccaagaaattgacaacaaccggaggtgctttttctatcaactttacaccatgcatagtccgagtccgaatatccaattaattcaagttaagcacctttgggataccatagactaatattgggagtatacttcaaatatcttagaattctttttgcggccttcaagtgaatctctctaggtgaagcttgaaatcgag

SEQ ID NO: 59859 - DNA, 519 bp, Zea Mays
cgagagtccggatgaggacgagcctgggaggattcacgcggccattggtgttttgttgggatatggcgggggtttgttcagaggatatagatggtactgacgaggcgaccccacaagttagtggttgaaggaggacaaggatgcacacggtgagcaattgcccaatgggacccacacgtcaatgtattaggtgcgtaagaagcagctggtgtgcgcacagattctagattgaggggccgacatgcgggccccgcaaaccagtgagagaagcagagcgcggtgctaagttagttgggtcagtataattagtacatgggccgccggcttcaaattgggcccaagcagcaagtattgatctttttcttttagtttttttatttctgtggctttattttcccttttttcattttccaatttcagctttaaatccctacttcaaatttttattctaggttttagacttttataaaattcacaacaaataaacaaaatacccagcatgagttgcaagtattaatt

SEQ ID NO: 59860 - DNA, 495 bp, Zea Mays
gttattattgacgacattggctcttctgaaatagtgtccgaatgatggcggggccacgctggtgtttttagaattaacggccaagtggttactgttgataccagtgttatagaagtaacaaccgagtgactgatggcagtgtcggtgttttagaggcaacagccgagtgactgatggcgtcgtcggcgttttagaagtaacagccgaacgactaacggcagcatcggcgttttagaggcaacggccgagtgactgatggcaatgtcggcgttttagaagtaacggccgaacgactaacggcagcatcggcgttttagaggcaacgaccgagtgactgatggtaatgttggtgttttagaagtaacgaccgagtgactgacggcgacgttggcgctttagaagtaacagccgagtgactgaaggcaatgtcagtgttttagaagtaacgaccgagtgactgacgtcgacgtcggcgttttagaagtaacagccgag

SEQ ID NO: 59861 - DNA, 813 bp, Zea Mays
cgacaatggtggccgggaatttcagtagtgacgcgcggcggtcggaggaggggaagagcactggtgcagtggcttggtgtcctacgccatggcagttactccgacgatcaccggtcatgctaagcttggttagccatgacgtggtaaagcgtctggacacgcggcggacgatggtgatggttccacggtggtgagaatcttatccgaggggtggtgagcaagaggggaggcacggcggctagccggagtggcgtccagctcaacggcggcgaagatttttctaccccgcgatgttatccatccactccgggcacgaatcgggacggcgatggcacgaatcgcggcggagggatcatcggcggtgagggctctgcgctggcagcctgatccaattcagttactgtaccatggcgactggcattcagttggcctgacagaccgattttaagcttgattttctcctatttttatttggcaacccatccgaggctctgcagcaaaaatgtagtccaatataccatcttcatctttgttatagtattccaagacaaattcttactggattatggtcgaaatggctcacaaacttggttctaggccaatgtcagtctgaaattcagacttcaacagcctgacagcccatctttgggtctagtttttaccaatttcttctcaataactatgcttacactcttaagcaaagttgttcccctttcatagagatacaaagttgatgtggtgccctaaggtgaattctcactgatttgaaagttataaagctccaaggttgagcttataacactgatttcagac

SEQ ID NO: 59862 - DNA, 614 bp, Zea Mays
tataaaagatccccaggtacaagatcaatgacatacttctggtgggttggacctactgtttgataaatatcaatcaacagagattaatggtcacttacactaatcattctgtagcacacttcgtgggattatacagaatgatatactacatactgagggtatgtggtggtcatgattttatatcattgaccttattatctatggagataatattactttgtgttgtttagatgaaaaacaagttacgaactaagtctctacttactccacattttagatgtgtttgagagcaggtatgggatgacttagtgatttgtaaagatcagggggagtttcctcttgatctgaagaacttgtttacacatcatgttgtactcttttcttcgcatgagtttttccctgattgggtttctcattcaaagtttttaacgaggcaacatcaacacaaggcctatgtcgtatcatctatttttcccgtagaggttttcgaggatgatacattatgacatagttattgttgtatttgaactaggtgatgagtttatctccttagagttcagatagatcaacaacagagtatgactactctccttatttttcccaccgagttttta

SEQ ID NO: 59863 - DNA, 636 bp, Zea Mays
cgaggccaggctagagtcggcgccggaagacaagaagccggcgtcagcagagcaggaagagcagaagccagcggcgaagaagaaaccgagccggaagtacagcgatggcgctgcacggaagttgaaggacgacggcgaaatgggcaagggccgccgtgatgaaatccaagtggggaaggctataccacagctggaaggggagcgccctatgcggaagaagctccagaaggcgatcaagctggttcagctcctcatgtccttgtacaacaagcaccgctcccaatcccaggataggaagccaggaacggcttctggtccgggtggggaggaagacagcgaggccaagcgagcgtcggcgccggaggaaaagaagccgcagcatcggaattggccacgagaggaagtgcgcctggagcacatcctcgaggaaactttcacaaggcttcttttgacagagtacaacaagcagctgagcggcgtgagtcagaagtgcctcctcaccttctccatcttcgagctcgcctccgaggtcaagaagcagatcatgatctattggtgggtcgcggagttcaacctccggcaccggagtgatccagcgcgggctctttctggcggtggcgaaacaagtgattcgcc

SEQ ID NO: 59864 - DNA, 431 bp, Zea Mays
gtcccccgcgtggaattcaagcagcgacgcggctgcgacaaactagatcacgggccggcggcgatcaacaacaaagaacctgcctttcgatctgacgatgcgccctacacaaatagacagcgagatccaaagaacaaacacgacaaccacgagacaaaccttgcagatcggatcaacgagatgcaaacgaacaactcaaagaaaaatgattaaatcaagtgattgttctacaaaattgcatctagcctccgcccgatcatcctccctctcttgattggagagatcaactaaaaatctatcgctatgatttgaaaccctagactagacaaaatgggagaaaggtggttccctgttgctgtagcaacgccgttactgttcacacccgtgaatagtaatcgcgacactgtagcaaaaaaggccttaaccatctc

SEQ ID NO: 59865 - DNA, 573 bp, Zea Mays
gcatgcatgcacacatgcatgtaatactccctctcccggcctggtcaaactcaaacgggccagccgggcatatcgcatatgcctgcactgcgtctgcgtgcatgcttccatgttgatcaggtcgcttgttctcgatggactccaagacaagaaaccctcgtgcagaatggatcgagtctcttgacccttcttcgttccaaagaccacacaagtgtgtgtgtatgtgtgcgtcagaacatggaacgatcatgcgttgagctttcgtgtccgccatgggagaggatgtcaccatatgtaccaaacggatgagtggatggatggatcgaagagctagcgcacagccgtagtagggagggttctgctataccagtttctttgcctacaattcaaagagcagcgtgcatgaaagctcagtctcatcgacctgttgcggcggtacggtacggttcttgagctgtaagcttcaccaaaaccaagtggagggaggagtagtagttgtttgtttcgtttagtttttataatgtagttgaagaggctatattataagtagaggagggaagttcgtctgaaaaa

SEQ ID NO: 59866 - DNA, 641 bp, Zea Mays
agagacatattacacatacactcaaccatgttagtgcacacaattcaatctaagacgttactctattaacaatcactcatcacaaaaccaaatccattagggcacatctcaactttgtgatcgcgtatagaacttcctttctattttaattaaaggaagatttcttgccacttacgacgatataatgagacatgcagagtcagcataaacaagacaaatatatacttgtggctaatgacaaaattgcataaggataatctatatttgtaaagaaaaaatgttggatatgtaagaccagatctagcagacttcctaaccctatccctagttagcgtgtccagcagactacaatagtaccgcacatccatctccgtttcaagtagtagcgtgcatccgcatcggggcaactgttggctttgagcgtgcattcttctcttacagcagcctccctatcccactctccatccccattttacgaggtataagacattgttcacttcaccaccagtctccctatccccatttttctttgcatggaggagagagacactagagtattagggagtagaacagactatctgcattttgcgcagtcggatagggagtctacttgatgtgactgaaaggaaatatgatttaac

SEQ ID NO: 59867 - DNA, 308 bp, Zea Mays
aaaaacttgactttgataccaaatataagcaaaaatagttcgctaaaacttaaagaattgtgatagctagcacaaattgatttaaccagaataaccatcttttatgtgcggagcataaagaaataatcgttcatgtgctaaacagcgcaaactcacgttgcgccatgcttgcttcttgcacctttgaatttgtttatgtctctccctctctgccttctacctgtttctgttcttttgatgatgaaaaaggtaatctgttttatggtgtattttgattcacagctaatccacgaaacactctgataagc

SEQ ID NO: 59868 - DNA, 432 bp, Zea Mays
ccgacttaagtcgattgctccgtttgtagggcatagtggtcaccctgggttaggcaagcgtgcaagtcaatcgtaaacgagccgagtatctttgaaatatctctttattgatgacgtatttccattttacagaatacatggtcgccctagctgttttgaaatacggctaggggtaaaactttctgaggtgctctatgttccaggagttcccaacttctgtgccatccatctgggtgaggcgatacgatccgggccgagtgacctctgctactatgaaaggcccttcccataagggtgataacttgtgccgtccctcccccgttagaattcggcggaggacgaggtctcctatcgaaaagaaacgttgccgcacagccttgtcgtgatagcgccttagagtctgctggtatcgtgctgattggattactgcgt

SEQ ID NO: 59869 - DNA, 577 bp, Zea Mays
ctcgcgctcggattcacgccggcgtcgcgattcacgcccggtcaaacgcggataacgatcctcggtgaaaaatcgggcgctgaggatgagcttgagacactgttccgccctggccgtcgtacccacttgcctcacggccggtccagataacctcgccggagttggccgcctgccgctcgggtggcacgtgcctaaacgcagtacttcgtcgcagtgactcaccctagcatgtccggtcatcgccggtggtcttgccatggtgaagtgccatggtaaccctgcgtcagtgaccaccccattcttcggccgccacacatcttctccaaaattagccgccaccaccgatggaacctataaattgccgccccagtgagctccgctaagtagttgtgcacccggtgaaccagccctcacctccaatcgtcccccatagctccccaatttgggatttcccccaaatctgtcaagaacaccgcagtgtgtgagctcgtcgtggccagctctccacatgtctgatcacgccctcctcgctcttgtttcagctctcttgtgtgctcttgatgcttctcgacccggc

SEQ ID NO: 59870 - DNA, 788 bp, Zea Mays
gtgagacatttccatataaagctttactaacaattttccgacgctctagaaagataactattgctactgcgacatctagagtagttgcatctattatgtctggtggtaggattgtgcattcaagattaaaaatcccatttagcatataagaaggtgtcatgtgtagctttactaaacagagtgggacaacaaaaatgatcattacttatcttatgggatgaggccataatgactaaacgacagacaattgaagcacttgataagagcatgagagataaaatggatagacccgatttgctgtttggaggaaaactatggtatttggtggtgactttaagtaggtccttccggttgtacaaaaaggtacaagggctcaaattatatactcaacgttgtgtagatcttccctatgggataatatgcaacatcttagatttgtgcacaacataagggcgtagtcagaccaatggtttttcaaactatcaactatgtattggtaatgggatcgaagagacatacgacgatgacactgtgagactacttgacgagatttgcatcccttgcactggtgaagatgatgatgttgcgagactaattaaagaggtgtttctagtgctagagatgaacatgaataatcaaaactacatcacatttcaagtgatttagtcagcaaaaaatgagaatgttgacaagataaatatgaagttcataaatcgcttctcagggcaagagatggtttactgcattttttatattgcagtcaatgatcataacaacaactatcctac

SEQ ID NO: 59871 - DNA, 380 bp, Zea Mays
tttgcaaggctatattccttttgataatgtcttatctgttagacttaagattagtgtgttgctttgcttagttggcgtgctattcaggttagattataatattgagttagaaagttaattaatggtttctatccttagactgagttaggtgtccctaaataatgagcctaagcctgttccgccttttggtgtgttccatagcttaggaagatataggacttgtggttcatttattatcgcttgttattcgaattggattcaattaagttaaaataacaaggatgttgtacttggtaatatctcgacacctagtattgtgctagttcttcttatgttcatgcatgcacattatgcatctcattaggtacgctagttgatca

SEQ ID NO: 59872 - DNA, 540 bp, Zea Mays
gtggtagcagtatccgagcgagggttcgaacccttggtcaatttgtcgaggatgtgttgcgaaccttgtggaagaacgggaatgggaccgagagagtgatccaggaccgaaggtgattgtagcgctcgttgaggccgtgaaggagcttgaggacgagcgtgctggagacgagctccttgaggtcagaaaatggtggtcaccattgcccttcatctgacagacaacagtactcggagacagagaggtctctctgtatgaatgttcgaaaggccacaatgaggtagaaagcgtttgcctcacggttgtcaaggaactgctcctcgatggcaacccaaacatggcgagcggtgcccccacgctcgcgacgtcctaaagctcaacagtgatggcttgaggatccatgagaggaccacactatccatccctcgtcaggaagggataatgagggagtcggtgaggacgtggtcgaccatggtgtagcgttggagggtgaggacgaggtcgtgctagttggcgtaggttgaggaagccgggtcaagg

SEQ ID NO: 59873 - DNA, 460 bp, Zea Mays
ttgcccctcctcgcttcctggccatgaggctgatcaacacccgaagacttctgtgactccatggtgtactagtgttgcatctccgcacccaatgcttgctccactgtagtacgaaaatccaccaacggaaaggcgcccagagcatgcctgatagaaggtttcagaccctaacggaactggctcgccttctccatctcattgtaagccacatgaggaacaaagcgaaccatcttgttaaagcccaattcatactcggcgacggacttcttctcttgcttggaagactgcaaatcaatcttcattttctctaggaaggtgaccgggtagaacctcctctcaaactgcttgatgaaaacatcccaggacaggactcctagtgaagaggagtgagctgcttgcacgcctctccaccaaatttgagcctctcccttcagcagctgagtgccaaagcaaacacgat

SEQ ID NO: 59874 - DNA, 425 bp, Zea Mays
agaacggtcgggccaaaaatatcatttgcaccactaccaacatgacttgttgccttctctttcaggcatttcttcctgccagtaattaggtagaggccctaaacactgttgttgggggcctttgtgttttgaaagtcctcaaaaacacagttaaccatggtttctcagtacacccctaagtgttgcaggtgcttgagtgctagataccttcgaaacagaccaaggaaaaagacgaaaatacaagcttcgtcataactatacagggagacaaaggcagaagtggaacaaggccggaagaaggtgttcacaagattctgtagccaagacaataaaggcagaagacaatactacccttgtgtcatttgtaaatcacatatacaagttttgtggatgtacatgtaatttcatacgaagttgaacctctg

SEQ ID NO: 59875 - DNA, 387 bp, Zea Mays
gtgaatatgaccaacataagatgactcgctgttgaatggtgatgatgggaaggtgggacccatcaccaacgatgatggattgatggcgaaggaagaagaggacgaggggggagtgagatagaataatgaggtgtgatgccatgtgagaggtgcccccagagttcatgtaccattcaccagatggagggggcaactgtagtgtcatggtgttgaatgccctacctagagcccgtcggttccatggcccaagtgcgcctgtgctggcctgctagaggccctgatgttgtgtggcggttgacaatgacaagaggatgagtggagccggtctaggcaagaaccaggcctgtagtgtgtttttgtggagagagtaatacagattgcaaattg

SEQ ID NO: 59876 - DNA, 571 bp, Zea Mays
gtaaaataccttaaaggtgtcctccaccttgggtgccacctttggaggtcaacaaggacgtcaaaactaagtgtgaggctcaatttatatcaagttcaagtactacttaaaatctaggattagcatgtagatgtagtaagataggcgccacaaactaatacgaactccattttctatgatccacatatggatgaaaagatagtttcataagctgactggtggctctggtttgacattaaaactctattagagtcgatatgaatcagcgaaacaaggcaatgtccagaatatgtcctgatgttgtgtcaccatcttttggaccactaggccatgtaatgtgtaggcccattaggtgacacaaatatggatccttgactaccccttcggctatataatcaacaatagcaacccatgttagggtcagggatttgctttacatcaatctatcattcaatggttgtcattatcggtcatggaacctaactttcagttatttgtcgttctcactttaattcagtcgcatattatcttgttcttgcttgtgtttttgtttcccagataaggattaacc

SEQ ID NO: 59877 - DNA, 866 bp, Zea Mays
ggcgcgttgtgtttgtttgatgtgatgagtaggtttgaaaatgtcagttatgtaaaggataaattgatggatgtgtgtgcgccatagtgtattgtgttagtgctgtgatagataagtgtagcatttcaaatgaagtagccgataggttttgtatgtgtcacttgcgatgaattgttactatggtgaagttttatttggattgcgagtcatgtggggtgtggcgaaattagtggtgcaaaggataagtttagtattttaaacggttagtggacaggttcggtcaatatggttaaaattgattttgcttatgtggtgaagtgatgatatgtcgtagtagtcatctcgtcatctgattattgacttggctgatggtcgtgagaaatgattattgctactgttttcctttggaattttagaaattcataatgaaagatgcgcataagtgctagtcttgggtgtacaagtttgtagtctcgtggagctctagaatatttggttagaatctactcgttggtttgaacgaaatgtgatgttttatttagttggcgtgctacacaaattaacctagaaaagtggtttagaaaagctaaataacttacttctatctatatttgaattctagcgtccaataatggtgggtttagtttgtggtcttctagtgtcgtgctttagctaccaaaatgtacgaccgcatattgtttagtgttttcttgcatattaactaaatcgtgtaagtaggaaaaatgtaactattgtgcttgctttttgctgccactctttgctcatgtccagagaacaacctttctgccttggcctccttaattaggaggaggctgtagagtacatcatcctctaccctcacctcg

SEQ ID NO: 59878 - DNA, 575 bp, Zea Mays
gggtgattcaatggaatgaatcccacatgatgattgaatgtgactaatcacccttcgaagccacacacattcacgtgaggcttcatacaagtcaataatctctgagggattagtggatgttgttactagagtttgcttggatgacttccaagaaatagcagttccaccattcagaaatacaaacccagtttgagacctaccattgtgggggtctgaaagataaccagcatctgtgtaccctacgaggctaggatcttgatttcttccgtagaatagaccaagatctgccatgccatggaggtatcgaagaatatttttgttccagtccaatagcgtttggtagcggatgcactatatctagcaagtaaatttactgcaaaagcaatatcgggtcttgtattgtttgctagatacataagtgctccaattgcactaagatatgggtactcaggacccaaaatttcttctccttcgtctcgtggtcaaaaaggatccttatccctttctagggtacggacaatcataggagtcttagacggatatgctttatccatattgaatttactcaatacttt

SEQ ID NO: 59879 - DNA, 413 bp, Zea Mays
cgatgtgctcgtcggtcatgagtgcgaagcagaccggccccgcgctgtggctcggtgccagacctggttaaatgtggtatgtatttatggcgagttagtctgaggtcgagcgtgggatccactcgagtggttcccttctaacacgcccggcctcccttgtcaggttccaccacgcccgaccctaggctcggtgccgtaggtttcgttagggggtggatcctttcaaggttgacgtatctgcctctcccaattgatcaatgagccttagcgaccaggggtccttcctccagtgagctcgctggccggtgggtcctggagactggggatcatttcccctacactcatgtttctagaaacaaaagttgtttgcttcactctatacatagaagaataatacacactcttacgaagaa

SEQ ID NO: 59880 - DNA, 1004 bp, Zea Mays
tctgtagtatgcacgaacttttatatgagacaaaagccatgggtaaagaacagtaccacaacaacttcggttgttatggatttatcgcccgtcccaacttaagctacccagtaccaacatttaggaaaagatggccgggaaattggatggaggaatggttttatgtgaagaacgacttggtagctagggaggatgttaaggaggttattatgcgccccatttggtcccgcttcggtctccgaagaccgaaggttgaaatcgatgaagccgccgaagcatgccagaaggcctttggcactgtatgcttcttcattggtacaagagacttgattcaagaacatatagcattcagagtatggccgcttgtagagagttgggagatgccaaaggagactatcaccaagtctggcgaaggtgagctggtttggctgaaatacaccttcagatacggagataaatttgatgaaccgaatgatgactggctgaaatgtatcgaagctacaagtgatgaactgcttgggccgtattcaaaagcgaaatataatgccttatccacatccttcggggcccggggaaaaaagagaattaacagagtttttgatgccattggttttgtttaccccgactactgctacccgctacggggacggggaaagaagaggaaaactgctgcttcgaccaagactgctgcttcggccactccaaatgagcttgtgccgaagagcaagaagttgaaagtccttacccacaggccacgttatattgaaccggccgtggtgcctgaatttggcggagagacttcttcagctactaaaccaaaggagcccatttctcccacacagaaggctaaagatccggctgtaatgccgaaggtaccctcagccgagctagctgactcgaagaccgataaggctgaagagccaaaaatcgaaggaacaaaaatgttagaagttttaagcccttcggcagaagtaacagtgtcgaaggcacaaaaaggtcttgcg

SEQ ID NO: 59881 - DNA, 407 bp, Zea Mays
aacgattgctcaaaacgggaattttggtgaaatttaagtctgggatctcggattggcgtgaaatttggcaaggatgttgctggaagtgttgtgaaggtgcctgaaaaatttgggttcaattggagcaagtttggctggtttgggcatttcatcgaacacgtgaagggcgaggaattagggttttagggaaatgaccttttgaggtatgaaaaccctcccgaaggagctagaaacctgcaagaatgtttgaggcacacataggaacacaaatggccacaagatttcactggatttcacagagatttgaattttgcacaaaggagggaaaatagagcttcactgcattctagtcagagaacaagagagaaagggagaggagaggggagagcagctgaccgagagagggg

SEQ ID NO: 59882 - DNA, 397 bp, Zea Mays
aacgatcgctcgaaacggagaattgagtgaaattgaagcctggaaactcggattggcgtgaaatttgacaagtatattgctggaagtgttgtgaaggtgcctgaaaaatttgggttcaattgaagcatttttggctagtttgggcatttcaccgagcacttggagggcgaggaattagggtttcggagaaatggccatttaaggtgtgaaaaccctcccgaaggagctgagaacctgcaggagtactcaaggagtacaggggaacacatttcacaacaaggttgcacaagatttcacaggatttggaatttgggcaaaaaggggaggaatggagtgctctgctcaaaagaaatagagaggagggagagggagccagagctgctcacctaagggggga

SEQ ID NO: 59883 - DNA, 710 bp, Zea Mays
atttcataacatttttccttggcggcacgaagctcatcgacattcttttgcactcttgatctttcaatttcacatatttcacgcttcaccgcttcaacttcaaagttcttagttgcttcggcaactttcctctttagttcttgaacctcggcttcatgagcttcggcttgagcggaaagcctggcttcgctagatttcaatctttccactaaagagagtaatattttatccttctcaagagcttcgtttcttaatgtagtaacctccgaacgaaggtttccaagtgctattcgacagctctcatcctctgcatctttctaggccttcaaagcctttcttaaaatcaagccctggaaaatgaagagtgaacacgtaacgacgataaaaaaccacaaaaatagtttatcgtaacacaaattgcagaatgccaaatcaaagtatacacacctttaggctgttgtaggcaagactatctgcaagctgatctttggtcatcgcagacaagccgagtttgagctttggataccccatgtgatccatcatttcgtggcaaacattgacctccttaccgtcaggtagacaatagaggaaatcatcatcattatctcctccatataccaaggatccatgggggtacttcagctctttagcataatgcttagtttcggcaaattgctccgttgatagttgttttcccaaagcatgtcgca

SEQ ID NO: 59884 - DNA, 311 bp, Zea Mays
gttgaatagagccgaagatatggagtgatgaagtttggtttgtctcactgctgaaacccgagatgaaatcccatatttgacgtgtctatggcacgaatctcgatgccatcttcacacacgttgcagaggggttaatttagcacaactttgtcaatgggggcttaagaatttgagctagggatcaaggtgaacgtgctcaagttctaggtgagggctgaaattcagaactctgaattttcagatttccctagagagctccacttggatggcctttttggggattttaattaattattttggctaaacttttc

SEQ ID NO: 59885 - DNA, 401 bp, Zea Mays
gacatcttcatgagtgctaaaaggccaagattcaaggtggtgatagccttagaggaggcgatgagcaaccagaaacccatactcacctatgtggttacaccaatgttcacatcccttacaagaccagtcaacaaattcaggagtgattactcgatcccaacgatgagctggacacaaagaacatccttgtatgatgtcttgagacaaagatatgttttagggtacacaacatccaaaacttgttttcagctatacaggtgttagctgacatgctaaaatcatcctttaaggaaggggcgtcacaaactttaaaagatctaatcaaggcttctatatcataacaacctaaggcaagccacacatcgggttcccgaagtcgtaaacgctctccacaacaacac

SEQ ID NO: 59886 - DNA, 858 bp, Zea Mays
tggttaaatttgttgagatactgcatcacagaatctcccccttgcttcagacggatgaattcttccagcttcatctgtagcactccttccgaaacataatgttccctaaatgccagtttgaactcttcccacgtgacctgatgtcccacaggctgaatggtagaaaattttgcccaccaagtgctggcggggcctctcaactgttgggcgacaaataggggcttctgtgtctcagtgcatcggattaacccgaacttttgtttcatcacctgcacccattcatcagcttccaagggttcctccgccttgacaaagagcggtggatgggtctcggagaactctagatatgtggtgtctcatggtccctgaggttgaccccttcctctgtgttgctaaaattgatttcccgccatttcacgcaagaagcgcgtgttgtcggcggtagcgttgaccaaggcagcgataagtagcgttgaccaaggcagcgataacctcggccagtgtaggaggtacatatggcaggttgggactgtcctccccgccgcaggaagttcccgccccatcatgaggatgagttcgcgatggcatctaaagaagaaaaacatcctgaattattacatgctaaacacacaccatctttattacattgttgaactgtaataattatacatactcggtacacaacttgacttccttatttattttacataagtacattacttaaactatactactctaattctcttcgtccttagctactccactgcccgcttcaggagaccgttcatctgcaaggttcatggaaggaggggccccaaaaaggtccagctccccatcaggtcctccatcagctgttcc

SEQ ID NO: 59887 - DNA, 407 bp, Zea Mays
aggacatgtcgatgtattggtcaagctaaataaaatgtgtcatcagcgaatctgcacgtttgcacaaccgtacagtacagaagacacacaaattcagaattcagacaagcctagttattacattacagttgttgcaccacggacttgtgcactgcgtccactccgccttgcgtacagtctacacacgaaggcgaatcgaattacaagttggcaacgcgattgcatgcatacagctagacaaagttgcagaacggactgaatcactgaacacgtgcgtatatatgcagcacagggtccctgtgaagggaggctggctatatatgattgtaactaaataacgagcttgcatgaccagttcaatctttctactagctctctcaagcggtatttccttgctttaattaatt

SEQ ID NO: 59888 - DNA, 692 bp, Zea Mays
ctgaaagccaaaaatcttaccgcagatctgatcaacttcaaggaaaaccaatggagggtacagtagataaagctacctggtgcaatgaaaagaagaaaaaaaaaacattcagccttttcttcatcaccgtcgctctagagcaagcaccaatcagtgggcgttttggatatcagaatatgaccactaacttgcatacacgaatgatctatacctttgtaatgcgcaccatcaagtctttgcgtgagtattctgggacagaaattgacctgtcctcatagctgtgatcttgcgatgccatttgtctgccgtgcgtaaattatgcagctgaagacggtaattccgataaggtctgcacaccaatctgtctgccaagatcagattccgatttcaagtggtgctagaaccaaccaatgactgcacaaaaagatttttgcctactgccgctgtactcctcacataaaatgaagctggtgtgatcttcaggctggaatacagagcttccaaataccgacagggaataaaggatgacagccacaccaacaaggggagcatttgggtccactgcttcctgaacaggcagaaatcaaggtaactcaaaatcatccttgattgcctgggttttcattgatgagtaggcctaaaagcctggatgaaatagcaattgggtggtttcacgctgtatttgtcacgag

SEQ ID NO: 59889 - DNA, 489 bp, Zea Mays
aggacatgtatcagtctaaaaagctgttatctggcctcggtatggactacgaaaaaatcgatgtctgtgaaaataattgtatgcttttctggaaggagaccgcaggtgagaagaagtgtactgtatgtggtgagcgtagattcgttgaggttgaaaacgacgatggtttgaccgtgactacgaagattgcacgtaagcagcttcgttacatgcctctcatacctcggttgaaacgtttgttcatctccaagaatacaaccagacacatgaggtggcacaaagaaggggtacgtgagaatccaaatgtcatggtgcacccagctgatacagatgcatggaaggcactagatgcttttgattccagctttgctgatgaagtgcggaatgtccgcttcggtttggcaacagatggtttcttgccattcaatgtaactgcaacgtcgtactcatgttggcccgtctttgctgttccatacaaccttccaccag

SEQ ID NO: 59890 - DNA, 421 bp, Zea Mays
ctgccttttggtgaaggttgatgaaccaaaagcatatgaactaaacctgatgtaagtcatcggcttttcaacatggagatcattcaataaagcaccaatgtataaaggccgtttcagattgtatccttctcggccatgaccatttggtcaatgaatcaaaaggaatagaatggaggtgccccccagtctggatagacaaagggactatacatgtaccatggattcatcattataccattccatgtttgaacaggataatataacgatgatgagtgaacgggtggaaagtaccctggcctcataggatgaataggcgatgcttgttgtgtcgcctttcgggtcgttttgtttactcgtttcgtcttagcaagtgaccagggtttcttcgttgaccgatcacgtagaacggtcttcttgctag

SEQ ID NO: 59891 - DNA, 411 bp, Zea Mays
atttatgtagcttggtggagctggtggtggtggtggaggtagtggaaaattgggagagcataggtatccagctactatttatgtaggatataaactgaacaggttgaggtaagaaagattatggcaaggaaaagactttatccaaaatgtttaagtcatgattcatctcgagattcgttttgactgatatatccttccttgttgatgttgatcttttcttctccggtcttgatctcattgattcgaagttagtgtatatcatcggggttggtagaatatggttaagatagatatggatgagatggactacatgatgtaggtcaaaagtttgtttgatgttaggtgggaatagacagattatgcaatccatcatgactctattggttggatcagatctcctgcatgtggccg

SEQ ID NO: 59892 - DNA, 697 bp, Zea Mays
cagcagaggaggaagacgagtagagatgagctgagagccgtgagcgaccctatccgtgggatgcacgatcgacgcgggtgatgaaggcggtctcaggcctttggatcagtaacggatggtcccgattagaagaagataacggtttggttaggtttacgctggccctcaagtgtggatcgagtggtctgcgtgttcggacggccgcgatctaatcctgacggttagatcagtatcagacggccaggatcgctcttggcatccaggtcgggcaggcagatcttgtgcattgatccgtggatgaacggttctggggcgatcaagcgattttaaatccgggccaccgatcgtcgatcggacggttgccactccatacctcttcgtggggagtctggtctaatcctatccgcagattggtgatccaacggctcaaaatatacgataccccttcgcgaccgattaattgcaaaagagcccctcgctaacttcgaaataaacccatcgtccatcagtgggttaatatgagtctagggaatatttctatgttagcccccgtgctttctggaatttgacgctcggtccagtgaaccaagaaaataataaaaataatttggaaaatacttattaatacataaactcaataaattcatagaatagtcatattaaatcatttttagttcattccagtggcattaatttt

SEQ ID NO: 59893 - DNA, 909 bp, Zea Mays
cccatcggatactgggttagggtactcattgcctaccactaccgttgtgaatttttttaacaggaatcggtacaaatatcacaagaaattaacaaaagatctaaaaaatagttacttgaattctggttaaagcgggaaagaagggatagttaatggactgcaactgcaagttccaattttgggtcagactcaaaagctacggaaactggctcatgcattatccatccaatttcgggccggactccaaagcgtgcggctgggcccaaatctggatgcagtccagctgcttaaatccaacgccctcccttccattcctttctcctggcgcgtaattatccatcttcctctactgcctactccgtgctcgctcgctatcggcttccgcgatcaacccggtctctcttctcctcgccgatcgaatccatccacagctctcctccacccgcgatcgtgatgcatctgtctcctcgctcctctatcgccgacatgcgaagcatccgccgcgagctccaccagcaaaggaggtccaagcccttggcgcccacagggtcggtcgccaagacgctgtccgcgtcgcgtcacagctcgagcgacggcagcgtccggggtccatgtcctcgtccaccgcatcgagcggccccgtcttcgacaatccgccatttccgaggccccacagtcaccgacgcgtcaccaccccgccggcctcgcgcttcatcgcgctgcagccctacctctcctccgccgcctcggtctgccccatcatcggcaagttcctcgcacggatctactcctggcgtccccgcgcatctgaagcctgggacggtggtttgtgtccgcacgaggactacaacgctgaagacggggcaggttctcgtgctgtggctcaaagccacgatcgtgtcgtcgtct

SEQ ID NO: 59894 - DNA, 304 bp, Zea Mays
actttaactcaaagtttatgattgtgttacgttgttgttaatcagatctcgttaggcttgctagtggtaaaagccacacctagctctagttactaggctagctagctataaccctatgatctaggaggcgcttcaatgtttaagctccacttgaacactattataatgtgccattagatccacacaactatggttggtagcccctcttggtgacaacaagagtccgcctatgtatcctgaccccatcgtctagtactatcgtagggtgcatgatcttgaggcctctctagatgagcatgcacca

SEQ ID NO: 59895 - DNA, 429 bp, Zea Mays
cacatagacccaggcgcattgaggcggttgatgttccaaagttaattgaaagggtggaaacaaccccccagccagagaggttgttcctgctatgcctattgaagccattgcagacccgaccagagagccggagccataaaaggtatcagaaaaagtaccagagcagcctaagatgatggtgacagctctgccgaagctgccaactaccacaggaactccaaggaagaggaggatggctagtgtcttggaagttgttcttctagaatctgtgaaaacgcctccttctgccaaagcttctggcagcaaaactgaagatgtcatagagatgaccactacctgtacttctgctcccaaaaatcttatgaaagaaagccttccagagaaaccctcgacacctgctcccgaagcatcttccatgagtgatttgag

SEQ ID NO: 59896 - DNA, 540 bp, Zea Mays
ggaaaagagtcgtcagcattctaaataagcaagctattcagtcagtgaaggaagactagaaagctttaaagaagaaaaaactctatcggagccaaaggattcagctcccaagaaatgaaaactcgtcaagatatcttttgtggagacgaaggttcaagatgtgccagacaagactataggtccttcctagccttcttctactgatgtttcagaaattttgaaggtaatgactgaacccatcccgttcgcaatgctaagtcctctaaggttagatctgactagcctcttgcagtcaaaggaaactgcttcggctgtcaaggggaaagctaggggacaaaagaaatggcgaatgatgaatgtgatgcaagctattgaacagaccccgcccccagcttcggcggataaagaaattatgcttgtcggtgcggaagataccgccacagccgaagccgataatcatgcaaccataatgttggaaatcgacagacttatatcggatgtggttgctgagaaagatgtagccgcaacgccttctgataa

SEQ ID NO: 59897 - DNA, 291 bp, Zea Mays
tctcataagctgaaataggaacttcgctgctgtagtgaaatctgccggtgagcgtcgcgacccatctgagaagggcggtcggaacagagccgcgacatgagctgtacccgaagcgacaccgccgtgagggcgacgaggagggtcagaggagccatagcataagctgtgaagtcgagtcgacgactcgtgaaatccaaatagctggcgaatctggctggcatgaatagtgacatcctctcgctcaaaacgaaacctcatccagtgatggtcagggtcgatccatacagtcgc

SEQ ID NO: 59898 - DNA, 672 bp, Zea Mays
gtttcaatgccagaaactgccagaaaagttaataattgcatttaaaccaccctatgaaagctaaaaatgatttggccattaattaagtttgtttgcaacctgttcttacttcgtagatgaggtaatggttgccttgtatgggctttctcccccttttctctctaatataaaattatgtaactcccctacctgtttgagaaaaatgttattatgagcttgctttaaaaatcactgtctcccagatactaaggtgtctcccaatgccatcaatacaccctcagaagttctatacgctattgtgatcttaactgaaccacctcccttcagacttacatgtgatcttagtctgtcaatatgacacatatggtgaatcttgcctacccattattgtgaatttttctatttttaagacttacaaagaatggtaacatactttattctgttggggattttgtcagaaatatttacagtttagtgtcctcaattatttctagctacaggatcatccacctccttctccatatcctatttggtcggccttgcaggtagagttttgggtattttgttatgctgccacttcattggcgcagaatctataaaaatgttatggatgagtttcttgataatcttatttgctatttgattcgttgacacgattggtatttcatatgt

SEQ ID NO: 59899 - DNA, 641 bp, Zea Mays
ttgatattggttgatattggaagttctcattcttttatcagttcctctttggctcacaagttaccaggaatatctgctttgtccatacccttgcgtgtatttgtcgctaatggatctcaacttgtctgcacttctgaactccagcacattcagtggtctgtggacaatattcaatttactactacgttcaagatccttccactatattgttatgacattattttaggtttggattggcttgagtcccacagtcctatggaggttcactgggaacaaaaatggatgtcattccagtcaggccctactacagttttattacaaggcatattaccccatatttgtcctactacaattattcaagtattagttgtcaccccggaatgtaacacagtggattttagtctgttaccttccgctattcagactattctgcaggagtatgaacacttatttgaagcccctacccatcttccaccaagtagggcttgtgaccattctattccattaattccaggcgccaaaccggttaacattagaccctacaggtatccacctagtcttaaaacagagatcgaacgccaagttcaggacatgttggacactggagtgatccaacatagccatagcgctttcaattcccc

SEQ ID NO: 59900 - DNA, 647 bp, Zea Mays
tggcccggggcctagatggaggagtggttttatgttaaaaatgatcttattgaaagggaggatatcaaggaaatcatccagtgccccatctggtctcgcttcggcctccgaaggccgaaggtggctattgaaggtgacatcgaagcatgccagaaggcctttagcaatgtttgtgccttcattggcacaagagatataatccaagagaacatagcctgtagggtgtgaccacttgtggatagctaggaaatgtcaaaggaaactactgctgaatccagtgaaggtggcctggttcgattgaaatataccttcagaatcagagagaaatttgacgaaccaaacgatgactggttgaaatgcattgaagctaccagcgacgagctgcttgggacatattcgaaggccgaagatgatgccttgtctgcagccttcgggggtcggggcaagaaaagaatgaacagcgtgtttgatgcaattggcttcgtataccctaattatcactacccattacgaaggcaaggaaagaagagaaaaactgccgcttcggccaccattgttgtgccgaagggcaagaaaatgaaggttctgacccaccggccgcgatatgttgaaccgactgtggtgcctaaatttggtgaagggacctc

SEQ ID NO: 59901 - DNA, 504 bp, Zea Mays
gatgtgttggcgtctcctagtgcgccttctattcctattgacttgtcctctcgcattgagccggtttcctatcctgtttctacattagagccgtctcttagatgtagccagtgtcttcgtcagcctattgatcggtactctcctttagcttttgtgactactgttctttctaagtcagcctcttatcatgatgctattctttatcaggaatgccagcataggatattgctgcactatagcgcactggcacatgggacttgttgtttgtaccttgtccaccacatgtttgtcctagacctgctctgatggttttcttgagtgttataagacttgtcttgttgcctgttgttttcaataggaatatggacatgattatgacgagacttttttctcttgttgattagatgaccacttttcgcatcctccttctggcttctgttcgtgagtggtccatctctcaacttgatgtcaaaaatgcctttcttatggtgagttgcttgagga

SEQ ID NO: 59902 - DNA, 598 bp, Zea Mays
ctcgccaaatgaagatagaccgtcgcgttgtggtttcgtgttgtcttctgcttttgtgaataaccctctttggttgtcattgactattttcccttgttaccggtgccatttctagaactagagtcggaggtcgcgggcctttgcgaggtcgtggatgaggtgatcttctttgttcagacctagggtgtcgattgaggagagcgaattctcaatgtagctaaccgggagtgcctggtcgtccatcgtggcgctcatcgcggtgccgctggggctctggcctttgtgcagttctggtcgggctacgagtttggtactatggacttgtcggaggacacgaccgtcggtgctctggaggactttgaggatgacttcgacatagccaccgaaaccatggtcgacatctttccactggaggatgtgatcaatggatctccctagttaggatgtatccgtaggtagcttcgatcatgggacggcccaggtgtgtctgcccctatgctttttgcaatgttgtcatttatttctaaacttgttggtgaaatgtttcccctccctttcctgttcctgatattctattatcctttagtgtgaaaaaatg

SEQ ID NO: 59903 - DNA, 409 bp, Zea Mays
actataggaaattagaaacctagcaaaaattggtttggtattttttatcatttttctacaattttctagagtttctttagctctggtagacaaagaaaaaggaaaactatgaatagtattggacctaaaccggcccaagccagcccactacaggcagaagcgcgcccgcgctacagactttgcagaaaagccctgtctttctgaataacctgaaccgggttcttgcactattttcgtgagtcgctgacacttgcagaaaagtccatgagcttctaattcttcacagtgccaagtccccgacgtcgcacggcggagacccgagcaccggcgagtctagactggtcggagcacgcaaagaccggcgctctccgtcgactggcacctaattcaagccttaactgaagtttcc

SEQ ID NO: 59904 - DNA, 763 bp, Zea Mays
caggcactggcacttcctcagtagcaggaacagaaggaccgacatcctgatccaagctagacactcgacgaagacgtctcttcttctttttctgcccctcagcaggagaagtgggctgattggctcggcgagggcgtttcgagtgaatactgtcagacctttgattatccaaagcgtcgctagcttctgggagaggcgctaccaccgatgtttcagcaggggccacatcagaggaatcttcagctaacatatccagcatggcacttatctctgcatcactgggattcaaaggcacctcaaaatgaacctgcctctcgtcgtcaggaatttcttccagtgaggcaaccaaagcattaacttcttcgggagagggtcgcactctaaggcccaaaccgctatcaccggcaggaggattcgacacaaaactggtaaaggccttggaaggaggcagattccaggccgagtacgcaacaggaaagccgatgttcgacaccttgcctctgagtatcatttcgagccggctcaccaagtccacagcaggaattcttctgttggttacccgggttgaatcagccaagcctcggtacagataggccggatatgctctgtctttcagcagctgaatgttcttgaaaacaaagtcagcgaccacagcttctacaatcagacccctttctttcaacaatccaacttcagctagcaaagcctctgcctcagccacctcctggtctgtgggggattcggtccagctcggagtgcgaac

SEQ ID NO: 59905 - DNA, 881 bp, Zea Mays
gaagatcgtgtctgaccaaggatcacagttacttctcggttttggaagaagttgcatgagagcttggatacacagttgaatttcagttcagcctaccatcctcaaactgatggacagactgagaggactaaccaagtgctggaggatatgttaagagcttgtgctcttaaacacggtggtagttgggataagagcttaccatatgcagagttctcgtataataatagctaccaggccagttgaagatatcaccgtttgaggctctatatggcagaaagtgcaggactcctctatattgggaccagactggagaaagacagttctttgggcctaaacttatacaagaggcagaagaacaagttcgaatgataagagataatgtgagaattgcacaatcaaggcagaagagctacgctgatacccggagaaggctactggagtttaaggagtgtgatcacgtgtatttgaaggtgtcaccgatcaggggtatgaggagatttaaaggtaaaggaaagttgtcccctcgcttcattggaccgttcttgaccgtaaagtgagtgggagaagttgcatatcaactagaactacccgatcacctggcatatgtacatgatgtattccatgtatcccaactaaagaagtgcctcaggatacctgaggagcagctatcgatggaggatcttagtgttcaagatgatctgacgtatacggaatatcctatcaagattcttgacactttgacgtgagttacaagaaataaggttataaagatgtgcaaagtgcaatggagtcaccatggagaagatgaagctacttgggagagagaagaagagcttcgcatagattttccacatcttttccctagtccttcctaaatctcg

SEQ ID NO: 59906 - DNA, 384 bp, Zea Mays
ctttattccttgtaaatcgagtcaatgtgttaagaatcttgatcagatactccgtgtaaatcaaatcaccctgaacactgagctcttccattggtaactgttcctcagggacacggagacacttcttcagttgagatacgtggaacacattatgcacatccgatagactatcaggtaactcgagttggtaggccatctctccaacttgcctaaaaactcagattggtccattatagcgaggggacaatttgcccttaactttaaatctcctcattccacgaagtggtgacaccttgaggtacacatgatcaccttcctcaaactccagtggtcttcttctattatcggcgtagctcttttgtctggtctgagctaccctcaaat

SEQ ID NO: 59907 - DNA, 1076 bp, Zea Mays
agagattgcatttatacatgaggaattgtatttgagcttgttttttgccttcatctgcttttgcaagttgtgttgagcctttacctcttttatagggactagtagtgttttagaagtttctattgttgctctaatttttagctagtggtgtagagccttttctacctcttcttgaggactacctattttgcttagttgtgcgagccattgcccatgtctttagggatcaagctttgttcatttcaaatgaccatgttttagcaatccacaagcttctggtcatttgtgtgaattttgatttttttatttgctcttgtttcctctctttgtttttggtgttgataatgcactcgttaagggggagattgtgaatatgtggttgtatgtgcacgtggtgttcaagtgtgataagtgattgtcataagatgatcagctttggttgagttttgaggctaaccatggtgcgagtgtgatgttgtttaacatgtcacttggcttatggtgtgcaagtgtagagcacagaggctatggtcgatgccaaaggtgaaagtcaaatgggttcatgctgatggactagaagcgatgaaggacgtatgtcgaggtatggactcaggaactagataagctagaggattgaccatggtcgctggcatctagagacatcaacaagtgaaagatgatggttgaccaattcaagtggaggctctagaggattttgtgattgaacaattgatcactagcagtgaaatgtgacgagatcatggtgggagcatattggatgcgctacgcaggagggttttggtggtgtggtcttgaaaaccaccaggtgggcaatttctgggtttgggccttaaaaaccttgttggagttttggcagaaactataggtggcacctggcatcattgcaaagcttgtgccgatgcaagcaaagttgtgaagtgcccatagtattcaaatctgtagatcttgagttggaccatagtgccctaggattaagtggttcgactctaattacatagaggcaagttgggaatgtgtaatgccctatataaaaggaggagctaatccaactagct

SEQ ID NO: 59908 - DNA, 540 bp, Zea Mays
cgattatgaagtgcgctttaagagggggctttcccatgttttggatgcaaagggagatcttgttcgtcagatttctccatttggatgagtttttcgagctgatttttcacactattctggcccctctcggtgtcttttggcaggatcttcctctttgatttggaagtggcatagaaagctaggtcatttgagcttcaatgttttatgtcgtttgagctcacttaaccttatccaaggattgcccaaattagaatttgagaaagatcttctctgtcaccttgtcgtcatggcaagatggttgatgctttccattcctcggtgaccaaggtgatgaccatgtagcctcacgaattgcttcacatggacactattggtctagctcgtgcttgctctttcgggaggggggatgtggtaagtgctggtgattgtcgatgaattttctctctattcttgggtgctctttatgatggcgaaggatgaggcttttgctcatgctcgggattggatccttaggttgcaaaatgagttttccaaaaattc

SEQ ID NO: 59909 - DNA, 660 bp, Zea Mays
agaaaggcccctaacagtagccccttgcagtattgatttgtttctttgtaacaaatttagactgcaacgtgaacgaaggcatttagccgaaggtccgaaaaaacaccttctagcgaatcgttctgacccgtgggacccaccatactgcggggttttgagtgtatatagagacctgtttcgtgagtatttttcgtgttattttgctgcttgcattgtgtcttctattttaaccttccttgcttcgttgagtttgatcaagttttgagctttagcattttagcaaccgtcgtctgaatggttggggagaaaaagatcgttgatcccacactagccgggttttacgaaactatggagaataccaacatggagaaaatcaccaatgagatgctggctggattatctgaaaattccagcgatagtgagagttttgacttcaaagtggaaatgaagatgccgaagatcaaccatggaggccgagccatgttattttcggaaagtcgaccattaaacaagggcagatcgaaacaatgagaggcagatactttcgtgacatttctatcgtgagggccggaggggagaatacttttcctcttcccgaagctgatgaagtggtgatctttagaagcttcatgaaagctgggcttcgtttccccctagaca

SEQ ID NO: 59910 - DNA, 861 bp, Zea Mays
atccatttatatcatgtatccaaaaaagaaatcatcgtactcaagttggattttgaaaaggcctttgatacagttgagcatgatctgatcctccaggtgctatctcacagaggatttgggcccaaatggctgggctgggttagggatatcctccaatctggcacgtcttcggtcctccttaatggtgtcccaggcaaatctttccattgcaagcgtggggtaagacaaggagaccccctatcgcctcttttatttgttctagcggctgatctgcttcaaagtatcatcaataaagcgagacagcaaggccttctctagctgcccctcactgagaactatggtcaagatttcccaattgtacaatatgttgatgacacattattgatattggaagcttgccccaggcaattatttttcctcagagcagttctaaactcttttgctacctcgacggggctcaaagtgaattatgataaatcaagtatgtacacaatcaatgtttgcccagcaaagttggagattctagccagaacactaaactgtcagacaggatcaatgcctttcacttaccttggtgtccctctaggcctgtcaaaacctataatttgccactttttaccgcttatccaaaggattgaaaggagattgtcatgtacttctgctctcctctcccaggccaaaagattggagttagttaactctgttttctctgctctcccgactttcctgatgtgcactctgaaaattcctgtcgccacagtcaagatgatagatgcctaccggaggcattgtctctggagaggaaacgttgtgaactcaaacagatcagctcttgctgcttggagcatgattactcagcca

SEQ ID NO: 59911 - DNA, 493 bp, Zea Mays
aggactcaaggaatggcgtccatcgtcaattgtcttctctggatgcaggttgtctcattctttcaaacgctgcaggtcctgtcgtgcttctagcgtgttcttagacttcccatacacaccgatgaagcctagcagattcacacaaagattcttcattaggtgcatcacgtcgatcgctctatgaacctctaagacacgccagtatggcagctcctaaaatatggacttcttccacatggaagcatgtctagtagcatcatttggaataggttggctgtaaggtcccttcccaaatactacttttacatccttcaccatattcaatacatcctcgccgctacgattgtcaggctttgttcgatgatctgccttacctttaaaatgcttgcctttctttcttaaggggtgattcgatggaagaaaccgacgatggcccatgtaaacgacctttcaacattttttcaagaatatacctttaatgtcaacgaaatag

SEQ ID NO: 59912 - DNA, 668 bp, Zea Mays
tgaacaaaacatgaggtgtctcggtaggccaacagcgagagacatagacaaattgtgacgcgatgaaatgcatgggcgacctaatttcattatgtggcttcaggaccgtgtaagtctcaattatgtggctccgagacctaattttagttaattaatattacagaatttgttaatgctttgtggcataattgacagtttggggaggaaatgaatttgaatgatgacttacggtagttatctattagaagtgtaactgccaaaagctatggacgttacgacgtcaatggatatcgctttcgttcaagcattttcgaatctagtcatcctatggccgccactcaaaatagtgtagtcgttactagggcaaccgacatggaaggacacgaagcctgctattacgggaaaatcaaaaatataatcaagattacatttgctggaaataagcctttagcgctagttttctttgagtgtaaatggtatgacccaaagtattataggaccgaatttgggatgacatagatccaacctgaaaaattgcttcaaggacacaacatctatatcattgcccatcaagcaaaccaagtttatttctcgacatatccatgcaaaaagttgtctacatggagggttgtgtacaatgtaaatccccgtgaacgccaatacactcc

SEQ ID NO: 59913 - DNA, 531 bp, Zea Mays
cctccatcaatttcactaatggcgcactaaaactctctggccacggtgaccgagaagcaagcggcaagatcgtcgggttcccagtgatcagaggcggtttggttcgattgaaggggtcggagagcatcaccaatatgtaaggatgctagaacagggatgaaaaaggaatgagcagacctggggacggctggccgcggggaggcgagtttacggtggcggagacccgatttggggagaattggaaattctcgagctccagtgagggactgctagcaattggcgatggctgagtgcgtgaggatgtggtgaagctcactgcggggtcaatttatagatccccgaggcggccggagaggaggaagaaccttggcgcgcgtggttacgtgtcctatggcgtggcagtaactccggtgatcgatagacagttagagaggatcacggcgatgcggtggtgcgggtaggacacacggcgcatggtcagacggcggctatcaccggcgttcttatctgcccagccgtagggtagagggg

SEQ ID NO: 59914 - DNA, 1982 bp, Zea Mays
ggcggcggtaccggccagtcgggtcgagcgaccgtgccgtgatccagatgacttccatggagccgggatcctcgtctgccaccatcgatgccgtcgtgactccccagccgccaaggtgatgcgtacttcattcgcatttgcaggtttcgagagcaatttgttatgtcacgtgctagcagatcgcaaacgtgctgaattcagaggttactgctgcgtggatcactagtatagttgctgcaaattagtgtgtgcattgtctaggaattgcattgttttgcacatgggctgttgaagggagcaattggagagtagctgtggactgttgagcatactcaatctattggaagtatcggaagttaagattttaggttgacttccctggatgctaggaaacactgaaacttctattttgggccttgggttgcttcttcctatttaaatctgtgggcatcgggatcaagtctgtgagaccatgtctgtcacatctgttttatgggagcgcctgcagctgcaatgctaccattgttgaaaccagtagaaaacagattgtcaagcaactataggcttgttgatgtagatttgacttttgtggctagactgtttgatgccagtttgtgatacttgaaagggaatacggttttgtccatgtattgattttacttcttgtgcgtggtatggcttgccacatggcatatacccttaaccttctttgctttgaacaactttgaagaaatggctatcattgtacatgatctttaccttttcttattttttttgtccttttcttttgaaaatcataagtacaagagaatttagtagaaaacaggttgccgaggtgctagaagtatggactcacactcttttatgtttgatataggaacctgaagcctgatgctaatctaactattgatccaagtatgcgggaaggttctcctgatgatcatgttacatccagtggatctcaaggggattcaaagctagaactctttggttttgattctcttgtaaatatattgggtcttaagaggtagggtcaatcattctattttcttactgttgttaacttgactaaaactttatgtttttttttaccatgaagctgagttttaccagtgtttagcatatgcaccctgaagatcgtttgaactgttgattcgacttcatgacatcatcatcttattgaacctgagcagcatgacaggagagcaggttcaggccccttcaagtcctagggatggcgaggatgttgcaattaccattggccggcccaaggttttcttccatttcaacattttctgacacctgtttgaagattcctcactctccttttagaaaaagatgaaaattaagagttagcgactatatcgatcttaaagtttgttcggtgtatgtttctgtctctcgtgaagtttaggatgagaagttgactcgtttcaatacccttacattgttttctgcatgtgaatattcacttaatcagagatagctgggttgctcattttagttttgtttggaatgtcatttggttcatgcatgtctgatcttctgtggttgttaagttttaacttcactcattcttgttggttttagtgactagaagattctattccattttgacttatgaaattgtagaagtgatatacttatatcattgatgagtttactttattttttggacagcaaagtggacctaagttcggcaccatgatgggtgtctttgttccatgcttgcagaatatcttgggaatcatttattatatccgttttacctggtaaggtattccatacacttttgttatgatctcagtacatcgtttctatttgttatttttctgaaaatgcttcactggccatacagatgctgctgcccttctgttatattcgaaccaaataaaagaatattgaagtaaaactatagataggtatcagtacatggaatttgacttattacagtattagttcctttttttatcctcctgttt

SEQ ID NO: 59915 - DNA, 943 bp, Zea Mays
gtggtgagcagtctctgttaagttggatctccctaaatttgcttagaattgggagaaaatgttgttcttagttgagctgtccggcaagttgtgcactgaacattgttcagttagctggtacagaatcagtgttttcgtctcgttttggagcacaataactcttaatccgtgagccttaggccttggattgctgcagaaaatttgtagatctatattttgggaataagtttagttaacttaggttggtcttttattgcttggaatagtgaggtttgaaggggtagaaatgagagttcagacggtttgttttgagttcagttcaaatggttgcagcttggttcagttttggggagcagaaaaatccccacgtctctgctatgctccacttgtagcagtttggattgagaccatggataggagtaggattcgatgcttccagtgcctaagtaatttatgcttggtgtttatccattgccggtgcccatcctgtctacctgtctctggtttgtgtgtgacttaggttcactgctctaccgtggattcgatcgggcatggtgcttgtgccgtgaagccgcgtgtgcaggtttaagcagctgctggcaccatcgaggtccttccctgctgtgatcaggacaacttcagccaacgcctatttctgtaactcgtggccatggttctctaggtgtgtagcgctcctccttcacgcgctcaggcgcgtcctccacgttcggcgtcttactgcccctcgtgcgcgctcggccttacctcccctgaccacattgctctctctagctctcgcgtgtcatcttccctagcggctggtcgtgcctctatcctactccgacgttcaccagcgcgcatgctttgcacctgctcgccggtcatccctgccccagcgcctacttcatccatggccggctctttgcgtcggcctcctctgcaa

SEQ ID NO: 59916 - DNA, 431 bp, Zea Mays
cttgggaggaaggggtatggacatatgaccgagctacgaagacaaacttcaaaatgcatgtttggtaccaatactccatgcatgacttaccggtgtatggctattctgcgcctggtgtgttcatgataagttcccatgcctagtttgcaaagaagctcttaggttcatttggttgaagaagggtggcaaatattcgtcattcaataaacatcgtcaatttctccctcttgaccatccatttcgtctagacatcaagaactttatgaaaggtgtcatagtgatagactgcccacctgcaatgatgactgatgccaaaatttgtcaatagatagatggactcgtgttcaatccagaaggtggttttgtgggatatggtgagtagcatatgtggacacataagtcgggcttgactcggctcccctattatgacg

SEQ ID NO: 59917 - DNA, 282 bp, Zea Mays
agtcgctccagccacagctcacgccgcgggtctgttccgaccacctttcacagatgggtcgcgacgctgtccagcagatttcactccagcggctaagtatctttatcagatcatgagacggacactactgccccagatgggttatagagaggccaccactcacattcagctttggctactttgtgccttgatctcacattcaaagtttgatgtggttgatttccttatttgtgagatcgaggacacggtgttggatggtcttcgtgctcgtcgacagctacc

SEQ ID NO: 59918 - DNA, 390 bp, Zea Mays
gtttgatgttatcgggtttgcgtacccagactactgctatcccacgcgaaagcaagggaggaaaaggaaagacattacctcggcatcttctagtgtgttgaggtcgaagaaggttaaagttttgacgcgccggcctagccgcattgagacagccgatgtgccgaagctaagtgaaaaggtggaaacaacccccccggctatggaggccattcctgttgtgcctactggagttactgctaacctggccagagagccagagccagtaacagaaaaagtaccaaagcagccggagatgaaagcgacaatattgccgaaactgctaatcaccacagacactccaaagaaacggaggatggagagcgttttggaagctgttctagaatctgtgaa

SEQ ID NO: 59919 - DNA, 522 bp, Zea Mays
ggcttcggtacgacaggaatgcccaggacggcaataggagcgatgggggcagatcgtgaacaagatgccacacagtgtagcacgtagtgctgccgtcgccgatgaacatgatgagcgctatcatcacgagcgtcgtggcggggaagagagacgaagcgtcacaagtcatcgctagcggctaggagaagtgcttcctcatgagtgaggagctacaaggccatcgcgcgcttgcgacgggttcttgacgagcattttattgtagctccattcaaagttgagcgtgtactgtttcgcgagagctaggccagttgggaacgagatagaaatggttggtgaccttccgatgcaaagcatggacgacagatacgtagtggatggcttttgtccgaggcatttggttcattagctcatctgtttcttgtagatggatcggaattaaccgcccctcgtgcatgacataagacgatattgggcaccgctcaactcatgcatggctcatgtatggtgcatcatgaattccca

SEQ ID NO: 59920 - DNA, 475 bp, Zea Mays
gccggttatgacttcatcaaggacatcaacctccttttcaatacattcgagtgccctgggtatatcttcggctgagaggctagtttcttcggatgcagctccaactgaattaaatatactcctcaatcgggcggtgcattggcttgcaaactcgaagcatctctctttcaaagccttcaccgcctcactaagcttcgaatttctctcagattcaaccttaagtcttgctttcagagctttgttttcctgttcgaactgattaacgttttccttcaaaagtgcttgagcatctaacaggtctttgcttaacttcttgttctgagtttgtgcttcgacaagggacccttcggctgagcatagcattttgtctttctccttcaaagagtcttcgagttctttgaccttatcctctaagcccttgacaatgatctcgtttttcctgtcttcgtcgtcttgttgcatctttaaagctttg

SEQ ID NO: 59921 - DNA, 461 bp, Zea Mays
ccgatttagcccaagtcggtctgcagaagggagaacacgcgcgcgccctcgccctcgtggtcaattttgcgtagaggaccttggcgatttgaataacttgaaaaggggtcgtggcactattcttgcgtttcactgacatttatggaataccccttctatttttatttctttaccgcgccaagtccacgacggtgaacggcgacgacaaacctccggtgaactcatactggccggagaatgcaacggctaggcttctcctttgcttgacacttaattcaaccctccgcaacactaatccctcaaataatttcactaatccggaccggagcacgtctgtccacgacgacgacggaaaaccgaggataatccaaggtgttctaggcgatttaaggcggtctagttcaatcgaatgggttagggagctacagggaacatgaggaaggctagaacaccaattaagg

SEQ ID NO: 59922 - DNA, 561 bp, Zea Mays
gtctcggtgaaagaatcactagacacagaccccatccatgtggactgcgggttgattcttaaaactacggggtctctttagacaaatgcacggccgaaggggtaaggtaggttctcggtcgttcgatcaggagcctgcggttcagattagatgagctctataacgaaccggtacgcatctggggtcactggatatgaaatctacgatcacgatttaacatagcgaagggatatccgcgacccgatcacagccatccgtggatcgatcaacgtcccaggtccttctcctagctccagctgcccaggcacagacaccgcgccctccccagtgcactctttctctctcccgttgctccaccgacgtgcacaccgatctcggttcgcatctaaactttgctcagggctactgctcctccacagattgtgcaaaagccatagaatggagaaaggaggaaattccgaggtagctactcacctacaatcacgtggcgcgaacacccaacaccggacgcgcttgattccgcggcgtaatcctcggcaccgacgagcaatccgatcccca

SEQ ID NO: 59923 - DNA, 707 bp, Zea Mays
aacaggttcccgcatcctagaacctacccccttgtcatcgaagcaatcgtctgctcgaaccgtctctccaaagtcgtcatggatggggggagcagcttcaacatcatgtacgcaagaattttgatgccctgggatcgcacgctctgcgctgcccctcagcgtcgcgtcgatccacggcatcacgcccggccacactgtccacccgcttggacaaattattctgctggttatgttctgtagttcgaagtgatggacttcctaggggcctacaacaccattttggggagaccgtgctacatcaaatcatggtcgttcccaagtacgcatacctgaagctaatgatgcacaacccccatgggtcaatacggcgtccgcttcattccaaatagtctatgcatgcgaaaaagcttgctgcgagctcgcgttagcacaagctgctgcgagagagttggcggagttgaggagaggcattgactccagggaggggccggacgcacccaaggttgcctccggcatgttcaaatccaccgaggacagaaaagacgttcagatcgatgacactgacccttccaagcatgttcgaatcggggccacgatctccgacaggcaagagggcaccctcatcaacttcctccaaaccaatcgcgatgcctttgcttggaaacccgcatagatgccgggaatcccaagggaatttgcttagctcc

SEQ ID NO: 59924 - DNA, 430 bp, Zea Mays
tggagccattagcagaactaaccaaaattgggtaacctctgcaccgaaagaccagcccacgacacaaaatcctccgaaacaaacaaatagctagcgccagagtcaaaaagagcatgggccgcaaacgaatcaactaaaatcgtacctgtcagcacgtctccttgctcactgccatccgcagcgggtagcacataagctccagaaatacccgcagaagaggaagctcccagagtgaaattaacagaagaaccccactgagccaccgggtgaggcagacgtggagctccaaactgagacggcataggagtagacggtgcaggagtaggcacggccagatactgaggaaaaccctgcattggcacgaactgagaagtcccaggcacataaagctgctgcagaggaagaggaactgaaaactgctgctcggcac

SEQ ID NO: 59925 - DNA, 1300 bp, Zea Mays
aatttacccacctaactaaacttgtttcattattttagtaccttttcacaatttctggcgcaaataaacaaacatgagataaaagaaaattctaaacatatgaacagtcgcgaaccagaactgactcaaccggtccaactctaagcaaaactagcccagtgcgtgtgtaaatggtcagaatagaactattttagcacaatgcgatatccatagggaacgaacccgcaacctatacacatgcggcacaaattaccataaatattactacgacgacgcccaatgatgaagcgacgacgacttggcaataaggtgagtgagacgtcgcagcacatgaagtatgctcagggcgactttgagagcacctgctattgttccatggcgaggatgaggatggtgaattggtgataccaaaatagcaagacaacgatgattcccaaggaaactacaagcacgtagggtccgtggctagacggctagagcgagacggccgaaggacactcttgcacaacgaccagagaaggggctttggcacctggggcgacagcgacaagacgcgcgttgaggcttggagctgggcgtgcgagtggcaaggcaagcactgaggagaccaagcgcatagcaagagaagggtggcaattgacgtccagacatcaccgggtgtttgacagctgttgctccagcgttggggaggagagggagatgacgaggaggagctggggtcgagcggctgctgctacaccaagcgatgggatgagggagggagatggcatggaggaagaagtgttgagagccaagcgttttggacttccagagagctagcgtgaggactggagctttccaaaggagtgatcgtgctttggctaggaagcaagaggtggtgttgaagatcacaagggacagacacgtgcacgtagggatagaagatgctagaagattgcagcgtacggtagacaaggaggactaaacgtgggagggaaaaaatgggatttttcttccttctttcatttttgtacccttttatttaccaccttttcagacctctatccaatactacagctcgaactggcacgagtgagacacaacagagacgtgggaatgcttctttctccccgaaactgaatcaggtcttagttatctgaaatgaagttcagtgcacacaacttggttgacagctcgaattggagcgaagctttctcccaattccatatactaacttgatatactttcttactagaagttgttcctctatgattactctccagctttgtttcaatggttactagctaaaactcaatagtat

SEQ ID NO: 59926 - DNA, 605 bp, Zea Mays
aatagtgataaaaagtggaaaaaacatggcaaacgcaggatgactatggcggcaaataaacatcattaaagcggcaggtacccacatgaacctgtacaaaaaagactggctacgagccccggcaccgtactagaaattggaaaggttgggcatgcctgattctatatgaatccatcgccaacgcaaggcagcagttggacgaatattagacggattcctaccggcggtcggctacccatacccatacgtaagaacaaggactattcgacatctttgctttcaccatccaagtaatttttggagtaaagactattccgcgacttgtttgccaaagaataagggggtcttggcatcctagacctagaacgttttgcaagagctttaagatggaatatcaaagataatgcgtgcatgggctggtcttcaattgccatgtgacaaaacagatgttgacctttttcatgcatctagaatagtacatgtacattggtaatgggaaaatggctgatttctgacgaccaggttgggttgaaggtgaggcgtcaaggaacatggcaccaagatcatacaagaaagcaaagaggaaggacatctcggtgttcaaa

SEQ ID NO: 59927 - DNA, 463 bp, Zea Mays
gaccatgttcctgttctatacattttgcttgggccattgttgcgtctgctcaattatttgttacctactacaagggctgttatgagcatcgcccaaaagaaatgattgttgagcatctccaactgtaaattttaggtgttccgaggtaaaagcagatatctgaaaaccttatgacttgtctccctcatcttttattcaccggcagctactggggatctggttttcagagggtctcttcatgcttgccggccgaataggcaggtcaaaacgaaggttgaattggatgatggatgctctgaattttgaatacccatattacgatagacttaacaaaggggccgacggagcgaaaagaaaaagggttatcagcattctgagtaggcaaactgtctggtctgttaaggaagaccaagataatttgaagaagatgaaaacaatgtcggagctgaaggcaatgactctt

SEQ ID NO: 59928 - DNA, 307 bp, Zea Mays
cagagtctcgcaatttcgtgtttcccccaaatacgtttttcgtgccaccgtgaacgcttcgtcgtggctagccctatgcaggtcagttcaagcttccttaattggtgttctagcctccctcaatccccctgtttcttgtagacccattcgattaagctataccgcaccaaatcatcgtgaacacctcagattatctcggatttttgccgtcgtcgtggtagagagattttggtcgggatacatgcaattagttgatggattagggtcgccaggggtagaatttggtgtcgaccgagtaagaagctta

SEQ ID NO: 59929 - DNA, 353 bp, Zea Mays
aaaaaataaagtctagcccgcaaaaactctggcatcctcactccaaattggctgccaaatcctccaccagctccaaccgctagggctgcattcatccaccttctgctcgtcacctcctccaacgccgactcatgctcatcgatcgccgcctcgcctaggtctctcacctctccagacttgcgtagctccctcctgctcgtcgcgtcgtctacggaatctagcctgcggccattggcggctagtgccccgccgtggtgccatccaccagcaatcagtggtcgcggtctatcccttctcaccccttcggatccgctacgcgcgaggcacagccgcgtctatggtctgcctggctg

SEQ ID NO: 59930 - DNA, 551 bp, Zea Mays
ggaatattggggccattcactgagttggagtaggtcggtccgggtgcctataactgagggcagttattcttaaagtgactggggtccccgcagtgccaacagacatttgctggcggttggttgcttgcaatagaggatgcctgaagggagctctgactttgctgactgtagcgcgacggagtgggtctagatggtttattgaagcttggacccctgggtgggagtccaaagggtcgagctctctggtgacgttcttgctgttgagctcggaggacttggaatttcctcttgaggtgccctttttcttcctcttttgccctttccacttggatagccttgttggagaggtgagagaagctgaggaagtcttggctggcgaggatggtcttaagctcgggtcttagtcctttcagaaaatgggccatctttctggactcggtgctgacatcctcaggcgcgtaacgggccaactctgtgaacttgtgcacatactcactgactgttctcccgccttgagttaactcccggaattcatcctccttgagttgaac

SEQ ID NO: 59931 - DNA, 338 bp, Zea Mays
ctagctttgaacatgtccctggggctagaccgtgaggatttggcctagtgacgcagacgccggattccgcgagcgcggagctagtagctaacaggggtttgatcgattgagacgtcctctgagtgatggatacgtacgttacgtacgtacaaggacacaaggtgcatgatgaatgtgacactggacatctatcgtggcggtacgcgtgccaacttcgtctctccgatccaatccttgtcttctcggcgttcgatttgtgagcacaagactctgagatagatccagctaggaaccgcatccgatgtcctggaatcttattgcatgacccatacgaaaac

SEQ ID NO: 59932 - DNA, 367 bp, Zea Mays
gctgtccttgcagtcaaaagactgcttttgctgctgtcctacagcagagatgctgtgcggattgttctccacaccataaaaaatagaaatgttgtcttccacatgaacaccacatgacttattccatcattctccccctaagtcgtgtgtgtcgccttatggatatgttaagccatcccagacctagaacaaagcttaagaaacttgatcctcccaaggggcttggtgagcaggtccgcaagctgatctttggtgttgatgtagcgtgccttgatgctcccttcacagatgaagtagtacctcacccggatgtgttttctccgttcatggaacacagagttcttggccaacgccagggcggactggc

SEQ ID NO: 59933 - DNA, 837 bp, Zea Mays
gctggctctccaccaacctggaatcgtgggccgtccatggcgacgcccaggcccagctcgacgtccatttcctgctggagctcgcgcagctcggtggtttttcctccgagagcatcaggagcagcgcgatggacttgattaccaaagcacaggagaaggtggcgggtggcgaacaggacgatgccgtccgcgaggagcgctgcggcggctgggctgcagatgctgcaaagcacgctgtgcaggtgctgctagcgacggaaggtggagacgtagcggccgggaacgacgctggggaggaacgcgatgagatggcaaggaggagcagcaatgacgaagaagcaggccaagaggaagcacccgaaggtgagaatgaggatcatgaggatgagagtggggctgccaacaagtccagcgacgagtttgtaagcatggaggacgaggacgaggatgagggcgaagaggatggcgtaagaatgcctgctcgtgcagctttgtcgtcagagagtccgaagcccgggcactcagcattgggcaatggagaggagatggcgaacattcgatcaggccatcatcatcccgagcttgaccaggctgagggcggaggtgacgacagtgtgcaggctgatgacgagacacgggatggagaagggatgtgccatggtgccatacagcagcaggttgaagagcagagcagcagtagctgggaagacattgatggcgaaggaggcggtggtgggaggagcagcacgcggcgtcagtcaactcctcctgtgatggcggcagggaaggatgctcctaccgggagcagaaagaagagggaggcagtgagcagaagca

SEQ ID NO: 59934 - DNA, 511 bp, Zea Mays
atcggagagcaggcgggcagcatggcatggacagatcaggcccatgatgtatgtctgtcgttagagacatgtccaaatccaatctccgcggcatatttgcaagggacagtcctgttgcaaactgcaggccttaacatcatagctatccattgatattctcttgcgtaggatgaagtcatgcatccacttggatgtcgtatatggagagggagatcagcggtgctgcatacctaactgaagccatctcccaagttggtgccatgtcattttctttcatgttcgtaactgcatcgcctgtccctgcttcatgtgttgcgacgaaaaattcctgataatcatgtatttggacgcgtaatacagtgtgtacttatgatggatcaggatcactgaagtgtaagttgcaacaatacagaaataatactgtgtcacaaagtggaggacatattgtcactaaaagaaataaagagatgtatcttgttactctccctcagtcccgtccgttccaaaccgc

SEQ ID NO: 59935 - DNA, 733 bp, Zea Mays
tatagtcctctagaggatcacttgggagttgtgagtgtagaaaagtaaaaaaaactagtcgagataggcaaaccggtgatcatatcgcttgggagttgtgagtgtacgcactatcagataaaaatgccatgccagtgagcgtacgcacaagatcgcttggaagtgatgtctgatgacctggttcctcaaaacaaacaaaaaatggattcactctatttccctaaccaaacacaaagaaagaaccatccgatcctctgatgacctggttcctcaaaacaaacaaaaaatggattcactccattttcctaaccaaacacaaagaaataaccatccgatcttgtgagaaatgaatccattctggatcaactggttccggatagagtcaatcctctaaccaaacacgccaaaagttcttcggtagtgcctcagtctaatgagatgatatcatattacgttaccatgttttctcaagtaggttcaattgtcacaaagatggaccataatccacaggaaaaagatggtccgtaatccagggctggcaggagaaattcatatcgaaatttggtaaataaattagtataaagggcgtagcacaatccatcccaacctataccatgtcctgttttgatgtcacaaagggattatgtgatgagctgagtataattattgggagatattggtggagtcatcaggaccaaacaaataagattcattggctgagttaggaaaaact

SEQ ID NO: 59936 - DNA, 527 bp, Zea Mays
tgaaacaacagggaccactgctgcaggtgtgaatggattatttgcttttcgttcggacttgttggggtttcatccgaattaactaacgaggcagaccacaaagaggtaacaatcgatgcctgagtttcttgatttggtttggttcaaaaacgaatttcatgaacagtctcctattacttttttttcagtggaaaagggggcactccgtactctatctaattcagggagatttgcatgagctgatccaaaacagaggatggccctgttcgatcggaaccagaggcagaggtcgtcgttctgctccacggcgaccttcgtcgtgttcgtcgcgctctgcctcctcggcatgtggatgatatcctcccccgagaacgtcccgtcggccatttccttgtcctcggagaaggtcgtcaagtccgacgtcaaagaggaggacagctccattgacgccaccaataccgtcaagcaggacagtgccaacgtcgtctcagaggcgaccacggacggtggcgctgccacggagagcg

SEQ ID NO: 59937 - DNA, 979 bp, Zea Mays
gtttgaagaattagtcaaagaaaaatggatcgagaagttaaggaaacgacctgtgggaatctattcaattgaagggtggcatgggagcttaacagcgttgaggatgttccttaaagggtggcataggaggctgcttgggtataaaaagaaagagaaaaatgatctcatccaggagctagatcagatagatatattgatagaggatcaggttaatctatgggagaactggtcaaaaagactcgcgatagagaaaaagcttgagcatatttatcatttagatgaggtgttctggcagcaaagggctggtagaaaatggactgttaaaggggactctaattctagattttttcatctatatgctaatgggaggagaaggaagaatacaattgcctatttggaaacagacaagggggtctgtatggatcagaaagcactgatcgcccacattgtgaacttctacaaaatcctatttggtccgaacacaccctgtaatatgaagctgagtgaggacttttggagggacagatcaatgaccagcaaagaggaaatggaatccctggccaagccgtttgaggttagtgaaattaaacaggctattgatcaaatgcacaatgagtcagcccctggcccaaatggttttggtgcctctttcttcaaaaagttctggaatcttattaaagaggatttgatcatgatgttcagtgacttttatgcagggaagttggatatccaacgtcttaattttggggttatcacgttaattcccaagattaaagaagcaagtaatattaggcagtatcggcccatttgtctgttaaatgtggattttaaaatcttcaccaaagtgctgacaaataggttgtctctagtagccaaggaggttattggaggcagccagacaggtttcattaaagataggaatatcctagagggggtggttattttacatgagattattcatgagctgaagacaaagaaa

SEQ ID NO: 59938 - DNA, 471 bp, Zea Mays
gatgaaacaaggaggggctgcaatgcaatgcggcttgcaacctaatctagggctagcgtggtgagagttcacacaaggcggctagcgagagcaaattgagtaatgtggtgtctcgacttgtaatatgggaaaggtgtatgggatagcggcggaaacaactaacagcgacggagcggttgaactacgattacgacacgacctaaaccagcaacaagactcgaacacagacacaaattcaacaaagcaatctgaaacgaaattgcaaggctaaacaaggttataggacaacagaatttttttatggcaattatctggagttataggatgaaaaacctaaactaaactagggtaagcctgatggtaatacctgagtctttgaataccacttgataggaatgggggtgcccgatcttccgtcaggtgaagataactatcgatttggtggagatgtcacacagacgatccggcttc

SEQ ID NO: 59939 - DNA, 1165 bp, Zea Mays
tctctcaagcatttctctattcttaaattattgacgggttgtactgaatggtgtaggagctcatacacaatgtcatcaaacaagctttacgtcatcttatttttcatcttacttgccggcttctcttgctcatggacaaaccacaacctgtaaggtagtaacagctagctaggtgtagcatgagcatatatatggaatcccccccccccccctgttgctctgccactgatcacacacccacaacactcataaaagaagaacgccacagtctaagtggataaaacagcccagattcctcgagtacaatattgagtctttactagtcaattctcgaaaagggtttgttgcttgctataaagttcactgttagtcctccccctccgtaattttgttggatatctttgtggaaatagtgccaaagtagattaggcattagactatatataaaaaaatacaatttgacctttgcaacatgttcttttccctcctgtcttttctgacaactgttcatgtgcatatccagtcaaaaacagataactacaaaattttgtttaaagactactgggaaggaattaaagatgcagaacatttgacattggttgacctggaagaagctagtgatattctgaacagaaagcttaactgtaaaggagcaactttagagagatttccagctgatgatcacaagttagatgaaaatacatctcctgataatggtgctaatgatcaaacaagatttccagctgatgatctcaagacacatgaaaatacatctcctgataatggtgccaatgatcaaacaatttcttttgactctgagggcaaacagattaaagcaaacacatcacggaacaacaagtcaaataagagaacctatgttgggtggggttccaaagagctaattggattcttgtcaagtttgggaaaggatacgtcaaaatctcttgatgaactcgaaattattggagttgtcaaggggtacatcaaacagaagaaactgtaccaggatgataagaaacttcgtttcttgtgtgatgataagctgcaacccctctttacaagaagaaaagtgagatgtaaaatgatccgtaagttcttggcagttcatctagcttcaaatgctatttcagaggatgaaagattttgtagttatgaagatgacgat

SEQ ID NO: 59940 - DNA, 388 bp, Zea Mays
ctcgaattgtttattgtcaatctacatgcttactcgacccagggtgaccactataccccacgaacggagcaatcagcttaagtcggcaatgacttaaggcggtgtgacatgctcacgcttacttaacctagggtgaccactatgtcctactaacggagcaatcggcttaagtcggcaatgacttaaggcggtgtgacatgctcacgcttacttaacccagggtgaccactatgccctactaacggagcaatcggcttaagtcggcaaagacttaaggcggtgtgacatgctcatgcttacttaatccagggtgaccactataccctatgaacggagcaatcggcttaagtcggcaatgacttaaggcggtgtgacatgctcatgctta

SEQ ID NO: 59941 - DNA, 322 bp, Zea Mays
aagtagaccaaacaacagcaggcctcctcacgggggcaagaaaatagcatacaaaaaagaactcatcatgtgaaaggaacaaacaacacaccaccctagggagcagctgcagaagcagccagagaacataggcccttcgccccagctgcctcccaacgacttcttcctcgtctgcccaagcaaggatataggtgaggcaaggagacaatccatcgaagacacatttgttccgatgaatccaaatagtccaagcacccaggataataagggagttaaggccttttctggtgacacctgagaccacctctgaaacctcctccca

SEQ ID NO: 59942 - DNA, 600 bp, Zea Mays
tcattaaatcattctcacaaagaaaacagattaataaatgttgacctgactgatactcttactatacaagttggacaggctctctatgtttaaaccagtcaacacttctgattggggcagagggatgagggttatcgatgtctaaaaccacgggtctacggtggtagttcggaacgatgaaacccaatcatgatatcccatccacaattagttacagaaaatcaatacaaagaattcaaatacaacacactaccaacctaataactgtgtgatagtcatgctcaatcatgcagcctccttcctttcttgttcttcgctttctctctgctcaggcaacccaatgctggtggtcatgaatcagccgctgctagccaacatctcacaccaggcagtagtgaaattgattgtgcgcaatgttctcttctcttgtgtgctcccagttttattggcgaaggcttaatcttgcatcagatgttgctgcttcccaagtcgtgggggtcatgtcaaattgtcaacgattgttggtagtcatgtactcatgttcaatgttagatgtctcccatgtctcagcaacataaatccacatcatctccatctctt

SEQ ID NO: 59943 - DNA, 450 bp, Zea Mays
aatccggttatcaaaacagattttaatagattgaatatcggctaatggcgtggtgttacttacgattgggagctgatgtagcatgggtgatagggaatcatattttacttccctctccttgacgatcttctggtgatgatctaccttgaagtgcgagaggtgccacttttccaccaacttgcttatctgagcctgttgtcgttggaattcctcgtccagcctttttatgtggtcttctaattactcgtcctcagcggctcgcgagttagtcaaccttatgttgatgtctgggcaacattgttgtgatctttgggattggccattgcggccgatctgatagttccaatttaatagatctaatccaatggatcagatttgatagatccgattttcgtccctagcggagtcgacaaaaagtgtgttagtgcctttttgagagcacctagaggg

SEQ ID NO: 59944 - DNA, 864 bp, Zea Mays
cttcttgcggccttcctgctgctctaaatagatggtcttgcccttgacctacctgaaggagcgaggagggtcctcgttgtctcctccccggctccccctggcaccgacacattcttcgtgcacaccattttgacctgaaaactgcatagaagagagataaactaagcacgagacgatagcagccgataggattacaaaagagtggagaactacctggaaatctcacgagagagggagagaatccagtcaggacaggagatggctcacgggcaggcaaggtcactgaaatgacagaagatgtgaacacgtattaatcacatagtcataagtatatgaaatgtgaataaatacatacatagagtgttatggcacagaaatcgagtgatttggcgaaagagaggtcaaacgacacgaaaacggcgtttgaacgaggaatagtgccataggaggtttgaaattggaaatgaagcatgaaatgacttggaattgagacgatacttcacaaataggtttatatgggtaaatatgagtgaagtgtgcgcttggtttgattttaggcgaagaaagtggaatttgggcactcggctcagaatcgatcgctagaaatagagatttgtgtaaaattgaagcctaggatgtcggattggcgtgagattttgcgaatatgttactggaggtatcatgaaggcgtctgaaaattttgggttcaattggagcatttttggctggtttgggtatttcaccaagcgcgtggcgtgcagtgttctaggtttagagtgaaatgcctatttgaggtggggaaaccctcccaaagggagctaggaacctgcagagatactcaaaaggcagtagggcccatagaca

SEQ ID NO: 59945 - DNA, 362 bp, Zea Mays
gattttaccttctcaattttggccatgagacaagtgtggaaaggaagatcatcatcatcggataagttgttgaacagtatcaaggtgttgggtgactcttgtatagctattattgcaatcttttcctcctcttcacttgagctattctttgatgaatcccattgatgtccaatgtgtgcttcccctctatattttcttattttgtcaaatcctttcttttccactttcttatgttgcttgtagtctttcttttcatgaggacatagagctataaagtgctctgtacttccacaattgtaacaagttctctttttcttgtttggaaaccttatcttcactactttgtatccctccttcttaag

SEQ ID NO: 59946 - DNA, 682 bp, Zea Mays
tgcagcccgacgcctataccggtatcttctctctcgctcactctctctttatgccatgtggggtccgtttgtaaggtcttcttctcccaacaccagaagttggacgctcgctcgtacgtctctatgtgccgtcggttctgttgccaccacgttgctgtcagcacagctcttggtgttgcgcctcctccccttcccgccactcgcatgctaagggtactgacgcgcactactgttgtcaccggaaactgttcgtctcctaataaaacgtcgacgccatcaatagacagtaacgtcgctggatctgtgtataaccttcccagcatcgccttggctcccctcgctcggttataaaacgtgccacactatgagctctccctcatttccctgctcgctcacctcgcggcttgttgctgctcatggtagcacacgtcgtgcactgctgcttcttgccatcgtcaccaggctctagtgccgcagctcaccggagtagtcgccctgctcgcgccgtcgccgacgttgtgcctgatctctgtcccagcgccagcccctgctctgcaactgcttcgccatggttatgcgcctcatcagaacccgttgtgcctcatcgtcaaaacctcgctactcgtggccgcgccatcgcaccagcagctgcgccgtcatcgcaccacgtcaagcaccgtca

SEQ ID NO: 59947 - DNA, 648 bp, Zea Mays
tggataccttgatggctgtggagaaggtcacggagaggatgagtatggggtggagaaggtgttggagcccttaatgacgatgcttgtggcgggtatgttgggtcagaaaaaggatgaagagcagcagatgaagtttgaggaggtgaagatggtttagcaataggatctgtaggtgatgactcttgtgttaggggttgggcatgagacaatgacggtggtggatcaaccaattagacatcccgtcaaggacaaaggatgaaattcttgatagcctattcaagtgtatcaatttctttgggccagggttgtctagcatgtcatcgttggatccttggacaaccgtcgtcacttctactctgcaataatcttctggaatgtcgtttccatggaacttgtgtcttgggatcgcaaggcctgtggctactttctttgtacgaagattgttaataccatatcatataactagggtgcacgccataggccctatgatgtcatcaactgaatagtggtccttattcaagtagaagcgatagagcttgggacggttgtacaatctgtggaagatggcgattgagttgccgaaattagttgcatttttggagcttgagtggtcatctgttgaatagatattgcactcaccaattgctg

SEQ ID NO: 59948 - DNA, 501 bp, Zea Mays
agccaatgtggtagcagatgccttgagtcagaagttgcaatgcaactgtgttatgatggattctcgcattgacaccttgtgtgatgagctgagcaaaatgaagattgaagtgattccttctggtgctttgtctcacattttccattgagccagctttgcaagaccagatcatcatggcccagctcagtgacaagggagtgcaaattattaaggagaacatccatcagaagaccgagaagtataaatgtttccgccaagatggaaagggtatattatggtttgaaagcagattggtggttcctaaaaaacaaggatctcaagaagaaaatcttggatgaggcccatctctccaaattctccatgcatccaggaagcaccaaaatgtaccatgatctgaagcccttgtattggtggaccagaatgaagagggagatagcccaatatgtatcggaatttgacaactgtcagaggataaaggcaacccacttgaaatcagctgga

SEQ ID NO: 59949 - DNA, 857 bp, Zea Mays
tgcgataggagcgccaggagatgcgccaagagagagaggagatgcgtcaggagaggatggggcaacagcagcaagtcccatttccaccacctcgaccaccacttccaccccaggacaagcaccggtaatttatgagccacaagccgcctaccttagccagctcttcagatcctctgcacgctgacgactggttgaagtcagtggagaaaatgctaaacattgcccaatgctctaaccgggagaaggttctacatgcttctggtcgtctgactggtcctgctgctgactggcgggattcttatgttgctgcccatgacaatgctgacactattgcttgggcagaattcaccacatagttcagaaactaccacattcctattgggctgatgaagattaaaaagaaggaatttctgtcattgaagaagagcaacatgtctgtcagcgagtaccgtgatagattcattcagctatcacggtatgctcctgatgaggtggatgatgatgagagaaagcaagagcacttcaaagaaggactcaatgggccactacagtatgcattggttgctcataccttcccatcattttagaggctgcttgataaagctctagctattgaacacaagcgtgttcaactaggagacatgaagatgaaggccattgcccaggggaagggtagcagcagtgttcgctctcgctacgtgccgccccagggtacaccagctcgtccaggaggaggaccacatccagctcagtatgctccataggggaccccgcagacaccccacactcgtcaggctgcccccactagcaccccggcgaggcctacaggacagaagataggccctacatgcttcaag

SEQ ID NO: 59950 - DNA, 582 bp, Zea Mays
aatgctttcgtcaggacagcaagggtgttctatggtttgaagaccgattggttgttcctaaaaatccagaactcaggaagaaaatattggacgaagctcatctttccaagttttccatgcaccccggcagtaacaagatgtatcatgacctcagatccttatattggtggacccggatgaagagggagatagctaagtatttatctgagtgcgacacatgccaaagaatgaaggctagtcatttgaaggtagcaggtaccttacagcctcttcccatcccttcttggaaatgggaggacatttgcatggatttcattgtgggtttgcccaacacctcccggcaccacgattctatttgggtcattgtggataggttaaccaagacaactcatttcttgccagtccataccacccacaaggcagagaaatatgcagagatctatattgaccaaatagtgcgtttgcatggaattctgaggactattgtgtctgatagaggagcactgtttgtggcacgtttttgggagcagctccaaaagtcacttggaaccactatgattagaagctcagcataccatcctc

SEQ ID NO: 59951 - DNA, 548 bp, Zea Mays
tgcacatctatcagctttccatcgtatttttttatagtcgatcgtcagtttgtatttgtgtccaacgtagtcgttgttcttagagataacgctcgagtgatgactgctggtgtcttcagaggtaacgaccgaatggttcttggcgacatcagtgttttagattgtaacctccgagttctgttgagccacgtcggcgttatagaagtaacagtcgagtggtgcttggcgacgtcggcgttttagaggtaacaactgagtcgtttcgagccacgtcggcgttttagaaataactgccgagtgatgactggcgacgttagcgtttttagagataacagccgagccgtatcaagccacgtctgtgttttggaaacaacgaccgagtgatgactacacacttttagaaacggtgtctgacctgggaaaaccccatttgtatcacgacgccggacgcctctgcattccaagccctagcctcacttttgcctccgggtttcctctattccctttgattttgcttccactccgcccgccaacgagattgccatggc

SEQ ID NO: 59952 - DNA, 440 bp, Zea Mays
tatgacaaaagattgagtttatgaatcattatttcataagtttaccacatcattttccctttattgaattgcgaacaaaccattacaaatgtaccttcgaagaatacatattctacaaaatatgctaggatactcgaatgctcgaaagcttcagaagtggagcgatccagaatcgctgaggcgtgttctccatgtttttcccacttctcccgcttgtgcactgtttacctatttatatggatagtttggcgtacaaccctatgtgaaattacaattatgacctcgaaacctatacatgcaactatgtaacctactaagggcatctccatcctttcttccagaaatagtagcgtacatgctgactagttcttctttcatttcctcgctacttgcttcgagtgcgacaacgtgcttcgtatgaacgttggtgctgaagtttc

SEQ ID NO: 59953 - DNA, 283 bp, Zea Mays
ctcacacggacaagaatttttcaacgatagaattaaaaaaggttccgactctccgatccatctacagctcggtgacgccgtgtgacggcatggtctataatcttttgctgtgctctgccatgctgcgcatgggtgcgtccacggtgacgctctctctcatcttggtatggcaggccaggcgtctttagcagccacaacctgctgcttggccactgaccatttcttctagacatgcatatgtgttatgggtgtgccggtgcccgccgcccgtgcccacatatac

SEQ ID NO: 59954 - DNA, 1210 bp, Zea Mays
aaatcctaccccccttaaaaataatctcgtcctcgagatttaagaagatctagggaaaagatgggggaagtctatgcgaagctcttcttctctttcccaagtagcttcatcttcaccatggtgactccattgtactttgcacatctttatcaccttatttcttgtaactcgagtcaacgtgtccaggatcttgatagggtactcagcataagtcagatcatcttgaacactaaggtcatctattggcaactgctcctcaggtaccctaaggcacttctttagctgagatacatggaacacatcatgcacatctgacagatgatcgggtaactccagttgatatgcaacttcccccactcgctttaagatcaagaaaggtccaatgaagcgaggggacaactttcctttaactttaaatctcctcatacctcgaagtggtgacaccttgaggtacacatgatcaccttcctccaactccagtggtcttctattatcagcgtagctcttttgcttggtctgagctaccctcaagttctccttgattatacagacttgttcttctgcctcttgaataagtttaggtccaaagaactgtactcctccagtctggtcctaatatagaggagtcctgcacttcctgccatatagagcctcgaatagtgacatcttcagattggcctggtaactattattataggagaactcaacataaggtagactcttgtcccaacttccaccatgtttaagagcacaagctcttaacatatcttccagtacattgttagtcctctctgtctacccatcagtctgaggatggtaggctaaactaaaattcaactttgtatccaagctctcatgcaacttcttccaaaaccgagaagtaaactgtgatcctcgatcagacacgatcttcttaggcactccatgtagacaaactatccgagtcatatacaattctgctagcttggctcccgtgtaattagtcctcactggtataaaatgagccacttttgtcaatctgtccacaatcacccaaatagagtcatatcctgctggagtgtggggtagtccaacaatgaaatccataccaatttcttcccatttccactcgggtatcttaagcgggtgcaatagtccagctggtctttaatgttcggccttaactctttgacacacgtcacacttagccacatgtgcagcaacatctctc

SEQ ID NO: 59955 - DNA, 556 bp, Zea Mays
aaggggccacgtgtgggcgattagctttgtgaactgcgaagggtttcccgagcgtggagagaatttctggcaggcttcgcaggacctcgtcacccgattcacggcgcaaatcatagcaggccagtagaagccttgatggatcaccttggcggctagggccctgggccctgcgtgagaatcacaagtgccgctgtggacatcacgtaggatctggacgccttcggtctcggtgatgcatttaagcatgggttgactgacccccttcttgtaaagctgtccctcaatgagtgcgaagtcctggcttcggtgtttgaggcgctgggcctcgttgatctcacttggctggtagtatccctgcaggaacagggttattggtgcccgccagtcttcggtcatgatgaggttgactatgcggtggccctcagtgtcgttggttatttggaggccctctaggcttcggacggctggcgtgccgatgacatggtagaacacgtcggagggcaaggcctcgcctctagcggctgccttggccaatgcgtcggcctcctcattcttg

SEQ ID NO: 59956 - DNA, 500 bp, Zea Mays
gaatttactgcgatgattaaatgcaaaccatgtgaacggagaggcctccttggtcttagtgcggaaggcttaaacgatgaagacttttggatggagggagtagtttgaaggctttgataccacttgtcactgttcaaggcagcgggagccgggagcactcgtctccctgacgtgagccagtgacgggaagaactctcgttagttcgagccaagcgtaggatcccaggtaagattcagataagtatttggtggttgtgattcctgttattcatttcatatccttctcccaatacaaagttgagtatttatactagttacaatgagacccataactccctactaaaccccttctcaactccttaatacggactacaaaccacatagtacttacatcttcatcctagccaagatttgattgcccctaatcaagcacctatggaaatcttttcttcaaaacttcaaaatccccccacgtcaaagcatcctctggtagattccac

SEQ ID NO: 59957 - DNA, 566 bp, Zea Mays
gacttcggtttctcgtatgtcagaaaattggcttttgcggataaatcttaaagtaaggaaaaccattctcactggcgcagctcccatatgttgggctatccagcgctctcgggatgacattcgtttagcaaagcaaaatacgtatctttttttgtagacagtttctagagaaacgtactagttgcggttctgggctacgttgcagtttgaggagataaagatagctattcgtacaacatgtttgtcgcatgccacaaatggaaattagataatatactttgtctttcatgatttattttgctttgtttcatgtgtgatggttagaaggttgataatttgtaataactgaatgttgtatgcggaagcacagagattggaattgtattcctttgttaacaacatgaaaacataggttttattagtagccccgcctgcatataagatatggtcgtttggtgaggtattcgaatttgagtcatacaaacatatcttgtaggaaagatcccaaaccaatatagcatgatctactatatctatttatttggctgctagataaggcactaccg

SEQ ID NO: 59958 - DNA, 318 bp, Zea Mays
tattaagggtattgtattcgcacaagagggtattagagtacaactattggatgaagacgctagtgggctagctaatgatcttttgtgataacaggtttcctataatcccctctattcaaggaatacttaaacagtgtttatgtccactcaagtaaaacgccacacatcaatttgccacatcgtttctcaaaataaaataaagaccatggaaaatttagccaaatcgagtaagagaacagtccaaacataggttaaggttgtaaggcacctttttccaccatatagatgataaaaagttggaatataaagaattcaata

SEQ ID NO: 59959 - DNA, 469 bp, Zea Mays
aaatccaaaagagtcaattcgtgcagagagggtgtaatgaagactttggtggcctggtgcaccggaccagttcgatggtgcattggatcccgtgcgcagagagctctgcaaaatggctctagtggcctgacgcacggtaccgattgcgcagagaggtctgcggaaggaagagtccaagctaatggcacaccggtccagtccgaagtgcctcgggccagttgcgtccaacgaaaaattcatcgttcaatggccggctccaatggctagtagttgatgtgtgaggacacgtggcagggtccggtggtggactggatcggtccggtgtcacgcgtggcaaggagcggttgggacagaccccgttgatttaggtgaccattattggagatccgcggccggcactacacttctttgacggatgatttgcggccgtgcttgcaagatgcatgctttatcactatggttttatctt

SEQ ID NO: 59960 - DNA, 530 bp, Zea Mays
gtccgcgcatcacggcagaccgtccgaacacctcaccggacagtccgcgcataacgccggaccgtccgcgcacgcgaccagcagggggtatgtagaacgtaataatagttacattcagcaacctatacccccgcctcagccaagcttccccttacttcccaccccacaaatgcatggaggtgaccattttttcggccaccataaggccgaaaaaatattctgatcaacaatatgatatgcctggagcaaccattaatgccccacaagacccaaacccatgggcaagaaggcaacataatacccaaacacccacacccatgttggaccaaaggaccggtggactaccaccggccaccattgacatagtaagggaagaaatagctggggcgttccgagataagctcggagttaccatggcccctggagggcagtcatatcggaaaccctatgacagccgatttgactatcacccgtacccgcagggaacaaggatacccaaattcacaaaattttcgggtgaccaaggtaag

SEQ ID NO: 59961 - DNA, 791 bp, Zea Mays
gcgtttggtactgtctgcttctttattggtacgagagatttggttcaagagcacatagcatacagagtatggccgcttatagagagctgggaaatgccgaaggaggccatcaccgaatctagtgaagatgaactggtccggctaaagtacacattcagatacggggataaattcgatgaaccaaatgatgactggctaaaatgcatcgaagttaccagtgatgaactgcttggatcatattccaaggcggaagacaatgcactatccacaaccttcggaggcaggggaaaaaagagattgaatagagtttttgatgccattggttttgtctaccccgactaccgctatccactgcaaagtcagggaaagaagaggaaaactgctgcttcggccactccagtcgagcctgcgtcgaagggaaaaaagttaaaggtccttactcaccggccacactatattgaaccggctgtggtgcctgagtttggcggggaggcttcttcagctgctaaaccaagagagcccattcctcctacgcagaagactggagagccggctataatgccgaaggcagcttcggttgatctagctgagtcgaagactgagaaagataaggttgaaaagccaaatattgaagaaacaaaagcgctagaaattttaagcccttcatcagaagtaacagtgccgaaggcacaaaaaagttctgccgcaactcctaagaggagaaggatggcaaatgtactagatgtgttggaaacagtaaagactttgaactctactccttcaagaaaaac

SEQ ID NO: 59962 - DNA, 620 bp, Zea Mays
caggatagagaatttgtccgacgtcgaggatatgtccctagctagccttgatgaccttctcaaggaatttggggacactttagaaaaagagttcggaagtacctcagagaacgctcgcgtgtagtacgacttgtagtagctgtatgcttgtaatgaattggtgtaatgaataaaataacttggttgaaaaaaattggcatatgcataatagtgactctctccccctggcagatggcttcggataaaaccacgcctaccgcctccgggattggagcagggtttcccctaagagctgaaatagaagccggtagagaagagagtgagacacacctccccgcacctccagaactacccttagatttagcccaagttctagccaaccaaacccgactcattgaggtcctcactagaagtctggaaaatcaacgcccgaatggtggaagaccacaagacaggatgggagatttcctaaggctcaagcctcccacgttcaccggatctagcaatcccctcgatgctgacaattggctacgcacgattaaaaggaagctagaagccatcggatgcccgaaaaatcagcgtgttcaactgcctgctcatcaactttccggaatggcctt

SEQ ID NO: 59963 - DNA, 469 bp, Zea Mays
aagaaatcatcttcactactcccattgaaaaccaaggcacccttcggatatttcaaatttcgtgcatagtgcctggcttccaaaatttcttcttcggacaatttcttccccgaagcgtgtcgacaaatgtagtcaacattttcgattaaagctttgggggcaggaatctcaatcttttccggagcagtttgctctgtcgccttttcttcaggtgcggcaggtctgtctcggtgggcactgaaggcccagcttcggtttcagcttgaacttgtgtagcttcggcttctgcttgcctagtttcggtttcagcctacgatttggcttcagttggagcgactttctttgcaggagcagggctcagcgcctttgtagtctctagtacaacatccagcacattcaccatccttctcctcttgggagtcgcggcagaagccttttgcatctttggtagtgttgcctctattagagg

SEQ ID NO: 59964 - DNA, 501 bp, Zea Mays
ttcaattgtaaacatgcatatgcaaagtctcaatgtccacatgagctccccctgaatatgacatcccccaacttctcttctcttctctcccccttttatcaattgccacaaataagggatctcattgatcaccaggtggagggtacatgctgtagtaatgagtgctgaaggtgtcgaagagagaggagaactgcccgaagtcggtctggagctgttgttgactctgacggatatcctaaatgctttcattggtggataggttgtcaaattgactggacaaggctcccatattatcctgaaaactctgttgcatgttgttcattctagccataagaggaccatgaatagtttcttggatgtgagagcgaaatttagaaagctcagagttcagcgcatcaagattatcatcaaagtgagactgcatggcatccatgcgctggtccatatgagtcatcatgccctgaaagcggccatccatgtgtgtctggagcccttgctgca

SEQ ID NO: 59965 - DNA, 469 bp, Zea Mays
caagttcacagtttaacttcataccataaacaacaaaggattttggaaaacccttgacaactaatatgagctttgtgagaagaaagcagctaaccattaaggaacaagatgcagctataatttagatgtttaaaactaaacaactatgaagatcaattgccctacataacactttgcagctaaattaaaactcatcaaagctgactgtttcctatagattatctatactctatggtgtcgattctgttctcaaaaaatcaagataaaatcgtatcgatccatgttggttttagtactgatcaataagatattgggaccgagatgtggatactctgctggaaaccaggaacaaatgaaatggagaagatcttttagactggagatcaggatttggagggtatgctctgaagttgggaatgatagatcaatccagagaaagagaatctgtgcatcaaggatttgaaacaga

SEQ ID NO: 59966 - DNA, 513 bp, Zea Mays
gggaaggaaaaattgggggaaataacttggagtacggtgaaatccgaccctaggattgtgatgagaacatctattttacgattccgacgaggggaaggggacaaaaccaggttaccggttctacgctaccgaatgaaacacatcacagagattagacatcggctacaattgattcatggtgaaacatggaagaccgaggggtttctcgccaaggggaaaggaagtacagccgatgaaccatcgatggcgaggacgttgatgctccagggatggcgacatagatgacgctcctcctccccagttgttgcagggtggtaatcatcgtcgcctagggatgcctcttcacctagggaactgaaactcctccatgtgcagggatagagcgaaggggaactagcataggtgcgagcaaatggtgtgatcgaggagggggaatgtggatgatcgagcaactgataggggacatgggagggaggggttatgagggcgtaggagttacggcgggttccctcg

SEQ ID NO: 59967 - DNA, 461 bp, Zea Mays
gtctaatctgctcacgaagatctgcgtggaacaaatcaagtggcttgtcagccctataatttgccacttgtgggaacagatctcgacgttgttttctgagtgcacatccgccatagaattcttcctcttgattcattagtgacagcccttagaccatccctttcacaccgagttgttggagtgaccaaaaattgagatgtccatagcaagcatttcatagccaagcctcatcatccgcctttgccaccgatagacaggagccgcaagctgcatcttcaacaaatacaaataattcttgatatgaggtgctcgagtcggtagtgagcgcttgacatcaaacaaactgtagaattcatcctcaattacgatcttgcagctagaagtggttggaaggtgcatcacatggatgtcaaatcagcatttctcaatggagactttgttgaggaggtatatgtcgaaca

SEQ ID NO: 59968 - DNA, 330 bp, Zea Mays
ggcgaatgtacttcgatggctcgctgaagctgcagggagcaggtgcagggatcctcttcattgctcctggaggtgaacaactcaagtatgcactccagctattatttccagcatcaaatattgcagtagaatatgaagcactgatccacgggttgaacatcgccatgtcactgggcgttaagaagttgatggtatacggagattcactagtggtcataagccagataaataaagattgggattgctcgactgattctatgggcaagtactgtgcagccatccgaaaattagaaaacaaatttgaagggttggaattccaccacgtggaaa

SEQ ID NO: 59969 - DNA, 432 bp, Zea Mays
gcgggttataatatgtagaatcttgggtcatatttgtaaataaaagggctgatttgcgatagtctttacacatatgaggaccgcgggttgatttaactatcttcgggtgtccatacgcaaaatggcgcacgcgaaggggtatcctccaaccccagccgatggattcacaacatgcggccgagattagatctcttcaaaattggcacggtacgccaccgactctattggatctaagatgaatgtctaccacttaaaacaacagaaacagcccctaggagcacgatctaaatctgatggtcgcgagcccacttgacgatcgacggcccagcttcgcccgaacgaagcaatatccgattgatcaaatccaggtcgcaatatctgaaatcgacggcacacatccacttaagccgaagtgttacggttcatctaatc

SEQ ID NO: 59970 - DNA, 662 bp, Zea Mays
agttggggttcgcaccctactctagtatagtgttgaagtagtattgcaacggaaagtgttacaccttgtgtgcttgtgtctgtagaataaagagggcctgcccttttatagttcaagggtaataccttacaggggtgacttactctctacctggtatgaggtcgatccgttgcctcggcttgacgtagtgctcctagtgttgtgatgtccgtagggtcgtgcatagtcgtgatcctagtatgacgcatcgtttcacacatttgtcatatgggtccctgtagcaagtccactcctgacatcttcgtaatagtgcacagtgagtcctgtgggtcagtcccatgacacagtagcgtgtagcgtagcttcttttgtcatcatgggcctgcgtcacttgccagtgtgtaggcatacacccattatggtgtattcgttacatctttcttggtatgtcggtcactatagagactctgatgttgagatcccttcgactaggattgactggccctattcgctggtgggggtctgcttgcgacaatacgtagtgaggtgtcgtttgacgtccattggggaccttttaacgctatgctcaagacttgggcgtagtctggtgatgacctgtattgtctcgccgacgtgggctcgcatcattgggtcggtcgtcc

SEQ ID NO: 59971 - DNA, 345 bp, Zea Mays
acatacatatctttcataagctactagtttgtttaagagagacaacctagagcaaattagagcaagtgatcacttctgctacacaaacatctttgctctagttctgattgcaagttatgtcgaatatttttaaaggctattcacccctctaaccagctaggttcttttatgcacccctactagtatcgcttaggtaggcatgcatgtcatcgtgggccatcatcgtgtgagcccgcacaacgccttctgcaccaataaggctaatgatagatgttataaccacatggcataatatgggttgtatactattgagaggccatttgaatggccatttcactaaccttc

SEQ ID NO: 59972 - DNA, 593 bp, Zea Mays
ccgaaatcatgagaggaaggtacatgagtcagaccaaataacacacaacgactaccatttttgggtgggtttaggacctatcctcttccttttaggctttgtagttgtgaattggttaataacactccacactgtacatgtttgtcatgcatgatgatgatctacgttcttctattacctttgaaaatgggtgacgtttgaagaagggctgtgtacgatggattcaacggtaactctctagggcactctgatgcatgggttaaggttgctgatgaattcatggcacgagcatttgctggcgagcctcgtgtggagaaatgtccatgtaataggtgttgaaatgtgatccgattgaacaagtttgatctctccattcatatttgcaaatatggctttaagatgactatctggtgtggcacgatcatggataggtggattgttctttggaatcaaacacatatgaggacatatactaaatggaggacaatctaaattacatttgacatgagtatccagcactagagaccaaccaccccccgtaggaggaagtgcatcagttttacaagttgctagaagcctcagatgcaaaagtg

SEQ ID NO: 59973 - DNA, 380 bp, Zea Mays
aaaccatcttcctgcgaaattagtggcgacaaggcaacaaatataggtggaatatgaagttatatatggaatctcacaacctcaccactcttaccaaccaaagctcttatgaggtccctgcgggttgcaagaaaaatgtgtggtggtaacaagaaagtgatggttaagcgaatacaagaccagagtaccgattacgatgacttatatgtggagcttgctggggaataataaacaaggaatgcaatctgaattctagttgttgtaaagttaaataacaatccaactagaagttccgtgcctagtgctgaccacaagatacgagtgatgtatgtagatcaaacacacgcgcaaagaaatttcagatttgatgcaaacaagga

SEQ ID NO: 59974 - DNA, 1318 bp, Zea Mays
agggcaaagaaaagcctaataagagaaaacttcaaaactcattagagatggtcataaaatgtcaccttgaatagacttatgggatatccaaaccctagaattatcaaaagccctaaaaagaaccctagaaagccctagatttaaaccctaggggcctaagtgcaaaattagtgcacttttggactaaagtgcaaaaaccatgaaagtaaggcaccttaagtcatatggttcacaagtatgtggatttgcaagttaaaccttaagatttggacttatttgcaaaaagtcctattggaactctattggctaagtctgaatttcagtgggattggctctactttggggctctatatctcctaagttataaagtgtttgccctggatcaacacatcaaacctatagagctatgaaaggagaacaattcttattaagtgaccaagcactgatgatgtgtaacatttggagaaaactagacccaaagacgggctgtcagactacttggagtctgaattcagactgacagaggaattgcatgaacttagggctcgaattcaatcatgatccaacgggaatttggctagggatgttgtagcaaaggtgaagatgctttgtagggctacaactttgctgcagagcattggttatgttgccatggaaaatttggagaaaacctgccctaaacatcgactgtcaggctgactgaataggattccgatggtacagtgaaccggataggatcaaattcagatcacatcgccgccgacgagctgtgcgctcagattcgtgctcgccgttggcgattcacgctcggatcggttggatagcttttggggtcattaaatatcccgctgtggatatgctccggacactaaattactccgaccaccgtacccgagctagccacggcggattcggatgagtttgccggtgacagtcgcctcacggccttgcgccacatgccttggcacatccaccgcatcgccgtgactcgcattaaccctccattcatcgccagggagcttgccacggtaataggacaccaatcgcgtgcgccagtaacttcttgtttctccggccgccgcgcgtcgtcgtctaattcaccggccaccgctcgtggactctataaattgagcgcaccgtcgggtctgtagggtaatcacgcaccaagccaccaagtcttgcctccaatcgttcaccagagagctccaatcccttacttcccccaaattactcaagaactccgctcggtttgacctcgtcgtggccagcgcgcctcaggtccgctcatatcctctgccctcccgttttagcgttctgg

SEQ ID NO: 59975 - DNA, 1148 bp, Zea Mays
caaatttgtcgctagatgggttcaaactaacctaacatagcaaatatagcaagttttgccactccactaatttaattcccgtaattgttctacgaaaagataaattaaggtttgtatcagacaaacttgtgcaaccaagggcgacttattacgcactacattaaaaaggttagggaatcgctcactaagagattggctggttaaccatttatccttccaaaatctggtagcttgcccatccctcacttggaagtggccccatctaagaaattgatccttaatagccattagacctgaccagaagtgggaatcacccggtcttctggatatttgagtacgggatttatctcctagatatttatttttgagtaattgttgccacatctcatcctcattaagtagtttgtataaccatttgctgagtaagcaaatatttttaacagccaggttagagacacctaaacctcctagcactttgggttgacaaacaacatgccacctagctagcctatacttcattttactgctccccctgccaaaaaaatctggaccgaatggtatctagtttcttcaagacgcccaccggtaactcaaagaaagacatcatgaagataggtagactgcttaatacagaattaagcaagaccaaccgtccacctgaagataaaaatttggccttccatgtactaagcctcttttcaaaccgatcaataacacaccctgccagtcactatttctcaaccttcgatgaatcattggaattccaagatatttgaaagacaatgttccaattccacaactaaatagatgtgaatattgcaattcatattccttagccaacccgtagcaaaataactcacttttttggaagtttattttaagcccagacatttgttcaaaaacagtcaaaagtagcttgatgttccgagcatgttaaagattgtggtctaagaaaaccatcatatcatcagcatactaaaggatagacaaacccctggaatcaaatgcgcagttctattaatatgtattattaatttgtgcatatatactaggcgaattgctaagcatgtactatcgtttaattaacgacattaattttattgacggacaaagaatctaacgaaaccgaaacgggacgtgtgtatata

SEQ ID NO: 59976 - DNA, 586 bp, Zea Mays
ctgccatgcaactagaatgtggaggagaagacccgacatgaacatccatggaagtatgagaaggagaacccactcggacaccctcgggggctgggtcatagctcgcgctgcccacccgagccggatcatcacaggcaacaccctcgggggctgggtaaacgcaagcgccatcctttgggaccgagttctctgtagcagccacctctaaggctgaaggattttcaaccacctccatgggaatggagcaatccatatcagcctcttgactcttaaaaccgcgctccaaggtcgatgaggcacgagacgccgctcgggataactctaacccaacagcaaacacatcagcacaaacttccattgttccaccatctgccggctccgacaacagatctttagggaccatatcttcgagagtctgatcaaaatttgctagagacaattcttgcagaccaacaagagcagacaaagccggagaaggaataccactactctccccactggctatatagcgctgactgttcttccgaattaaggggatttcctcctcttcctcatcttcatcaataatacggacagtacacccatt

SEQ ID NO: 59977 - DNA, 309 bp, Zea Mays
acgagacgaaggggtacgcataaatctcggccatccgatctaaaattgacggcccagattagacgcgccaacacatgaatcggtacgcaatcatgttcctctgatccgagatcgacgctcgagatccgaccatgtcagtgctgcatccgagccctcgaatgggcgacacacggaccggattttataagaccacgctacgatcctaatcgttgatccagggatccacggtctaggcccatccaagccgaaagggtacgcatggcctgatccgagccatccgcggctgaatcaacggctgttgtgttttcc

SEQ ID NO: 59978 - DNA, 309 bp, Zea Mays
ggaattggtttgtttgtccaaaagctgttcgtttcgacttgaatcaaagccaagagtgatccggtttgaagctttttcttctaccacggtccggtacgaatccaggtcttctgacctccggatccaatttttgcgagcgctggcggaggacgaaattgggcagcagctatcctggccgaaactgggtagcagtaatcctggccaaagcgaacagcctttagtggaccaccagtttttattccagagccagatccatccctgaccagttttgagtaaaccagccggatccaccctatttggcccaggaac

SEQ ID NO: 59979 - DNA, 696 bp, Zea Mays
tcggggtctcttttacaaaatctgctcagcgaaggggtaagttctaatctggaccgtccgatcaacaatgtgtggcgcagattagatgtaactcaaatgaaacggtaagcgctattaaccgcgggatccgagatccacgaccacgatttaatgaagctagatctagtctgagccgagggatggcagatctacggtgcctgttgatcgcgcgaacgggtaagggaatacctaatctcgatcacccatcatcagatcaacggctagtggccatcatccaatcgtgatcgcccgagttaaatcggacggcgcaggcatagcctcaccaacccgacggcgaaacagaggcgccgctggtccttacggcggcggacactccggtgacggccatccggccaagcccccggccactccttacgcccacgaggctaaatgcagaacagaaagcgaagaacgcgtgagaacggttgataccaggatcagtggcgcgaagtcccctggccatggcagggtgatgtcccatggcggagagaagattccggcgagaaatcccccacgccaggccaagctccgggcacgaaaaattccgtggacaggtcctagacatcccggcgattctccatggtcacatcacgagtcttcaccgtcgaagccctctcagttccccgatggcggcaatcggcggcgctgcagctctct

SEQ ID NO: 59980 - DNA, 672 bp, Zea Mays
atgccgtcttcggaatgtctgagggtcggatcctgagctggtgataacctgacctcagatctatctttgagaacacgctggctcctctcaactggtcgaacagatcttctattctgcgcaaggggtacttgttcttgatcgtgacctcattcagagctcgataatcgatgcacatccttcttgtgccatcattcttctccacgaacaggacaggggcggcccaaggcgaggtgcttggccggatgtaacctttctctaacagctcatcgatctgcttcttgagttcaactaactctggtccagatactctgtaggctcttttagaaatgggggtggtgccaggaagaagctctatagcaaactcaactttccgctcaggtggcatgcctggtaagtcctccggaaacacatctagaaattctgacacaaccttgataactttgagtggatctgcttcactgctatcaacaaccatctgataacaacttcctttctttggctcaggcgggactaactcggtcaccacttcctctcctagtggagacatcaacttgattgtcctcctatcacaactgataactacctgatacttatctagccaattcatccctaggatgacatctattccctgagtacccattactatgaggttagcgggaaacactatccccc

SEQ ID NO: 59981 - DNA, 647 bp, Zea Mays
gcgcgctcacaatgtccggctcgggtcgctcacggtgggtaatcacgcgacggatggaagcccttctggcgcgacccagaactccacgctaccttctcatagaggtgaggtaaggtcttcttgttctgtcctagggtttccgtcggactttgttggctcgcactcctttctgcatcttgcttcctcgctctcgtggctttggtcgcttccgtcgtcgtttcgttccagtttccgtggcgggtggttcgaatccccgatttgtcctccgcatgtggaagaagagtggtcggtgttgtctcgcggggtggtgacgaagatggatccgaaggggcgaaaccctaactgggaccgatggaatcagaaagatgcgcctcaaggatctcaatcgtggaacaagaatcggaatctcagctggagattgaagccgaatctgggcaaatcggatgtcaaggaagacatcggggcctcgtctgccggcgatggaggtcaatcaggtatcctcaaaacccctcccgcggctttgaaaaaagagattgagaatgtgcgtcgtcctttttgtcaaaagtgtggggttgatggtcaccatgctagagattgttttagatctttgtggtgtgacatttgtcacaaagaaacccacacgactg

SEQ ID NO: 59982 - DNA, 316 bp, Zea Mays
aggtgttttttacctttaatattagactaggctgtgccattgctgccatttgattggaatcccatctattatttggatggatcaacctctctctcttcttgtttcttgacgtcgctttgcttctggaaaatgggaggggagacactggaggtcatgcatgggagaggtgaagaagaggcttgttttcattcggctattcttagttgtgtggatgagagggataatagacgggaacatgcatctaacgtatataaatttgagcaaaattagagatgcagcatccccgttttgtccggattttatcagttgggccaaa

SEQ ID NO: 59983 - DNA, 508 bp, Zea Mays
gctatttgagttgcttgcattgtgtttgccattttaaccttccttgcttcatcgattttgattggattttgagcttcggcattctagcgaccattgttcaaatggctgatgagaagatcattgacccggtgctggctggattttatgaagctttggaaaaaaccaacatggagaagatcaccaatgagatgttagctggaatatctgaaaactctagcgatagtgagagcctcgatgtagaaagtggaaatgaagatgccgaagatcagccatggagaccgagccatgttgtcttcggaaaattaactattaaataagggcggatcgaagcaatgagagggagatactttcgtgttaattcaattgtaagagccggaggggagaataacgttcctcttcccgaagatgacgaagtggtgatttgcagaagcttcatgaaagccggacttcggttccctctagacaaaaggttggtcgaagttctgaaaacttttgaaatttatcttca

SEQ ID NO: 59984 - DNA, 280 bp, Zea Mays
tcagggccggggttggctcagccccgccaatagatgtcaaaattcttgcatctggctcgctgacctccaaggcgacttgtttgctcgaagtcaaagaagcgtgcatcgccatcaccccatcagatcgtggtatgggaatgagagctcacttggacaccctcgggggctgggttgcagctcgcgccacccgccagagctggatcactaccgcaacaccctcgggggctgggttgcagctcgcgctacccactagagccggatcactaccggcgacaccctc

SEQ ID NO: 59985 - DNA, 486 bp, Zea Mays
gtggaccgccagccaccggatgcctgcaggagcaggagtgccagtgtctggatctgggcggggaacgaacggggagaggaaagagtggagagtggctatcactggtcatcagcttccacatcatcaaccgaattacactcaccagtcatcatcttccaggtcttcaggctcctgcagttctagcagatgcagaccgccttcaagtatatagtttgtaccattatctatcacctcgacaggtttagcatccacatcaacccattcaacagtgcaatgaacttgttaccaagtaatgtcaatccactgccatcatagacaggtttagcatccacatcaacccattgattgttccaatcaaaatcatctaaacacaaacgataaaaagctacctgcccctttctcatgaccctttttgcaaacctcattgccatccttaagttgtacagaacacacgccagatcattcggcctcttgaatggcaaaaat

SEQ ID NO: 59986 - DNA, 492 bp, Zea Mays
aagttttgggtctatttgcaaaaagcaccacttaaaccctattcacctaagtctgaaattcagtgatatgggctcaactttggagctttgtaactttcaaattataaggtttttgccctaggtcaccacaacaattttgtagctctatgaaaggagaacaactttgcttaggagtgtaagcatagttattgagaagaaattggagaaaatttcacccaaagatgggctgccaggctgttgaagtctgaattccagactgacagtgcaactgctgtgactttgggcatgaattcaggcatgatcgagtaagaatttgattaggattgctataacaatattgtaactggatcttaggactataactttgctaaagagtgtcgatcatgttattacacaaaattgggagtaaatagctctgcaaatcgagctgtcagttcatctgaatgggattcgccatggtacagtgcccgagaagataagcttcagccctca

SEQ ID NO: 59987 - DNA, 508 bp, Zea Mays
atttttttgctacattgattatgtgacacaatccttgctaaagtggtgggttcttgcttgtagcattccagattcacctgctcctttgttacttcacttcttgtttcttgaccctaccaaagttggtttaagtaagtgactgtctagccaaggaaccttctatcccctggttagatgatgcttcctttcctcaactgtgttaggctattgctgcattcatacaataatttaattcccatgtaagcatacattgactatatttactttgtaaatctcacaagggtaagcataactaaactaaaaataattttgagcgattcagatagagtgaaaaagtggcaatacgatgcaagttggcatcctttttagtatctatagtatgaaatatcctcattgtaggattgacaatttaagtagtgagatatcttctgtctcatttcaaaatgttattttccataaaaaaggtatatgtcaaaattgttattatcatgaaaaatgatgttttgga

SEQ ID NO: 59988 - DNA, 903 bp, Zea Mays
gtgaggttgttttcacgatggcggaaaaccgaattgggggaaacgagaaattcgcgagctctagggaatgattcgaggtacgagttgcttcactggttgcttaattacctaacggagccgagggtgtgctcaatttataggctccaggggcggtggctggtgaatcggggatggcgcggtggcggccggagagaagagggtgtactggcgcaacaattagtggcttgtaccgtggcgagctcaccggcgatcaccggatatgcttaacgtgatctactgcgacgtggtaagatgcccgggcacgtggcaaacggcagtgagggatcaacggtggtgagatcctacccgagcgatcggtgaacaagggggaggtacggcggctagccggattggtgtccagctcatcgacgacgatgatctttctaccccgagacgttatccacttatcccgagcacgaatcgagacgccggtggcacgaatcgtggcggagagatcgtcagcggcgagggggaagaatcagatgatctgatctgtttcaggtcactgtacaatggtgttcttcattcagtgcttctgacagagcaatttgcagagtcgtttacttccaattttatgtagtaacttgattgtctccctttagcaaagttatagccctaagatccagctacaacattgttatagcaatactaagcaaattcttgctcgatcatgcttgaattcatgtccaaagtcactgcagttgcactgtcagtctgaaattcagactttaacagcctgaaagcccatctttgggtttgattatctccaatttcttcataacaactatgcttacactcttaaacaaagttgttctcctttgataggtttacaaatttgatgtggtgacctagggtaaattctca

SEQ ID NO: 59989 - DNA, 449 bp, Zea Mays
gttttcccgtgcctatacatgacctccgagcaccgcacccctatgtttcgtctagtcgagctagccgtatcgccgagcgtagagagagaaatgagagagagaaccgggaggacatccacgccgccattgcatccatataccgtcgcgggggtcatttgaagaggtcgagggccatccacagggtgccctgtgtgcgcctgtgggatccgcgagctccgggggagttatagcgttagagaatccatcatcggagttttgcgaccccgccaatccactgctcaccacgaaccagcctccagcgcacgccatctccggtgagtacccgtccaccgtgttcgcgcaaccttcctcttcgctctgcatcagtttaattgtggattagggcgcgtaatcgccgagcgggctacgccggcgaggttcggtagctgggcgggcgctgccgtgccgat

SEQ ID NO: 59990 - DNA, 849 bp, Zea Mays
atagtcgaccgtctcacgaaggtggctcttttcattccaatatggactacctttggtggggataagtcagcttagctgtacattgaccgtatcgtgaagctgcatggcatacccaggaggatcgtatctgatcgaggtacttagttcacctctagattctagaagaagttgcatgaaactcttggcactaaattggactttagtttagcttaccatccacagacagatggccacattgagagaatcaacaatatccttaaggacatgttgagggcctatgttctcacatatggcaaagattgggaagacagtctatcgtattcagaattctcttataacaatagcttccagtccatcttgaagacatcactgtatgaagtcttatatgggaagaagtgtaggaccccgttgatgtggtctgaagtaggtgatcacattattgagggtctagactttatcacatcatcagaggacaaagtggcagagattcgagagaacttgaagacggctcaatcctactagaaaagctatgtagacaaaaggaggtgtgcactcactttcggtgtcggggactttgtgtatcttaaggtttccccgatttgtggcacacggagattccaagtccatggtaagttagccccaaggtacattgatcccttcctgatccttaaaagggtgggagcagtggcctacaagttccatctttccgaggagatgttaggagtgcatgatgtcttccacgtgtctcagttaaggaagtgtttccgtgttccggaagagtaattggttgaagacactgttgaccttcaagatgacctccattatcaggaagtgccagtgaagatctcg

SEQ ID NO: 59991 - DNA, 854 bp, Zea Mays
caggaaccgcctgccgatggttccctggtctgctgcatgcttgctggttcgtgttccgttgaaacgaaaaggaaaatcgccaggccgacacgacgaggcccgttcatgcattattttcgtcgcttctttaaggatgaagaagcgatgacgcgtgtacatgggggacgaggtgcgcgtgcgtgcggtgaggtgcggtggttagctgaatcgagatccatcttttgacagcgtcggaacgacatgtggtacgtcagaattaagagcggggcgcgaggacacggccgcaacttggcccattttgcggcaccaccggtcgctgctgctcttctttctgaaatcctgtgccgaggatggcgtcatgctttcttcttcttcgtctcgtcgtcgtcgtcgtctcctctccttcagctggtatgtacagtgcttccccgtgactgactcgtagccctcgtcggccgggctcgttccaccgcgactgaggtcaaaccatgtgccagttttcctttcccctcatccgacgaaaagctagcagcagcactgctccatggcaatgatcaccgacaccgagcaaagcaaagctgccacccatcaacactcatcaacaccccacgccgccatgagctccggtgaaaaaaaaaaatctgttctgccgtaaacgaaaccctcgggaagaagaagaagagtcacggattcagtccatcccctccatgtgtcgtggtcacgagaaagctgcggaaacacggccggtgccgccggtcatgcaagtcggccattccaaaaagtttcggcctgtgcgttttcaggcgtagtagagttttcaaaaggtagctaaataaaacaaaagaaaaagagaa

SEQ ID NO: 59992 - DNA, 974 bp, Zea Mays
aacaaacgggacctaaagatttttcactttgctagatcatttgatcttaatcattctgatgtatgaggatgcagtatggggttctgcaccttttgttacaaaggtggtcataaatactgtggttttttatttagataattatagatatacttggatttacttcatgaaacttcgatctcagttgtgttatggttattatgctcgcatggtgtacagttgtacacccagttttcaactcacattttgaggttttcattctgattctggttgagtaattatcccacactttttcatagtttttgacctcagaattaggttgttgaacgcaaacactgtcatattatagttggacactcttttgattgcttcttttgttccttctcatttctaggttagcaagtgtcctagtgaagttctattggtactcctagctagatcaccttagagtttttggatccatgtgctatgttttgcttgcacctcatgagcgggctaagctaactgcttagctgagcagggttttcaagggtatagccccggcacaaggcttatcgtcattgttagccttcttgccgcatttgtatttattgtaatggcacctttgttgaggaccatcctttcttttataactcttctgctctggcctcatcttttacgaagtccacgtctttatgtcttcccctatttcagttagtgataatgtcgctcttccaccatctctcttctatgtccacctactattcttgaagctcctccaccagatggtgttgatcctccatatgttgttcattagtctcccccatgtcggctacctatctcccaagtctatacccattgtccttgagttctcactcctaattcctctgccgtaacttgtaacactcttgatgttgatatttctgttaatattaatgagtcattgctatttctgatgagtcacagagtggtcaaagatataatgtatggcatcatgc

SEQ ID NO: 59993 - DNA, 411 bp, Zea Mays
tagggaccgtctttgtgtgcctcagaaatcagaggtgaagatagatatcttgagagaagctcctaaaacgccttacactgttcaccctggcgaaaccaaaatgtacagagatttgaagcaaaacttctggtggaagaggatgaaggttgacgtttctaagtatgtggccgcctgtgaagtatgtcagcgcgtgaaggtcgagcataagaggcctacaggtttattgaaaccattggaaattccggagtggaagtgggagcatatcaccatggattttgtggttggcttacctcgttctcctcggggtagggatgctatatgggtggtagtggatcgcttgactaagtctgagcactttattcccatgaagaccacaaattcagctttagagttggttcccttgtatatgaa

SEQ ID NO: 59994 - DNA, 297 bp, Zea Mays
cactcttttcctcccggggggtgaggtttttaacgaggcggagccatgtaatatacctgcaaaaatcccccgcaaaaactaagatgcaacatgtcaaaaaagaccgcatcaacggtcttcggcattcgaccactccgaagtcaccacgagaggcagcacagactaccctcgcgtgcgacaactccgcgcaaaagtcgcataagggtgcagccggaatagcacaacaagtgcgttaatcagtcttttattcaaaagacactccgcgcaaaagtcgcctaagggtgcagccggaatagc

SEQ ID NO: 59995 - DNA, 562 bp, Zea Mays
gcgttagggccctgcgcggcccatgccagccgtcataatgagtgtgagcagaggtgaccagatgacaaggtgcatgcagacaaatggccttgccacggtaaggcactcggttttaccacggaataacaactccttctcaaaggagccaacgaaagccaacctcaccttggcctataaaaggaggaggtcggccacagggatggggttggagacacacatagacccaaatgaactggagagacgcagacatgcgaagaagacccatgacagaagatgctcgatagaaggcaaacacacacgtctggagaaaccttaagatctggaggccagagccaaggcttagcgtaggactctagttccgtagtctttaggatactcccgcataagagacctgggagccttccctccctctctcgcccacttgtaacccacttgtaacccctactacaacatcgagcaactaaggtaccggtagcacaagccgccgaagactggatgtagggatgttctgctcgaacgagtttaaaccttgtgcccaccgagcacaccgtccagagcctag

SEQ ID NO: 59996 - DNA, 661 bp, Zea Mays
tcgtgaggacaggatgcctccgttgattggacttcagtttgcatgcgaatcatgaatgtgactcgaattatgatagcaggaaccaagaaggacttcagatcggcattaacaggaggacaggagcagatggatcttttctgtaggagaggcgtcaaacccaagcaccaggaagaacagatgtatcccgctgcctcgggaacagcaacaaatatgtaggacacgcgcggatggcggcgatgcgatgaacatcgtcggcgatggtgatatcaacagggactgaaaccctaattttttaatctcctgatgttgatgacgttggcagagatgatggccatggagctagctaatgtcggtgtcgccttccccacggtgggcgccagctgtcgaagttttagatcgacaatgcaccacggggtataccacgtgatgcttttgtgagttggcaacatcaactgtagctcgatggttcgcttcgaggcacgacaaaacacaagatttatacaggttcgggccgcgggatgcgtaataccctacatcctgtttgcagcgggttgtattgctttgatatctagaggttacaatgagggctagggtttggatgtttgatgagagagcgagggcgtgtatgagatcagatccctctaagatctgccttgggagg

SEQ ID NO: 59997 - DNA, 451 bp, Zea Mays
gcgttggccatagatgggttcaatccctatggaatgagtgctgcctcgtacacatgttggcccgtgtttgttatcccaatcaaccccccctggtgtgtgctttcaaaggcagaatatattcgtgtcgttgataattcccggacacccggggaataaaatgggcgtgtacatggagcctttgatcgatgaattggtatgtgtctgggaggaaggggtatggacgtatgaccgagctacgaagacaaactttagaatgcatgtttggtaccagtactccatgcatgacttaccgacgtatgggctattctgcgcctggtgtgttcacggtaagttcccatgcccagtttgcaaggaagctctcaggttcatttggttgaaaaagggtggcaaatatttgtccttcaataaacattgacaacttctccctcctgaccatccattccgcctagac

SEQ ID NO: 59998 - DNA, 562 bp, Zea Mays
gccctgttggtcagtacccttgttcccgtcgttactacggaccgagtcttgcggcgggggatctccatggatctcgcatggtcggtgtacttggcccagccgcggactccgcgtcgtgggtgtacaagtatctcccatgcacccgtcttcccatctcttccacgtccactgcttggcaccccgaccacaattcaccactgtcgccgccagggtagtcttgcgccgccgcacgcagtcttctggtcaccgtcgactggcgcaccgaggtggtgaccttgggtttcctgggacttgcagtcgggtggtcgtgtccgcattgggcggatttcgccgtcgccattggctaaattggccgctgctgtgtcatccccgccgttgagccgccgggacgcgtgggcagagtcgtcgccgcatcaaaccaaggtaaaaagcccaccatcggattcaccttgacctcctctatgtgtagcgctagggaatcgagaacttagcgtctgggcgagtagttggggagctccagccatggcactccgccgcggtgagcacgcagtcgggattggga

SEQ ID NO: 59999 - DNA, 412 bp, Zea Mays
ggtttgccttttaaaaccgggtgtgacaaaagccttacgacttaacgcatctgccactacattagctttgcctggtgatagtgaatctctaattcataatcctttatcatctcaagtcatctcctttgtctcatattaagctctaactgggtaaagatgtacttcaaacttttatgatctgtataaatgtgacagacattccccagcagataatgacaccatatttttagggcatgaaccacaacagctaactctaggtcatgagttggataatgttcctcatgccggcgcaattgccttgaagcataagctattattcggccctcttgcattagaacacagctgagaccactgcctgatgcgtcacaaaacacatcaaagggcttttcaatgtccggttgagccaataccg

SEQ ID NO: 60000 - DNA, 476 bp, Zea Mays
tttccaggcatgatgaggaagacccacctcaggaatcttgcagtagtcccgtgcactgagctgtagcgacatgacgttgtcacgcagaatggagcaagcgagtgcagagtggccacttgacgtcgtcacgcagaagactgttgcagtcctctggagccattttccaggcgagcagagcagtggttttctcgtactgattgtctgagaaagaagtggatacgccaaaagcgcagttgctcaacttactcgaattactgaagtgggctaactaatcgacgtcggctatagaaagagaggggagggggggaggggaaagaaaggctaatcgacttccccagtcaggctttgtttagcggatcctgtgggttggagcctgaattgctatcacctttgttttcagcgcaggctgccctgccccgcccgtcccatcgcggagatctctgtggatatatacgatacgatgatgtcgtccgtgc

SEQ ID NO: 60001 - DNA, 973 bp, Zea Mays
ttctgccatagctgctcctcaggtaccctgaggcacttcttcagttgtgacacgtggaatacatcatgtacatccgcaagatgattgggtaattttagttgatatgcaacttctcccactcgctttaagctcaagaaaggtccaatgaagcgaggggacaactttcctttaactttaaatctcctcataccccggattggtgacaccttcagatacacgtgatcaccctccttaaactccagtagtcttctccgagtatcagcatagctcttctgccttgattatgcaattctcaaatttttccttatcattcgaacttgttcttctgcctcttgtataagtttaggcccaaagaactgtatttctccaatttgatcccaatatagaggagtcctgcattttctgccatatagagcctcaaatggtgacatcttcaaactggcctggtagctattattataagagaactccgcatatggcaagctcttatcccaacttccaccatgtttaagagcacaagctcttaacatatcctccagcacctggttagtcctctcggtctgcccatcagtttggggagggaaggctgaactggaattcaactgtgtatccaagctctcatgcaacttcttccaaaaccgagaagtaaactctgatcctcggtcagacacgatcttcttaggcactccatgtagacaaactatctgagtcatatacaattctgctaacttggctcccgtgtaattagtcctcactggtatgaaatgagccacttttgccaatctgtccacaattacccaaatagagtcatatcttgccgtagtgcggggtagtccaacaatgaagtcgataccaatttttcccatttccactcgggtatcttcaatgggtgcaatagtccagctggtctttgatgttcggccttaaccctttgacacacatcacacttagccacatgtgcagcaacatccct

SEQ ID NO: 60002 - DNA, 642 bp, Zea Mays
tttatttcctgcggcgtcatggcctccgatccatataatagatgaaaaggtgtgaatccggttgtctggcattcggtcttgtttagggcccagaccacttcaggtagttggtcagcccatttacccttcttgtcgtcgagaagtcttttcttgatggtggtgaaaatcttgctgttggcgcgctcgacgacgtcgttggattgcgggtggtataccgaggcgaaggcaggcttggtgccgatggagaggcagaaatccctgatgtcctggctgtcaaattgtttgccattgtcgactgtgagctcagacgggactctgaattggcaaacaatgttttgccagaagaacttttgggcggtcttcaacgttattatggatactgccctggcctcgatccacttggtgaagtactcgactgcgacgaaggtgaatctgaggttcccttgagccataggtagtggtccgacaatatccagcccccagcgttgatgtggccaggtgtgggcgatcagcttggtgaactgcgaagggttgcccgagcggggagaatacttctggcatgcttcgcaagacctcgtgactcgattcgtggcacagattatcgcgggccagtaaaatccttgatggataactttggcggcg

SEQ ID NO: 60003 - DNA, 306 bp, Zea Mays
tgaagtgattccttctggtgctttgtctcacgtttccgttgagccagctttgcaagaccagatcatcatggcccagctcagtgacaagggagtgcaaattattaaggagaatctctatcagaagaccgagaagtataaatgtttccgccaagatggaaagggtatattatggtttgaaagcagattggtggttcctaaaaacaaggatctcaagaagaaaatcttggacgaggcccatctctccaaattctctatgcatccagggagcaccaaaatgtaccatgacctgaagcccttatattggtg

SEQ ID NO: 60004 - DNA, 360 bp, Zea Mays
gccatgtgtactaatcgttgtcgttgaacggataacggactgaatggctagatgcttctagtttgatgaccatcaaaccaaactctaggtccgacaatgcgcagtacatactcgagagtggccatctctcgttgaaatactcttatgaccactgtcgggcataagaccatggactgatgctcatgttcctagtataacagtcacctaacagtgggaccatccaggtgaatagtgtgtcttctcgtatgatgctatgttttcctcaaccgtctgaccaaagataataggtctgatgcattccatcggactattttgatgccactgtttgtcaacgcactagggttagccgttggattggca

SEQ ID NO: 60005 - DNA, 290 bp, Zea Mays
gtcaccgccgtaggactctataaattgatgccctagtgagttccgctatgtaattacgcatccaatgcaccagcccttgcctctgatcatccaccagagcctcctaatttcgtatttcccccaaatctgttttctgcaccaccgtgaacacttcgccgtggccagccctctgcaagtcagttcaagcttctttgattagtgttctagcctccctcaagcctcctgttgctcgtagacccattcgattaagctagaccacaccaaatcgtcatgaacacctcggattgtct

SEQ ID NO: 60006 - DNA, 745 bp, Zea Mays
gggcaccacggcacctcaggtgaaaccatctgcccagcctcggttagttcttggtgcggtggagatggaggtgaagaggagtgaggataggtgggagaaaatgatggtggttgtagaacgtctgataggaaaggttgagaggattgaagaggtgcagcaaaggttacttgggcagacggagctgactgcttaagttgctgggcatgctgcagaagagagagtgataatagcttgtcagatggaggaagtagggaaggagatggctaggatgaggttggaagcaatggcaagagatatggagggtttatcaggaggatcgatagaggaggatggggaaaacagaaggagggtgccacaacctgaagaacgaagaggaatgcagggaggtgtgaatggaggaataagggaaaatcaaggttgggagatgggggagagggagacaaatcgacaagatgttctcaaactaaatttcccttgatttgatggaagagaaccagccatttgggtgatgagatgtgaggattacattgggttgtatcatgttctagatgctatgaaagttgttgcaacatctatgaacatggagggaactgcatcgaggtggttacaagtgcataggctgaaagggggtttgggaagttggaggagtttggcaaaggcagtggtggagaagtttggagcagaagcttatccaaaggctatgagaagatcgatgaatattaggcagacagtgggattagaggag

SEQ ID NO: 60007 - DNA, 565 bp, Zea Mays
gagaacctgtcaccactggttcctcggattgaacaggtggcaatccggcatgaacgtccatggaagcagccgaggagccgagctcggcacccttggggcctaggtcatcctcagcagcactctcgggggctgggttatcctcagtggcaccttcgaaagctatagcacccttgatcgtacccacaggagctgggtaaccctggcctgcaatgttaggagccgatgtgttcccatgaactaggccgccctcaaaggtcgaagaagcgtgagaaactatttgggttatttcttgcttgactggattactagctgaggggatgtcatccgagacctctgtacggatgatagcaccttcagtttcaggaagctccaataaaagatctttagggataatatcctccagtgcatggttaatggcagacatcgtgaacctctacagactaactagtcctaatagagcctgaattgggacgtcgtcgctgtttttgctacaactgttcttacgaatcaaaggggaacttcctcttcatcctcatcaaacataggttcaccgactctggctcca

SEQ ID NO: 60008 - DNA, 410 bp, Zea Mays
attggaagttcacgacaaaccggcggctgaaatctccccaatcgtcgatgcagtgtcgagttaaatgtcgaagccattgtagcacgtcctgcctaggacaatgggcaggtacgctgtcaagacatcttctgttgccccagcagcccgggtggcggtcgtgtagaaattcaagcagccccccgggtcttgcttgggttcgtatttgtcgacattggagactttgaagttgggaggccattggatgccccgaagccggggggcgagcgtggagaccctgcacgtttcctcttgtcgatgatcatgccaccagtcctagggaggggagcgagtctcatgtcacctcgaccgtccccagactagagtagttgtggaggctgccacagactcgatcctggttgcacggctacgtg

SEQ ID NO: 60009 - DNA, 565 bp, Zea Mays
agcagtaggtggagcacccccatcggggtcagcagtaggtggagcacacccattggggtcagcatcagtaaattcaggaacaggcacttcttcagcagcaggaaccgaaggaccaacatcccgatccaaactagatactcgccggagacgtctctttttccttttctgctcgtcagcaggaggatcaagttgattggctcgggaagggcgtcttgggcgaacactaacaggcttctgaatatccaaggttgtatcagtttctgggggaggagccaccaccagcgtcccaataggagcagcatcagaagagtcctcagccagcaaatcaagcatagcacttatttctgcgtcactaggatccaaaggtacctcaaagtggacttgccgttcatcatcaggaacttcctcgagcgaggcaaccaaggcgttaacttcttcagcagagggtcgcactctaaggcccaaactgccatcagcaacaggtggattcgaagcaaaatgagtgaaggctttggaaggaggcaggttccaggccgagtatgccactggggcaccaacgtttgat

SEQ ID NO: 60010 - DNA, 500 bp, Zea Mays
gtcagatcaacgaaggcgcgcaaccttatcatacaaatagcggttacatacacacagcgagggcttcatatattacattggctcaaccttcgagatgatacccatctccctgtagttgaacaacattatcctcagttcctcaccctcaaacagattttgcagctccccctcacctacactcacccttatcggcgaggacaacaattctcgcttaccagtcctgtccacgcgaagaagacctctctccacctcgctacgataacgcctaccacttcgcgacaattcactcactctccgcttcgccaccgcccttcgcctcctatacccagtactcgcgcccaggagttcctcggaaccctccgcgcgcggtgaaggctccgctgcagccacatccaacgccgcaaaataatctaagtcctcatctaaagactcctccgtccatgcaatcgaactcccagaatcatcagactcaaaacacttagacacagagccaaacgaat

SEQ ID NO: 60011 - DNA, 1127 bp, Zea Mays
aagccacaatctgttgaagagtctgtccacaagaacaaaattcaaacaaagttgtcaacccaaaaaagagaagagagaagagatagagcctgtgagtatatatgccaatttttttatgaagctggcattgcacataatacagtaaccctcccaagctttggccatatgcttgaggcaattggagcttttggtagaggtctgagaggtcctagtgcttatgagatgagtggaccattcttgaagagagcaaagcaaaaggtattggatagattcaagaatcaccatgaatcatggcagctcacaggttgctcggtgatgacagatgcatggacagacaggaagggtaggggagtgatgaacttggttgtccatagtgcacatggggtctgtttcttagatttagtggattgctcagcagtaaagaaagatagaaaatatgtgtttgaccttgtggacagatgcatccaagagataggggaagaaaatgttgtccaagtggtgactgacaatgcaagtgtcaacaccgcagcagcaagtctaatggcggcaaagagaccctccatattttggacaggatgtgcagcccattgcttagatctcatgcttgaagatattgggaagcttggacctatagaacaaacaattgctagtgctagacaggtgaccacattcttgtatgctcatacacgagtgttggatctaatgaggaaatttcttgggaatgacttggttcattccggggttactcgatttgccacagcatatttgaatctaaaaagtttacaggacaacaagaaggatatagcaagactctttagatcggatgaactcaatgagttgggttacttaaagaaggcaaagggaaagaaagcaaacaaagtggtggcattagaaggattttggaaaaatgttgatatggctatcaatttttttgagccattggctaatgtgcttaggagaatggacagtgatgtacctgccatgggttttttccatggatgtatgcttgaggcaaagaaagaaattgctacaaggtttgataataatgaaagtaaatacagagctgcttgggacataattgataaaagatgggataacaagttgaagactccattgcacttggctgg

SEQ ID NO: 60012 - DNA, 599 bp, Zea Mays
ctccgtgcaaaagtcgcccaagggtgcagccggaccctccgtgcaaaagtcgcctacgggtgcagccggaatagcacaataagtgcgcaaaatcgaagtcttctccaaaagactacccgtgcaaaagtcgcccaagggtgcagccggaccctccgtgcaaaagtcgcctacgggtgcagccggactagcataataagtgcgcaaaatcaaagtcttctccaaaagactccccgtgcaaaagttgcctacgggtgcagccggactagcataataagtacgcaaaatcgaagtattttccaaaaggttccccgcgcacaagtcgcctacgggcacgaccggatcaacgaaggcacgcaacttcatataaattacggttacatacatacaacgagggcatcgcactttacattggttcaacctttaggttgatacccatctccctgtagttgaacaacattatcctcagctcctcaccctcaaaaagatttcgcaactccccctcacctacactcgccccagccggcgaggacaacaattcccgtttgctagccccatccacacaaaaacgaccaccctccacctcactcaccctccgcttc

SEQ ID NO: 60013 - DNA, 421 bp, Zea Mays
agagaacctacgccggcgtggaggctctggtagcgggtctgggagattagtcgttttgtgtgtgggggattcccattacttttctcggagagatcgttggtgtagcattgtgattgctcatcggcgacccggggcaccacgggaccaccgtgccactggagttgaagcaccaccctcccaaaatacggtaatcggccaccctccatctgtttagcgctcgcctctacgtgggatgttgtcggtgggtgtaagggtttggttaagccatgggtcaattcgtgtctctggcgtggccgcgagcgggggaaattggcaccaccgtgctccatgtcgggaggtcagtgacggttggggaggccgttgatactccagcgaacggtccagatccaaagttgatcattcaccttgagttcgatctggg

SEQ ID NO: 60014 - DNA, 373 bp, Zea Mays
tgaaaattgagaggctagggttttctagttttgtgtgctttcccagatagttcatatggacatgggacgatgcaccaaaatagtctagccatgcaaggacttatcccaaaccttaggtgttgtcaagatcagtccagtgatctaccagactttccacgagtgcaataattgagagtggcactctcgattgggagagatgtgttcatcgaatatttctggattgtctgatgctctcatggacgtggagaaatggggcataaagagttagtgtttactatgttctgctcaaggggcgtccatgcaaatgggtaggtgttccatcgaatggttcatgggaacaatgatagaacctatgttattcaaaagtgtttga

SEQ ID NO: 60015 - DNA, 555 bp, Zea Mays
agcagggatcgcacggggagccgaccttgagccgccgtcaacgactgccttgcaccccctcgttctggtctggggaagtggtcagggagattagtggggatgccaggggtctatccacatcgagcatttgtgtgggggaaaaccggcgccaacgagattcctcgccgtcgcgcctggcgcctctatgccactgaaccaccgtgccccgtggtagacccattcaccgtctccaacgttcgatgaggccctatccactcttttcggcttgatgtacactgcgcttagcaaaggaatcgggggccctaacctgtcgagtggccgtgaatttctcatcggggccattcctccgtcgcgggtccatgcttggccgtggggagggcataccatcgcatcgtccacagtgtggagggctttgcgacgttcagtaaggtatggagtagcctgtttacccgaaagaatggggatccggacacctgggcggcatttcggcgtactctggcgaggcccctgccgtggaccggggtggtgttgtaaacttgagggcatattcagttg

SEQ ID NO: 60016 - DNA, 933 bp, Zea Mays
tagtgaggtatgacatgtctagttcatgagtatcattaatccgatgttctacaataaaatctgctacaacctggcctctcatagatttcagtggttcataggccaagtcatattctataagtgcataagcccacttaccaattctaccactcataattgggttatgcaacatgtatttaattacatcggcttgaccagaaacagtgcaatgactagacagtaaataacacctacacttggtgcacgcataaaaaaagaataatcataacttctcaataagagtctaccttgtttcaacatccaccaacctccgacttagataagtcaccacatgctcctttccttcagtttcttgtgtcagaacagctccaatgaccttatcttcagcggcaatgtataatcggaatggtactcctgctcgtggtgcttttaatacgggagccgaagacaagtattttttaattagatcaaatgcttcctgccgctctgccccccaagcgaattcggcctcattcttaagccgaaggataggggtgaaggcatcaatcttcccggctaggttagaaataaaccttcgtaaataattcaccttgccgagaaacctctgcacttcgactttacaggtcggaggccccacatcccgaatagacttaattcggtcagggtctatctctatgccatgttcatggatgataaatcctaaaacttaccagctaacaccccaaaagcacatttacgtgggttcattttcaaaccataccgacgcattttatcaaaggctttgcgtaaatcagctatatgagaactaaactcagccgatttgactacgatatcatcaatgtagacttccacagtatttcctaacaactcatggaaaatcaaattcatagccctctgataagtagcaccagcatttttaagaccaaatgtcat

SEQ ID NO: 60017 - DNA, 470 bp, Zea Mays
taaaaactagttgcttgaagggataggtgggtggacgaggaaaagagcgatttgggttaaaaggacgaatcaccatcctcgaccgcttctcggacccttgagatgatccttcacccccttcacgcccatatctctttgtttttcctcgccccgtattcttggcttccaccgaaagcgctgtgctcacagccctactgtaagtgaggtccaggcaagtggccatctttcgctgtagttgatcatttagacctctcatgaagcaattcttcttcaggtccgtatcaacgtgctctatagcatactgggagagatggttgaatttggtgagatattgcatcaccgaatctcctccttgctttaagcgcacaaactcttcaagtttcatctgtaaaacaccatcgggaatgtagtgttccctgaatgcttccttgaattctgcccacataacaagatgtcctttaggttgaata

SEQ ID NO: 60018 - DNA, 840 bp, Zea Mays
gatagtaactaagctagccagaaaaaaccttaaacaaataggcccttttcttcttgctgactgaaacacgaggcatgaatcaaaaggccctttgagcccacgagtcatagggcgagtctgctccggaaggacccgtccccgagtaaccttgaggcaccaagcccgaggtcgggcgaggtagagccgaaaggggagtcgagtgaaccgagaggaagccatttgagtagattctgcacctgacccgagattgcttgccataaatgactaaccacattaaatacgctcgacaccgagccacgacagagaagtcgttcctcttaccactcatgacctgcgagtctaggctagatcccactcatgacctatgaggacgtagacctgcgacccacttgtggcctaccgagcctaggcctgagctccctgacgatctatagggcccacaacacgatgagcagcaccgagactcaagctatgaaggctaggggacgacacggcacatgaagagtaatgatgacgagtaatttcctcgccgcccatgcgcaatcggacttaaagagcccaaccaaagagctcagaatactgaggcgaatactaacagacacgttcctacagaggatagaacgcttcattctagcatgacacggtaactccttccatgagaagccacttgtaaccgacccctccttggtctataaaaggggagggtcggtagcgacccaggaggaggcgaggcctagaggacaataccacgacgctcacgcttagctaggtagcaaatacttgatattagtcccttagaaccaaactacatatagagacttggaaactcttctctctcgc

SEQ ID NO: 60019 - DNA, 276 bp, Zea Mays
gacatggagaaggcctaaggccaattttgtcccaagtagggcccaaaggaaggaagtactgcagtggatcaagatgttgatgttccctaatgggtatgcaactaacctgagtaggggtgaacttatctactctatgagtcatagggatgaagagtcatgacttccacatatggattgaacggattctttcggcgatggtttgaggctatgtccctgagcatgtctggctagcgcttacagagttgaactatttcttccgccagctttgtgcaaaga

SEQ ID NO: 60020 - DNA, 349 bp, Zea Mays
cttagttctttgctctgcaggcatggttgacttcatccgtcacatggtcatatcctgggtgtgaaaggagccccgacggtctacatcggatggttggagtttccaacaagtctctcgcagcataggtgcaagggtagcccctgagcctccgcccggggcgagaggacgatctaggggtgcctcgacttttttggttatatgcctcttcgtcacctctccgtaaggaggaagagggggaaagcgccatgctactctcggtgggcgacaagcaagacatctctattgagttgttaacgcttaatccgagtgagggtccgagctccattcgataggagtcggctagtggttc

SEQ ID NO: 60021 - DNA, 423 bp, Zea Mays
ccctccccttttagatggccttagcccttagctattacttattatttcaacaatgagacaaacacaactgttgctattttacccagatgtagttatattgtcaaattgagcccatcgcctttccgtcggatagaaaagattttttctttagtttagtttcagatagaaatgcattttactttgatttagtttcacataagagttaatcattgtagcattcaaaggtgacacgcagtggaatagaaaggcgaataaatctttgttggtacccggtactcagaacgtcagcaacatggcgcattcagaccaccgtcatccgaggatggggacgcctcatgacagcagttctcctataggtgccttagtggagctaacctcgtcgaccttgtcattggcaaacaaaacaggcttgttcgtgacaac

SEQ ID NO: 60022 - DNA, 1067 bp, Zea Mays
gttcatatgtgatagtaggtagaggcaaatcatataaagaaaattatctcttttcttattctttacaacttgggtattacaattgctttggctaactggattttctcctcctgcactttggtttgaaagtgttgggctactgctatttcctgttgctgctggattttgatcagtaaggtcatagtgaacaatgaaggtgtcattcccctgtagatctgtattgcaatgaatattgtcccagtcccaaggtttcccttcttcaaaaatcacatctctactaactaccagcttattagtggatgggtcaaagaacctgtatccttttgttcctgactcatagccgatgaataccatcttactagatctgtcagcaagtttgtttattcctggaccaagacttttcacatgtgatacacaaccaaaaattctcagatgattcactctagacttttttccatgccaagcttcataaggggtcttactgtctagggcttttatgggtgatctattgaggaggtagactgtagttctcattgcctcatcccaaaacattgatggaactttcattgatttcaggaggcaccttgccatttccaccattgactagtttcttctctctacaactccattttgctaaggagaatatggagttgtggtgtagtgtttgattccgtactgactgcaaaacactgaaaacaaatttgatgtgaactctccccctctatctattttcaatgcctttagactagcaccctgttcaacttcaaccctttgcttgactcttttaaaacagtctagagcttgattcttagtattgagcatctccacccacatatatctactgtagtcatcaaccactaaaataaaataggaagcaccaccaatacttttaggagtgatcagaccacataaatctgcatgaactagctctagggttttctcagctctgaagcttaacacatttggaaaaggttttctatgttgttttccaagaacacatccatcatagacctgctcaaccatttttacagctggcatgccatcaaccatgtttctgccactaagat

SEQ ID NO: 60023 - DNA, 460 bp, Zea Mays
tttcctgcggcaggagaccgttcgtcagcaaggttcatggaaggagggggcctaaaaaggtccagctccccatcaggtccttcatttgctatacccgagggtctggctcccattgcagcaatgttagaaggcacgtccgggtgcagtcgagcatacagtacatgcacttcttcatgtaaagtattacagtacactcgcaggctttcgaggtacgcactaagctctgccacacgagctagagctttcgcttcgcagtcccaagcgaacgaatgcgagttaacggcccaatcaatggctgaatcccattctgagatctcatactgcaagcggctgacttcgactaacaattccgctatacgacgactgtcctgcccacgtgccctattcctatggcgtagttctgaccggtggtgctccaccctagcttccagatctccaattgtgtcattactgccactac

SEQ ID NO: 60024 - DNA, 390 bp, Zea Mays
ccttagataaaccttgaggcatcgagcccggggtccggcgtggcggagcggtagagagcggtcgggcaaaccgaaaggaaaccacccgagtgggttcctcgcctagcctgaactgacacgccataagtgaacgaccacattaactacgcatgataataggttgtagtagagagtcggtccgcccacactcatgacctatgcagcccctcggctttcagcgcattcatgacctacgtagccctttggtcagcgacgcagtcatgacctacgagcccctcagcctgcggtctgcggagcacttatgacctatcaagcctaggcctgagagcgtgaatcgtccataggggccgcaacgtgacgagccacgccgagacctaggctacggtggca

SEQ ID NO: 60025 - DNA, 676 bp, Zea Mays
acttgggttggggcgacggaggccgactgacctgcttgccagcaatggagccgccgtggtagagtcctttgttgccgcgtgcacagcgtagggaagtagacgatgttgtggccgcgggatctcaaagggacggataagattagatcttgacttggagtatttgggaccattggatggtgatcggatgggtgatattggatcgggcttaagaaaatatgggtcgtagatctcgtatcatgcggtcataaatggataccggttctggatgtgtggatctaacctggtccgtgggatgcagatcgggcggctgtcatctgaagataccccttcacggcagcaacttttcaaaagagtccctgcgtttttataaaataaacccgcagtcctattcctgtaaaaacaaattacagtcgagccctgatatttataagataaaccctaggctttcacaattttgtgacagcagtccagcagtccgataaaattaggaattaaatccaaaatgggttaatgtataggaaaataaactcaagaacttgcaaaattcatatctacctcattctagctcggaattgatccattccaattgcattagactcatgataatattgtctatcggttagtaaccttatttcactatgtaacttagttataaaaataacattcattttgtttt

SEQ ID NO: 60026 - DNA, 577 bp, Zea Mays
cgagagcggacctggagatggatgtccacggcgcggcgtcacatggtggcgcggacgaccgatttggtggaaaaactaaattagggcgctatggtggctaatcggaggcgagggttggtgctctggcttcgtaacaacctagcggagctagctgtgcactcaatttatagcatcccatagcggtggctccgaatttggaagaggaaagctagcggccggagagagggggtgagtcactggcgcgaattaccgtggctttcaccagggcaatgtctcaggtgatggacaggctacctacggtgatctactgcgacgtggtaactcttctaagtatgtggcacgactacgaagggcgacgaattccagtgaggacacctcagtcaatcgcgcggcaagtggcacggtgaacaatccggtgataaggctccaactcttccctgcgatgagatctttcaccgccagccgttaacttcacaccagggcaaacgaatcgcgacgccggcgaggatcatggtgcagcgttcaccgacggcacgttcactgcatctgaagatcttttcattcactatatcatggc

SEQ ID NO: 60027 - DNA, 1014 bp, Zea Mays
gttacaatccctccccctaaaggaatctcaccccgagatttaagattactaaccgtttttggtaaaagttaggataaacttctcgcagataggcatccgtctcctaagttgtgtcaggctcatcatggtgacaccacagaatcttatacgtcttgatcgtactgttcatggtaattcggtccttagtgtccagaacttcgatgggttgctcttgatataccaagtctaatccaatcttcagatccttgacttctactttctcctcgggtattctaagacaattctttagttgatatacgtgaaacacaggaaagatcatgctcatgccctcaggcaactgaattttgtaggccacttctccctttcgttcgataacctggtaagatcctacatatcttagagaaagcttcttctttgcccccaaatcttcgcacacctttcattggtgataccttaagatacacaaaatctctaacttgaaacgtcagcagtcttcatctttagtcagcataactcttctatcgatactgcattgtttacatgttctgactaataattcaaaccttttctttggcttcagcaattaagtcgttgtcatagaatcttcgttctctggctttgacccaattgagaggtgttctacaccttcttccgtacaatgcttcaaatggtgccatctttatgttgctttggtaactgttgttgtaggaaaactcggccaacggtagccacgattgtcatgatcctttcgacgatagcacacaggctcttagcatgtcttcgagaatctgatttatcctctcagtctgtctctatgtttgagggtgataagctgagctatgcacgagcttagtccccatacctttcagtagttgttcccaaagtgagcggtgaattgtgtcccactgtccgacacaatggtttttagaattccatgtagtcgaacaatttctgtgatataaatgtatgcatactttggtggtcaatacgttgttttgacaggcagaaaatgag

SEQ ID NO: 60028 - DNA, 635 bp, Zea Mays
tcttccatgcatagaaacgcggggaaagcggtttcagcagctgcgaggtggagccattttactcatcctaatccaccaccaacctagctacaaaaagtcatactgaggcccctcaagcgatagtggtaatggatctgctcgccgctggtggcctgatgctttccaactactccgactcgcctacgtcctccaaggtacgcacatacgtacatctgtttttctggcattcgtgggacctaattagtgtcgcattcgtgggaccgaggccccgcaagcatcttcacatgcctgtccaccgagttagtgtcgcattcgtgggacctaatggagaccaacgctgggatggagggcatcgactgttactcagttaggcatgggccacagagggcatcggtggcaagtcaccaaccttaggcacgacgacgggcattgacgacaaggcggcaaccttcggcacaacggggcattggcggcatgtgttgagcacaaccttcggcacaacgggcatgtattgagcacctaatttaatagccatcgaagggttttgacagttcgtggtgtgctaccgacagtctaatattagaagagttcacatattgtccgaggtgttctatataggaatgagcactcgagtt

SEQ ID NO: 60029 - DNA, 471 bp, Zea Mays
aatttgtatctgggatcaccggataaggcttcgaatccgtcatgaaagttgatgctgctctgggttagcataaaacagagaggacacattttgaatcacatacgcagaccagaagctggtctttccgatagaattctttaagtcggtctccaacagattatacatatggtcgtgtaaaacattgttttgcactattcacaatgtgaggtttgaaattgaggatgggataaaagataggatgagtaagctgatggagacaacctaagacgcatagacaatttaatcagaatttgtgcagtttttgctttgaaaagaactactcttgaaaatttaagccccatctttgaagttgttgcatatgtactatttttttaaaacctttccttgctgaattaataatgagatctgtatgtttcttgcatgtttgtcatgtattcttccacgcaacagtatttgtttcgttcttttttg

SEQ ID NO: 60030 - DNA, 434 bp, Zea Mays
ccgatccggcacagatccactataatgcatagttggtgatgcatgcctaatggtggttgtttagtgttagtttgggcatgttggaactaagcaattgtcgatgccatacactagaagtgaagaatgttgttagcgttaggagtagaggtgtcaatggggaccgatgcccgttaagccatggagaatttctctattagatttagggtatgggaagattttaatttccatttgctgaatttaggtatacatctatttgaatcaacagttacagttcaacaaaaactctttccgctctagtttgtttcgtgtcctacctttttcctaaactagttttccctaaattgacatactctctagaaaatatatccaaattttgaagatcaaatatgttccattgaattattcatgacatatatcttggtattgcttttttg

SEQ ID NO: 60031 - DNA, 868 bp, Zea Mays
aggaatagcaggagcaggtaggaggaggaagagaggtagacttgggaaggaagaaacttctgcgtatcttcttacatgcctcactcggcagccattccctcatacataagcctcccgacgcccactagttaacgcattccacccatagacgacgacattgtccttcctgggccttgacgaacgatgcaacccaattgctcctattccttgtccggtacacggttgttcctttactgcactgctgacactcttcagcttgggagactggactcataagatgggagaagagaggaacgagaaagaaacgcggcagggtatttatagcggcagtgtaggtggaagggcagagctgagcacgtggcttggaagctgcttcgcaatttctttttgtttactctctgctctttcatgtattttgtattatgtacggagtatatcatttatatggcttggttttgggttttgaaattttatgggggattgagtatagtgcttgctgggattgttgggatttttggtgtatgaaatcctgtcatgtagtgctcctggtctactcgtgtagaattacaaggtatcttttatggaatgaggaattaaataatttacggagtaaaatttacgtgtagtttagttcatgtataattaaaaggtatctttacgggtgaataattaaatattatacaaaggaaaatttacttgtcgttctcaaattattacaaccgaagttctttagagaggaatagtaggagcaggtaggaggaggaagagaggtagacttgggaaggaagaaacttctgcgtatcttcttacatgcctcactcggcagccatttcctcatacataagcctcccggcgcccactagttaac

SEQ ID NO: 60032 - DNA, 397 bp, Zea Mays
taacatattttctttttacattattttcatattgtcacaaaatgcacacaaaatagagttcggcatgatgcatgatttagtggcaggtcctttattaattatttgtttttaaatgaagtttcacatgagatgatacatataggtcacaaaatattgagctcaactctattttcgtttttatacttttgggtattacaaattctaccccccttaacaagaatctcgtcctcgagatttaggaaggactagtgaaaagatgaggaaaatctatgtgaagctcttcttctctctcccaagtagcttcattttctccgtggtgactccattgcactttacacatcgttataaccttattccttgtaactcgagtcaaagtgtccagaatcttggtagggta

SEQ ID NO: 60033 - DNA, 1048 bp, Zea Mays
cacctaatgggatcaaattgggggcagattgagcatttaggcacggtgggcacgacctccatagcacggtcatagttttccactttaggggacattcaactaccacctggcgtgccaccacctccatgacttgaaaacgagtctttatagtcgagctaacataattctcccattcctgctgacactcaattagggatgacacatcttaggacgcttggtggaggacctaggttaagcaccctctcaacggcaatatggtcatcttcacgacaacctagctttgtgtttagcctttgtaaccacctcactcaaggagtgtctatcaacgaatagcgcaggcacacgtcacatgtcaacggactcaatattttcgtaatgatctttttccacgatgcctccatggtatatgataaaaatgatgtccatctatttgaaacacgaatccaacattcaataaccgattatgatagtgagtgcctaaccacatccactaatgcctaattaatcactaactatttactaaccgataacgaataactaaccaataactaataacgaattactaataataactaactaactcttaattactaataactaactagttactaataataactaactactaactaactctcaattaataacgaattactaataataactaactactaactaatcaagaaaaagggttatacctaaggtcgtggtggagtaaggttagcactggcggtggagtcggacagtctcctctctgcataaaaaggaacatagtactaagtaaaaactttcgacagcacctcctctacacggggaggtgtctaaaacgtgcaaatttaagtgacattcatcacattaacgttgatcatttgcatcacattcacctaagtcacttaacaatgacaaaaccaacagctacatatatagctacatcaattacacaactaaattactaaattaataactaactagcaagttgtaacactataaaaaccatcaactaaaaataatgaatttagttattatggtaattagggtaataaatttt

SEQ ID NO: 60034 - DNA, 428 bp, Zea Mays
ctatttcgctcggcttcgagtgataggtccagtaggaaaggtcggcaaggttgacgatgctgatatggtcacatcataagatgttctgtgttgtggtgtgtttcctaccaaggaaggcagccctctgatttctaggaactcttgctagcacatcagtgccatcaatggcaccactacagtcctacacattagggcaaacatttgttactacaaacccaacatgaaaagtagtggtatgtttggatttggctgaccttgaaatatgggtaccatatgtggctatctctaatttttggttggtgtaggagttgaaggtggcaagatcatttcattccttagttcaccaacagcatacaatacttccttgaagtatctgctgatggtctcatagaccttcgaaagatcatgtgtataacactaaacctttg

SEQ ID NO: 60035 - DNA, 893 bp, Zea Mays
gggaccccattagggagtagagatccagggagtgtctcaagatcggcaggccacccgggacgtccctagacaacatagagtcaaagggggatgaagatttggggttgaaggaaaagctaatctaggtctaaattatgcctactcctaatgcgacgaagaacaaaggaaataaactagattgattgattggttcgattggtgatgcgtgcaattggtcctatgcttcatatatatataggggggtctggacccgttcctaggagtttcccaacagaatccacgtgaaaagttggataaacatgcatggaaaagggatatctcacctaatctaatcctatcgcgggtcgtccgcgctacctcacggaccgtctgaggtgcggaccgtctggccttcctagttgccacatatggtgctcaataggtggtcttgctatttgctcttgggtcaaggtttgttgctagggtgtgacttctccttggattttcattgtgtttcaagcttgcggtagtgcagttcctccaacctggcatacttttcgaagagctaatatagctcttgtagtgtatttggggtgtctctggtgtagtgactatataggtggcctggacaaaggccactgctcgtgtaatggatggtgatgatgtcttcgatggatggaagctaaaacttcatgagtagaaacttgttgtagtactcctggagagtttccttttcttgctttctgcagagttataactcggtgagggcattagtattaggtctatacccatggaagttgagtaggaacttgtcatgtagaaccttccatgtgaagaggggttgcagccttgtgtaccaggtgagggatgggacctcgagtgctatgatgaacgatttctccatagcattgtca

SEQ ID NO: 60036 - DNA, 411 bp, Zea Mays
ccccagcagggcggcggcaatggcctgccagagctccacgccgcgaagctccaacgaccacatcgaattacccggtgcaaaatgtaattggaatatgggtggtgcagaggaggtacttcatactagctatgatgaatccgcggagcccgaccacggtgggggatggtttaacggcggggctccaacttcgatgagaaattcactggtttctggctgttcttcagccctcaatcttctctggtcgcgatccttgtaccgaggtgacacaccctgaccacacggcggacaccgtgcaacgacggaggcaaggcaagggcgtggcggcttcctttcttcccaggcgcaaatggcgcgctaacaacagtgcccggtgtagcagagctctggttagatgggcgagacggtcgtgga

SEQ ID NO: 60037 - DNA, 308 bp, Zea Mays
tctggtgcgcatgttgtcggtctttgcgcggacagtttggtgtagttgttttcgcacttgttaagctttgtccggctgcacccttaggcgaccgttgcacggatagtcttcgcggaagacttcgatttttcgcacttgttgtgctagcccggctgcacccttaggtgacttctgcacggatggtcttcgcggaaaattacgatttttcgcacttgttgtgctagtccggctgcacccttaggcgacttctgcacggatagtcttcgtggaagactttgatttttcgcacttgttgtgctagtccggct

SEQ ID NO: 60038 - DNA, 1234 bp, Zea Mays
ttaggtgaacaactttgcttaagtgggcaagccatgttctagtgagaaatttagagataatcatgctcaaactttggttgtgaggctgattaagttctgaatttcagacaagcagtgcaactgcaagcactttgggcatgaattaatgcatgatcgagcaagtatttgtctaggattgctataacaatattgtagctggatcttaggactataactttgttaaagggtgtcgaccatgttgctgcacaaaattggaagttattggctctgtaaattcccctgtcagaagcactgatggagcattccatggtacagtaacccgagtggatcagaacgccagcgtagcttgctcgccgccggtgaccttccctgcgttaagattcacgctgccgccgtctcaattcgtgctctggatgacgtgataaacgctcggagcacaccgccgtggataagcccggccattaaagtatcccggccaccgtacaaagttcaccgcggtggaaccagataacctcgccggtgcactgccccttccggccttatgccgcgtgtcctatccgcgccaccgcatcgccatgactccctctagcctctccgttgatcgccggaatgaccgccacggtagaagccacctagcgcttacgccagtaccttcttcatttccggccgccgcgcgtcgtcgcccaaatccacggccaccgctcgcgggctctataaattgaccgtgcccccagctccgccatgtacccaagcacctaccgcacccaccagcatcccaaatccctcactagcaagcatgaatttcggattctctccaatccggttctaaaacaccgtgaactcaaccccgccgtggtcagcccaactcaggttagctcttcccctctgctcccttgtttaagcattcttatgcgtctgtgatgcttgccgacccacacaatcgagctaggagccctttggtcgccgggaacgcgactgtcttgccgtgatgttcacggtcaccatggctagagcaatccttatgaccctttgtgaaattgggttaggggaaatggtcgggatagatccaattgcgtgtcagccgctcaaagaccctagccgttgccccattcggccggtgcaggcgctcgccggagctcggctgggcatgagcgccgtcggggacctccttctgcgaagaattagaactgcagggacttctttgcaatctgtcagcgacacagtgtaacagtga

SEQ ID NO: 60039 - DNA, 531 bp, Zea Mays
caacttttcaaaaagtgaaacttgcttagaaaccagtattggttagatcatcgggactataccgctagacctaggacgaaaggccttaaggatagtggggtagctaggtggctatgtaagtaggtcattcaggcccctaatataataagggggatgccctaggagcacccctatgcttgatgagaggacgttcatacgagcatgcatacataatacattaggaataggaggaaacgtgttaattaaaagttggaggaaatcacattaattcgtgacccctaaaaactatggctaaggacggttaacatagaagtaaattaaaacgattcaatccatacaaccatctcctttttaacctaaccgcaattttctctttactgctaatctctagcactcacacttacccctcttacacagatggcttcgcctacccccgccgatagtggagacaccctcttaagctttgactacctttcccgagagggtttttcctctatcttgtgggaggtactaagcacagctaggtcaccc

SEQ ID NO: 60040 - DNA, 481 bp, Zea Mays
ctcctttgacacggagattaggcctgcgaatgcaacgacccaccatttgaacgccatcctttggctcctttcctcgcgcccctttcagcttgtgctggcgctggtaggtctctgatattctcctccccttgagaagtcgcttgtccccaagctggcgcagctggaaatcaagctcgaagagcttcttcatcttcctaggacgatagtgcttcatccgtagatgactagtgaatgaggacctattgtatggatttgcctcctcgaacgataacacgccgatcaagcacctattctggtatctgaagaggaatggacatgttaggcaatacttaactaacattttgggagcccactgagtgcttgagttaggacacatgaaaaactggatgaacagtggatgaagaaggcagctacaatttgtaggcaaccttgccaatgcattgaataattgcaaagggcccaaagtacttgaagctgagtt

SEQ ID NO: 60041 - DNA, 375 bp, Zea Mays
ctgatggtttgctgcacccgcttaagatacctgagtggaaacgggaagagattggcatggacttcattgtaggtttaccccgcacatctactgggtatgactctatatgggtgattgtggacaggctaactaaagtagcccactttattctagtgaagaccacatattcaggagcccaactagcagagttgtacatggcacgaattgtatgtctacatggtgtgcccaagaagatcgtgtcataccggggatcacagtttacttctcggttttggcagaagttgcacgaatgcttggatacaagattgaactttagttcggcctaccatcctcaaaccgatgggcagaccaagaggaccaaccaagtactagagg

SEQ ID NO: 60042 - DNA, 594 bp, Zea Mays
ggggagcaccgccgtggttgggcgaggggaggaagacgacctcggtgcaattggatcatgatccagcgagtggggctgcctaccggtttggagcgtgttcggggtcgttgatcttagcgtgcacgatggtgattaggtctagcgatcggttggttgttgaccgttgatgccagaatgtgcgagtgagattagtgctcggtcatttaaaatctaagtcatcgacccatacatcaacggttaggatggatatcatctcgtcactgctcgccaatctaatgcgggcccttggattcagatctggcgatcgagatttgggcagtctgcgatctaatctgggcccttgggatcaaatccgacgactgtaaatagaccataccccttcgtggatgcgactttgcaaaagaaccccctgttttcattaaatgaacccgtcgtccacagtctacataggataattacaacgatgccctgaaaatttataaatgaacccccatgctcttgggtttttgtatccgacacccaatagaactccaggtttattaaataatccagaaaatgactattatgtattaattaaaccctaaaacttcataa

SEQ ID NO: 60043 - DNA, 494 bp, Zea Mays
tagtgtaatagagggagagagattattgacgtagaggaaaagtgagatataagtggagaaatttaggaaactgctgcagataggctttgggcctaaacacaattctttggatagaagctattacatctttttgggcccaataatgatttatgattgattcaatgagctaagtgttaaagggcaattgtcgcttcctcataagtggaagtctgataacttatttgctaaaagtaacctgtcggaggtaagctccagctaggtggcggatagcacccgctctaatcctaagatgaggagggagcatgaggttagcctatagagagataaacacaagaacaaacaagaatttagagtagttcgggccgccgaagcgtaataccctactccactatgagttgtactgctgatagcttgagaaagcttacgtctaatggagtctttgcgtgaatgcctatgagtcgtcctggcctgaacaactttaggttgctctgctc

SEQ ID NO: 60044 - DNA, 439 bp, Zea Mays
gtaagcacttctctaaagttttttcctttggattaatatgagagttgcctaacaatgatcccaagacacaccttgcaccccttctatagattgcttattcagattcatagtttcagaggtaaaaaaattatataaacaaagctagtgattgaacccatcctaaatatgctatgtctgtaacaactcatcctaaatatgctatgtctgtaacagcacagaaaaaaacaaataacaccgtctacaatagcacatcagtaatcttgatgatctagaaacgtatagaacaatagttaattaccattgatatgtcagggaagttggaaaggacatcctaaaacattaattgtttcgttgttccatgagtgtatccaccctttcacttgggaagttagctcttcctcatgagcactattttttagtatcatctgcaaacatagaa

SEQ ID NO: 60045 - DNA, 593 bp, Zea Mays
gtcccgagagaactggccgagcacaaactgaaggtctacccccaggcaaggccgatcctgcaaaaactgcgtcgtttcacgcccgacaaagagagaggccattcgtgctgagttggcccgcttggtcgcggctgggtttatcagagaggtgttacatctcgagtggttagccaaccctgttcttgtaatcaaaaagaataaagtggattggcgcatgtgcgtcgactatactgatctcaacaaacattgtccgaaggatcccttcgggctcccaaggatagatcaggtggtagactccaccgctggatgttctgtgctgtctttcctggattgctattccagataccatcagatcagcttggcgaaggaagacgaggaaaaaacggcgttcatcactccgtttggtgctttctgttatacctccatgccattcggcctcaaaaacgctagaacgacttatcagagagccattcaaacatgcttagctgatcactggggcaagcgtgtggaagcctacgtggatgacgtggtaatcaaaacggagaactcggaaaacttcatcgaagacttgcagctagttttcaacagtctgc

SEQ ID NO: 60046 - DNA, 553 bp, Zea Mays
cataactgagccgcccgatcagaaatcgagggctgagatttaaaaaaccgaagggggtatccgcaacttaatccctgtcgtccactactcgatcaacggccagatctttatgaaacgaaggggtatccacgatataatctaggctgtccatcacggaatcaatggtcacaagacattcttccctaagacgactgccaggacacatgagtccgtgcccctttccctgggcggcgccccgccggcgcgacgggctctggccccgtcaacccccaacaagaaaactaatgtgccaaaatcgatgcgggaatcgtgggaagtacgcaagggtcgcaacatgggcacggtcgttggcgcagtatggcggaacagcggcgtctctctcttccttctctgctcctcgatttctctatttgtgttacaccggtagccctggtttcatcatcgtggtgatccaatgagccgaggaacttatggagccgcacatatatatagccatggtcgaaggattcaagcctgtgaaaggaccccaacaatcacagacaagtttgttgcg

SEQ ID NO: 60047 - DNA, 1365 bp, Zea Mays
agcggggaggatagttctagtgacgacaatccttttcctcctatacctccaaggaagaaaaaaacatcagatgagcttgatgccgactatattcccaacgatgaagaggtaaatagaaatatgccgactatattctaaaataatgttcatatatgaaggccattaattgttttaatatatagatttcaaatgaagagaagaaaaagtatgcatgttctacacgaaacacggaggatgttccgatgcctgaatcatctgtttcacataagcggaaacgagggcgacgaggtcccaatcagatgaaagaaggtgcagttatgtacgtaacaaaactcaatgcagagggtttcctgaagaaccacttgacgtggttacaaagtttcgaaattcatgcgggtctactgttagagatatagtgccaatcacatttcagaaatggaaggatttagatgaagacacccgcaataagctatcggctaagttgtctgagtcattcaaggtcccaaaaggcatagaggatgcagtaaggaagtcgatgctctctgctatggtcaagatgtttcgtgggtggaagaccgagatgaataaggattttgttaagaagaataaggttcctccgcccaagaaaatggggaaaatcactcaagcttagtgggaggaatttgttcgtcagaagaccgaactgaaggccaaagaactgggcgaaactaattctcaaagagcgaagatgaacaaacacccccatcgcctggggtcaaccgtatatcaccataaagttgtgcagtggaacaggataatcgagtaagctatagctaacggcactttggacccaatattaaaagatgtcgattagcgagtcattcgttggatcttaggtcgggcaggtttgactgagaacggcaaacttttgcacccagaattggtaggcgaagtttcgacaaaaattcaagaatatgcagaaaagagaaagaaaggcgaatttaagcgtcggagggagaatgacatactaactgcagcactaggcaatcctgaacacacaggacgggttcagggaatctcttctaagatttcctggagaaggcgtttccagagtatgcggcgtcatataggaaacacgagaagtcgaaaagaacccttgaagagactattgatgaaagggtagaaaaggctattaatgacgtgataaagaaaatgaagaaaacagaatgcatatcatgtgaactcaagtcaggccacatgagtacacctctagtccctagcagcgtaggatctgtgcaagacttcgtatcgggcaccaagtaccctgtagacgatattgttgaggacaagccttgctttcttcatattccaatcaatcgatctggg

SEQ ID NO: 60048 - DNA, 688 bp, Zea Mays
cagaaatgttcgtaggaacattggtctgtcgatatgatgcttggccccatacagcaacaatctgatgcatgggcaatggaccagaccaaagaaggaatataaaagcaccagtgctgcaccgcaggccagggcctcacactctaacccaaattagtatccgtctggaaaccttaagcgccaagtatattattctcacgggcgtgtttggtatcttagggtgtgtttgctctgggtggtccatcttcttctcacttctaacttatgatgcatcagctcatgagatgactctacaaaccaaacacactggttaggtcttagagctcaccctcgcctcgcctagcctagctcagcatgagattgaaacgctagatgacgatggtatttggttctctcaagtctcaacagagtcggctgcctctcgtcgtcgtctgcgaaagcaagcaaggattttcgtcgttaatttgctgcaggcacgaggccgattcggctagccttgcccagggatgctagcagggtgagcggttaggcttttagtgcgaaatttgggtgagtgtcttgtcgtgtggtcgtcgagaagagaagagagcgggcatccccacgtacagccggagcagcagtgcttatctattaatgcatgcatgcatgcctcggtgaccagctgctagctagcttagctgcctgcctctgc

SEQ ID NO: 60049 - DNA, 538 bp, Zea Mays
gggatcataccggcttactcaaatggatggcacggaagtggggaactcatggaacatagagcatcttagaaagttttacccttagcaaggccttaaaagctctcgaagcaacttttactatgtaatcggggaccccatcattaataaagttttcgttttcaaaagcattcagactcttgactatcggctgacttcgatttgattggacttgaaatcaacatgctaacttggcttagggtgaccactataccctactaacggagcaatcggcttaagtcggtgacgacttaagacggtgcaacatgctcacgcttacttgacttagggtgaccattataccctactaacggagcaatcgacttaagtcggcgacgacttaagacggtgcaacatgctcacgcttactcggcttagggtgaccactataccctactaacggagcaatcggcttaagtcggcaatgacttaagacggtgcgacatgctcacgctaactcggcttagggagaccactataccctactaacggagcaatcggc

SEQ ID NO: 60050 - DNA, 396 bp, Zea Mays
ggcgtccttcggcctatcgactgcctagttctcacgacgtcctcctatctggcgctctctcccgagtcgtcctctatctgttgtgtgctcgtcgatccgaactggttgtgcgctatggaagagtacgaggccatataggcgaaccacacttggggcctggtgtcatgcctctccggcgctaatgtgttcaccgggaagtggatcttcaagaagaagctaaaggcggatggctccttggatcggtacaaggcttgctgggtcttgtggggcttcacctagcatcctggggtggactatgacgaaacctttagctccgtggtgaagcctgctaccatccagactgttctgactttggccctctctcgggcctggccagtccatcaactcgacgtcaag

SEQ ID NO: 60051 - DNA, 522 bp, Zea Mays
gttctcgatcatgcgaaacacctacataaaaaataattattgataaatcatcgacagttggcacgccatgtaggagagcccgttgatcatattagatctgatggtaaccaacttcgtgcaagtacaagagatcattcggtagtttcaagttcatctgcagtgcattagcgagtctctcaggcgtgtgctgaatgtgtcggcaattgacctcatctcgttcaactcactatgcttcgtcaacgatgcattaggatagcttaggctatagcctagcatctcacgacaccaaaaccaaagaccatggatccaatagatctgatctatgaaatgacataatggacatcacgtacctgatgagtctcgaatatctgtccgaccccgacgactgtgcagactcagacttgggccctaacttcctaggatcttggctcgcgtccgtgattgatggagaacgatatgacctccctccattggaggatggaagatattcaaagatgaagacaatgagtttgtgacaactct

SEQ ID NO: 60052 - DNA, 1767 bp, Zea Mays
cgccctatgatgagtaagcgtgagcatgttgcaccgtcttaagtctttgctgacttaagccaattgctccgttagtagggtatagtggtcaccctaagtcgagtgagcacgagcatgtttccccgtcataagtcattgccgacttaagccgattgctccgttagtgcggtatagtggttaccctaagtcgagtaagcgcgagcatgttgcaccgttttaagtcattgccgacttaagccgattgctccgttagtagggtatagtggtcaccctaagtcgagtaagcgcgagcatgttgcaccgtcttaagtcattgccgacttaagccgattgctctgttagtagggtatagttgtcaccctaagttgagtaagcgcaagcatgttgcaccgtcttaagtcattgctgacttaagccgattgctctgttagtagggtatagtgttcaccctaagtcgagtaagcgcgagcatgttgcaccgtcttaagtcattgccgacttaagccaattgctccgttagtagggtatagtggtcaccctcggttgagtaagtgttctgatttcaagtttaatcaagtcgaagtcgatggataacgaatagtttgaatgcttttgagaatgaaatcttttattgatgacgtgttttccaattacagaatacaacattgctctgatagttcttgctaagggtaaaacttcctaaggtgctctatattccatgaaatccctacttccgtgccatacatttgagtaagccgatatgatcttggacgagtgacctccgacactatgaatggcccctcccatagcggcgataatttgtgccgtccttctcccgttagaattcggcaaagggccaaatcttccactatgaaggatcgatgtcgtatagtcttatcatgatagcgcctcagggtctgctgatatctagctgactgaattactgtattcaaccgctcttcttctagtacgtcaatatctttagcctggtagcttctgcttcagctatgctttcgaagaccagccttggtgccccaaacctgaggtcgacaggtagcactgcctccaaaccataaaccatgaagaagggggtgtttccatgtagagctcgactgggttgggttcttaggctccaaaccacgtaaggtaattctctgatccactttcttgcgaacttttcattcttgtcgaagactttcttcctgagtgcttccagtatcattccattagccctttccacctgaccgttggctcttgggtgtgctactgacgcatatttgatctgaatgctctgttgttcatagaaatcaaagaattcagagctagtgaaattggatcccaggtcggttatgatgctatttggtattccaaacctgaatattatattttgtatgaattccactgccttggctgaagttagagaagcaatgggtttgtattctatccatttggtgaatttgtctatggcgaccaacacatgagtgtagcctccctgagctttcttgaaaggtccatgtccagtccccagcacgcaaatggccatgttactgtaatggtctgcagttgttgtgctggtaaatgctgctgttttgataagaattggcaagcttcacatctctatactaacttggctgcatcactctttgccgtcgggcagtaaaaaccagacctgaagaccttcccagctagagttctggatgctgcatgtatcccgcactgttcggcgtgaacctcatctagcagttgctttccagtaactgaaggaat

SEQ ID NO: 60053 - DNA, 500 bp, Zea Mays
gatgaggtgaaagcaatgcatagcatagacagggatggcttttgagaccactctgtttccagcctcaaatataaacttaaatttttcgacgaagcctggtaggctcaaatacttttcattataaatagcatatgagattcctatattctacatgcaacttccttttacttcatcagacacattaattagcactgaacgtaactactaactagtccttattaattaacagcttctctaaagcctctctcatagtcatccaatatcttccttgtttccatagaaaccgaatttgtagcattcaataaaaaaaataaacactaatatgtcaatttaggtgacttgtgacaaaatcttcaccacctttatgctcgcctttcttctccagctacctcataagccacaaaaccattatccgtgaatctgtgatgagccgtccaaaacaaaaagcactttggatatttgacatgacttctggaagagtcttcttcaagcaattcgcc

SEQ ID NO: 60054 - DNA, 316 bp, Zea Mays
ggaacgcgccaacggaaaaatcttcacagctgtcaaaaagatgctcctcgatgaaaaaagggcaagtgggacgatttgttacccgaggcggtctgggcactaaacacgactgagtgcagggcgaccgggttcactcctttccgccttctatacggatcggaggccatgaccccacaagaaataaagcatgggtccccgcgaacagttccttcagccgtccccgacgtggacgagcccacttcaaaggatctcatcgatggagaccgagtcttcgccctacaagctctaaacaaataccaagcccagacaaaagcat

SEQ ID NO: 60055 - DNA, 927 bp, Zea Mays
tcttatgtagcactgagtgaacaaacagaagtgaacatataaacctattgagatgatatgcaccatattattgtcaataacatgactttcaacacatccaatggcactttgttacagaggaggtaaaatagaattacaaggaacaaatgaataaagacacatatataaagcaagcacaagatcaaaatcaacataaaaagaaatttcatattagtatggcatcacatagagatatgtttgagtggagcagtattatttatcctctgcaggtatcaacttttgcagtgtagtatatgttgctttagcagttggctgtcatcaaagcaaggtggcacgtgtcaatgggtaagacctcttaacaccgttcgcatcatgcatgatttattgaccaaaagaagacttgcagcagatgattcaaggcactcaaagtcaaagtagaagcaaagtgtcaacaagaatagaatgttaagagttgtgcaaggtagcaggtgtcaatgggtcagacttgttaacatcgtttgcattatgcatgatttagtgagcaaaagacttgcagcaaataattgaaggagctcaaatagaagcaaagtgacaataaatacttgagtatcacttcttatccagatttagttgtcaaattttaaaaaaacagtgaggtgaaatagagttaagaaagaggcattcctgccaattttagagagcacacacaatgaagaagtcaccacagaaaggttagcaccacctaccaattgcagttgtagtgtgttcaaagggtcagaactcagaagggagattgatggggcccaagtaagagaagtaaacaggaggttgaggaaagtatctaattgacatgaatgatcacgatacactcactttgaagaggtgtctcttaactgatatatgatataaagactaactgtacaggat

SEQ ID NO: 60056 - DNA, 356 bp, Zea Mays
ctgggccgtgctaggaaatcggcccacgagaggaaggggggcttttctatttattttccctattttccattgaccatttcctctaatcctctactaagcgcaaactttatggaatcaagcaaatactcacaagggaaattgatgtgtggatcggcatgatgcaacaaccaaagaaaataactctagggtttactatcatcacacgacatggagttttgaaaataggtgaggttttagcgaaaaggaatgggaaagagaggtaacgcccgaatttggcgagtgaagaaaagaaaaaaattcaactccaaaattcggggcgttacaaacctatcccccttaaaagaatctcgccctcg

SEQ ID NO: 60057 - DNA, 447 bp, Zea Mays
cgtttgccatgccatggtcgatgactccgcacgggatggccatgatccttcgcaggcggtcctagtgacatgtctcggccacatgctaagcccgggaccgtgacgctggggaaaaatccgggcagcggcttctctctgctccatatcgaacggagcgacactggtgatgaaccaccccgatctagactcgtagcgcagcttgcgacgactggttgaagggaaggggtgcctcggcgtcacttttatattctgcgaagaagttcgattggggcgattttggcgagatgccgggcggaccatgcgcttggtttgttacgcggagaagacgcacaatgccagctcgaggggcccacatggcggcgacctgaagaatcaacgcgtgagcgaccagctgatgtagtggagccatccgccagtgacggtctcacgcacgccacggactgacgg

SEQ ID NO: 60058 - DNA, 828 bp, Zea Mays
ggactgtataactaatacatgtgtattcggtgaaatcataacttgcacggactgtataacaaatacatgggtattcctttgaacttacatggctttggagaatgtgtggtgtgtcctgctcatgttcaccaattgtcctcatgggtatccgctgagttgttcccaccaaacttggatgaactgtgttgctgtcttcaagaattcctggcaccggtaacgcagccgggggagttacagcatgccggccatcggtcatacagggtgtcgtcgtcgctgtagcttctgcacactgctctgatcccctggccgtcgccattgtgtatgccctaactctcccagagctttgaacaaaagcgtcggcggctgtgtgtagcccgtttttttgcagctattctcctatactcgcctaaaccgttctgacctatattcatggcatgatccaatatcctgcgcgatttgctgcgcagttcgcatgtcgcgagatttaggtgaacgacacgttacgattacctgcctattgtgttacatttccataaacatggctcaccccaacgtgcgaccgccccacgttctcggatgacgcgcgcgtcacccccactacccgatctgaccacacacgtcacgtcagatgattatttatttgttattagtaatttaaacaagcataaaagttgaaccacctcccgatcacgtccaactatgccaatttacgcagccaataacgacaaaatacgcaagcataaacgcgcgacccacgtctccgtacccgagccccccacgttaccatttacgcatatgtttcattcaaattccgtatgcataaacttc

SEQ ID NO: 60059 - DNA, 481 bp, Zea Mays
ctcgagactcgagaaatatagcggggcgtgaagtggaactggaagaactggaagagccgatgcagctgaggcactgaccgaagcctagggagcctacacgtacgcgcgcctggcctgcgctgtctgcatccatccttcttccctttggtttgcctacttgtagaagcaaagttgacataaaagctgcgtagaaaccaaagttttggctgtggcctcaggcaggcggcaggaggcagctcgatcatacgttggcaccggagaagacggggacggaaagggagagctttggattgcgaagaatgtggaataaaattaagtagagataatgtggatagcatgtattgaaaagttaaacgttaatagggatgacatagttggagatgatgtggatagttagtgtgagatgatgtatagcggtgtaatgtcaattcctactaattgactaaaggtcctttttgccgatctcttgggagaatatact

SEQ ID NO: 60060 - DNA, 605 bp, Zea Mays
gcactgctccaaattgttcattggagcatggcggcgtggtggaatcgcccctcaacgtggtcaggactcccatcgctgccatacgcggtaagaagaccttcgtcgggttcgctgctatctctactacgcgtagcgctagggaatcatgaactgaacgtctatgcgtgtggttggggtgctcaggtgatgtcctccgccgcggtatgccccgcgccgccgtgtctagtaggtaaaaggaagaagaacggtcccgggccgttaaaccgttgatgaacgactcagatgagacctctataccccttcgactgggactcctgttgtccgttgatcagcaatcaagcgcccaggatgagatctcgcatagttttgatccaagccatagatcgttgatcgaacgggtgccactccatacctcttcgtggggagcttggtctaatcctatccatagattagtgatccaacagccaaaaaataaccataccccttcggacaggtacaattgcaaatgagccctcgaacttcaattaaatgaacccgtcgtccaccgtgggtagatctgagtctaggaaatcttatcgattaaaccctgtgcttctctggttttg

SEQ ID NO: 60061 - DNA, 594 bp, Zea Mays
ggcggttccgccacagagacacccaatgaccagcactaatccttcaactaattgcactaatccgagccgaaatctctctacccacgacgacggcaaaaatcagggacaatccgaggtgttcatgacgatttggtgcggtctagcttaatcgaatgggtctacgagcaacagggggcttgagggaggctagaacaccaatcaaagaagcttgaactggactgcagagggctggccacggcgaagtgttcacggtggcgcggaaaacgtatttgggggaaatacaaaattgggaggctctggtggatgatccgaggcaagggctggtgtattgaatgcgtaataacctagtggaactcactgcggcatcaatttatagagtcctacgacggtggcgtctaattttgagaagttgcgctcgcggccggagagaggggaaatgtactggcgcgggtgatcgtggctttcaccgtggcaaagcctctagcgatggacagacttgctactatggttcactgcgacgtgttaaagctcctaggcacgtggcacaccgtcggtaagtggccaacgccagcgaggatcatctcggccggccgc

SEQ ID NO: 60062 - DNA, 632 bp, Zea Mays
cgcgccacccgagctgagtcagctacaacctcgactagtggcccattccagggacgatcgagacgacacactaccagctcccctccccgggaccgacctcacgaacgctgataggaagaaacatgtggagtcttcatgcttactccacgtctccgggccatccagtgccccccaacttcaaggtctccaacatcgacaagtacgagcccaagcaggacccgggtggctggttggccgtctacacgaccactactcgggccaccgaggcgacagaagacgtaatgacgacgtatttgcccatcgtcctagggcaagacgcactgcagtggctctgacatctgtcacatcactgcatcgacgattggagcaatttcagtcggcgtttcatcgccaactttcagtccctctctgacaagtcggcgcagccatgggaccccaaatccatcaggcactagggtgatgaaacactccgagcatacctcaagaggtttcaaaccatgaggaaccgcatccccgaggttgccgaagcagcggtgattgaagatttctactagggatccaatgactcggccttcgtctgagccatagtacagaaagtgcccaccacctccgaacaactattccaagaggta

SEQ ID NO: 60063 - DNA, 603 bp, Zea Mays
ctagcttctgttgtgtttagcacccaaatgacgtcaggaagttggtgagcccatttgccctttttgtcgtctaaaagtctcttctttatagcactgaaaatcttgccattggcgcgttctactacccagttggattgttggtggtagaccgatgcaaacactgccttcatgccattggagttacaaagtctcctgaagtcttgattgtcgaattgtttaccattgtcgactgtcaattcggaaggactccgaatcgacaaacaatgttctgccagaagaacttctatgctgttttcgacgttattgttgacacatatctggcttcgatgcacttagtgaagtactcgactgcaacgaaggtgaattttaaattgccttgcactgttagcagcggtccaacaatgtcgagtccccaatgctgtagtgtccaggtgtgtgcgatgagctttgtgaactgcgaaggggcgcctgttcgaggtgagaatttttggcatgcttcgcacgaacgggtcactctgttgactacgcacacgttagctggccagtagaaaccttggcgcatgaacttagcagcgagagctctaggtcctgaatgcgatccgc

SEQ ID NO: 60064 - DNA, 954 bp, Zea Mays
aaagaaagtcttcgacaagaatgaaaagttcgcaggaaagtggattagagagttgtcatatgttgtctggagcctgagaactcaacctagccgagctctgcatggaaacactcctttctttatggtctatggttcggaggcagtgctacccgctgatctcaagtttggggcaccgagattaatctttgaaaacataacagaagctaaggctactagactggaggatgttgatatactagaagaagaatgattgaatacagtaattcagtcagcccggtatcagcaaactctgagacgctatcatgataaggccatacgacatcgatccttcgcagtgggagatctcgtcctgcgccgaattctaacagggaaggacggcacaaattgtcgccactatgggaagggccattcatagtagcagaagtcactcggcctggatcatatcgtcttactcgagtggatggcacggaaattgggaactcatggaatatagaacatctcaggaaattttaccccaagctagatttcagaagctattgggacggccttatattctataaattggaaaatacatcatcaataaaaagacttcattctcaaaggcactcaaactatttactgtcgacctcgcgcttacttaactcagggtgatcattataccctactaacggagcaatcgacttaagtcggcgacgactaaaggcggtgtgacatgctcatgcttacttaactcaggatgaccactataccctactaacggagcaatcgacttaagtcggcgatgacttaaggcggtgtgacatgctcatgcttacttaactcagggtgaccattataccctactaacggagcaatcgacttaagtcggtgttgacttaaggcagtgtgacatgctcatgcttacttaactcagggtgaccactataccctactaacggagcaatcgacttaagt

SEQ ID NO: 60065 - DNA, 334 bp, Zea Mays
tgaccataatgtcgtcgacgtatgcttccatgacccttatgatgaggtcgccaaagcatttgatgatgcaccattggtacgttgctcccacgctctttagaccgaacgacattgtcatgtaatagtatgagccgaaaggcatgatgaaggagttggcgggttggttgtattccttcatcatagtatggttatagcccaagtaagcgacgaggaagcttagtacctcacagctgaaggtggagtcgaccacctggtcgatgcacatgaggggaaacagatccttcaggcacgccttgttgatgttggtgtaatcgacacacatcctcaatttccc

SEQ ID NO: 60066 - DNA, 862 bp, Zea Mays
atagccgagggcgtttccttcctctgtaaaagttttgtcagttccaatcccaaaggactttgcagcttgaatggcagagaatcagtcattaccttcaaaatttcaaccacttcggcagtagttggcgacagaggggttctctttgctgctttggcgaccttcggttcaatagagggtgtttggtcaagcttccgcttcttaattgttgccttcggctctggtgttgtttttttaagtccttctcatcttcttttactgagcgggcagcttgcctgcttaggatactaacaaccctttttcttttcacacccccagcccctctgtcaagcctctcgtaatctgggtattcgaagtttaatgcatccattacccggttcagccttagtttcggctgggtaccgaaggcagcagtcattagctggtcctccttcttcgtatagttgccaaggatctcattgcacatgatttcgatcatttccatccattcattgcatggtttcttgaactgttttccaaatttgaagcgataggggagccgaacaagctcatacttttcccccttcctttttcttcggcatcccccagccgctagaagttggaaatgttctatttgccaaatattcttgcactaagtccctagtgctgatttcggcagctaccactctaaattcaacttcggccagctggcacggggagccaagttgcatgtggcacaagggcctagtcattccaaagcttaatctcatcaggctcatgaccatagtcatcaatttttccttcttctcatcagcttttatctagaaccactcactcgtccacccgatcggccacttggtgcggtagccaattaccggggccttgg

SEQ ID NO: 60067 - DNA, 349 bp, Zea Mays
tttggcatgtcactgcaacaaaactgacgcttggtttcagcagaagggcgggggcttataatgagcctgggctagtttgggaagcagataaaagggcaaaaacaaacaccttcagcagagagcatcagagcagggggcgccacgctcgctttttgacctgcagttgtgcgaagcacggtgcaatgccacttgcgactaccaagaaaaccctggccccctgcgagatgaacaagcaagccggcagagaacccattggggagggggaggcgatgagattctctctgcaaatgcgacgttcgcctcaacagacatgccagccttttgatccggagctttggtatttgggtgg

SEQ ID NO: 60068 - DNA, 489 bp, Zea Mays
ggcatagttgcttgaggcgtgcaaatagctggggcttgaggccttgtaggatcgtgtcgttagcccattcgacctattcgttcgcatgaggctatgccaccgcggcttagtctatatggatgtggtattcatcacaaaattctaggaatgtattctctgtaatctatgtaccgttgtccgtgataatcgagtttagcacctgaagcgatggattatcttagtgacgagtctaacggcttggtcggaggtgatcttcatgaagagctacacctcgatccatttggtgaacatgtcgacaatgaccagaacatgtgtgtagcctcgagtaccttttctaggggtctgaccaagttgagttcccataccacaaatggtcaggtcatgggaatcgtctggagctcctgtgtgggtaggtgggtttgtcgtgcgtattagtggcatccctcgcatgttcacaccacctaatgtgcagtggacaccacagtaggc

SEQ ID NO: 60069 - DNA, 795 bp, Zea Mays
aaagatctacaagactcagccccgacccgaggtggacatcgggttgaataaatgaaaaggtaggggctctttaagaaaataggcgcgacgaaggggtatggatgaatatctaccgtccgatcttcaatctgcggctgtgactagattttgtataatccgaacgggtatgcaatatggacgatctgatcccgatcagacagttgcggcatgttgcgcgaaagggtatctcccggatgtaatcagagccgcacgattccgatctaatggctacgacttaatgggacgcgatctgctttgagccataggatgccaatccaacgataccaatccaaacaccccaagtggtaagctaatcctggccacccattaatggatccgctgccccacgttgttcttcttcgacccgatcatcagagcggcggtgcgcgcacaacagacagtggagccgccccggcaaacaccgacccaggcgagcccgtgcacggaaacgagcacaaagagttgctacacaatgcgacatcatagagaaaacagatccagggattcctaccgggtcttgatgcagcggtggatctggccacagtgcaaggtggattcatgacgctccttaactccgatgagcaattctaattgcccctggccgtgatctcccccgaatacgcgacacgcggcactcacggttgtcgatgaagcccccaatccaaacaccaggaacgaaacgatgtcgaagatgaagcaccccaacggcggcaattcttcctccctcggcctctctgtaccccagatggatcgtga

SEQ ID NO: 60070 - DNA, 533 bp, Zea Mays
cagccataccaaatctggcagccaataagctaactaaactggagcacgaacagaattgagcactgaaattgttcacaccatataagatttgttcagagaatacaagcataaattgttcttggtctaactgcatttgtctaactgcatttgcctaactgtttgtctaactgttgccagaaacagctgtttgtctgttcgtgctccagttcagctgccagaaacagctgtttgtctaactgcatttgtctaactgcatttgccacaacaagcatgaatatgtgaagctaactgcaatgtaagagctaccagaaacagctgccagaaacagcagttcacctgggcacaaacagaaacagcagttggcagaaattgttgacagctgggcacaaacagaaaaatgttgactacattttcatgtcattcacaaacagaaattgttgaccactgggcacaaacagaaatagttcactacttcaatcactactgggctgttgcctgtcacatttctaaacacacccagtactacattttca

SEQ ID NO: 60071 - DNA, 539 bp, Zea Mays
gcttcgacctgagcgttgtatttcacttcatcttccttcactttactcaccaatggaattagaatcttttccttctccaaggctttgtttctcagctgaattacctctgatcaaaggttgccgagagctatagtgcagctcttgtcttctgcattcttttgtgccctcagggctttgctaaggattaagccctacaagaaaaaagaaaggatcagaatgagaatgaaagaattaattttcaagaccataaacttcaaagttcaaatcttctgtaccttcatactgttgtatgcgaggctgtccggaaggtcatccttcgacatggcggagaggccagctttgagtttcgtaaatcccatacttttggccatctccaggtagacgattatctctttgttgtctgggagacagtataggaaatcatcttcgtccgtgccattaaacactaaggcccccttcagatattttagatcccgggcatagtgtttggcctctaaaatttcttctttggataatcttttccccgaagcatgtcgaat

SEQ ID NO: 60072 - DNA, 566 bp, Zea Mays
tttttccacgaagaggacaggggcggcccaaggcgaggtgcttggccggatgtaacctttctctgatagctcatcgatctgcttcttgagttcaactaactctggtccagaaactctgtaggctcttttagaaatgggggcggtgccaggaagaagctctatagcaaactcaactttccgctcaggtggcatacctagtaaatcttccggaaacacatctggaaattctgacacaaccttgataatctcgagtgaatctggctccttgctatcaatagccatctgatgacaacttcctttccttgactcaggcgagactaactcggtcaccacttcctctcctagtggggacatcaacttgattgtcctcttatcacaagtgataactacctgatacttatctagccagttcatccctaggatgacatctattccctgagtacccattactatgagattagcgggaaacactatcctccttatttccacacttaaattcaagcaaatgctttcagctcgaattctacaaccggctaagtcaatttgaatgggggttgacatggtag

SEQ ID NO: 60073 - DNA, 990 bp, Zea Mays
ttgggttcagcatcagcagggtcacacccattgggtttagctccagtaaagatttccaccggtacttcttaagcagcaggagcagaagggccagcatcctggtccaggcatgacactcaccgaagccgtctctttttcttcttctttccctcggcaggtgcagttggacgactgacctagcgaagacgcttcgggtgagtacctttaggctttcgggtatctaccacttggtcaagctctagtataattgcaacaaccgttgcttcagcaggggccgagtcagaagagtccccagctaacatatcgagcatagcacttatttatgcatcacctggactcattggcatctcaaaatgaacttgcctctcatcattgggaatatcaccaagtgaagcaactaggacctcaatatcttcgggagagggtcgcactctaagacccagaccactatcaccggcagaaggattggacacaaaattgcaaaaggacttggaaggtggcagattcaaagcagaataagcgacaggagcaccaatatttgatactttgcctctcaagatcatctccagtcagctcatcaaatctacaacaggaatcctcctatcagtaacctgggttgagtcagtgacaccagtgtacaagtaagccgggtaagctctgtgttttagaggctgaatattcttgaaatcaaagtctgcaaccacaacttcagcgctcagacctctctccttcagcacacaaatttcagcaagcagaatcttggcttatgttatctccaaggctgtaggagactcgatccaactcgcagtgcacacatccggttgtctccctgaccgaggagggagggacttgccatagttttccacaatgaaccactctaagcgccatcctttaatgctgtccttaagtgggatatcgaggtactccgttttcctcccacgacgcatctctaggctcgcaccgcccacaagttggtgctgccccccagcc

SEQ ID NO: 60074 - DNA, 378 bp, Zea Mays
cgacgtttgaggacatcggacgtgggaaaagagaacagcttcaacaggatcgcgcctaagccgcgaataatacggacgcgagcccatcgccttcctgggtcggtccatttccaccgttgtctttgcctggcccacgatgtagcgaccttgcagggtgactggcttgtggccccaagcaaggttttcgccttctagcagacccggggatatctgtcccccacatccacccccagatcgatccctgaccgtggatctatcaaccaacgctcaggattagaccttgatacacgccgaaccggtaagctttcacagcgaccggattaaagatcaacgacatagcgctccagagcgatcgtgccatccatcaatcaaccgacg

SEQ ID NO: 60075 - DNA, 578 bp, Zea Mays
tttgcatcatatcatcattccatcatcatagcatacataccattctgtacaatcttaaagggcggagaaaggaaagtaccattctccctgcaacattgggcaaagaagggaaaaatccttcttcttgcaacaggtaggcaccttcggacatttggcacgacttctgagaggaggctttcatcccataaggtaagaggtaccttcgttaattttatccaaatgctattttctaacaaagtatgtttcaatattcattacaaagcgtgtttttttgccttcggttcaaaaggtacatatgtttgtttcatgctccataaagaagtagcatggaaattcacacaaagcatgtatattacatgaatatttacatatagcacaaatgtactccccaagttttctaatacaaatgtttatcagttctctttcagatctctttcagcaatgtcattaagtacttcttaaacaacttcatctattgtcttatgaactacttcaagttcagccaagacatccttcagcttggggtcattcctcgaaatgtatggctcgggcactggcgagacgacagttgtgaagaa

SEQ ID NO: 60076 - DNA, 373 bp, Zea Mays
aagagctccaccagcgcaaggtcgagtcacagcggaaacccaaagatgccccacagtccagccgtacgtggacgaggactccgcagccagactccggtcgagacggccgtaatcagcagcaagtgcacaacatcgccaaccagcatcccgctgctgacccccctcgtcgccaggaatatccccccagggccgcggaaatggaactcgtggtaggggccgagggcgcgcacagccgccgcgccgattctactgcctcttccatggcgaagactgcgcccaccaaaccaaagactgccccgagacgaaggccaccagagacagaatggcacgggcgcagccaaccgacaaccccagaattgtcgcgcacaattac

SEQ ID NO: 60077 - DNA, 597 bp, Zea Mays
gggtagtgtagggaaattgtgttatgtgtgaggtaacttatggcttctggaattgtttaggaactaacatcgccttctatggtgttgatgatccatttgagaccatacttcatattgcatattatatagatgaacaaagatgaggaaggcaggagcgaagctaggttcatgagagagggtgcatatgcacccacaaaaatttgcaaaatcagtgatttagactggattttcaccatatatatacaccacctataaatcattactatgcaccctcctccaatttactctagcttcgccattggaggaaggtttgattaattagtcatgcatgcaaacaggttcactcaagattctccacgaacaccttccccagctgggatcgggcacaaccaatgcgtgttttgggacataatggcgagatcaatacccttagagggaacaagaactggtaacagcccccctcctcccaccccgctacacaatttgcaaagttttgtaagcaataatctccatatgacaggcattcatggacgcatttcactgcgatgtgctatatttttatgtttaataggatgacagcacgtgaaggtcttctgg

SEQ ID NO: 60078 - DNA, 271 bp, Zea Mays
tggtggccacgggatagcctgcatttctgctaccaaaggagaagcatcgtcgaaaacaaagctaccatggtggaaatcatcgtaccattcatcttcgttgattgggctttcttgacaaagctccctgtattggggtctttggttttggtcatcctgagtgagatgacgcatctcctcaactgctttgtctatcttcctctgaagatctgccagccgaagcattttttccttcttcctctgtacttgctggtgaatcgcttctaagtccctg

SEQ ID NO: 60079 - DNA, 738 bp, Zea Mays
gcccttagtttatttgttttgtttgtttactgtcggttgagttctagtcaagagcatacttaaattccattccgatccatttctgtaccagctagaatgcctcgttccgttgcttagcccagtacacaacaccaaatcttgtaccagccaaaattccagccaatactgtgcatatcaggctatccaggctacctcagccaaaatgtaatgtctcatggattctggtaccaaagctcttctggcgagttaggcttgaaatttaataaaagcttcctttatcaaaaaatggctctcccttcctgcttggctgccccagctgcctggtgcatctccttcggtagcagctccgaagtcaataatcactcacatcgtaggccatgtcattgtcctttctccctcgctaattccgtcatggggcctgctacctgcagtcctgcatggatgcagcacttgcatgcctgcagcagtgctgggtttttgttttgttgatgaagctttactagtcttgttcctcactaccattttgctggtcctaaatctgtcagttatcacctccatggctccattcatccaatgagtagacagctagccagctctctcttatgtgcttgtcaaccgatcgagaatagagagaaggcaagagcacagcagcataggagaggaagagatacaggttgctgcagccttatcaatttactgagcccacctttagatagcttacaaaagaacaatttatga

SEQ ID NO: 60080 - DNA, 395 bp, Zea Mays
gtagaggccgtcgtgcgtcctgaacgctgtcttgtgaatgtcactaggtcgcatgcggacttggtggtagccagagcgtaggtagagcttggtgaagaagcacgccccatggagctcgtctaggagctcgtcgatgatggggatggggaacgcgtccttcaccgtgagcacgtttaacgccctgtattcgacacagaatcgccacgatccgtccggtttcttgacgaggaggaccggggacgaaaatgcggaatcactgcgccggacgatgccctgcgtgatcatggcggcacactgcctctccagctcatctttgtgggcggcagggtacctgtacggcctgaccgccaccggtagcgcgcccggcttgaggacgatgctgtggtcgcgcgcgc

SEQ ID NO: 60081 - DNA, 399 bp, Zea Mays
gttggtgaggagttaccacaacattcattgccattgcactgttgcgctgttaaaaaatttaaccatagccgaagctttctgcattgcgctctcgagcaaacgcttcatcatttgagtttagattcgtcaaaaagtgaaaacattgaaatggccagagtgcgatcgactgctagggtgtctcacgagggagacgaggtcgaagtgactgagatagcaccaatatcagaggtgatgaggcaatcgggtcttgttgtatcagaagagcctgttgccgaaggtactctgactgccgaagctgagggaatcacagttggagagggaagtggtaatgaagacgaagaagattacaccatcttgatcccagaaaaacctagtcaccttgactttggtagatctact

SEQ ID NO: 60082 - DNA, 983 bp, Zea Mays
gtggggaatacaggcacggactcacaccgaatggtgaatcacgagcatccaggctaaggagctgagacatagggagttatactggttcacgctagggccctagtccaatatagtgttgatcgatgtattgcttaggagcgtgttacaacaagtgtgcttgtgtggagaaagaatgttgtccagcacttttatagctaaagggtggactttacagttgggacatatattctactcggaggtacttggcttgttgcccctaggttgctctagccctccttgtgtcgtttataggggggctgtcgtactcctgatatggcgttctgtcccgtccgttgtccatatggatccctgtagcttgtttggtgtcaacgtttcggtaccttgtgggtcccgcaaagtgggcctatggtgtgatttagggtcgtgttcagtacaacttcatctttcgtcataccgcctgcgtcaccttccagcacgtgtagccatacacccgatacgagcattgccctatccttttggtgtatgggtcactgtagagactttggtgctaaggtcccctcaactagagttgaccggccccacgagtcagcgaggacatatccaagggtgcacgcgggggtgtaccatcgtgtttgtcagagaccttttgatactgtgcgtacggtctagacgtggtttggcgatgacgcgtcttgttgcggtcgacgtgggtcaacaacgttggcatgggtttcttccttgcgggtccacttggtgggaacttggtcgtttgccctgtcccatagacttgctcggcgggaatttggtcgctctccccgcctcgcagacttgctcggtggaggtttggtcgttcacgcctcgcctcgcgaactcgctaggtggggacttggtcgttcgcttggccccgcagacttgcttggtggggtacttagtcgttcaccccgccccacagactcgctcgacaaggacttggtcgttcgtcc

SEQ ID NO: 60083 - DNA, 802 bp, Zea Mays
gacctcggctgttcaaataaccggttaagaacccttggccactattcacttctctctaacaatcacaattgggtccctgtacttctgttccttcgcaacgactggtccccgatggtgaacgccggtgagcacaccctccggcgaacctatatcggccgagacactcaacgaccagagccctagcttagccaacacctaattccacccttggcgacactaatccctcaattaaatgcacgaatccgggctggaatctctctatccacgacaacggcgaaagttagagacaatccgagttgttcgtgacgatttggtgcggtttagctcaatcagccgagtctatgagcaacaggagacctaagggatgctagaacatcacaaagaagggcatgaactaacccgtagtcggctggccacggtgagagactcttggcggcgcagaaaacagatttgggggaaaagagaaaaattgagaggctatggtgaacgattggaggcaagggctggttcactgggtgtgtattaacctagcggagctcactaggggcagcaatttatagaatctatcggcggtggcgtataatttgaagaaagcgcgctagcggccggagagaggggaagtcactggtgcgagcgctatcatggctttcaccgtggcaaagcctccggcgatggacggactcactactacagttcactgcgacgtgttaaagctcctaggcacgtggagtatgggcggcaagtggccaacgctggcggattatcacggccggccatagagcaagtgggtacggtgaaccat

SEQ ID NO: 60084 - DNA, 337 bp, Zea Mays
attaagccgagcacaccaaacatttgcatactgtacttcagagactgcgtgaccatcagttgtaagccaagttgtctaaatgtgaattctggctgaaggagattaaattcttgggtcacacaatttctcaggatgggatatcagttgatcctgagaaggtgtaggaggtgatggattggaaacccccgactacagtgaggcagattcgaagttttctgggattggcagggtattatcgacgatttattccggatttctccagaattgccaaaccaatgactgaactattgaaaaagggagtcaagtatgattggagccaaaagtgcgaagatgcctt

SEQ ID NO: 60085 - DNA, 704 bp, Zea Mays
tggaagcttaagcttgtaggctactggtccacatggttctatgatatcataaggtccaacatagcaaggggctaacttatctctaatcccaaatctttgcccacccttagtcagagagagttttaggtatacacaatcttccacttcaaattgtagtggcttccttctcttatcgtgataacttttctgtcttgcctgagcagcttccaaatttttcttgattatcctgattttccgtggcttcagtaactaattatggcccagatatttctctttctgctggttgtgaccaattgaggggtgttaggggtgtttgacacctccttccatataaagcctcaaagggtgccatttccaaactggcttggtaactgctattataagagaactctggtaatggtaggcatttgtcccaattcttgtcatagtgtattacacatgctcgtggcatatcctctagaatttgattcactgtttctgtttgcccatcggtttgaggacgatatgttgaacttctgattagcttggttccaagtgagctttgcagctactcccagaaacatgctacgaattgagctcttcgatctaagacaattgtccgaggtattccatgtagacacactatctgacccatgtatagctcagcgtatatctttgtaggataagttgtgcgcacagggagaaaatgagctgtcttggtcaac

SEQ ID NO: 60086 - DNA, 561 bp, Zea Mays
tgaaaagtgaattccttcgtgatgttatcatgaaagagaaggttaacttcattggtcttcaagaaaccaataagaaagattttgatgattcttggttgaatttcattagtggaaatagtaatttcgtctgggtttggtctccccctaatggtaggtcaggtggattgctggttggttttgattccgacatgtttgatgttagagaaaaagagttgggggaatttatgattcggttgttggtgattcaaaaagattcaggttttatttggaattttattaatgtctatggtgctgctcaaaatgatcaaaaacagaaattcttgagcgagttatccgctttctgttcaaattgttctcaccctttattgattggcggtgattttaatattctcagaagagaatcggataagaacaaacctagggggactaacaaatggagttctctttttaattctattattgatgttcatgatttgattgagttggatcttagtggtcgtcattttacctggtctaataatcgtaatcctcctacttttgagaagttagacaggtttcttg

SEQ ID NO: 60087 - DNA, 725 bp, Zea Mays
aagggtgatgtatgatggattcaatagcgtgactctaggtcactcaaaggaatgggttagggatgcaaaacaattcgtggatctcgcattttccggtggacctcgtgtggtgaagtgtccatgtaccaagtgtcggaattttaagtatgtgagaaaggccgaagaactggagcatcacctttgcaagaatgggtttatgcctaactatcttgtgtggcgctcacatggagaagtagagcagaatatcacagagtcagaaagaattgatgatgatgaggaggatcggatggatgacttggtggctgatattagtagagagtatccaacattggcctcggaacaggctataccagaggaagtgcaggagttttataagcttcttcacgcgttagaggaaaaagtgcatgacgacaccactgtgaccgtgttgcaggtggttacacgtcttatggcaatgaaggcaaagtataacttctcgaataattgctataacgatataatcaatctgattattgatctcatcccatcgaaccataagatgccaaaagacttataccagtctaaaaagattgtgtccggtcttggcatgaagtataagaagattgatgtgtgcgaagataattgcatgttgttctggaaggaatatgaagcagccacccattgtcagaaatgcggtaaatcaagatatgcggaggtactaaaagaggatggagctacttttgcta

SEQ ID NO: 60088 - DNA, 483 bp, Zea Mays
gagaagagtgggagaggtccaatagactacgacgaagacatgtgggcccaatctcggccctaaggtttgttgagacaaagaggttgctacggttcagtttgtatctatttggatctaactgatacctaaacatcaattaaagttttaagagatactttaaaagtttatggatcgagatgatacacccgcgtaagttaagggaccggaaatacactttgctcgttgtgagaaagtgatagatcactccattcttcgagccaacactagtagaaaagtgttcttaagcccgcggtacgcacaaattttcactgacgatttcagttatcgcgcactagtgaaaataaacaggtgggcccgacttaagaaaccgacaatggaaacatattttcactgacagttttcttaacacaaccgccagtggaaatcgtcattgccagtagaaaagtggtattttcactagcagttgcattaagaaaaccacaa

SEQ ID NO: 60089 - DNA, 666 bp, Zea Mays
catgtgtctggtgtgcgtaaaatagctacaccaagaacacacattattatctcatcgtaagcatgcaactcttaaatgtttagccacacgagtcagagaaaagttagtattatcgaagtatttttttcataaacatttttgcttgctttttgagtgtgtcactaatggcactagatgattgagcgtgtgcaccaaactttctacactgcaggtcctgtgcaccaccgggtattactgcgaaatcagttacccttctgacggaaggttgccatgtcagtgccactggattggtctggtgcaccttcggacaccgccatgtgtgccgccacgtcatctagtcgttggatctagaaactaaccgtcaagtcttgactggttcggtgcgctaggatcttctactcttcaaaacaaccattctgcacaagtgttttggtgtaccaaccccacaagcccgagaaaaatacttctctgtgtaaccggtccgatgacccactggactggtggatgcacaccagactcatttcttattttatgaggctatttttaataggtccatgaaaagaccttaatattttttgtccctaattcattttttatcttctgaggctaaattttttattagagaaaactaacactattactaaactacttaagtttttgttgatt

SEQ ID NO: 60090 - DNA, 491 bp, Zea Mays
gtcaacgagtggtttgctccttttctagtcgtacaacggtagtttgctggtggctgtctactgctggccgccgacgccatgctggtggtcgtctgctgctgtccactagtggccgtccgctgctagtattcgcgtcaacgatagcggaccaaaaaagttcgctacacttagcgggggctgagaacctccgctattatagagaaccatatagcgttcgttgttggagcaataaagttggtggagaaatgctaaatatagagttcagaacgctttagcgttcgttgttggagacagtctgactcctcttgtccaaatcgtctccaactcttcatccagagctgtttttcgggcattgtttaggagggctccggtaaagagcgggaaccgatcgggatctctctcaaacgggcacgtagtagagtagtatcatgttgccagtaacccactacatgccacacttgctcacgttctcgcacgcccgtcactactcc

SEQ ID NO: 60091 - DNA, 427 bp, Zea Mays
caacatccagatgcggcggaggagactcgccggcacgctcccactcgccctcccgtggcttcgccccctgatcggcctgtacctccacccagtattgcgtcgtcttcgtgggggatgaggcggcgctggtcggcgacaacgacggcgactacagtcctcgctccatagcctccctctctgcaccgcgtcaccgcttctcacatgtaaccaatctcattcatcacgcttagtcagatcagttgattttccttcgttagggttattctgttgctttcttcttcgtgcgcacatccgttgttgtcttcttcgtgcccctcccccaccctaacatgagtatggtatggatgacccagttcttctttaaccacactgttattgtcttcttggtgacgacaacattcatgcccgttcccatccttgcttgcgg

SEQ ID NO: 60092 - DNA, 285 bp, Zea Mays
tgaatctgtccaaattctgtacagatttcagaagctgcattgtttgcttaagttaatgttagaatcagtccttgtcgattataagaaagttgtagaggcttttctgatcttgcttgtgttaaaatttcataaccataggactgatagtttaagagttatgaatttttcaaacgggttgctgtgttctgtcctctgtcagaacagatttcaaaaactgtaatgtttgatttgaataaacctggaatcacttcttggtgattataaaagttatgaagtacttttccc

SEQ ID NO: 60093 - DNA, 613 bp, Zea Mays
cagagttgagctatttcttctaccagctttgtgaaaaagagttatcttggaccgtgattgtagacttggaaaaaatggcacccttgttactatgtaagttggagaagatctttccatccgacttcttccatcaaatgcaacattttattatgcatctctcgtatgaggcacgaatgggggggccgtgcaggaacattggtgctatccaatcgagagatgtctaaagactattcgaaagaaatgtagaaatatatgtaaaatcaaggcttccattgcagaggcatacatactgtaggaggtgtcaaacttcacaacaacttactatggtgaaaaactcccgagcatgcataatccatcccctcgttacaatgatggcgaaaatgaatcgaacctcaacatttttcgagggcaactcagaagcgcaagtggttcaaccaccaagaccctaagacatgaagagtggtgccatatcatgctatatttgttgaccaaccttgacgaggtgacgccatacatgcatcaatattttgatgacttctaccgttgatcaagggatccaactccacaagaatatgatacccttcttagaaaaggtgtggaaaatggattgccc

SEQ ID NO: 60094 - DNA, 458 bp, Zea Mays
gaataatagaagtcggtagcaaaagcatcattgagtgtgctaatgatgaaaactatattctaaacatagcttgctgggtgtggttgtctagataacattacactgtaaattgttggctagaataacttttgtaagtaacgatacctgtatttccttgccatgttttggaaatttgaaattatgtaggagtctagttaatataattaccgaaatgtctgattactcatgcgcttaaagttcaatatggtgatggtcatgatacaatttttctaccctcagcactccagttcaaatgtatcagacttagacattcatgttggttccttgtgaaacaccctgttgatataaaacatttgacagtagtgacaaactaaccacataacaataaaagtgatatgcttattatgctgctatctgattggatccttgtggtttgtatatgcatacctttcatgaac

SEQ ID NO: 60095 - DNA, 527 bp, Zea Mays
gttttgtcagggaggtggaggcagaagcggtaaaaactgtagggaaatattcggcgaagacggagatgacgatgagttgggacatacgcggtttgaaagtcaggctaaaccgggtcttcaagttgaacggtcttcagtatggcccgtatcctgaggagggttctactaattttggggatattgatgatcgcaagagaaatggtgtggcgacacgtggtggtgtggatgaggggtgctctaaaggtaaggtcatggctgtggtggtgaggaaaaagagaagagttgaagctaaagcgaagggtttgacaaagacatctggggtggcaggggccttggacatatttgttgaggagttggtggagacgtgcgccgagccagggcaagtcatgacctcacccaacctccgggaagcatcttctcggatgctgaaagtaacctggatgagtggtgcggaaaagaccctattcccgtggctcccgacgaggataatttcacgtcttatctggctcagtcttttaaagtttttc

SEQ ID NO: 60096 - DNA, 1449 bp, Zea Mays
gggaggtctctcatttttaattgtgttgtctcgtttcgatgcccttcaggaatcgaagcgagtgaccaacacagagcatgtattatcttttggcagctccatcgaattgcttgacaagatcaaggataacactcagaactcttcttatgaatgaaagataggataattaagaaaaataccttgtagatctcttgaaggacattcttttcggtgctgcggaggatgatcgagtccatcaaggaatcgaatctaggggttgagtcatcacaagccatgggcttggtagtggaccaaattgaaggattgttattcattgtcttagtcatcactagatccaattaatacccttaagtattgggaggtgtcccaatgtagaattagattatgagcacttggaacgatgcaggcttagagctggggaaggaggcacatcatcattcattcatcgactcagaccaccctcttcctcttcttaggctcaagaagaggactaggctatgcagaaacataaggaggctcaggggtttgctcagtgagctgctcaagaaaatagctcggacaagcttcatcatcattcttaggcttctagttaggaccctatagaggacaataatgttccaacatctaaatcagtatgaagagttccccaagaaagattgataaatttaagaagaatataagtgaaagagtaatagaagatacctctagacgtggttcaagtaatgactaggtacatgcaccccttagcccaatctctgatagatgaaaagatctaacaaagttgagcctttacttctagcatggtaatgggctgagtcttagactgaaaaggataagtttccccaccatactctcatgcgtatttcaccttctcatggagacggggaactcaacgctaagtctagttgccaacgacatgtactaccgagaggcctaaagctttcaactcctagaacatatctatcatagagaagatggcatcgatgtgctttataaggggtccctcgtccactcataccaaggcattaggcaccaccaaagaactcatgaagcttgggtgcatggttaccaacataaaaccagtgtttgtgctagtttttgttggaagtattcaaggaacaattaaggtattcatagtttgcatgaagttgaacaccaacaccacaatcatagcaggttggtctttgcttgggtgaggatagagaaagaagcaatgttggaacaaagtaaagaagggatgaatcctgaaataaacttcatagaggtgagcaaagattgtaatatacaaaatagagttggtatctagatgaacgagctcaatttgatgatgataataataaagaagacctcaaaagaattttgaagcaggaagcccaaatccatgcatcaaaagggaggaaagacaaaaaatttatcaacatctggtatcagataagtctccttaccagg

SEQ ID NO: 60097 - DNA, 806 bp, Zea Mays
cagcaacattccaccgccagacctcgctcctctgcctggcagccccatcgtccacgggtgcgacgacattccacccactcgccaaaccgatcgccgcccgccagagctccatcctctagcagctcactctgtctccaccagaccctcgccccagtaccagctcacgctagcttccgcctcctgctgcgtcctccccatcccactccacaacacttagcatggctgttgctccttgttccaacacccttgtgcaacttccctccatcaccttcgatggcaccaacttctgggagtggtccaccatgctccgcgtgtgtctcaacagctagcgcatatggggtcaccttactggtttgtctcctcctgtcccggagcgtcctattgaacccatggtcagtgtcgatggtgttcctcctgttcaggccatggagggttatgcccaagatgttgagcaatacatggttgttttaaccgattacaatgtttggcttgctgataaggcttgagcgactaaggttcttcttggcagtatgaaggtggaatttgccatggatctctgctctgcccaccactcaggcgatgtgggagtgggtgtaggctctctaccagccgagcagcaccgctctctacatctccaccttggagctcgctagctctattcagcagcaggaatcctccgtcgatgccttctatcacgagttgactgatgtgtggcatcagctcaactcgctagagccgtcgtactgtcgaacctatccctggtgtgtcctccgacagggggcacaacgatgttctttgcctccatg

SEQ ID NO: 60098 - DNA, 585 bp, Zea Mays
caagatgcaaccggcttagtcaagaggtgtgaagcatgtcagttcctagtcaagcaacaacaccttctagcacaacaattgtaaactatcccagtattctggccctttgtgtgctgggggctagatatgactgggccatttaagagagctcaagaaggatgcacacatgtactagcagtcgttgacaagttcaccaagtggatagagtacaagccaattatgttattgacagtggccaaggcggtggagttcattcaaaaatatatacaggtttggggtacctaacaacatcctcgcacatttggggtctaactttacaggggtagaattctttgatttctacgaggagaatagtttactggtcaagtacgcttcagtagcccacccaagagctaacagtcaagtggaatgagctaatggtatggtcgtgaatgcattgaggaaaaagtcttcgataagaatgaaaaacatgatgggaaatggatcagagagcttccatacattatttggagcctcataacccaaccaagttaagcactacaaggcaatacaacattcttcacggtatatggatcgaaagcagtg

SEQ ID NO: 60099 - DNA, 979 bp, Zea Mays
tagaccgcagccctgaccttaaaagttgccttaacaagaaaacacctcttacccccaagaaacacttccccctttccccgatattaacagacccttcttttcttctaccagatggaaggcccctgggttattaggacatcctattgctcagaggaggaaggctttcttcaccttcttcgaagttgcacgctacgcatggggatccgcaagaagcccgaatatgtctggaaggaataccgcgaaaatggaatagaaaagtgctctatggcagtctacctgggagaaagccgaaactacccaaaccaccctcccttccaaatcaccttcatcgggcaccgctttccagacacttgctagggtgttgcccgaaaagcccttaaacagctgtgccaaaactacagccgagagatctttgagacccccttcgatattttccacccagcaacaaaaatacccccacctggaggaaaagactccaggctctgtcaggaggagatcccacagaagatgaccccaccatcgtctacatggccggatacctccacaccctcgacaaccactatgatgagctctcctcccactgcacccacctaaactcccgagtggaaagcctagagcagcaggtcaaagagcttaagcaagagaaggcatctctccaggagagtctcaacatagcagaaggcgaggaagccaacactcgtgaggcctatcgaaccttaaagatggactacgacaagaagctatggaagctcgctcccaagaagaaaatccagaagaaaaccaccaaccaaggatgccaaacatagaagaagtagaagaagaccactccagccccacctccccctagaatcgatgattggtccgacgccgaggatatatccctagcaagccttgatgatcttctcaaggaatttggggataccttagagaaagagttcggtagtacctcagggaacgctctcgtgtagttcaacctgta

SEQ ID NO: 60100 - DNA, 370 bp, Zea Mays
ggagggggctttctttttgggtggctaggcttttggagggggaacactggagatgttgggaagggtatcaagtgtgttcctgaggtggttaggtttagggacccacacattttctaaggggctctcacaggctcctcaatcacaccatctctcacaggggtaataggcttaggtggggtgattttgataagcttgggaatgactgaaggtttctctgatggtttcaagctgaacgtcactcctagaactagaagcgaagtctattcctagtcgaccagttcccctcttgaattgactaacaagcatgcccaactaaggctcactacacgacacccagcacaagaccgaccgaaggtatgtgttttcttcc

SEQ ID NO: 60101 - DNA, 388 bp, Zea Mays
ttttattcaaagggaatctcaaaccagctttgaagaaacttttaaaaactactacttcatcttttcctggcttcggagtagtttcctccccaccaaagcgaattagctctttcttttcttcattaaaatagcccaatttcagcatcttaggtaggtcaccttccgagatggtggattttccgaaatccagatggctgggtttgctcggcaccgcgctgctataatcatcttcagacccagtttcgtcaacttcagcttgctctgcttccgcggcagggatgtcctccgatgtcaccagcccagaccgcttcattgcttcggaaatcagaacagtctcagtagcttcggtctcatctccctcacgatcaaccctagcagtggagcgaac

SEQ ID NO: 60102 - DNA, 620 bp, Zea Mays
aatctgttgagctggtactggtacacacactgcttgtgtctctagaacgaagcagtttttttgtatttacctcatgaaaaaaaacggtgataataaagcagctttagacatcacacatgcatataccctgtgctgcctgtataagccacacctattagtacaatctgcacatgctgcccaaatgcaagctgctcctctttccgcgtcctttgatctcactttccctttttttttttgcttgcttaacaaaggcaaaggcgaaagcagatgcagcaaaagccattttatggcacgtaatggatggcatcatagctagcactagcagcaacctccacagtcattactccccagtccccacagccagtcatcagtccccccctggtcctgtgcttgtgctgttgcttcactactccctggccggccggctgtcgtctgggctgctctcaaagttcctgcactgtagtacgtagtgtaccctctacaagggccataactcccatgtctcactactcccacaacacagccaatgcaagagatcgacctgcagcggcagcgccatggcctactacaacgtcctacgataacggatcctccttgatgggtctcatcgtcgtctactc

SEQ ID NO: 60103 - DNA, 562 bp, Zea Mays
caagatcacgcaggctttgaaatctatatgctagaggagcaaggccatccaagtagaggtacttttgatgtgacattcttttattttttttcatatgttaatttagactgtatgcccttaatgaggtgaatgtcaatatcctacgtttggaggcatttctttaattcctatttttggtacgagcatgttacttaatcagtgattgtgtgatcttgtagttatggtccaaaattttatatggcacaaggacgttgttgtgttttggtttctgtcacgccttgtagttatggtccaaaacattacttgaagattactttgttagttcctaagttcatataatgtcgtagatcttggtagccaatttcatgtgtgtgttagtgctgtatatttggacctgtcatttacatttacatggtgtgtgttattattgcaagtgctctatagtatgccttttgatctatgtcaggttgctcaactttattctgatttggtgaaggtttgttccttcaacttaatgcatcagtaatggttgcattttctggtagatagaacaataccattc

SEQ ID NO: 60104 - DNA, 593 bp, Zea Mays
gtcgtggctataaatgatagctctgggctttgctttccccagttcatcgcccccaccaaccgtccgccacagaaaccgccgtgatttcatcgccacgagggatactgcgccgccgtcgtggttgtgtacctgtgccgccgtttaagggtcgtcgtcgggtccgggagctccgctacacctttgagattgcgctcgtggtttatgcgggtgtgttgtcgtgctgaggcccaacgaattgctcaccgaagcttcaatcaccgccgcgggtggacttggattctgacgccaacaacaccggtatgagacactccctggaaagcacctttgttcacgcgttgtatagcgaccaacgacgtaggatttagcgctcttttatgttgtgaattgcttgtcggtgcgtcgggccaccaccctggtcatgcgcctccgtgagccataggctctgctggaccatcgcgtatgaaacctcactgaatcgaatcaccgtgttgcgggccacgtgtagcagcttttaattcgagtttggcacggtggtgtgccgtattggccgtacgccggtgatgctacgtcgtggggcgcaagcgcaccgtcgc

SEQ ID NO: 60105 - DNA, 585 bp, Zea Mays
aagcacaggggctaatccataagaatccctagacacagagcgctatatgcaggatagtgggttgatttccctatactagggggtctattttgcaaagtggtcacagcgaaagggtatcatttgtttctggccttcggattagttttggacggcccagattaaatctttccaactccgaaccggtacgcaatcgcacccgttagatcaaagatcgacgctcacaatttaatgaaggcgcgatctaatcttcaccatgcatacaccgatcgacggtcccgatcacctagtcgaaccggtactagtagactaatcctagccgttccccagggatcctgtggccacgacattgccttccacctcccgacggacacccacggcggcgcacccatccatgcgacagcgccatggctgtcgaacacccgaactctccccacacctccatactctacacgcttgggcgaaaaaccacgagaagtctactatgattcggttagtaggatcttactagagatggtgatgtggcgcacccagaccacggcgagacccaactccgtgacggccagccacccattgtcgcgctattcc

SEQ ID NO: 60106 - DNA, 396 bp, Zea Mays
gtggaatatttggtggacagcagcttgccgagtcgggagacttcatcttgagatgcccgcaactcatcgcgatgatggtccaaatcagacatagtaaagcgatggctcctctccagaatggtcaaggaggtgctggcatcgcgaaatagcctatccagattatcacgtgaagcaacgagtgctcgtttttcctcctacaagtaagaacagcactaagcattgaagcaaagggagcaaaacaagagcagccaagagagtttacctcatatgccatcttctcggagtctagttgtgcattcagagtggagttcaagcagcaagcaccgtccaagaaggcagaagtttggactaagtcggcctagctctgggaatacttctcttcaatgtcagagcacc

SEQ ID NO: 60107 - DNA, 404 bp, Zea Mays
gtaaaaatccccagacccagcgaacagtggaggtggatggcgggttctaaatcaactaaacacaggggctcaattgtaaactgacccagctgaaggggtaccgcctaatctaagccgtccgatcggaaatcaggggcccggattagatctccacacccgtgcgaaccggtacacgccagatccgcaagatttgaatccaacgccccagatcaactctcccctcttttaatctacaacgttcatcaatgcttggacgtcgccgattcacctaagcgaaacggtatgaccccgtctaatctagaccgctcaatggaggatcgacgactcagacttgttcttccacctcgccgccaacaccggcgaccgcaccgaacgttgcgacgacccgccatggcaacgacgcc

SEQ ID NO: 60108 - DNA, 1694 bp, Zea Mays
acatttttaggatttttctacaattttctacaaatttccaaagcttgacagaaaaagaaaagggaaaagatttgaacagtactgggccgattccagcccaagatggcccaaccctagcagaagcgcgcccgcgcccgcgaggtcaggtttgcacagaggccctcgcagctttggatatccgttaagaacccctggctactgttcaacatctcactgacagctacaaaaacacccccgagcttctatcctttctccgttcgaagtccacggcggcgaaccgcacagggacacactccggcaagcatgtatcgactgattcatgtgatgactagcgttctactttggcagagatcaaatccaagacctaacgagggtttcccctcaaccaatttcaagaatgggcaactggttgactctggccacggcgaccgtagaccatgcagacagatgaacgtgttcccggcgattggtggactcctagttcaattgggtgggtcggcgagcatcacggggttatgaaagcactcaaacgagaaagcagagaggatgaactgaccgggattgtgctggccgcagtaaggtcgttttcacggtggcggagactgtaattgggggaaatgagcgattctcggtcccaggtggataatctggggcaaggtttggtgcaatcgatgcgtgattatcctacggagccgtgggggcactcaatttatagtgaggttaagcggtggcgtctaatttttcgcagagagaccagcggccgagacgaagggtgagtcatcggcgcggtctatcatggcgcgccctggggtgattcctccggtgaggaactaaccttctcaggatgtctttggtgacgtggtagatcgccaaagcacgtggcgttcacctggtaaacggcgagctccggtgaggataaactcggccggtcgcgcagcaagtggataggatggccggaccagctagcaattgtaatccatcccgcgctagatctttttacccatccccggtgttatccattcctccccgagcacgaatcggaatgacggtggcatgaatcgcggcggagaggttgtcggcggcgaggaccctgcgctggtggcctgatccatttcagggcactgtaccgtgggacttccttattcagttggactgaccgagcaagtttggcgctaattttcttccgattttcaatggcaaccagtggattggccagtaacaaagttgttgtctgatgatccaacaacaatcttgctatagcaaccatagccaaattcttattagatcaaggttgatttccagttcaaagttgactcagtaccactgttagtctgaatttcatacttcagacagcctgaaagttcaactttgagtgcacttttctccaaattcttcacaacaaccatgcttactctcttaagcaaagttattcacctaagatagatctacatagttgatgtggtgacctagggcaaattctcaataatttggaagatatagagctccaaagttgagccaatatcactgaaaatcagacttaatcatttgagaaaaatgtggctttttgcatataagcccaaaacttagggtttagattgcaaatccaccttcttgtgaaccatagtacttaagatacttatttaacatggtttttgcactttagttcacaagtgcactatttttgcacataggcc

SEQ ID NO: 60109 - DNA, 573 bp, Zea Mays
cctgatagcacacaaagttattcctttggagccgctcccaaaaagcaaataagaggaggagcgaatagctctagtaatgagctcgttctttgatattgacgaaggtgagtctgaagaaaaggatactgtcagtacaatattagcaccaaaaggtgttacgtcgcttgatgcaggtgtgactaaagcggtgacaccttcggtgatcataatagtcgaagagaaaggttcctcaaaacttgtactgacggaggataaaggtaaatgacctactaagattgaagaggctaagaaggctattgaagatgatacaccacttggagaaggaccttttgatcaagagttgggtggtcgaaggtacatggttcatcatgctgtgggggaagttatgggtgcaaagcagctggctgaagctatcgcctatgctgaacaacttggatacccttcggggtccaccatcttcaggggagggctagatgattacttgtattgctgcctggataatataaaaactgaagtgtgccactacatagtggataatattggtttcccaaagctagagtgggctttcaacaa

SEQ ID NO: 60110 - DNA, 525 bp, Zea Mays
aaatattacagaaaaatcagataaaaattatatgtgatatgagattaattataaatcaattccttgcagataggcatgcttattacatacttatatgtggcagaaaaatcatgacgacaactgtgcccaagccccaagcttagtgctgatccctttagctaatctcggctgggaacagcctagatgtgcgtgtaaagaacatggtggttatatatacagcctcgaaacaactaagcttgtgtcattaaaaaatattagtcttcatgacaccctgcacataggcatgcttgattatttgagtttgggtgtatagatggctggcatttacaattgtcaaagctttccataaaaagtataaaactattaaggttttacataaaaggtttttgtgccacctgagtagaatcaagaggataatgatcagtaatatatttgtccagagttgcaagaaagctactaagaaccggaagatatgcagtacaaggcagtgagaaaaggctgttaattccatagacaaaagtggcg

SEQ ID NO: 60111 - DNA, 552 bp, Zea Mays
ggatagaggtctgactgctgaagttgtggttgctaatttagttttcaagaacattcatcctttaaaggacagggcctaccctgcctatttgtacagcggtgtcaacgattctacccgggtcacaaacagaaaaattcccactgaagatctgatgagccgactggacatgatcctgagggatagagtttcaaatgttggtgctctggtggcctattctgcatggaacctgccaccacttaggccattttctgagtttgtgtgcaaccctcctgctcgtgacagtagcctaggtcttagagtgcgaccctcttctaaggacattgaggctttgattgccccacttcggagtcttccagaggatgagaagcagactcattttaagatgtcggctagcattgatgatgcggagatagatgttgtgcttagcttgctggctggggaatcatctgactcaacccacaccgagccaatggctatcacagctgggcaagaacttggtgaagaagtggagactcggaaactcgaaggcgcccgcccaaagcgtccacgccg

SEQ ID NO: 60112 - DNA, 504 bp, Zea Mays
agctctagcgttagggattatgttgtccatgtgggccattgttatcaaggtatgtttcattagtctactctcttccctggtcctataaattttccctcattatttgatcttgacaagaacaagcatgtcttcttggaaattccaactgaggtttttgagagggtgtcactagaaagacatggtgtgcccactgaggagatttagctgccacgactacatcatccctggggccagcaggatgcccatggaggcagtagcacatataacttcagcacataagctatccatgaagactaaacttatgttattagcatttttgttgttgtttctatcttacttctagagggggcatcgttttattggcttaaacttatggttgcgagccatggctcctaaccctatggaatgctctgtagtaaactttgttcacttttgtctatctttggttgatggaactatggtttcactggtttctctagtttttttgataaaatatgtcataag

SEQ ID NO: 60113 - DNA, 729 bp, Zea Mays
gtagtagtgaaataatgttgtagtggttagtagtatagtgtgatgtagtaatgtaatgtagtaaaaaggggaaaatgctgattcataatgggtcagcctttgagtttgcgaagaccccttccactatgtaatgaagaagtttcaattattccgagcaaactttcatttttttcgccgctcctcctttataatagtttgatagttcgtctttgcgcctatcactgccggcatttttagaaataatcaccgagcgataactgatggtactagcattttagagttaattgttgagtcgtgcttgaccctattggtgttttagaggtaacggccgagtggcacttgatactgtcggcgttttagaggtaacagccgagtggtgcttgacactgtcggcgttttagaggtaacgaccgagttacgcttgacactatcggtgttttagaggtaacggctgagttatgcttgatactgtcggcgtttttagaggtaacgaccgagttatgtctgaagtctcattttcccgagtgttgacttggcactttttagaaatggcgcccaacctgggaaaaccccatttatactcatgttgacgtgcgcttttgatttctaagccctaacctcacatttccgcctcaaaccactcccctgtgttccttagatttcgctgttgttcgttccgctggcgaaattgcgatggcgacgaaacggaagaaacagagctccgttgtg

SEQ ID NO: 60114 - DNA, 289 bp, Zea Mays
tatttttgtggatcgctctcaagtggttctcgctctctcgctatttcttctttagatcatccttcataatttcctctggtggcaagggaagcaaagagattctctcttctttagacatgaaagacaacttgttggttcatccaaaaatttggacatccatatcatataaccatggtcttcctagcagcaattgacttgcttgcatagggaccacatcacattccacatgatcattgtacctcccaacagaaaaaggaacattcatcatgtggctaacacgcaacgctcc

SEQ ID NO: 60115 - DNA, 294 bp, Zea Mays
ccagatttagacaattagaccgcatcaagtgataagtatgcattctgtagacaacaacttccagcaatcctccattcctcattgtgcccagcgaccatcgaccaacattacactacctgctgttgcagttatattgttgtttcctgcagtttaaaaatagagaacaaagagaataaattgctacttcatgcagtttagtttatattgactgcaatagaaaataaatgaatagataccagaatgtcctcttgaatatcttgaagtgtcacacccggatttcggggcaccaagacc

SEQ ID NO: 60116 - DNA, 464 bp, Zea Mays
ccccggtggcggacgcaaggggtgggcaatgggggccacggccccaccttgatttttataaactcttatacatagacttaaatatataataacataaataaacttttatatagacttagatatataataaaataaataaacttttatatagtaggttggactaaatttaatgaaaactagattttgatctaactttttctcggtgcttcactactcagcccactccccacccgagtcgtggtgctcgtcgccacgtcgggatcttgcacgcagtacatctactttgccttctaatccgcaccggtggatgggtaggctattagtaggattctaccttggcatcacagcaacacccgccctggctatctcacaagggtcccgttgcgccgtcgcaacgcgacaatggctgtcgcttgctgccactgcctttcgcctcgtcgtcaccatctaccgtcgcatcgtcg

SEQ ID NO: 60117 - DNA, 548 bp, Zea Mays
gaccgtgatgtgagtcgggcctctattttctggctttcattcataggcccaaacaggcctctttcttctgctctcgtaggcctctttccaactgatccgtgtctcgcctgcacttatatctacatgcccggtgctcagcattgcagtaagagcataaatctgactcactagcagatataaaggaaaatgaaacatcccctgaatcaaactcacgcgagcatgaatcagtttcaaggcctcttcttctgtaacaagaaaaaggccaagaagaacgttacgttgtgaggtgcctctcgatcgaaggttggcatggtaataagagcattagtagtttcggaaaaggacagagctagattagcttgcctgacggcttcccgtaaccagatggagcaaatcatacctgcgaagaacgacgagacaggcaacttcgatcatcagaatagcatggcagagagaatctgctaaaatcttcgagatgaaggacatagaccttgcagcaaccggtaactgtttaaatggttcagcaagaacgaattaatagacctgca

SEQ ID NO: 60118 - DNA, 285 bp, Zea Mays
attgtgtcttgacaaggcaattatgaatcagttcatcagatgaagcataattgatcgaacacaatgctatcatggtcagagtgtgaaattgtggttcttgttcgtggaagtgtggggatggacaagaagcaagagccgccaaaacgaacatgaatgtctcaactaatgaaactgcaaaggtactacatggtgaaaggaagcaatggtgcttcatatgattttcgaccaagaagtgtgcaagaatgaagccgaacacattgcggtcaagaggcgacgacggcttca

SEQ ID NO: 60119 - DNA, 456 bp, Zea Mays
gttggatttccgttgaagaaatatagggagcggaagaattgtaaatggttgaattgttcgatggaaggaaagaatgctgaaagggtagctggaaatccaaggatatgtaacacatgttcaaaatgaacacagtgcaaggctgggatgaaacttaaaaaaatcaacgatgatgctaaagagaatgttatttccgtccgaattgatctggtaaactatgagcataatcatgaattcttgaagaaagatacagaaaaaggacaattgcaatgcaacaaaactcatgatcgtgattatatggagttccttagtgcgacgcaagaaagcaggatttcacaacattgcattatggattttgtttcagaaatgcatggtggtccagaaaacgttacaataaccgtgcaggacatgagtaacctgtaagtgtattatgcattgacaataatggtattatatatt

SEQ ID NO: 60120 - DNA, 586 bp, Zea Mays
gtaatttctattgtaagttctgacttcgaaacaaagaggatggattcattttggccctttttgctatttatggcccagctcaagatgatttaaagaatgatttttagctgaagttgtaggtgcgtgtagttctgaaacacatccatttatgatagggggactttaatatcatgcgaagagcggaagacaaaagtaatgataacttcagctttcgatggcctaatttgtttaatattatcatagcgaatttagaattgcgcgaaattgaaatggtgggacgtcaatttacttggtcaaatgatttggatccacccatgttttaaaagcttgatagggttttaatgagcccggagtgggaacttaaattccctaacgtctcagtgcaagcggttgacagatctcggtctaatcatacgcctcttctactgaatggtaaagccctcatgaacctaggaaatttctattgagtttaaatttgagttaggatggttaattagagagggattctttgataggatttcttctatttggcaacaagaaaagagaggtgaaaccaccatttatatatggcagaacaagattaggt

SEQ ID NO: 60121 - DNA, 626 bp, Zea Mays
atccggagttgttttacactaggggaggatgtgggtggcaaggaccctaaatttatgacttcttcggtgaagatagagctgtggctatttttagatgacctatttatctctaaaatggatgtgaatacgtacaatagtatgatgatatttttttattgggctcatctttgcctcttcaatgcattattgatattaattactggcatatgatgagagatagataagtgggttagaggattgcctgccactccttgtttttaaaataaattgacatccacttgaatgttttgattataaaaatgcatgtattctgtcaatcgagtgaaaccttcaagtaaaattttaaacaagatttcgggtttttattgatactttttcttgtctcgtcatgtttttgtgccctgaaatttcattaatatgcacattatattgctcatatgatgttgatccatcaatattctatgttcatattggggatagattggcttcaggattttggtgcattattgtcaatattattgtaagtaggagtatacagtatgtgctgagagcctgagagggggtatattatacctgagcatatttcagtttgggttgaaaaaaggctgaaagatcttacccacaaa

SEQ ID NO: 60122 - DNA, 626 bp, Zea Mays
gtagaataggaaatctgctagagacaacctaaggacgacgtcatagatctagattcagacctatgtgccagtattgtagacgtgagaaagatatataatgttcgttttttatatggcggtgcaaggataaggagaaagaggagagacaatggtggagaacctcttttctacttatttattatagtagggcacatgtttattatacagaaaattagtgccccttataagatttggtattagtctatacagttcttgttagtgatatatccaagaagcaatcatacacaatttatattaggatctaattgggattagaggttaatggactgcagctcattaacacattctataaatatatgggaataggttagggctaggccactccaccacacgtgtaaaccctagtcgttgccttcctcaggtcatgaaaccctcactgcacgcgcggtgctaggctgctagcacaccagcgcacgacgttccttccccgtacgtgtggactacgtggaggcacgttgtgactgctctgctgacaaaatgcggaggaggagacgatcgtgatcagctacttcctctccaactacacgtgcctacgttggatcgctgctccaacttgccttccgctg

SEQ ID NO: 60123 - DNA, 605 bp, Zea Mays
atggtttcctcccctgtgttcgcgcttatccctatcgtgtatagcacctctcaggtgggattttggggcgctgtgcgggggtaatcgaactcggtggcgatgcgctgtcacggtggatctcgccgtcgccgatggtgaggacgtggggttgatgacggtcgtggtccgtccgtttgttgatgagcgcctaggattagatctggcataggatggccctcgcctgtcgatcctgcaacgaacgactacgattggaacctgacattccagcgctagcgtgggttggtagccgttgatctcgtgatccacgacttgggtgtgtaggcgggtttgatctaatctcggccttcaatactcgataggatggctgtaggccctggataccccttcggttctgtagtactgcaattgagcccctgcatttattttaaatagaacctgccgtccagagcaacaacgttttgagtctcgggaatatttgtagaataacccctgccttctctgggaattgaggcccagtccaggaaattaagaaattcaggaaactaaatagaaaatagattattaatatataaataagtgctagaatttataaaattcatataaaa

SEQ ID NO: 60124 - DNA, 513 bp, Zea Mays
attgtgaataaggtttctcttatttgaacttcagttcacgacaaaattatatataaattttcagacatatttttggtgctaatactttcaagaatgtgagtcttgtgtgctcttaaaatccatatatgtttgattttactagtgtgttgcctttaatggccccagcaccaccacatatattactccatattgctagtagatcctcttacattgagctatttacaccaacacccccctcaagatgtgctaaatatattcaacatttccatcttgttacatgccaattcactatccttaggagctagaccctttgtgagactatcagctaactgattacaagacttgacatatttcaacttcaaagcccctctgtcaatcttctccttgatgaagaatctatcaatctccacatgtttcatacggtcaaactggactggattatttgctatatttagtgctgcaacattatcacaatgaagtaacattgtctcatctttcaacactcgaagctcc

SEQ ID NO: 60125 - DNA, 473 bp, Zea Mays
gccgatggcgctccgccgtggggatgcctggcgccgccgtcttgtgggctgggggtggtgtaacgcgcggccgttggatcctcctgtaggttcaccgtcgttcatctgccacgaatcgactagtcggagggggaaattggggaaccgtgggtctgggccgtggaccagccatggcgcgccgccgtgtgaatcctgggtggtcctcgccgtcggtgttgggtgggtagaagaagcctatgccgttagatctgaatgcacggttgagatctgaacccgcgtatcctttcgtcgtgatcgatctggtccgttgaaaccggatccgtcggctaggtttgggtaccggttcgatgtaatatagagctaatcttcgcccttcaaatctaatcgggcggccgtgatcagcccataccccttcgaccctggatttctttttaaagagcccctcggttttgttataataaacccgccgtcca

SEQ ID NO: 60126 - DNA, 327 bp, Zea Mays
ctactaagttattgtgacccaaaagatcctaacccaagactcaaatattcagtatttaatcatttgtcttatctacaaatctatcttaccttatgtatctaacttagatggtcaataccaggacagaaggaggtgtcgatcaacctgcacgcatccgctgaagaaggtcggtagctaatctagaaccggagatgaattccccaaatcctccgcctgctgggtcggaagccttttttgttgcccaaatccagtcgctgcaacagatgtccaacaccatgaccgacatgcaagctcggctccacaataaccaacaacacccacacccac

SEQ ID NO: 60127 - DNA, 526 bp, Zea Mays
gtcatgagatgcatcaatgtcacctccctgccccaaaattcaatgatactatgtttaaaccctcagtcatgtgtcaattacatttaatcgataattgagattacaaaggattaaacaaagatgaaacatatacatgtttttgcggtgtggcgtcaaacatcggcaagtgggaagacgtatatgagctcataatgttgcagtctggtatatgttgaggtgggatgtttatgtccctcgacaatttattaccaacattaaaatggtaatcatgttgacattattatggttttgtctaatatttggatgcaaagtggaaattaacatataatgtaacagtgatgagattgtatataatacctgctttttggagtttgagtatgtgttcgtctccatgggcgcagtaacgtccaaatcatcaaggcagccctcaaatgcacgacgcatttgttgttactttcatgtatttcctcaaactgggtgcatgtcaactccgtagttggctgtgaagttggcatagtcagatcca

SEQ ID NO: 60128 - DNA, 1007 bp, Zea Mays
ctataaaagatgaatttgttctacttggtaagttgaaatcttgaattcgacttcctcttttgctgaataaagtttcaagctcctctatcagctagtttttaattgtttcataggaatctagtactctgggtgattaagcatctgtctagtgttatattgaatatcatcagcaagtaatctccaaactttttcaaagaaagacaattcatcacccacttcacagaaaagaagcattgtgacaaagagttggcgaagctgattcgatgtggcccaagacgcagcctcatcgaaggcgtagtaccattcttgatcatcttctaggagcccacgtgctctacaagcttctttaaaggttggatgtaaaatatgatcgtatgttcgtaatgattcatagttctgagctcccttgacaaccatcagaagcatcctaacataatatctttctcctgcagatggatgcacaaaatgtatgcggcctattttaccatggcgttgtctgtgctcccataatcttttcttttcatcccatctccactcggatggaaagtcagggtaagttagggatctagcgttttcatgtctttgattagcaacaaaccactcagttagcatggttcgacgtaagaattcttgtcatagaatttgcgacatgttggcattagcatggtatgtaatgtaattctcattaggcaagtgaaccggtaatctctcaacgggaggaaaatgtcgatggatttcaaaaccaaaaatcctccaacatgaatcatatggacatataaatctagcatctaaatattccttgacctcattccttgtgtttgtctccttatcaataggggtgtcctagccatttataacctgtttcaaatacaacttgctgcgatctggaccctttgtaacatatttgaaaaggtacttaatgaatatgcttttgttacaccattctacattgatgtgggcttgatattttttgagtaatgtcatgttgtagggaacaacccatctat

SEQ ID NO: 60129 - DNA, 463 bp, Zea Mays
actgctaatcgcccgcttgcactcaccaatgtgttacatgttcctaaaatttctaaacatcttctttctgttcataagctcacccttgataacaatgttttctttgaatttcacccatgaaattatttcatcaaggaccgagccacaaggaagctacttcttgaaggcagatgtgaatctggcctatatcctatcaagtcatcggctgtcaagtccctctgtcacgctcttgtctcccattcggtgcgcccggatcaatggcatgctcgtctcggtcatccaactttaccagttgttaggtctattttacgcttgaataatctttcttgttccaaataacctagtgagtcctcagtttgtaatgcatgccaattggccaaaagtcatcaacttccttataaattatccattcatcgtaccactgcacctcttgaattaattcattcagatgtttggggtcccg

SEQ ID NO: 60130 - DNA, 672 bp, Zea Mays
gaacgatgtcaacaacgctattttaaactgcgtttgattctatatgaaatcaaataatttcatatgtgggttgaacgcctgattccacggctatagacaatttactggagaaacagatctcatttataaatcctcggacttgacgttttgattaacgagaggggactaaattattttacacctaaaaacttgtgtcatcgagttctatttaatttagtcgagcctagacgatttcaccgctatccgaacatcaatctagaaaacagctcaatttataactctatgcctgatttttcttggacacggattgtgatcaaatttataaaatcgaattctcatattcgcgtactagatcgatccaaatagcataggttcaacatcttgaaagatttctaaaatccaaacatctctaaaatttttggacggcttagatagatagagatagatacgatatcaaaataacgataacaaagatgagtaaaatttagtgtccattttattttcactgatatcccgtgcttaagtccatattcgatgtcgaacaggaaataaacacctggggtgttacaattgccatcgtcgcctccaccgcagctgtcgtcgtcgctgccttcgccgccatcacctccaccgctgtcgtcgccgctaccgtcgccctcatcatcactatca

SEQ ID NO: 60131 - DNA, 657 bp, Zea Mays
caaaattttagaaattggaatggctcaatttggagctagaatgaattttctatgcaataaacaagttttaggaattctttttatattaaaaatcaatttttgtatctatttacctattttatatgctctctggactggacctcgaattccagaaagtgcaggggggtctggcgtacgtttaccgagactcataactctatttgcagtactgcgggttgattctagaaaagcacaaggactcttatgcaagtttctagggccgaaggggtatcttcaaatcgaagccctacgatcgcagatggacgtggcagattagctccgagccacggtgaatcggtatccgaacacaaccatccgatctgcagcgaacgtcctagatttaaagcaaccagatccaatcgcgcacgcccgatcacaaacggacgcctcagatcgatcctacgaaccggtacacacgcgatctaatcggagccgcacctggaggatcccacggtcagccataactccccccaatacccactcccgactgtcggacctgagcggcgccgccacgattccacggtggcgcgcacaccggagtttcccccaatcacgcaccagagcccccggttcccaatccgcgagtcctacagcgcgtatatgtgacaaggaatcgac

SEQ ID NO: 60132 - DNA, 546 bp, Zea Mays
ccggcagttggcgtgccaggtaggggatagtcgcgtaaaacactcctagttctcgccagcactctagatggcaggtttccaccacccactcaggcttgggatggtgatcatgtttgggagtctcgagttcatgcctcccggcatcgaagatgacatgatactcctcccacctgtccctcttgagcatctaagctcccgttgccgcccctcttgtcgcaggaggcagagacgtaacaaccgtgatcgcaccgctcatggtgccccgtgcactggaggagccccaggatggtagacgacatggactccctctcgagggacctagccaatgtcagcattgcacccagagcgccaccagccgcacctacactgactcatatggcgccaccagctttttggtatgggcaacaccagtccccacgccgtcgaacaagtggtaccagctgcgccagtcttcccacccacgggtcaagaggaaccaatcgctccttggagagacatagcagaggctggggaagaaccgtccgtgtttaaccccatcccctttgt

SEQ ID NO: 60133 - DNA, 1286 bp, Zea Mays
ccaaggacatctgcagttttttaggcctcgcaggttactaaagaaagtttgtagcgaactttggcatcctaagtcgacccctgaccaacctattaaaaaagggacaagtgtttgtgtggcattcagaacatgagcaagcttttttggcattaaaacaagttttaatcagtgcacccgtgttagctctaccggacttctctcagcaattcgagattgagacaaatgcgagtgacaatggaattggggctgtcttacaccaggctggtcatcccattgcatttgtcagtaaggctctcggtcctcgtcatcaagcactgtccacatatgagaaggaatgtttagctatattgatggcagtcgagcactggagatcctaccttattaacattgagttcatcatccgaactgaccacaaaagcctaatccatttggatgaccaacgtcttaccactccttgcctccttggcaacaaaaagccctgaccaagttgctgggcctgcgttacaaaatcagctataaacagggacacaccaacagagttgccgatgctctatctcgacttcctcatgaccaactttgttctgtcactactgtccaacctacttggttgtcaaaagttgctgattcctatgctaattatttagatattgcaccaattctgaaattgttggcagctcagactccttccaatcactacagcctgcacaatggattaattatgtacaaggacagagtggtgctccctgcacaatctgaatttccccagaaaatattctcaaatttccacgacacaccaattggaggtcattctagattcttggtaacctaccaaaagatcgagaggttatttagctggactggtatgaaacaaatgatcaaaacttggtgcagtcattgtccagtctgtcagcaagctaaagttgaaagagtaaaataccccggacttctccaacctctgccaatacctgatggtgcttggaaaatgatcacaatggattttatcgagggtctaccaacgtctgatcactcaaattgcattatggtagtggttgacaaattctctaaatatagtcactttgtttcgcttcgtcacccttttacagcattgggagtggctcatcacttcatggacaacatttttaaacttcatggattcccttcaactataattactgatcgtgatcggattttcaccagtgcattgtggaaagaaatgttcaaaattgcaggtgtggaattacgcttcacaacagcatatcatccccaatctgatggtcaaacggaac

SEQ ID NO: 60134 - DNA, 621 bp, Zea Mays
ccaacaagcagcttcaactcctccagtctcagcaggagctggctcgagcggaccccaagtggtggaaggagtggggttgggtccgtcagccgtagtagtggaagcaggctcgattggggccgctggtggagttggctcgagaggaacccaatcaacatcgtcgtgctcctcctccacaaagatggtctatcccatctgatctggacctgtaggctcaaagacagcggatggacaaggtgcagtctcatcaaatgtaacctcacaagtctccataatgtggttagtctctaggttaagaacacgataagcatgagaatgtaatgcataacccataaaaaccccatcagaagaccgtgactcaatcttgtccagattaccctattttagtacaaagcatctgcagccaaataccctaaaatgactgaccttgggtggccgtccaaatcgcagctcataagaagttttgttcagaaaaacccaaagaaagatgcgattggacacatggcaagcagtgttgatcgcttcggcctcaaaacgcctaggagtcctatgctcatcaagcatcgtcctggccatctcaacaagggtccgatttttgcgttcaacaataccattctgctg

SEQ ID NO: 60135 - DNA, 394 bp, Zea Mays
caattgtataatgaaaactgcatgctggtctttgccaaaacggtcaactaccatatgaccaaactctatccaagagactcgggcaagttggtattccactgactgaagccaacgagctgcagctcctgtgaagtgcatcgtagcaattttgatccatacacgaggatcaactgaatacatggtgaaatagtcgtgacaacgcagttgccaaagtttgggattatcaccatcaaaccccggaaatggaaccttaggaaggttgcctaaagaaggaacgaactgattctggaacatatcaccaaaattatcgtgcggaacaggtggtggcatggaagcaaaagttgaagatccggcgaacataccattgttcgggagtagaccttgggtataaaca

SEQ ID NO: 60136 - DNA, 424 bp, Zea Mays
tatatcctacttttgtgccacgtcgtcatggtttcatcctctacttttttatctctagcagcagttccctctaaatacccttataatccgctaccataaatatcatttatatccctactttttattacttaccaatttttcatctactaacaatcactcgcgggcataaaacacgagacgtaaacaatgtgaggggtcaccacaccatcatagtgagagaggaaattccggcgcgcttagcgtgcacgataggggggcaccgctgcggcctcaaatgagctcatgtagccgctacacgtgagggagggagcgcctgcgggaaccgctgcagacggtctaacccatgggattcacattcatttcttttgagggggttcctgtaatgtaaaatcatgtgtggttagtagactgagggtgagtttgg

SEQ ID NO: 60137 - DNA, 344 bp, Zea Mays
cttgggtgtccactgtccggtcacaatcagactagcactaaacaaaacactgagaaggtgcaacgatgcagcggatataattggttactcccaagtgtgtccacacaattacacaccccgcgcccgtgcacaaacgatttcctacgaaatcacaacgaacgggaacagttgaatattatcaaatcaaatatatctatttcggattggatagtatcttaactttgcctaattaaagataaaaaatactcatatttatagtatcaagtaaattgtattagattagttgtaaaaaatatattatttccgtaacaaatcagtataggaacatatgaatattatacatc

SEQ ID NO: 60138 - DNA, 954 bp, Zea Mays
tccgactgaagtataccttcaaatttagggagaagtttgatgagccgaatgatgattggctgaagtgtattgaagctacgagtgatgagatacttcgagcatactccaaggccaaagataatgctctatttgcagcctttggaggtcagggcaagaaaagattaaacagggtatttgatgctattggcttcgtataccctgactgccattacccgctacaagggcaagggaagaaaagaaaagccgccgcttcggccaccattgttgtgccggctgagccgaaaagtaagaaaataaaggttctgacccatcgaccgcgatatattgaaccagccataatgcctgaacttggcaaaggggcctcttcaactgccgaagcaagacaagctgctccaattgcacagagcgttgaagagcgaactgtagtgccaaagatgcctatagtcgggcccgccgaagctgaagatgataaggacaaagagccaaaggttgaagaaataataaaaatgccaaaaattctgagccctccgacagaggcaaaactgccgaaggtgcaaaaggcttctgccacaactcccaagaggaggaggatggccaacgtggtggatgctgtgctggagactacaaaggccttgagccctgctcctacaaagaaaattgctgaggctgccaaaacgcaagccgaagccgaaactgggcaagcagaaaccgaagctacgcaagctcaggctaaagtcgaagttgggccttcagtgccctccgaaatggagcctgccacgcctaaagaaaaattgacagagcagattgcatctgaaaaaatcgaagctcctgctcccgaagcttcgaacaaaaacgttgactacatcattcgtcatgcttcaggaaagaaactatcccaagaagaaatactagaagcaagacactacgcccaaagattaaaatatccgaagggag

SEQ ID NO: 60139 - DNA, 708 bp, Zea Mays
gggcgcggagtgcgaccgtcgttgaagaactgttggcaccattgttggggcttcggtgtggagttggggcgctgcattggacctcagggagcgcgttcttggccttggcgggggttgcggtgcattgagaccgagcgaatttctcgccatcgtcgcgtcatcaccgcggattcacccttcgtagtgagccgctgcatcttcaacacgtacctcagtgagcatgcccccctatcgcttcgcactatcatcctctacatgtaccatagggcggattggaggatagccgtagaaatcaccgagggcgcgtaatccggtcatggcgctcgcgcgggggataagcccggcagacggagttaggcgggcgtgactgtggccgttggatcccggggcgatgattgagattagaagttgcacacccgttcggctgggatctatgctgaccgtcggatattgatcggacgtgtacgtggggtcacaggtgttttaaatccaaactttaggattctaatcggacgagctttgttgaataccggttcaggccaatgtcgaactaatctgggccattcctactggatcgggtggccgagatctgatggtaccctttcgcgatgcacgttttacataagagacctcggcaaacatgtgaattaacctgccatccacgtatatgtaaagaccatcacatccaagccctggattttacagaat

SEQ ID NO: 60140 - DNA, 274 bp, Zea Mays
gcatggttgaggcttttggaagaggtattgattttcttcttttgttccctcctcttggcaatcctcaagtccttgatattttcttcaagggattttatgcatgccacggttgttcccatctcaagcttcttcaccatgtgatcacggttatcttgagaaggttgagcaatgcacttccctttaagttgtgtcaagctcatctttagcctctcattttcttccttgagcttttgatatgtatcatcttttgttcctgcaaattctagctcaaagg

SEQ ID NO: 60141 - DNA, 686 bp, Zea Mays
catggaccgaggacgagagaaaatggactccgccgcaggaccttgtttgggttgccgttcgggcctcggatctggtccagggagctttgccatgctgcgcgtgactcgtccatggccttgcttgggcgaagccacgcttcaggcggccggaatccttcaccgatgcaccactactactcaccactgtgcctggagatttacccgcgaagatctctggtaaggacgtttcccattgcttcaccatattcctgacttcgagtagtgacattggaatcaacgattcatgcacggggttcgaattctggggggttcggcaatggctccactgctgggaactcgtccgccgccgtccctggttggaggtgggaggagacacgacgaccgctggcctgggtttcgacggcgtagattgaattgggtaccgctttgggggaatccaatctggtgcatggatctcagatcagatggtttggagcggatcaagcctcataccatctgggccctcgatcagcgatcgggcggttgagaggacgtaccggttcaggatctaatcccaaccgcagatcgcacaatgtagggtctaggttgtctgcgcgttataacagccacgtttattttacaaaagagcctccgcaaaatccaataaccaacctgcaatccaccaaagggttaagaccagtaccatt

SEQ ID NO: 60142 - DNA, 650 bp, Zea Mays
gtgggctgtaagacatgtaatattagatttatggagatatagaaaaaagagaaatggagatggaagaaaagcgagcttgtcgatgtttcgaaccagctccgacaagtaaatttgttgtgcgtgttccgggttcgaatggtgtactcagtggacgcatgatttatactggttcggacagaacgtgcttacattcagtcttcggtggctcaccctaccgacaccttgttgctcaatacttatagttggggttaccaggcaagagagggaagaggctcccaagtctctcatgcgtggagtggcaaaaggactacaaatctggtgctcgctacctaacaaagccttgggcgtcgtggcggtgtgctcgttggctccggcctccgtagtccttcatgtgctctggttgtctgtggtctacgtgagtcgtctttgtgtcctcttctcgtctgtccctccccttttataggtcaaagaggggtcacttgctagtagcttcacaaggaaggagctactgtgccgtggtaaaatgaggcgttctacctcggtaaagccaggcttgtcgacatgtgcctcggtcatctgggcttctataggcgtgctatttaagaccagttgcgtgtgggcggcgaagagctctggcatcatcattactg

SEQ ID NO: 60143 - DNA, 468 bp, Zea Mays
gtcagagaatcatgggtttggttggcgggtgatatttatctgaattcaaccggatctaacatagtctacaatatcgaagttgatctcgtttggtttggtccatgtgtttctcgtccagatccaaaacttcggatataaataacggatgaaaattcatctgactccaaagtattcatcaaattaaatccggtccaaatattgttgtcgattttattttgttcgaccattttatacatcttttagaccctgattttataacctcaaaatattagcatttcgctttagtctaaaaatggaaaagaaaaaaaaatcccccaccaccttccctctcatcctaatcacgtcgtctctcctcccttatccgttggagctcatctccagcttatgccctccacgtactcctccacatactagctctagaaattccgatatgcattcctttatctcctccacctccacatagaaagc

SEQ ID NO: 60144 - DNA, 501 bp, Zea Mays
aaggattaccatcaaggattgatgtattactgtgagccgttaggtggtttatatagagtacatggcgtagaaagataaggcaacccacgaatacatatgagagtatgcgagacataatatctaaattaacaaatatgctctaacacatatatgacagtctacgagacacaatctagactaccaaatataatctaacacatataacagtctacgagacacaatctagactactaaatataatctaacacatgacggtctacatgacaaggtatctagactacccgatatacttttatcagtttttagtcgctatagaattatagatggtgggcgctccacatatatgacagaccacagtccatccacaccctcctctggtacctgaatactttgccttggcttgaggtagctgagttacgtttaggacttgggtctacctgtctgaccatttttaaatgtccattggtgacattcatggatcagatctcatcgacccccggt

SEQ ID NO: 60145 - DNA, 362 bp, Zea Mays
atttggtgagccggcttgagatgatactcagaggcaaggtgtctaatgtcggtgctcctgttgcatactcagcctggaatctgcctcctttcaaggccttcatcagttttgtgtcaaatcctcctactggtgatagcggtttgggtcttagagtgcgaccttctcccgaagaggttgaggctttggttgcttcacttggcgaaatccccgacgacgagaaacaggttcatttcgaggtgcctttgaatccgagtgacgcagaaataagtgccatgctagacatgttggctgaagattcctctgatgcagcccctgctaaaacactggttgtagcacccatccccgagtctggcaaagctttg

SEQ ID NO: 60146 - DNA, 528 bp, Zea Mays
ctttgtctcactgcttctctatgcagtgcccccttgcacatattctcacattcctgtcaaaatgtttgaatcaagtgaatgtgtgtgtccctagtactaccaagagcttccatgcaggttcctagctccttcgggagggtttcaccacctcaaataggcatttctccaaaaccctaattcaccgcacgccacatgctcggtgaaatgcccaaaccactcaaaattgctccgattgaacccaaacttttcaggcacctttcacaatacctccagtaacatattcgccaaatttcacaccaatccgatatactagccttcaatttcactcaattccccgtttcgagcgatcaattccgagccgagtgcccaaattccattttcttcgcctaaattcaaaccaagcacacacttcactcatatttacccatataaacctattcgtgaagtaccggctcaattccaaatcatttcatgcctcaattagaatttcaaatctcctatggcactatttctcattcaaacgttgtt

SEQ ID NO: 60147 - DNA, 474 bp, Zea Mays
aaattatacatcatcaacactttggtttgttcacacaaataatccattggcctaagccttgctcgctcttcatcgttatcttggtccatcaatgccaagctatatactcgcacttcactaccgcaatgacctatcgtactcaagcctctaaattgtccttcacttttccactatttattgtagccaagccttgctataacctttagcatcatgccatataatacttgagcttatcaaacatgctttatatcatatccaccatgacatccatgttgcttcctttagaaacacaatcaaataaaatgttagtccacaattgttgtcaataattatctgtcattgccaagggaaaggcatatcccctgccattggcatgacacgcacaaggatcctatcaaaagaatacttgtataccatgagtaagtttaccaagcttaccctcaaaggtcatatatgatcttggacccttgaggc

SEQ ID NO: 60148 - DNA, 723 bp, Zea Mays
gaacaaggtttaaataagtcttttcatcttaagaaattctccttagtcatgccatgcacctcaagataagaagaactcacaaaccctaattaatcctaaatggaccatttaagcacataaagggaaattgggaaaagactttggaaaaatacaaaattttggtaagaaccaaataacaaagttttagtgcactaaataacctacaaaatatagtaagaaagtttggccatttgaattttccaaaaatccccaaatcagcccatgaactaatgtcctatgggaaaattttagaaattcagaaaactgaatttcaaaccctttcccaaagttcagaagtgttccctgctttccaaggctcgaatccataaagtccaaatatcaaagtggcgccaaaataccctagtaacactctagagaagtttgagatcaaaccaaaatcgtttgacatgacttgacataggttttgtctcggtttgggcagtgctgacagagctatcttcaggccatcatatcttctcacccaggccatatcttcactcgggactcacacacgacaagaagaccttggcacagtgaagagacgctacacaggatccttggcaagatatgcacatttaggtcggccaacaggcgtttgaactcgggcagaatcacacctccacgtgtttgatcgcgtgctcaagcgctcggccgcgcactggctgtcctctgcgcgcgcgccgc

SEQ ID NO: 60149 - DNA, 550 bp, Zea Mays
gtggttcaattattcacaagtattgggttaagtatataaaatctagggtctataagtgattacttttgtataggcgtggatggcgggtcaattttaatgaaactcgagggctcttttcgaaagaatccgctgcgaagaggtatcagcgtatcgggccattggattgatggtatgcggcgtagattagattaggccttcattaaagaggtatggaatggcagccatcggatcaagatcatcgactcccacacacccgcgaaccagtatctgatctcagccacaggatccagagcaacggtccagattagatctactcgaaggggtatattactttaaattggagccgctaccgcccatccgatggccacgatgcatgagatggaccagccacccgatcaagcttctacaaccctgaataaattcttccaaagggatatcgtggttctaatcatgggtgtccactcggatcggacggtcaatgcccaatcgctcaccacggatgacgctgaggcagcggcgccgccccctgcacctagtgacctcgtcggag

SEQ ID NO: 60150 - DNA, 496 bp, Zea Mays
cattcaagatctttccaggctctgggatagttgctacaaccaatgtttcagcagggaccgaatcagaggaatcctcagccaacatgtccagcatagcacttatttctgcatcgctcgggtttataggcatctcaaaatgaacctgcctctcatcattggggatatcaccaagcgaagcaaccaaagcctcaacctcttagggagagggtcgcactctaagacccaaaccattgtcaccatcaggaggatttgacacaaaactgatgaaagtcttggaaggaggcagattctaggaagaatatgcaacaggagcaccaatgttcgacaccttgcctctaagaatcatctcaagccagcttatcagatccacagcaggaatccttctgttggtaacccgggttgagtcagtgataccacgatacagataagccgggtacgctctgtccttcagtggctggatgttcttaaaaacaaaatcggcgactacagcttcagc

SEQ ID NO: 60151 - DNA, 325 bp, Zea Mays
ggaaacaacgagattaccatgggtgtgcaaaataaaatgaccgctcatggatcattaagaaacaagggtggtcaagggcacgttaactgaaatgtcttaaataggtatgtaggtataagactgattgcaacggtgtcctttaaaccgtcctggattggtataatacgggtttggcggtacaagtaaggccgcagcggtatcatgtaacacctcctgtacattttcaggctagagacctctcctccaaatgtgcaggcgttgtctcgtcctccaaatcctctcccgatcgaaggtggccgcatccatatcccgagcgacggtggcc

SEQ ID NO: 60152 - DNA, 581 bp, Zea Mays
aaacctcccaggcacgtggcgcacgatcggtaagcggccaacgccggtgaagatcattccggccggccatagaccaagtgggtacggtgaactcaacagtgaccgagttcaagccaatccaggcgctaagatcttttattcccctcagttatccactttgcgcggggcacgaatcacggcgatcggcgcgaatccgggcgtggggttaccagcggcgaggtgcaacacacctaagatcttcttcagttactgtacaatggccatcttcatcagtgtgtttgtcagagcgagttgagaggcttcattctccatttttcatgtggtgagctattaatccatctgcaccaaagttgtagctctataaaccagctacacttcgattataaaaaccttgatcatttacttactccatcgagcttgaatcgagtccaaagttcatcaaaactcactgtcagaccaatatcagacttcattggtgattgacagccatactttgagcccatttaactccaatttttgtacaacactaatgccttgtgacttaagcaaagttatgcgcctatagtagctctacaaatttg

SEQ ID NO: 60153 - DNA, 480 bp, Zea Mays
gacggcggagggcgccttaggggcagatgccgaggtattcttggggccattcaccgagttggagtaggcgggtccgggtggcttcagctgcggacagttgttcttgaagtgacttggatcaccgcagtgccaacatgcatttgccagaggttggttgcttgccactaagggagaatggaaagagctttgactctgctggctgaatcgtgacggagtgggcccagctggtctactgaagttgggacccttgggtggaaacccaaatgatcgagtcttctggtgccggtcctgctgctgtgcccggagaacctggaacttccttttgagatgtcctttttcttcctccttagctctttcaacttgcatggccttgttggaaaggtgagagaagttgaggaagtcttggctagccagaattgttttgagttctggcctgagtccctttaggaaacgggccatctttttgctctcagtattgac

SEQ ID NO: 60154 - DNA, 474 bp, Zea Mays
agttggcaggagaatcccaactgcatgttgcacaagggtcaagtcatgccgaagctcaactttaagggactcatcaccatactcatgagtttctccctcttcttctcgtcagccttcatgtaaaaccattcttttgttccacccggtcgtccacttagtgcggtaaccaatcacaggagccttggtgtcttttcgatatgcaaagttgtagcacccaaagttcttgtgcagaccatcggacctagcctttgtttgataatggagttcatgcaccagacaaaacccttcaacattggcactctttccatggctttgaagagcccaaatgtacacactaagtctaactatgacattgggggtcagctgatgtaggtaaatttcgaactttttcaaaacctcaccgatcatctcgtaaaggggaaccgaagtcctgcgctgaagaagcttccaaagactacgacttcatcatttttt

SEQ ID NO: 60155 - DNA, 593 bp, Zea Mays
gtttctttttaccttgtttgtgcttgatgagtgcacttgtcaacaagggggagagattttggagagttttgcttttggatcttttggggggagagttcttcaagggggagatatttcaagagtttgggagaattttggagatgtgtaaaggtggagagattttggggagttcttctcttatacatatttttgttgagggtgtctagctttctatgaggttttgagttgtgtttcagggggagatgtttttatcaagggaagattttgaggttttgggtgcttttgctagttgcgttgagcctttgcctctttctggaggaactaactttgattcatcatttctgctgctcttatgctctaatttggctttgattgctggctagtggtgttgagcccctttttgcctcttcttgaggactagccattttttgcttggtcatgttgagtcattgcctatttctttgggggccaagctttgcacactttggatggtctgttcttggcttttgtctggcttttggtcatttaattgagttttcctttttcttccttcttctgctgatttgagtgttcacatggtggtgttgacaatg

SEQ ID NO: 60156 - DNA, 412 bp, Zea Mays
gactcaagaaatagttagtatcaaaagacacaagttatgtttgctccccctaaagttgtgcgtcaagtatttgaatgactcgcaccttgcacattctagtgtcctcagaactagaggggatcacaacataccttggtctaggcataatatatcaattgcatcataaaaagataccaattgaatagatgacataatacaacttatgactagtggaaacaatgcatgcctcaagatatataacattttaaaagcaatgtaggcacacttcacacatgatgatcattgcaacacatataccaattgaaaaacgacaagatcatgcatataaagcacaatgtctaagcacaccatgattaagaagtattttcttaggtacaccaaaggaaacaacattttaaagcataaggcacct

SEQ ID NO: 60157 - DNA, 562 bp, Zea Mays
gttttcaaacataatatttatagttctatgtactattgttctaaagtttatgtactgattttcataatagatacatttgtagagtaattgatgacggaatcccatagatcctttcacacatctcgttagagcaattagcaggatgctagcgctgatggtagtgtttggtattgctagagaaattgagaacgctgaaacataatcaaaggccagggcatagtaattactccccctatccccaaacagtgacctaatcacaaaacaataacagaaaggagacagtagattggcagggacagaggtactgttcacctgaccttagtggcgaccccaagatcctccgatgttgttgtcttgtcccgatctctcctagcctcatccatgtccagcgtcatcgacttcctcgatctagagctcccccatgtctagctcgtgcaagacatgaagaactaaataatgataaatctcactctcgcaaggaactataagaaaggggcgagaggtaaggggtgggttcgacttgaagaagatgcagtctagcttcgacatttcaccactgccg

SEQ ID NO: 60158 - DNA, 813 bp, Zea Mays
gctttacgcaaatcagctatatgagaactaaactcagccgattttactacaatatcatcaatgtagacttccacagtgtttcctaacagctcatgaaagatcaaattcatagccctctgataagtagcaccagcatttttcaaaccaaatgtcatgacaacccactcaaataaaccgatgaagcctggacatatgaaggccgttttagacgcatcctcttcggccataaaaatctgattatattcggcattaccatcaagaaagctaataattctatttcctgatgcattattgattaatgtgtcggctatgggcatgggatactcatctttaggagttgctctatttaaattgtgaaaatcaatgcatactctaagcttacctgactccttcttctccactggcacaatattggagacccactttgcgtatctacagggtctaataaaattagcttctagcagccggtggatttcgtccttgattcgtgggagaagatctggacgaaatgttctagctctctgcttgaaaggtctgaaactagacttaatgggcagccgatgttctacgatctctcgacttaatctcggtatcttagtgcaattccaagcaaagcaatccgaatactccttcaatagaccgatcatttcacttctagaatcggtctccagggtcttgtttatagaagtcggccttcgagttttaccatctcctatatcgatctcctccaaaggatcggccgatgtaaacccctatcctagtttattgagatctctgaattcctctatcatgtcccccacagaggaattagat

SEQ ID NO: 60159 - DNA, 510 bp, Zea Mays
caacgttgaccaccgtggatgcattgaaaagttcttcatctattttgtcgcatggcgattgcagaccaatccatgccttatccctgtccttccaacgcatccacaaccatatgattcttaaagcccttgcgaagcgttctaggttcagaatgcccagaccccccttgttctttggctgacatgttgtagaccagttgatcaaacagtgaccaccactgcaagcttcatggttgtttcctttccaaagaaagcctcttcgaatcttatcaattttctttagcagccatttttgaactggaaaaaccgtaaggtgataaaacggttgggctgttaatactgatttaaccaatatttctctgcctgcttttgagaggagtctgcctttccaaccggccagtctgttgttgattttttccaatagcggttgcaaggagatccttttaatcttcctaaagtggaggggaagaccaagatactttctaggcaagttagcatatttacccgggaaca

SEQ ID NO: 60160 - DNA, 645 bp, Zea Mays
ggcttctccagttctcctttggcatgtgcagtcgctcactaccggtaccgtgagcataagacccagggcaggcgaagtggccgcttccatcagcagaagcctacgtgcagactcagctcactcccaatatcatccaacctgcagcccagggcacggaccaactcccactccccgtgcaggcgcactatgcataggacggggaaacaggcatgctaggccaacaagacagcacgatctgggaatcggattacgacccgtcaccagagccattcatggaaccaagatgcatgccaatcctgagcagtaccaccaacaggtagtaggagctagaagaacaccccacaaaaccaaaccaaccgcgcagcaataacaaacactcggtctatttgagcagcgtggctgcctctccaggcccggtaaggaagcacgaacacccaaaaataaactcaacgcactgacctgtatcggattgatttgatatcaacacaaagaaaggcaccgtttgctaggcagaatgtggcggaggctgtccttttagcatgcatggctccatcccacttgcaaagttgctgctccacaattgctagtgacctaagctcagtgcttccaccgttatgacctgtttacacgccataacgaactttt

SEQ ID NO: 60161 - DNA, 583 bp, Zea Mays
ctgagcgggatattggtcttgactagtttgtcatcttcctttcctaattttttgtacaatgaataggacattaaatttatggtcgcccctttgtctaccaacatagcaatcagtattccatcaatatgaccgcgcacgaagagcggctttaaatgattgaccgattcttttggcttagtgaaggcgacctctttaggaccaaaatcaaattgagcaacgacagatttatcatcgccgataatagtacaatcgactgagaacataataacatttacgtccatacctgagtgttctggcgtagctctgtagtcgaccaagtcttctcccaccaggtcgtcttcctctataggtgttggcgcatcattggaggtgttctggcacagggcggacggtctgaactcgagggtcggacggtccgtgacatccacggacggtctggctttaatagctggactatccgtcgtacctgcagggagctgcaaacctgctgtcttgttctcagtggctgtttgatttatttcaacgcctttagcctccacctcttttgcggtggtaggtactgcggatgtgtatcattaaattt

SEQ ID NO: 60162 - DNA, 609 bp, Zea Mays
ggagcagccaggagcccaggagatgttctcttaaattcaggagaggtcttctgccttttgcctccgacaatcggtggtgtagactgtagagtagcagcctagtacttttctactgtttcagtgatgctccaatatatcactatatgcaatgtgtaaaaaaaaaagaggtgcggcgcttgttattagagctatgtcctcaatctgcgtccattagtgggtcaagagctagcttcaaaaacacacaggaatacatgccgggatagggaagggcccaggggcgcgtgcggctagtttctatggggaaaatctctatttcaaccataaatcactattcaattccaggttcagctcgaaatcttcattatttaaccttccttttattccgattctggatccgcctccggccatgtatgtctgagcaacaaattttacacacgttcactttgttgatctaaccacctctgctacttaattaagttcttgctgaatttgttgttggtggtacttaatactacacagcaagcgccgcctatgcatgtagcttctacttaataaactagtcatatgtatagtgctgttagctgttgcatgcatgaaagtagtagcagc

SEQ ID NO: 60163 - DNA, 1006 bp, Zea Mays
gcccagagaaaaacgaaaattaagggggaaaagaaaattatgcgccgaaagcatgtacagatcctcacatcggaaccaatcaacatccttaaatgtcatatgcttttgaaacgtgataagagccaatctgagataagaaaccagatgcacattcataatagctaaacatttaatttcagaccccacctaaaaccacagaattacagaccaaatcgtcagcttagactcactcacctccgaaactcagctcaaaaaataacaccagaaaatgcagtgagacattgctttcggctctgtaaatcaatacccggtgttgaacagaacgactgtcaaggattgatgctaaacagcctttgcagattaccataacttaagtagaactgaaatttcacacatgtgcattccttcaacaaaatgtggggctcaagttttaaggcaggtcctgccatgacggaccagggtactaatatgttaattgcctagttagatatgttcatcggttcattttgtttggaacagttgcagtaacatacaagcaaggccatctccactattcaagactacaaactataatctgtagaaccacaatcccaaaaaaaactccaggaatactatccaagagtacaaactaaaatctgtaaattccaggatccgcaatcccaaaaaaactccagtaatttcaagtgccataacctcaaggcctactattattagtttattaccctggtaaggatgaatatttattttgttacttctaaagctgcaatgggttaaggaactaaacagaacttattgttggtaattggcgtaatatagctgataaatcctatctaactagtctcccttggcaaaaagaaaaaaagaaagttgtccaacacatgaaggttgcaaagattcaaagaatatgaaggaaagacgtcacgtaaatcaatcagcttatgtcgaacaaaacacggatacgacaaaatgggaatacactaactaaaaacaatttgcactatgaaga

SEQ ID NO: 60164 - DNA, 359 bp, Zea Mays
cttgtgagctatgactgaaacaagtgactgatgtattgctgtctaaaaaattctgctagtgcgcttttgattgtttagttcacccttctcgctaaaaatgtttggtttgctcttaagtaatatagacttgccatgactaagcttaataatgcatgtgtgtcatgttttatatgtttcttctctagttgattgtgatataggagtttcatatacattgatgcctaggtccaatttaaacttacgttgtcttggttgctcttgtgtggtcaataggacaacaaatgaatgattaaggtgagcgtagaaaatgcgtgtacttgtcatatcgtatttgtgttgcgtaaataaataaaatatgg

SEQ ID NO: 60165 - DNA, 414 bp, Zea Mays
cacagatatcttgcacttgtgactcaatcatcagatccaaatacaaatggctaggctttgagtgctcggtttcacagaacaggaacttaagagaaggggtctgcatacctggttggtgtgcgtcgctggcgaaagacccattgctggtcgctttcccgttggtgcacaacaggaacttaagagaaggggtttgcgtacctggtcgctttcctgttgctgtcctcggcttggcgttcctctgctcagcggggcggatcgaacctacgcatgctgtagagtttcagcagagtgtgagagtggtcgtcgtgcttgttaggcaatggccaacgggcgagggaggagggtgaggacaaggggtgggatccgggccaccatgccaacagacgaggggagggtaaggagaaggggtgggga

SEQ ID NO: 60166 - DNA, 607 bp, Zea Mays
ctctggtgagctgccaaactctgctcccgatcggcgttgcccgatgaagctagtccttcgcgcgaatcgttttccgcgcggtttagtaaaaatcatttcgccacactgatagttaattaaaattacagttcgatcgaaccaaacctataattttaattatgcgtttgtgaatacctgttagtgtgtgtacgccaacttaaatgtcgtttttaatgtgtagttagtatgaatacgacataatttagcagtacatgtgtgtcgcgttgtttataaattcattatatgtttaaatgtattgagtatcatgcgtcgtaacttgtttcgaccgcgtcaactctatagcggcgtcaatttcatattagtaacattgtttcgtcacgacacaagctttaattaattaattaatcaagtaatcgtttaatcgactggttatttaaaatagttttctggttaaaactcttttatagtttctaccttgggcctttataaataaatgttaattaacgtgattaatgacaactaaaatacttgttatcaattatttgttcgttgtttgcgcgcgacatcgtttgcgcatcatcgtgctgttcgcacgcgtgtccactcg

SEQ ID NO: 60167 - DNA, 481 bp, Zea Mays
cggggctagtagtgtcggaagatgtttctgacgaaggtgcacctgccgctgaggctaagcaggttggtgctgaggaagatgaatctaaagatgattatagtgtcgtgccatctaaacccagccacctggagtttgggaggtccaccattaccgaagatgatatgcctaagctgatgaagttaggctatttcagtgaggccaaaaaggagctaattcactttggcggagaggaaattactccgaagccggaaaaggatgaggtggtagtctttaaaagcttcttcaaagcaggattaagatttcctttgaatgagatgattgccgatgttttgaagaagtttgggatttatcttcatcagctaactcctaacgccatcattgggcttagcgtctacatatggcccctccgaagccagggggtagaaccgtttgccgaaggcttctgccgagtacatgagcttcattatcaaacaaaagctag

SEQ ID NO: 60168 - DNA, 738 bp, Zea Mays
tggataccaaagtgctttggaggatagccatataaagcctcaaacggagatctgccaatggaagagtgtggactggaattataccaaaattctgctgacgctagccaactgtaccacttggaagggcaagcatggacaaaacatcgtaaataagtttccagacactggtttacccgctctgtttgtccatcggtctgcggatggtaagagctgctcataagaagattaactccagccagcttgaacaattccttccagaagtgactagtgaacactttgtcgcgatctgaaacgatagcagtgggaaggccgtgtaaacggtatatgtgctggaaaaattccctggccacagacgctgccgagaaagggtgagatagtggtatgaaatgtgcatacttggtaaacatgtccaccaccacaagaatagaatcgaatcgttgagattttggtaacccttcgatgaagtccattgaaatagtatgccatgctgtgggtggcacaggaagtggttgtaggaggcccggagaacgtgaccggtcaggtttagcctgttgacaagtgacacaggaagcaacccaggaatgaacgaatgacttcatgccgcgccaagcaaatgactgtttgatttttttgtaggttactgggacaccggaatgacctcccacagggctgtggtggaaagcagtgaccagggtatgtttgagggaatcatctgtaccaatccagattctgttctta

SEQ ID NO: 60169 - DNA, 304 bp, Zea Mays
tggagatccattatcacccaggcaaggccaatgtggtggcagatgcactgagccgtaaggttacctgccactgtcttacaatgaagacctccgagaacactttgtgtcaagtgatggaaaagctaaacctggggatcatccaacaagggactctaaatcagctaaagcttgagtcaatcattttgcaaagaataattgatgctcaaaaggataatctgggtatgaagcacatacgagagaagataaggactggagtagccaaatgttccaaggaagacgatcaaggtgtgatatggtttaaaaa

SEQ ID NO: 60170 - DNA, 656 bp, Zea Mays
cacagatgtgccgaccaggttaaattattaattggctgagttaagacattggctattggttgcgtcctagcaacatgacgcaatatttgtgtcatacgaacttggttgcgtcatgtgattgctatgtcgcgctctctattaatcggttcgctcctgttgagtcagaccgccatcgctgagtcacgtatttttcgcatgtcctgtaggcattgtctgtcatccgtgatcatcgagccacaattgcgcctgttgtgcacgttgcgtgaacttattgtgtaccccaattactgagccataattgtgcctgttgcgcttattacgaaggcttgttgtgttgtcgtagccctgatggtcacacacacgttgacgccagaacgctagagtttgtactcgcgtggattgtggtgtgtcgttcaagcccctaaagtcacattatgcgcaaccttcgtaaataattttgttttcactctatattttgtttgattgtgttgtgtggcatcgtatatttatatatgccgccaagtggccataacaactatattaaatctgggaaattaaatcaaaatacaatgaaacacagataagttaaatctctgctctctcctcgtgcataaagttttacccgaagtaacctgaagaaattcaatattaatgca

SEQ ID NO: 60171 - DNA, 519 bp, Zea Mays
agggatctggtcgggtccaaagccgcagctgcagggccgctggacaaggcaaggcctgctggaatggatttcgcgcacagtcttcagtcttctcgtttgacgagacagcactgtcgagcgttgcgccgtggatgtatctcccgacaggaaccggtaggttccactacctgctggcacacaattccatggctttagatttgacgagatcggcaccgccggaaggatccagctcgtcagctctccgagctttccatgtcactcacacggcgccggcgagagtgtacttcgttgttgaaccgctgactcggcggcttggctacgccagtggcgagcggagacttcggtcgggagggaaaccgagctagaacccagaggacagaggggttttcgctggggaaaaaagggagcatttttttacacgttggatcgccatggatctgcatcatcctcatccacgggggcgtggggccttgccgtggatctcctctctgcaggctgcagcctagttgagtttttttt

SEQ ID NO: 60172 - DNA, 1033 bp, Zea Mays
ctatctcacttttatttcaaactccgctctacaaacagtgtaatatacagtgtaaaacattactttacacagtcatttacatggcctactggatatgccctaaaagcaaaagtttgctataaaagtatcaagatcaaactatgtgaacaaaatgaaatagcaaagcaacacgagctgcctaatactaccggacaaatgacctccctgaattccatcccgtatgtcatttggatgatctacctagcttgtcccaactcccaagtagtactagatagtttatgagacctaatggagtcagtcactgatgaagcttaagcgaaaattaagcacaaatctacgggttggtcccctgtcttgccacccgcatgatccatatatcttgttacaaatctgtctggatttgtttttttgtccaacttacaccaatttaaaatgaaatatactactattttttaatagagtgcaaggatgccaaggacgcacaccacaccatatacacatgcacgtctattacacacaaggaagggattaagagatctagacctttattgagtgagaaacacgcggtaccactgaatatgcacgcgtgttaccgtatacctagacttagatataatctgagaggcaacgaaagataaactccaaagtgagacacaatgtctgatgattcaacccacgtccagccgttcgcacacctggtgaatgaaccaactgggctacgacccacccagtactcaatataccactatttagcaacatgaaatattttaattgtggcacacaattaatttaatattcttgagaggccatgcatggatttgccccgttagacattgttcttgactctcttacctgaccaccattaatctctgtcttaaatttgtttaatcctctctgcttgtcatgagaaaaataaaacgtttcgatcttgtttacccagtccaaggttcctggatgctgctaccaagaagaggacagtagtgcttaagctcggatgttgttttataatttccaactctgagaatgagaagaa

SEQ ID NO: 60173 - DNA, 396 bp, Zea Mays
gtggtacaggccggtgcgctgctgtagatcttaggttttccaaaatcgccgttggctacgtcagtgcgccggtgtagatcttctgtccagctcgtcgcgcgtcgctgtgctccggtgctgtgcccataacgttaggtgagggttgttcagcggattttaaaatcccacaaatccgtctcgtcgcctgtgcttttccaacagcgcagactccctgttcttctgtccttcgccgtagcgcccatcccgctgctttctactacatatatggagccccttcgctggtgtctttctctttccgtcggcctgctactcggcggaagcgcctttctcctctcgactccgtcgccgtcgtccgttcatttcttccaatgctaatttctcttgtctcggttcctg

SEQ ID NO: 60174 - DNA, 487 bp, Zea Mays
ccttatttatgtgctataactagcacggcaagctctacccaaaacttgggtgatgcaagaatcaacaaagtggtgcactccaactggccatgagcatttcattagagtttctctttgcgatcttcgacacggggatgatcacagagaccctcacaagagcttgactcgagccgacaacaatcaccaatagcggttcaacgatccttctaaccctaagctggctaggtgatggcaataaaaaagagtaatataacaagagaacaaccatcagctagccagaccgcaagctactagtgccacgagatgcaagcataataatgggttggttctagatgtatcctagtcgttgaggaggcttgtgagcagcaacatagagctagctaggtcacattccgctaataaaaccaagagctttcatcgttccacacgtattatgtagcgaacggagagcttaattgtgcaagataccatgaacatggacatgtgc

SEQ ID NO: 60175 - DNA, 755 bp, Zea Mays
gagcgatcaagtacaggtgttgttcatattagctagtagcttaaaaaggtaataaggcggaagatttttagatatttctcctagagagcacccgagtttgataacctatgctttcactgtttggtcaccgaaaactgatcagagaacaattaactcaaagcaaacaatgactgacttctccatcagagggccttcgtcactgtgttttaggtctaaatagcatttatgttatgttttagctaatcagaattgaatgtgaatgcatgtacaatgcaaatgggcacgagttgtgtaaaaggaacatttgattaacatttggcacaacacgtgtgatttttgtatacttatattaagacggaggtcgttgctacataattgacagtggacgttatacggttgtaagaaaacagatataatagctaaatacatctaatctgtctcaaatttgttgctgctttgaactgaatttttcatcggtgattatgagttagacctagtagatttggtagctctgtgacaggaaaatgatgaatcggttaattcctatatccgaagtttaagggacacaagaaaccaatgtttccaaattcacctagagaaaacagctaacatgattagcatttattgggatgtattagtatttaaaagaaagattagaagacattcagtttttacgctagctgggttataccaaagggctctggcttgtgaaagacgaagcaaagatgctactaaagcaattcgtcacaacgtcc

SEQ ID NO: 60176 - DNA, 598 bp, Zea Mays
atcccacaatttcttcatcgaccccgccgaagagcattgatcccggctggtagccacaggagatagcaaattcttttagctctgatatgtcctcttcggagagctgttggccgaccaagtgctgtaggtcaaaattcacacctttcgaagaggttccttcaattttcttccccttgtcagaaactactgcggctacctttttctccgcaaccacatctgatataattctgtcgatttcagatagagtggttgagatttttgtcttcagctgcaatggtagctttgggcattagttgattttgcagccttgactgccgaagctaagggcgaggtctgttcaatggcttctagtatattcatcatatgtcatttcttctggcccccatctctcccctctatagccgaagagatttcccttgtttgtaagaggctagtcaggtccaactataatacccaaaaatatacacaatgagaatatagttgatctccctattttatgtgccatatattcatcataacaagagcatacctataagtaagagtgattagttaaaataaatggtactaaaatggaatatgcatcatgctgaggttttat

SEQ ID NO: 60177 - DNA, 383 bp, Zea Mays
gaagaagttgagctctcccatcttgctcttctcaaactcgagcacgttcaaacgtcggacacccagctccacaacaaatgtgtagcccatttacaagggatttgtactcgaccacattattagaagctttaaagtggagtcgcacaatgtaccacaggcgctcccctagggcaatgtaaaaacaaggcccgccactagctccccctttgtcattgatccatcaaaatgtatgatccaacatttctcggtggtgtcggctctaattggttctcggtccactgcgcgacaaagccagcaaggacttgtgatttaattgtcgcccgtggggtgtaggagatcccatatcccatcaattcaagagcccacttggtgattctcccaga

SEQ ID NO: 60178 - DNA, 590 bp, Zea Mays
cggcggtggtagcactctagcggggtggttggtgaggtcgaggatgctttagggatcacattagtggtcgggtcgtcttcggagatggacggaggtgtccgatccacgttcgcaggcggtggtggtcaatgacggctccaaactacggccaacgatggtggtagagcttactctgctcagcagggaagctttacagagttgtggtggtgctggcttttagagaaatcggactgtggtgggctggggaagccgacccacgttcaccggcagagctttggtctccgatgaagccgatttcactgttccgacgaggtttagctcgggctcaggctcagggaggctttatggggctctagaggagttactagtgtggctaaaactggtggaacatgactggggtggactagccatggtggtcgtgctcaggcgacaatggcggcatgcatggagctcgccgaagttggcaatgtccagggttgagttaggcatgaggctgagggagaaacggaggaagtgactgagggtttgggcagcttttataggcacaagcagagcgaggcattgcggtggccgactggtcgcacggggac

SEQ ID NO: 60179 - DNA, 1039 bp, Zea Mays
gatttcctgaggctcaagcctcccacgtttgccggatccagcaatcccctcgatgctgatgattggctgcgcacgattaaaagaaagctggaagccataggatgcccagaaaatcagcgtgttcaactggctgcgcatcaactttccgggatggctatagcctggtgggatgccttcaacgtcaccatcagagatgctacttgggcggagtttgaaacggcttccgggagcaccatgtgccccaagggctcgtacagctcaaggaagacgagttccgggaactgactcaagacggaagatctgtcagtgaatatgtgcacaagacagagttagcctgctacgcgccagatgacgtcagtaccgaggtcaagaagatggcccgcttcctgaagggactcaggccagaactcaagacaattctggctagccaagacttcctcagtttctccacctctctaacaaggccatgcaagtggaaagggcaaaggaggaagaaaaagggcatctcaaaaggaaattccaagtcctccaggctcagcagcaagaccggcaccagaaaactcgatcctttggatttccacccaagggaccaagcttcagtagaccagctggacccaccccgtcacgattcagtcagcagagtcagagctctttccatgcccctcagttgcaagcaaccaacccccggtgaatgcatgttggcactgcggagatcccagtcatttcaagaacaattgtccccagctgaagccatcaggacctgcctactccaactcggtgaatggccccaagaatacctcagcatccgccccaaggcgccctcctccatcagccagcagaacaagacccagtatcaaggaagggcacgagtgaatcacgtcgatgcccaggaggctcagcaagctccgggagtagtgctcgatgagttccttgttgaatttactcccgctaccgtacttttcgattctggagcatcccactctttcatagccactagttttgtggaaaagcatggcattccctctactcctctagagat

SEQ ID NO: 60180 - DNA, 501 bp, Zea Mays
agtaacgtgactacataatcttcaatacaaataattctgtatgtacagattaatcaaagattagcaataaatatttaatattctttgagcaaaatatatctgtttacatactatcaagaatgacaggataacatacaccattcacaatcatccaatagctttataaaacacctaataaattaagtccgtctcacttaatttggggctacacttaagcaagtcactacgaaatgttgtatgaattatccaatggcgccgatatcacagcctcacattcacagaagtagatcagcttgctggacacataaatataataaactgccaaaaatgcatcaggcttttccatacaaaaatgcagaaatgcattcatttctcaactgaatgtccacaagctgatactaacatgcaccagtcagtatatttcaagattaaaccatcaatataccaatcagaaacactaaataagtatagtaagcatgtcgacctaccattgtatctatc

SEQ ID NO: 60181 - DNA, 361 bp, Zea Mays
ttttaataatgaacaagagggcagcaaggaggcgggaaagctgtgctaatgatatggctaagctgttagcattttttatatcatgtaaaaagcagaatccacaattgtttgtgactttcaggtggacggagatgggaagatagttagcattttttagtcacgtgctagtatgcaaggggaatacattgattttggagatattgtcacctttgtatgacccataggacaaatatatatatgataagcaccttggcatgtttgttggtgctaaccatcatctacagtgcacaatgtttggttttgccttactgggtgatgaaactgtggaaacatttgagtggacgtttaatgcattcaaaac

SEQ ID NO: 60182 - DNA, 357 bp, Zea Mays
gggatcaaacgatccaggattggtgctggctcacaggccttggatctgcgattcgatgaccgatgttggttatgggttaagatgtgatctggtgcgtcagctagtgatcgcatggtcgtagtttcgagataccccttggctatcgtagatttgtaaaagagccctgggggttcggggaaatcaacccgcaatacagaccagtgtgaaaacaattacgcagaggccctgaaatttataatttaaacctcacacttccctgtaatatggtgcgcagtccagagctaagataaaatagtaaaataaatttagaaagtggatttctaatgtaaaaaggaattccagaacttatttaattca

SEQ ID NO: 60183 - DNA, 430 bp, Zea Mays
tggcctgtaatcccccaccttctgaggattctccatcttcggaatcaagacaatgaaagacccattgatacttctaaggcagacctcaccatgatggaatttatcacaaagatcatagaaatccggggcaatgatatgccagcacttcttgataaaatttgtgttgaagccatcgggacccggagatttatccgaaggtaaaagttttataatgctatcaatctccaatttagtaaatggtgattctaactcgtgaagttgcacatcactggttaaaagttctgaaaggtcaaaaccaatgcctgaaaagtcagacgatcccaatctgcacttgaaagcgtcccaaagaagaccagatttaagttcatgctcaagtaaagtgatcccattgtcgtcagtcaatgtagcaattgaattattcctgtgtcta

SEQ ID NO: 60184 - DNA, 1323 bp, Zea Mays
cacgacaagaaagttcagtttgttgtcccgtccctgcccgcgaaacagcttcgtcacccacacaggcttgcgtctgctgcacagggagctttcactccacgccgcatcgatgggacttcttgccagccacagcattcaagccaacttcgcatcaaggagcaactatgcgaaatcgaatccattgaagatgatggtgcggctgggtggactacggtacattggaggcgccgcgggagagtcaattcggcagagcctttatgtcacccaacaagtagcctcccaactcacccccatccggtgtggaaaaatttgcaagtgagtgtgagaggtaaatgcttccgctgcttggccaaaggccactacgccattgattgcagggatccgatgaggtacctcggctgtggaggtgttggccacaaggcctggcagtgcccgaacaagcctgcctcgacaactgctgctactttctctccatcccctcatgtgccccctgcctcgacagttcgcatttcccacccctgtgccaggcaagcatggcaaggcccggcgatgcagctgagcgtccgcaagaaacatctgttgttcctgcttccactcggggcatggatagtgagctggcgaggctgagtacccacgcggtgtgggcctagctaggtgatgttcggccggcgacaggtacaagcacagtgagaagggcgttctgctctaggttcgggatgcacgaagaagacatcacggtggtgcagcattacccagaggatttcttcatcaacttcgagcaccagcaccaccgtgacgcggcggtggcatgacgcgatttcacctacgacaacattgacattcgggttaggccatggcagctccctattcacggtgaccgcatcaacttcgactaccatgttcgtctctgcctcgaaggcattccctctacatgcgtggaacgagggcatcaccaagcgggcggtggctaagagctgcgtgctagactacgtcgagtctcagtcactgcgaaaggaggacacaaggacactcaacctctgggcgtggacgcggaacccttcagacatcccaaaggtaacttggctaaccattgttggcaggaacatcattgtccacaatgtgccaccggcgggacaaagtggcttaaccttcagggtcatcgtccaccttgaccttgtggagggttccccgggcaacgagggtcaaggaagtacacatgtgttcgactggaggcttggagttgttgatggcaagagtgctccacgcgacaggcacgacccttcacctcgacgcaacgatcatcaccgggacgacggcgacaac

SEQ ID NO: 60185 - DNA, 343 bp, Zea Mays
gaagaatgtgttgatatagtggaagtagttgaatgtcctcgcgttcacccgtcctccacatgttcatcgtggatcaacgccacaacaccaacagcagtgtatccacgatatccatacgtgcggagatgaaacactgcaacgttggtgtgtgaacaagagaaacgccgcgcgacataaaattatcactcaagcatgctagatcactccgtatatagactcatgctggtgtgtttttaccctaaaagtatgttagtattgtcctagatcatgattgtctcttggattcataagcaacaaaaagtattgtcctcagcgtgatggcgtgatcaaacagatcatgttc

SEQ ID NO: 60186 - DNA, 370 bp, Zea Mays
aatagcttttaactttattgtttatttttgtgacttcgaacttatttacgttttctaccgcagccgaactatctcctcccctagagcccttcgagtcattggtcgatccagaggcaaaagaatcagcagaaattattaagatggccgaaaccattatggacgaagtcgttactcaactgctgaccgaagctgcagacaaagttttgaaagaagagtagatattgtaaaaatattgctagaatattaatgtaacatttgctggactatgcttgtaatatttggtgctcatgggttcttgatgtgatgtataaatggctttgcaattcatttctttgcgatgcatgaaacttttatgtacataccgtttttg

SEQ ID NO: 60187 - DNA, 955 bp, Zea Mays
cgacgatcctagggactctagctcaattgggtgggtcagcgagtatcagaagcatccaagaacactgaaacgaggactcagagggcatgaacgaacctgagatgcgctggccacggcgagggctataccacggcgatggagagcaggtttgggggaaatgagaaattagtgagctctagtggatgattcaaggcacggtttgcttcactagttgcataattacatagcggagcaggcggggttggtaatttatagcaggcttgagcggtgaccggtgaatttggattgagacgcgcggcggccggagatgaccggggttactggcgctcgggatcagtgtcatttaccgtggcaagctccccgacgatcatcggataggcttaacacgatcgactgtgacgtggtaagatgcccgggcacgtggcgcaaggccgcgaggtggctatctccggcgaacccatcggaagcaaccgtgactagctcaggtacggtggtcggagtaaattagtggccggagcatatccacggcgtgatatttacttaccccaagtgctatccaactcatccgagcgtgaatcgccaatggcaagcatgaatccgagcgcacagctcgtcggcggcgatgggatctgaacctgatcctatccggttactataccatcgaattgttctttagtcagcctgacagaccaagtttggcattgattttctcctgatttttcatggcaacttgttgatcggccagtagcaaagttgttgtctaatgatccagctacaaccttgctatagcaaccatagccaaactctcactagatcattgttgaattccagtccaaagatggctcaatcacactgtcagtctgattttagacctaagacagtctgacagcccatctttgggtccaattttctcaaaacttttgacagtaccaggacttgatctctatagaaaaat

SEQ ID NO: 60188 - DNA, 479 bp, Zea Mays
gagtaataactatccatcggtcctattcactttgctaaatgtggccataatttgggaacaaattttttggaagctagacttagattctttgtactttagatgcaaatggaaataaaatcagaatttgatgctcaattcatcttggattagaggacaactagagaaagacctacagtatcaaaaggttggaccttcttattcgagaactcaacatcctagctcctgactgaagggataagcaaatccatgagcttcttatgccagttgccaagcaaccaatgaccacactggttgtctagtactcttctatctctactagtgaccactgctatattccactagccatcatctctaacatttgtcatggatggaccatgtctagttgtcacattgagaaaccactattaaaagctaaagaacaactagatggtagggcctcaaggatccaaagaatgaaccctcatattatagaattgaat

SEQ ID NO: 60189 - DNA, 835 bp, Zea Mays
gcaatcccgcatgttgcaacaaacccaggatgggttccatccggattcttcgccaatccgaactcaatctttctcttggcgcctataaaaaccggggccatgaacccctcgggcattcgtaccacgccgacgtcgagaccgtgggggagaaaaaggaaggtgggcgtctctgtggcctacggtcaccttacaaccacaccatggctcagaggatgacaagcggagtaggagcatcaccgtgatacatcgaagccgaggttagtgctcggtgtcgcgatggtcgattgtgggttgacgaattcttcaccggagatctatggtgccgccaaatccgcccctcgccatggattaaagccgctaccgcatgacgataggtgaagcaagccctgttatgttcgcggaactccctgtttgcgtaggaccttcgagataggggggatcgacgacagagggacaacgttggcgagtcgtcgaccatgaacaccattatgggccgccgtgcgccggggtgagggctctgcattgcacgaatcatggtaatgattccccgaaccaactcacctgtcccactacatcgtgcagcacctaccggggttaagtagagggcactagggccgccggggcaccgcacgccggcgtaggctccgccgttggccggggagcgccgctacgtggtgaagaaagattagggaagacggggtggtctctggtgaccgttgatgaagcaaggaacagatgcgattagatcaagcacataaggtttgttcgagatgtatatgccattgatctcagtacggacgaccctgattgatcgagctgatgtggtcgagtaccg

SEQ ID NO: 60190 - DNA, 285 bp, Zea Mays
caatgacagcgagggccaccgcatagtcaacctcatcatgaccgaagactggcgagcaccaataaccctgttcctgcaggggtactatcacccaaccgatatcaacgaggccaagcgcctcaaacactgaagccgggacttcgcgctcatcgacggccagctttacaagaagggggtcagccaacccatgcttaaatgtgtcactgagaccgaaggcgtccaaatcctgcgcgaagtccatagcgggacttgcggctctcacgcagggcctagggccttagccac

SEQ ID NO: 60191 - DNA, 610 bp, Zea Mays
aggaggtggcggttgtggactacggggaggaaggcgacgtggaagtggacgaccgcgccgagcgcttcatcgagcggttctaccaggagatgaggctgcagaggcagcgctctctggtccagcgcctgctctagagacattcgtccgttgctgctgcttcaattccttggtcgatcgggcagaaccagtcgtggttgtcgctgctatcttagctgcacttcggttaaatctctccgtatcttgcatttgcgtcgttccatgtttttttgcttctcatgtggcaattctcttgtctgtggaaggagacattcgtctcccctgctgttgtactgttacttctagtccttacctatataatccatccttgtgttgcaatgttcatttttttttggggggtagtgttttgagtttgtacaattattacaaagcatgcgtgctacacacctgtttctattagcacaaaatgccaacttctgatttcaaaatcgacatcgtggattctttaattcggaactggaaaggagcggctaccagagcaaatcatggaaaacgatcaggatatataatgtggggatgacaagtcgaagagcagctgacggtcagctgtctc

SEQ ID NO: 60192 - DNA, 580 bp, Zea Mays
tggtttttcacggtactgaaggtctttctgaatctgtaccgtctcttcctcgaggtgactttctggtgcttgcaggcatttgcggagctgggatacgtgaaacacattgtggatgtcggacatggattccggtaattctagacggtatgctgcgggtcctaccttgtcaatgatgggatagggacctacgaaacgtggggctagcttcccttttacttggaacctcctgacaccacgcattggagaaaccttgaggtagacgaagtctccttcctcaaatcggagttccctccgcctgttgtctgcataactcttctgccgactctgagcctcaagtaaccttctgtggatcagtgcaactttttcttccgcctctttgacaaaggcaggtccttctagtgctttttcccccacgttagaccacatgagaggggtctggcatttccgtccatacagtgcttcgaatggcgacatcttgatgctggcctgatagctattgttgtatgagaactctgcgtagagtagactggattcccaacttctatcaaaagctaacacacatgctcttaacagatcttca

SEQ ID NO: 60193 - DNA, 423 bp, Zea Mays
gtttggtgcaagcgtgcgattaaaccatctaaagcatctgacatggatccaatgggtgactgctattttacatttcaccctttccacataaaatttagtgcctattttatatttaacccctttccatacgaagtcgttgatctaaatctgatgttcagataatttggttgcatactacatttcacccttttcacatgaaatctagtggttattttatatttaacccatttcatatgaaattgtcgggtctatattgggtgatttagatgatttgattgcacagttgcaccaaataagtgatcgcatgaaaatgtcccctgataataatagatagatcaaaatctctgctacaataaggctgactctagcagtccgtacaaacgtgtgtgcaaaaattgatttgtaatgtagacgatactattt

SEQ ID NO: 60194 - DNA, 301 bp, Zea Mays
cttgttttgaccattatttttattgcttttggggtagccactgaggaatcgaaggtcagagagatggcgaacgatgggatcgggcactccatgaccatcaatgaggagttgtgactatgtgggttgcttggcgatgagtatgagaatgatctttgcatggacaccaaagagcttttcgatcattttgttgttgatcccattccccttgaccagaatgaggaccatgctggcaactatgttagagccgctgtcggtggcctagtcgatgcaagagtggtagctctaactagccacaaatcgc

SEQ ID NO: 60195 - DNA, 582 bp, Zea Mays
cgtggatggatgcctcaccggagtagctccgccacgaggggtgagccgtgagcgtcgtcgtgagattctattccgccgctggggtccggccggtttgggtgaaccaccctcaggcgttgatccgtgcgtgaacgattcagattagacaagtgcgctgctttaccagggatgtcggccgtaagtcctttgatgaacggtcgaaagccaatcgtgtggtaattaaaccagaaccgtagattcgtgatccgaggggcgcgttcggatctcaggtgattaaatctcggtcgtcgatctgcccatcagcggtcgatgagcgcatactgattcataaccccgccgatgagatcgtgaccgtccactcatgatctggcggccaaggtttctagatattcttcggcccgaccctttttactaaagagaccccggacttaattacaatgaacccaccgtccttagccgtgagagaataattgaagtttagtcctgaaatttataagataacccccgtactttccagtaattctgcgcgcagtccagagagctggaaaataggataaaatcaatatagaaaataattttagt

SEQ ID NO: 60196 - DNA, 476 bp, Zea Mays
gaacaagtttacttaagcaactaaccactggtgctgaatgaaaactaaagataaatgggtctgaagttggactgtcagactgcttggagtctaaaattcagactgacagtggaatggcatgaagttagggctcgaattcaatcatgatccagtgggaatttgactaggaatgctataacaaatatgaagatggtttgtagggctacaagtttgttgcagagcattggttgtgttaccaaggaaaattgggaggaaattggacttaaagttgatctgtcaggagctctgaatcacagttctgatggtacagtgtcccgatcaggtcgctagctctgtctctcgccgccgatgagccgcgcgcggattcgtgcctacgccgccgtgattcgtgctcggatcggttggatagcgcttggggttgagtaaatatcatcgccgtggatatactccggccactaaactactccgaccaccgt

SEQ ID NO: 60197 - DNA, 742 bp, Zea Mays
ttcgaagcagttgattttcctcaacatcttgtaaagcggtaacccacgctccccgaggcgtgatacgaagcggctgagggacgccaagcacctcatgcttcgttggacgcccttgagatcccatatgggtcccatattcgtgatggcggaaaccttctctggattggcctcgattccccgctcggggactaagaagccgagcagcatgccccctgcaatactgaagacacacttttctagattcaatttaaaatcgttgactttagcttgtcaaatgtttccctcaggatatggacgaggccctcggaccgccaggtcttgaccacgatgtcatcaacataggcctccacaattcttccaattaggtcattgaaacatttaatcgtgcatcattgggacgtggccccatgttctctagaccgaacgacatcattacatatcagtatgagccgaaaggggtgatgaagaaggttgtgggttggtcggattccttcatcatgatctggtgatagcctgagtaggcatcaaggaagcttagaattacctcgcaactggaggtagaatcgaccacctgatcgatgcacagaagggggaagggatcctttaggcatgccttattcagtctgatgtaatcgacgcacatcctccatttcccgcttttctttcgaaccaacatggggttggcccgcattaggggcgcttaatctcgttgataaaaccaacaacgatgagcataccgatc

SEQ ID NO: 60198 - DNA, 335 bp, Zea Mays
cacttcatgagttacgaacagactgatatccaaggagagtgtcatgaagcacgttgaaatgatgatgagaggtgttgtctcgaatgttggcgctcctccctcttactccgcttggaaccttcccccgatggtaagttttaactgcctttactttgttctgtcaagtcgttatgttccctgttctcactatgggattttgttgctgcagagttctttttctgagtttgtgtccaatccacccatccaaggggaggatgggagtccaggacatagagtgtgaccttctttctatgaagtggaggccattgttgccgcacacaagagtctgcttcaag

SEQ ID NO: 60199 - DNA, 668 bp, Zea Mays
aaagatgccaaataaatggcatgacgagggacaacaacgtagctaatttccctcggcagcgataccgtacctctctacccgccgttctcgccaaaaaaaaaccacgaaagcaatcatggagaggagcgtaataatcagcaggttggttaatcaaaatcagtaacgcccaccaaattctgcagtgcgcccaagcaaccatttccttagagccaaaacaatcaccggcaggctaatttaattccatttatttatgctatggaggggagggggggcaccagattaggcagccaaagcttcaattgttagcaatacacagcaccaatcacatgaaagcaaggaagcacggcttccattcgttgcggcatcaatcctccccctatgtgactgccgctgcaatctgacatgcatgccgatgccatgccaaaaaccgtgtcagcatccagcaagatttccatgtcaccaaccctagctatgtgactgactgactgatggttgatgatgctaccaaaccatatacgaggggagggaggacaggaggaacaaaccccatggcccccacacacactccctctttctctcctttatcagggaccaggaaatagaaccagcaacgaataataaacaaaccaggcaaacaacctagcccgagaaaagcaaagccaaggagg

SEQ ID NO: 60200 - DNA, 820 bp, Zea Mays
ctcaaaaatggattccagatatcaagggcacagataaatctccccttgagtatgttggcaggaaaacaaaactaaaagaggatagaatgaacaaaagatacttatcttcacctactccttttgccacttctggtaaaactacttaccttcattattgttgactccattgttagcagtttataaatgttttttttcaggaacacaagaaactatagtttctgacaaagatcaagaacaatgcccagaaaactacctaactaggttctgtcttgttctgtgttaattaattatatgtcatagtctgttagtttgtctgattatggtcttcattttcaccagggcttttgatcaattgatagtggttctgggaaggtttcaaactaagatcaagtctgaaacaagcaagaaaagttctgagattcttgcagctactagagagactatatgtcagcaccttgagggggttgaggcgcagatgcaggctgacgtgtaagaccttgtcccagtgctacactgaaatcaaaccctcatatacacatatatacagggtccatatatgaattcaaatatcacaaaaactataggcacagttacttgatacatgtcgttttgactgttattttagggacaaattggtcaatgcaggcaggtctaaaaggaaacgcctagaatctacatttgaaggtacaacttccagtcatattaatgcttccaagccggaactgaaattttatttgagaattatcatgacaggattcttttggctgtactcgatcatagagcagtttatctctaaagatgtgcattgtatccaatattc

SEQ ID NO: 60201 - DNA, 461 bp, Zea Mays
cctccaaaaaggagatgaatacctgcaggagggttcaaggtggcactatggcacacaatcatgcacttggattcacaaatattgcatagattttggatttgagtcaaaaggtggtttgaagaaacttcactacctacacagattgaaaggaaagagggggaaggcagtgggggtgctcaccagagaggaagaaagcaggggaagcaggggcactttgctggggcagagctccggtgattgccggcggtgagcataagggagaagtgtcgccagagagctaagggcgccagtgctgagataggaaagggagcctctggcttgggctcgggcaggaggccttttttaaaaacgcatcatgggcgcaccagacagtctacagtgcctgtccggtgcacaccagacagcgcacagtagctgtccggtgaaccaccggacagcgcacaatagagaggggatctgcg

SEQ ID NO: 60202 - DNA, 1573 bp, Zea Mays
acaagattgaacatgaatcattgcaacaggcataacatatcacaactcactcggtaatttgcatccataaagccaaatcatgtgcaactgtggaaaggagagaaaccatacttcagccaaaacgccgaataattgcatacgacgagggcgatgtaaacggaaaggtgttgctgattggaaggtgcatgctccagatgagaaggagagcgcaatcaccaacattgtccattcccaagctttttggcctggagcagagaaacataagaggaattagcctatagctctcacgtgcatgtagacactcatgtagctgtgaattaatctcacagtgcttttagactccacatagatagcaccaaaaactatattccaacaatttaaacatttagtgtgcagagaaaatgacaactcaagctttgtccaatgctcttgaatgattctgcgctttatgtggaaaatgaaagaagctgtttaaaagagcaaccgctgtaatttaaggggcatataagaccaggaaggttacacagaagcacaagcaggactgcataaggacagggtaggacgcagatagacaaaggttaccgaaccagaagggccagcaggaaacaggaaccagacaccttggcctaggaggccaccaaacctgttctgttgccaaacaatagaaatcagacaatcatcatgagctcaaagggcagacaccaggccgagccatgcccacaaaagcatgagacaggccaacaggtccagctcaaagcttcgactatgccatcaacaaatgcagcagtgcagcacatgaattcctaagccatcatatgatcttgcaagctaaatgcctgcctgttttaccgatcacaattgtattatctcgacctacaaatattctatagtggcatttgataatcgtgcaagccaaatgtatgttcttccaatcacaccgctgctatttccatctagaaaattatatagccgcacacaagcctcatagcaactaaactggaaaacacgaaacaacaaagcaaataatacagaacaacaggttaatggataggcaccggaacacgggcacacaagcatccaagaacagcacaagaaaagaaaagggcagggactcacctcagggaagaggacccttgctagtccgccgaaatcacgaagcatcctcgccaggatggaattctgagaccgacaatctctgggagacagaaatcaggcacaaaagcacatgtatcaggaggggcaccgacagaagaggagagatctaaagcacatcggatggccaggccgagccatcaatcccatcattccacatgggagcagggatggtagggtcctaggcacgtggaaccgcaagcggtggcggatggggcctagcatggatggtttccccgtcgtggagccgcacaagcgcaacatgaaaccacgcatgccgataatgtggagacggtcctccatatgcgattatgtgaggaggtaaagaagccggtgcagtcgccaggtgcttgcctctcttgcggggccgcaacgacgattggcgcgcacccagtcgacgcttccggactgctctatgtcc

SEQ ID NO: 60203 - DNA, 350 bp, Zea Mays
ttaaagccaaagagaatatcgggacttaccaggttgagagtatcaaggttgtgttcgagttcccagatgtgtttccaaaggacttaccaggtatgccaccagagcggaaagttgagtttgctatagagcttcttcctggcaccgcccccatctttaagagagcttacagaatatccggaccagatttggttgaactcaagaagcaaatcgatgagctgtcagaaaaaggatacatccggccaagcacctcgccttgggccgcccctgtcttgttcgtggtgaagaaagatggcaccaaaaggatgtgtatcgattatcgagctctgaatgaggtcaccatcaagaacaag

SEQ ID NO: 60204 - DNA, 350 bp, Zea Mays
gcacaaactcttaacatatcttccaacacttggtttgttctttccatttttccatctgtttgcggatggtaagctgagctaaagtttagcttggtatccatggactcatgtaatattttccaaaagcgcgaggtaaattgggttcctcgatctgatatgatcttcttgggtactccatgcagacaaacaatcctcgacatgtataactctgctaactgggctcctgagtaagttgtcttcacaggtataaagtgtgccactttagtcaacctgtccactataacccatatggaatcatagccgtcacgagtacggggtaatccaactatggaatccatacctaattcttc

SEQ ID NO: 60205 - DNA, 557 bp, Zea Mays
taattcacttttcattccttataaaaaatgattacaaaaagggaaactagtgcttgtgttgctattaacatttctcttgagcctacttatgaaaatctacaagagagtaagtgcaaggttaaagccacaagcctcaaagagtactctgctcttcacccaaaaggaagaaaggtcaaagcaaaggtatgggaactcatctctttaatttagttcccatcaatgattgttcactctaattatatctttgtgaagaaatagattctttattaaacttaaattggctaagatgagcattcaatctcgttctcattaatgcactaatcctctagaatctatctcatacctttgctatatatgttctcatattgacttgcttttaagtaatgattaataaattcaatatgaagaggtaaattcctatgcttgatcaaatgcttaaatagtgcatgttccttttttcaagtaatgtgcactaatatcaaggattttacttcatgtctgtgtgatctatggatgatgaactgcctctactttctctctaaagaaatcatcattca

SEQ ID NO: 60206 - DNA, 604 bp, Zea Mays
ctgaacatcctcgggggctaggttgtatcttgcactacccaccagagctggattactaccggcaacaccctcgggggttgggtaactgccggcaccaccctcgggggctcggtcttctgcagtagccacatccaaggctgagggctcctcagtcacctccatgggagtcgggtgactcagaccagcgtcttggcattgaagactgccctccaaagtcgacgatgcgcgagacaccgctcgggttacctcctgcccagcggagtcaagcaaggaaggcccaccgtttgggacctctgaacaaacgactgagatatcatcggcaggtggctctgatagcatatcttcgaggacgacttcctctagtacttgatcaaagtctgatattgaaagtccctgaagactgaccagagacgacagagctggagaaggaatatcactaccccctcgctacctctatagtgccggttgttcttacagatcatcgagacttcttcttcttcctcttcgtcctcgtcaaatatgcagacagcagcctgtgcacgatcacaacccttggcatcaaccttaggaagtgtggcggaaccgctcgaattattccaactta

SEQ ID NO: 60207 - DNA, 1211 bp, Zea Mays
gcaatttagagcttgtaagcaaagcctctatgcaaggttcaaggttcacacttcatgttcgaatggcgttttggggtggataccgaaaccaagaaataatggatttgtacagctgtgttgaggcatgtaaaaaaagtcattacctatgcgccaacctactaacatgaataaaatgctaagatgtacctaaatgcttgttacgttcaggggagggcccaggaactggtcgtcgatgccgctgttgcatgaaccttcgatttcgctgttccaaggggggagagaggggcatgccgttgttgcaaggggggagagggagtgatgtgcgacaccttctgcttgacgctgggttgcgctgagatttattcgcttaatcaagaaaatgagctcaccatagaaattctcgtgacccaagtaacatactgatgctagtcaaaatgttagcaaaaatacaatgaaccagcaggtatatcttgtgttcttgcatcctgaaacttgtgaggtatatcctgaaactgctgcataccaagcagttgttacttaagagctcctcagttttagtcaaaacgcgtacactttacattttaggcttcagttgtgtatcaagcacaacacttacggggtttggagatgtaggaccgtgagcgatacaaacctgggccacaataaaaaatggtgtttcacaatgcattcagccacaaaaaatagaaccgtgctatagaaagcttgctattcaattaacaggcttataacaaatttaagaatataccttaagatggattggtgcaggcaaaactgcttcctccgtgatctagaattctggatagcatttcttgctgaattgaaacctggattcttgatgggggcaacaataaacaaatgcatccacctacactttagtgaacgcaagccctccaaaagtacaacagcaacaacgaattattgttcatagcaagactactcaaagatcactcaccaagtggagacgcgctgacagcaaggtttcttccatggacagcacggacacggatcgagaggactccccttccatggaggctggggcggtgatccggggcgtctgattctccttccatggacaaccttcaacaaccaacaaacacacggagtttctttgatctgaaaataaagaccaacaaacgcagaagttgtcagccctgcacccaagagcagtggtacttctgtagaggcagaaa

SEQ ID NO: 60208 - DNA, 329 bp, Zea Mays
ggattttattgtagaacatcagattaatgatactcataaactagacatgtcatacctcactattactccttggactattttgatggatcagtttgcaatgaagggcaaggaattggcatcgtacttgtttcaccaagtgatgtctccttcgacttctctagccgattgaaaacttattgcactaacaatcaagccgaatatgatgcccttttgttcgtcttggaacttttaaattgtatgggagtaaaacatgtgaagacatttggtgattctcagttggtcatccaacaggtgttagaagaatatcaatgttttgatggtactctaaa

SEQ ID NO: 60209 - DNA, 591 bp, Zea Mays
ctcgaacaaactctcaatacaaggacaagtgtataaagtataaatggtagaatacaaaaaatgtaaagcacaagtgtattattttcacttttcagaatatacaccagacccgcatcacccacctctagtgttagcctgctaccaccatatgcttgctaccaccatatgcattcagccaaaacagtgaaataccaagcagtcaaatagacagccaaccaaaataccaagtaatcagcccaaaatacatttaccattcacaaatgtaaacagctagcaaaacattcaccagaaataatatgcacctaccagaagtccagaacatccacctacctcactgtagcacgcacattcagtcaaccattcagcaagcaaaacagctagccgctgattgcaacaagcaaagcagctagccatgcacctacctcacctattcacaagcaaagcagctagccgctgattgcaacaagcaaaacattcacccaaaataccaaaagacagtggcaacattcagttgctaagttttacagtctactggttacaactagataaaatacgaaggcataaactggtaactggtaaggcttcaacagt

SEQ ID NO: 60210 - DNA, 754 bp, Zea Mays
ggggttgaggctcccctcgacctgggtataagaccctggggcacctgctccccctcctagctaccctcacgcaactcccagccatagtcgtgagcgcagagcgtggaaccaggggatagaagagcaccgccgtcgctcttagcattccatggtcgcttggtgtccgcagagcattcggggtcttcgagcgacggcgtggaacgtgcgcgtgcgatgatgggtcgtatggcttcctggattggcgtgaattgctcgccggagcacttcggccaggacagaaccgctgtgcgccatggctaggctactttggtgctcctagtgtggaagtgaccttcccatctgattcgccatgagtagggcaacgtgtgggagctatcggagtggtgtatcgcgtacctgggcatcggggcacggtgcgtcggtggaagctccaccgtgtgcacggtgcgccgtcgcgctgatgatgatgagggggagaaacgcgtgcgccacagatccgcgaaggaaccgtggagattagatcgtcacctacccctttcgcgcaaccaaccacgaccattgatcggagattgtgcggacatgattaaatctcggtgttttatatcgggtgcgttgatgcgggatccaatggtagcgattgggtaccggttcagatggtttagatctaatttgatccgttggttagtgatccaacggtcgggatcttagaataccccttcgccacacacgccttctaaaaaggaccttgaaatta

SEQ ID NO: 60211 - DNA, 868 bp, Zea Mays
gtggactctatccttcaaaggctgaatgttcttgaaaacaaaatcaataacaacagcttcagcggtcaagcctttgttcttcaacgcatatatctcggcaagcaataccttggactcagcaagctccgagtctgttgggacctttgtccagctaggcattcgaacatcgggttgtctcctcgatcgagcgggaagcgatttgttatgattctccatggtgaaccattcgaagcgccatcccttaatactatctttcaaaggaatatcaagatattcagtcttcctgtctcggtgaagttccaaactagcacctccaacaagtcgatgctgccctccggccattccagaccgacaatggtaaaggtacttccaaagcccaaagtgtggaagaattccaaggaaagcttcacaaaggtggacaaacacaacaacttgaagcgtagaattgggatttagatgcgtaagattcagagagaaaaagtcaagaagaccacaaaagaagggagaaactcgcaaggctagtcctcggatgagtaaaggcatgaaaataaccgccttgtgggtatcctccgtcgggacagtaactccccgccagatctgctaggaacatagttccttaggcggcagaacaccgatttcaacaagatgtaagaggctagcttcagaaacaacagagacgtggttaccagcaaaagggagttggctatcaggatcgataggagggatgactagcgtggtaccactctgtttcctcttccggggcgccaacatgatcattcaaacaacgcggctcaagaacaaaacacgaaaagatgcaggagctcagtaagctagggttcaagggtcaagaaaatgtcgacaagagtac

SEQ ID NO: 60212 - DNA, 576 bp, Zea Mays
ccgatagccatccgccgctcaaattcgtcgtactcatggtcggtctctataaattgatgcctcagtgagctccgttagattatccccaagccagagcacccaccctcatctccaatcatccaccatagcgcttcaattcgggttttcccccaaattggatctccgcgtcgccgtggatagctcttccgtggctggacaactctggtatgactctgcacttctcgtatgatttttagcagctctgtgtacccgtgaagctcgtcgtggcagtcatttgaccaattcgggcgtgattgaatgggaacgcgggctcggcgtcacgggttccgccgtgtgcgtgggtagaacactctctaagtgtgccagccaaaattgaagactgttcttgggtcgccttaggtcgggaatgttcaccccgtagctattttagacagccaccgccggtcatggccagtacgagatgcgtggtgctcgacgacgagcgcaccgtggccatgggtctatttggagaagaaacagaagtcgggggacctctgtgtaattgtcagagagaggatgaatagtggttaaggttct

SEQ ID NO: 60213 - DNA, 479 bp, Zea Mays
cacctgtctgctttcctcggctgtctttagaatcacatgcaattcaaccaatattttctccaagccattcattcggtagttcattatgaatggctcgtagctcggagggagcgactagagaataacatcaatagccaggtcatcattgagctcacaaccaagtttgtccaaagtctcaatgtaaccaatcgtcttgatcatatgaggactaatcggtctaccttctgtgagcttaacagagaacaaggactttgagatgttgtatctctcggccctagcctggttctcaaacattccatgcagccccacaatcatagaataagcatcagtatgctcatattgcttctacagatctggggacatggtggcaagcataagacatctcacattaattgattcattggtgtgcttctcataagccacacgttctgactcatccgcattatcagggaagtcatcaaggtatggttcctcaagaa

SEQ ID NO: 60214 - DNA, 279 bp, Zea Mays
ggcaagttcttaagtctacatcttcagaggtgaaatccactaagtagagattgttgtatctaaatcctttgaacaccattgattcatcatccattttttatacaataacctctctaggagtgaataagcattgaaggccaagatcatagagttgacccactgataataagttgaagctcaaagatacaaccaagagaacatttgaaattgatagatcatttgaaattgccaccttgccaagtccttgaacttttccctttgaattgtccccaaaagtga

SEQ ID NO: 60215 - DNA, 717 bp, Zea Mays
ctgccgcgctgctcctccatgtcgccaggtcccgtagctgccagagtcgaggtgagaagttccccattcagtttgctggcgtccctttttcgtgtattgcccttcggattgatgcgcggcgctcgggatcacggtttaggaacggcggcgatggcctccgccgtgttcctgtacaagcgctgtcgcgggatgctggtttggggcgggtgcctcaggccattggatcacgaccgacggctaggatcactctatgcacaccggttggtcaggatggctttgtagccatcgatcggtggatggaggggtaagattagagttcgcttcaatttaatctgcgccactgatctactgatccagcggctggcatatcataccgcttcgctttaatggatgatctgattgcgaccgcagaactccgatccaacgaccagtagtgaccaataccccttcgtcttggacgattcgctaaagagcccctgcagtttttcttattcaacccgccgtccattgctacagccctctgagtctcggggatctttttagttttacccctgcgcttcctaggatttgaggcccagtcctgagatcagataaaatagggaaactaatttaaaaatagatttttagtacaaatttaattgcagaaacttgttttaattgtagaaaaatccaaattggaccattccagttcctataattttgtaagattattctcta

SEQ ID NO: 60216 - DNA, 337 bp, Zea Mays
cggagtaccagtagggaaattactcggattcattgtcagccatcgaggaatcgaagccaacccagaaaaaatcgaggccatcatgtgaatggaagcaccgcgatcacagaagaaggtacagaggcttactggatgcatggcagccctgagcaggttcatatcaaggctgggcgagaaaggcatgccattctacaaactgctcaaaaaggtggacaagtttcagtagaccacagaggcacatgaagctctagaagcactgaaaaagttcctgactacgccaccagtactcaagccaccacgtcgggccatgccaaatcatccggtagaagatttgttg

SEQ ID NO: 60217 - DNA, 751 bp, Zea Mays
ggcacgactccgcgaacccagccgcatgtggccagagttatctcaccggcggtcaccgtggctcggtcacctccgccgcggtgtcatccataccctactcttccctcactatacctctcttctacgtggtgaacatgcgctagcaatgctatccgtggccgctgatcgctagtcggtccgccgtggctttaaatagcggcatggaccacggcgagacactcacagcctcaaccgcaagcttgagaaaaacccaaaatttgcactgccttctccacctctcttcaaattgagtgtgcacggtgaaactagagtttcgtacggccgtgtagccccaatctcgcctcccaatttcacctagagtcgtcgcgacgtcattttccccttttctctgtcaccggcgagcacaagtctccgcgctccgtggccggaccactctggtaaagctctgcccctctcgagtgttgttctagcagctttgtaggcacgtaaagctcaccgtagcatccgtttgaccaattcgagcgtaagtgattgggaacacgggatcaacatcacggtttccgccgtgcatgtgggcagaccgttctcaaagtgttcaagccaaagtgaagctcgttcctaggtcgccttgggtaggttatgctccccttgtcgctcgactgagcatccgccgccggccagggccagtccgtgcggcgtcggtgatgaacggtgagtgcgccgcggtcagggagttgtttggagaagaaac

SEQ ID NO: 60218 - DNA, 621 bp, Zea Mays
caattgcgaagttctagctcgaaatctatctgtcaacgatgatggcgcaaactgaggacaacccgaggtgttctcggcgatctaacatggtctagttcaattagctggaccgataagcatccatagcacacaaggatgctgaaacgagggcaagtagggtatgaatggacctgtagacgtctagccacggcgagctcactcacggtggcgcgaagaactgaattggggaaatgagaaattgaggggctctagtgcatgatttgaggcacgagcaggtgcattggcttcgtgacaccctaacggaaccagcggcacccccaatttatagtgtccgagagcggtggcggctaattttgagatggtgcgctgacgaccagagagaggggaagtcactggcgtaggtgataccgtggctttcaccgtggcaaggccaccggcgatggacgggcttgctacaagggttcactgcgacgtgtttaaacctcccaggcatgtggtgaatgatcagtaagcggccaacggtggtgaagaccattctggccggccgtagaccaagtgggtacggtaagctcaacagtgaccgagtccgagccaatccgggcgctaagatcttttactccc

SEQ ID NO: 60219 - DNA, 484 bp, Zea Mays
tggtcatatcaattacatcatttttttgtcatgaagctatagaagtaggtatgcatctatctcttcgtgcacaagctatctcatgtagggaacgaaaacaattcgaaacaggttagaccaaagttgaggtgaacatgttgatccactagccatgatcatgatgagcaaagctactacagccgtatgtcttttagctggccaatcagtgaggaaaggagggagcaggacaaggtcatgaaagggaacgtgaacatttgctctcgtactgtatatatagtactgtgcttagtgggtagtgatgcgtgctggagcgctgctattggacacggaaagtggtagtagtgttactgcacgtgccagctctgagtctctgaagatatagatagtgacgtgcccagttttctgaactaaaactgcattagatatttcgtaattttttgccggctactagccatactctgggtcgaagtttagtgaacattaa

SEQ ID NO: 60220 - DNA, 782 bp, Zea Mays
gcttcgtgtgtatatttgttagaatgtgtttatgccctttatggtatgttcaatgtgtacgtgatgatgctttggctagattaggctcattttgttcataatgatacaatcttgttgaactatttttccaaattaagaatgtttctaatactttactaaatatgtaatattgttcactgttgagattgtcaactagcatgtgtaggatgtgttgaaaccctttttgcttccactagtatgctaagttgctatgtctcatgctttgagtcatgtactatattgatcaaagtaatattgtgctaaaatttgattctagataagtgaaaacaaaagattgacatgagtttgcatttgtcaccatgtcaccgtattgggaatgcttctccttacacacttagaagacttggacaatatagtggatgatcgaagccagtgtcttcaggttatgattatgtttttgtaaaggttacacccggttgaaattttttacctaacaatgccttccaatcactcgcacacacatgctttgtctaagtcttatgtcaccctgcaaactttaataatttaattaaaatttgatctaacacaaatttgatctaactcttatgatgtcagtagaacaaaatgatcatctgcaattaggggacgtatgcacagggggacaaagtagaccataccaccatcgattttttaaaacctcttattcctaatgttcatttactcttaaatataggggaataaataaagttttaaagttttgggtcgaccaaaccaacctcgtc

SEQ ID NO: 60221 - DNA, 374 bp, Zea Mays
gcatttacatgttgcagcatcacttggctgaatcaatgacaagggacagtgcatgattcattcatcacttgttttggtcctctgattcttccgattccgatcgctagctgtaaaaagctctagctgagctgatcggggcctgggcagggcagctgtctccgtcatgcttcatcacatcacatcatagatgtagtaacaggaaactaaggaaaggttgattctcttcatgctttcttcttcagggattgacagagctgctcctccggtcgctgttactgcacgagcacatcacctaaaagaaaaaaatgctccttttccactgctcttccttttttttccttttctatctctctccaaacaatgccttttgtttt

SEQ ID NO: 60222 - DNA, 727 bp, Zea Mays
atcgtcttttatgtaaatttttgttcctgttggttcgtcttttaaccgctctctgtttcgttgcctatattgaataaaaagctgtggcggcgttctagttcgttgtaggtagatgttttacggttgttgtttatttcttttattcttaattttgagtgaaagttgccgtttggtttttatttttttggtcatgctcatgcgttgtaccactactatagcctcttggaggacgacgaggcaaaagcgtggatctcacctgtagaggagtcgacgtacgacgcatgaatcggtcaaaaaagcaattcaagcgcccggccggcggagttgcactggtgcgggaatattgggtgatgcaatggatcggtacaataatttacatgatgccaattttctctaccatgcatgcatactcatttcacaacaaggtaattcgctagcttaatctgtgtgttctgtgaagtgtggacgtaattaaaaggggagaggtcccagaataaaatgttggatcgtacgggcgtcgttgaggtgagaagagatggaaaaaaggcgtgatccaacctccgagggcaccggtctaacagcccgcttgcattgcattgcattgcccggttaacatcgcatgatgctcttacagtctctctctctagcgctctctctctctctctctctctgaatgattactcggatcaggttcggagatccttggacgtatggtcagttagggccg

SEQ ID NO: 60223 - DNA, 458 bp, Zea Mays
gtcataccaatctaacctagacctgatctaatgtgatagattagtctaacctaacgaaggctgaccttaagttgagctaatctagtgtaagttgcttaatgttggtacaaaatataaggccatactcctaattcacttaggtctaaattggtgacttagaccaactcagccatacacaacaactcgacctatataacaggttacttaacttatccacccaatctagaagcaaacaatcaaactacattctaactaatctcattcaacttataactacctactaaaccggctacactacctactaagtcactgcctacaaatctatcttaacctcttatccctaacctggttgaagacatcaagaccggagaagagaagatcaacatcgacaaggaaggatatgaatagaatcaaaacttcagatgaatcaagatccaccatccaagatgaagtttttt

SEQ ID NO: 60224 - DNA, 351 bp, Zea Mays
gtggagctaagggttatagagtggagtcatagctaagtcttggcctcgcggcggggctccggcttctaggtcctcatcggtgcgtcctcctcctgttcgtcagtcctcctgggcatcttctcgttcgggtccgtccttgtgcataagtccgtctgtctctttggggatctcatggtctaggagccaacatattccttttatatgccgaggaaggggccagccagcggtatctttcactaagaaggagtcaccagacgacgacaaaccaagcgttctaccatggggtgcagccacacgtgctcgtgggtcccaagctcacctggttgtcttgtattcttatggcggacgacg

SEQ ID NO: 60225 - DNA, 425 bp, Zea Mays
gttgcgcattgttggttgatgtgtgctgctgtgccatattgctatgtgttcctatttggtgtgctttacaatttcgtttctggggatgggaattttgcaaatcgacgagaaccaggattgctccatagttaatgctgcacaggcaatgaaagctgtcaaaaacttagggtgtgacttgtgagttctgcagatagttgactcctgtagtctttctgattgcattggattttttagggactattcagggtcgtattgatatatgctctagttaccccttttctgtaagaatctattgttatttgtactttcccaccaaaactgtcgttctaaatgaccgtggccattagttagtcatgtaaggatggtataaatcctatatctacatttggtttaagcttccctctcgttgttcacatcaatcctgg

SEQ ID NO: 60226 - DNA, 835 bp, Zea Mays
cttgccttggcacacccgaggtcgggaccgagcgaccgaaatgactcgatctaaaattctcaaggtcatgtttgacccgatcagagatttaggtcgtgtgaactcttgatagttctgtccaaatcatggtgacctggtcggggggctaggtcaaacatgtcgtagtcaggtctgatctagctaggctagacttggttggggagttaagttgtgtctaccaaggtcaggctcgacctagttggggaattaggttgggactgattttgtttgagggattgtcttgggttatgtagggtcttaatctctaggaggggtttttgtgctatccttgggtaccccgtgtatgggtacatgttagtcgtgctctctcattttccttcgacctttgacccgatgccgcacgaatggaagcggtggctagctagggttcttcattgtcgtctccgtcggacctccccaacccaataattgaagcatgaccgccctctcaaccttatctggcctcatttctaccttctctaggcaacctatccgtattcttcggtcctccgctagatgtaggaggttgagcacgcgacactagcgaaggggcttgagcacatgacattgggtccaggcctagagaagacgaggacaacaatctttctacagccacaccatcgatttcgacgcaggtggaattccatgttcagttaaagccatatctatacaatttgggtgaagttcatttatccccccccccacaattggagctatcttttgaaccatgagacgtataccaggatgtaaatctttcgaatcatgagcttacttcatctttcatcttatgatcaag

SEQ ID NO: 60227 - DNA, 1364 bp, Zea Mays
ctttcagactttgcaacccaaatttgtttagctctacacttgtttggaggacctaagaatgctaatttgatattcccatttgcaacttttataagcacatagcaaacattgaatgcaaaaggccttgagtgctttggcaaggcagttggtggtgtcgttttgcaaatgtgagcaaagtgtccttcttttccacactcatatcacttgatgtgcttaggattttgcttagccttgttttgatttattgctttcttttgcacaaatgaattgtatccattaccactctttttatttttcatgactgcgttcatgaggagctcattttggaggtattgacccttgttgaattttttgcacactggtggcaaaatgaacacccatattacctcgagcagcaaaaccccaacctctttccatagcaacagcgccttcaccaccaagaaaggttagcgctaccacctccaccaccacaacatccaaaccaacacctaccacccctcccaccaccaccaaagcaagaagactttgcagacccacccttcaggggagtgattcacatgatcacaaagggtccagctctgacttcgagaacaaacgacaaaaaagggatcactactaagggtcaatcaagtcgcagtcacaggacccatcgtttagaagaaagtggtctcacgtaccattaaccttcgacgcaagagacaccaaccttcgcagcttgccccacacagacgcactcgtcatcagttgtaatgtggcaggatgggagctgcacatggtcctcattgacaacggaagccaagccgacatcattttcctacatgccttcaaccaaatggttttggagggaaggggacatttccacttggcaagatagagctccctctttccgtcggcaccaaccacaatattaggtcagagcgggtaacatttgacatagttaacatggtctaccaatacaacgccataatggggagagggtccatcaacaaacttgaagcagcaattcacggtcttcacatgtgcatgaaaatcctagaacctctcggcacaataacaatttacggagaccaacatactgctcgcaacattgaaagggacctcgtcctaggacaatgcaacatccagtaccttatttctgagaacgaaagccacgttgtcccacaccctgagaaagcagtgccaaccaaagcctagattcaaagcaccgaccaggccaaaaaagtccctctagaagccacagtaccaaatcagacagtgttaatcagcgaagacctcacccaagatagagaggccaagctgttgtcctgcctacatcgcaacaaggacgtcttcgcctggtcagccctagaccttgtctgcgtcat

SEQ ID NO: 60228 - DNA, 469 bp, Zea Mays
gctaacttggccgaaggtgccttcggtattgcagctggctcttcaatcttctgcgtaggaggagcaggtccttttgcttcaatagctgaagaagtttccccgctaaactcgggcactgtggccggttcaatatagcggggccggtgggtgaggactttcaactttttactcttcggcgcaggctcgctcgaagcagccgaagcggcaacctttccagaggtcgcgccttttctcttctgcccccgtggcaggtagcggtagtcagggtacacagatccaatagcatcaaaaaccctgtttaatcttttcttctttcggctcccaaaggccgcagatagtgcattatcttcggacttggaatatgctccaagttactcatcgctagtattttcaacacacttcagccagtcatcatctggttcgacaaactggtctccgaacctgaaggtgtatttcaatcgaaccaggc

SEQ ID NO: 60229 - DNA, 1206 bp, Zea Mays
accgtcttgtgtgtcatacggggggagcgaattgtgatggttttataatctggaccctctccctatatttagcaagttcgacgtggacctggctcaatagcctcgtccctgggtgcatccaaggttgagcggacctagaagagattttcgtcagaaatttccagggcacgtacatatgcctaggaaacccatgggaccttaatgattgtcgacaaaagtcggacgaggcctcgagggactatatccgacacttttcttgacaatttaatcgactgaccagcctcatgaatgctgatgttatcgatgccttcactggggaatcaccgataaaaccatggcacataagttgggacggaagaccccgccaatgacaaagaagcttttcgacattgcgaccggccataagttgttgcaaatggaggactaggcatgatagagggtcagatgaagatgtcgatgactgcctcgacgcgaaaaggagaagaggccaacagcaacaagccgatgcatcggcgactacggtaagccggacgagaggaaggcctctagccgaggaaacccccgatcacatcgaaaactccttgaagacccatgtccgaaccaccagcgctcagtccaacaagcctataaggactgcaagttactaagagaattcttacgcaaaacggcgccatccgggagggggcctaaaccctaggataacaaaaggccacatggaacatgaccatttgccttgtcgagactggctgctctccggccctcatggagtgtggccagtccccacttaccatcggccctatcagcaatatggtataattaaccaggatacacgaggttagaggcaacaggcctgaaaacctctgctttgcctcgaacgaacgccattgagtcttaggacgtggtcgccttcaaacgactggaggacctgttccacctctttcgtgcggcgactagctagcgaacgctgcctcaagccataagacattgggttgggccactaaaaggggaaggcactgctcgatactgggaacatcaaaccgctaggatggctcgattcatggtgaagtcttagtgccctgggccagttctgaaccccgaccctagaacaatcgtctagggatgtcgtacatgcaaaaccaagaaagaagggagatcaccaatctctccacaacttattttctgtgcctttttacatctatcttctga

SEQ ID NO: 60230 - DNA, 683 bp, Zea Mays
atatacttgacatttgtataatataatattttgatagatgtttaatttttgtgggtacgggtgacccgatgggtgacccatacccacgtgggtatgggtatgggggtaaatccatacccaccagtttatatggatgacccgaggggggtatttgtttgtcgtgggtatgggtatggggtagtaatacctggtgggtatttaaccattgccatctctatcctgaacaaagtatagaatggcaacggactcgctctcagagcgtgacgaccattgcagggagggtctatcccaaaaatgcattgtcaccaagtaaacccccaagcaatccacatggattactcaggggctcgggggctacttctagcagatgtgcttgcacgtgcccaagcgttccgcactcaccatgggaaaatggacccatgccaagcgcgtggcgtcgatcatagaaagggtccatccgtaaaacaacattatcaccaagtaaacccataaacaatccatatggattactcgagggcttaggggctacatctagcggatgtgcttgtgtgcacctaagcgtataggacaccgagcataagcctcaatgcaactctaaggagtcgtccgaaggctcggggctgctgtcgggtacctaggaatagggtacctagggtaaggcctataacctctttctggcccat

SEQ ID NO: 60231 - DNA, 459 bp, Zea Mays
ctcgactactaaattttgtccatttgaaattgtatatggcttcaaacccactgctcccatagatcttttgtcattgcctgtgtaggaactgatgaactttgacactagcaagcgagccgagttaatcaagaaccttcatgaaaaagctcaagcaaatattgagaaaatgaccaagaaatatgaaaagcgtgccaacaagggtcgaagaaagatgttgttcaaaccaggagacatggtttgggtacatctacacaaagaaagatttcctgaacaaagcaaaagcaaattacaaccacgagccgatggtccattcaaagtgcttcgcaagatcaacgataatgcttatgaaattgatctgccagatacttatggtgtgatttccaattttaatgtggccaacctctctcctttctttggattggaagagtcgaggacgactctttttcaaggagggaggat

SEQ ID NO: 60232 - DNA, 444 bp, Zea Mays
tgcatatcagactgaagcttttttaggatgtctgagacaatcgcagtttagtatgcagtgaatcctggactatatatgtgaaatgatgaaaaaatgttgattatcattggaatctattttctaaaacgaagcaactggatacttgaaagtttatcgttttcatctgctagtttgtatatatctacatgtttctgcatgttgaatgacatatatctgttagactggatatatggatgtgcatatcagattgaagtttttttcttcttctaggatatataactacattatgtgtagcgttgctttgctccctgctatgaagctatgaatgtgtgcgagcttacatatatcatcttcccctttgttttcttttatttcctcggaagctaaaaatttatttcctcgaaagctatggatgtgtgcgagctgccaatctctgagtttcgg

SEQ ID NO: 60233 - DNA, 808 bp, Zea Mays
accatcggtccagggattggacggggtgttacatcggtctagaccctagtacctggcatgtgggctgtcaaatcggccactcagtcgcgcctcaccatgtttcgcatgtggacccaccctatcggatttgtcttccacgctaaactcagtccatggccgccgccgtagatcccagtggccattgaaacaaccctcccctctcgtccggtgtctggggggataaatactcgtcgactatcctcccctctcatctcattttcttaaccactgctagcggcgagagcattgtgtgcttccttgctggaccgggagaaagggagagctagccgctaatggggagctcgcactgagcttcactggagaggggcgagaaaaatgtcgggttgtgtgcttgccaggggtcttggtgatgggtcgccgtggtcgccctgggttgaatcctagccgtgcatggaggccgttgacgagcatctggtgccgagcagaacagacattggtgtagggacagaaatctaccacaggggcgcctgcctacaacgatgctcggggcatgatagttggtcaggggagatcgtcgtggcgctctagacgcgcgtgcattggtcctagggtcggatgaccaaccggggtgccgttgttgttcgctggaagaactgctccaccaggaatcatcccgctcgtgtgggcagcctcattggcaccttcagctctggtatgattgtctcccgtcgattcacctttctccctaccatgttttgagctgttcgcattggattctagggcctaggatcggaggaattgggtgctc

SEQ ID NO: 60234 - DNA, 368 bp, Zea Mays
ctactacggttggattaggctaggttacatagagcgacttattaagctggactgcttaaaactattcccagttgccgctaactagataatatagaacacgatctataattaagctggctatttgctaaaacaaaaccatcacattgcaaaatcaagtgggtgctccacttttttatgctgagatcgtgctatttagaggcactgattgcctatcatgtcaattgtttttctttaccaaatctcgtcatacatggtcccatgcatgcttctaggtgccaggtgttgtagttgcttctctatgcttgatcacagactttcttttttcgttggcagtacatttttgtataacgaaaaacgcttcatatcat

SEQ ID NO: 60235 - DNA, 713 bp, Zea Mays
agctgctgctggaggagttcggaattcaactctagcacctcacaccccactccatcctccaggtggccatctttgtccatttctgtgagatgttcgtgggagtggcggcttgcacttccctttttcgccagttttttgtgctggtgaggtctgggaagggcaaagatcacctcggggcctactaccagtcaaggacagatccgacagtgacctacatcgcttcccttggtggtgcgaggtgggagaactagcgaaatgactgggtgatcgccagtgctgaggtcagcgatcgccttgccctcccgagtggcgggcccagactcgagcggaagcaatggagggtaaaaccatgccttgtgccagagttcaagcccttcctggacaggattagggaactggcagttggtggcctgacctcgatgcacgtactcggggatttcctgaagcgtcgagtcatgccgctgcaggggaggccacgcctgtgttgctggtttaccggcgtcagcgacattggtaggatccagcgcgggcctgggactgatctgacctgggagcagttggaaattttggtgagggggatcactagtgaggcttttatccccgaatccttgatacctccctagggcatttcgccgctttgcgacaacccagggttgcggtcagcggtgctggcccgactgccgacccttgatgagagtggtgtggcggtccac

SEQ ID NO: 60236 - DNA, 308 bp, Zea Mays
ataataaggatgtagcaatctgctaaactttagctctatggatataaataggtctagataacatatgggaataaactttagattgtttctaaatccccattatcttactatctacccaaataatgggggctcacaggaacattactctccacttattaattaatccattagttatggatctgaacaccagttacaccacaacctactatccactctgctaggcagtagttagcaaatattagctaaataatgataatttcctatatatgaaagcaactcagaaacggcgctccctagcctatgtttgg

SEQ ID NO: 60237 - DNA, 532 bp, Zea Mays
ccaagaaaggaggcccaagacactcaggacatacatacagtgaactatcagaatgagttccatactatcagggaagctcgcatgagaatgccctacgttgtgcctaaggaaagaatcattgattatctcttttggaatgggtttcacttggaattctatctctctatgctctacaatacaatgcatgatagaatgcttcgtgtgaagtatgttgattgggagcacattgacaacaagtcagataaattattgaacaacatagtgaatgcatgcaagcctctatgacatcatggggttccaacacatttggaacactgagattctgtatcagttctcaactacctactactatgagacctcctgcaatgtgatgcattggatgactgaagagaggcactacaggctggacttcgtcacctttgctcgtctgttgggtttcggctctgatgatagcagcttcagtgagattcatgatgagagaaacctgacagatcatgagattgcttttatgtatgttgatccttctactgcg

SEQ ID NO: 60238 - DNA, 369 bp, Zea Mays
aaatgaagaaagggttgaagaatttgagtactctagacacacatgtgacgaccggacatagcactagacattggacacactcatagaggtcttcattatgtttcgggagatccacaacgcaccagacatgtgatggtgcactagacacccaacctgacacgacactcaaagaggttgcaaagcaacctgattggggttacaaagcactaacacctctagtgtcacatcaaataccacactagatacccctagctcaatggtcggcaactactagttcaatgactagtacacatggaacactcacaggacgtgtctagtgcattcatcagagtatctaatgccctcgtagaaagtctacatagttccaac

SEQ ID NO: 60239 - DNA, 1038 bp, Zea Mays
caactactgaggataggctaccaatattgatgactgtgacatggagttcataccaggcggagagtgtcggcaccaggggtgttgtgggctcctgatggcgtctccacgttaggcggagcagggataatttcttttcctagcagcaggttgtctccctgatgtggggttgtctgtatcatacaatgcaaataaaagacatgtgtagagcttgtttctcagtgtatacagaaggagaatgaggttttatattgtagatagctgttttttcccactgaatacaacagtgcaccttggcgctagacgaaactttgcgactctccggtgttagcgacggctcgtggatgaaggcagcccccttgttttgtgtgacacctgatccttgccctgctgcagagttagcaagtagtccaaaaagcaggttagagccacaaagagctgaagtgtatgagtttagtcgtttttttcatgtgtactaatcaatctcaatttgaccacttgagctgcaatgaggctagtttcaggtgagaattctgcagcctgtgtctattgggcagatgctgcagtctgtgtcattgtagccctaggtgacccgacatacacaagtagaacggagtggaacatcaactaaacaagctgagaaaacgagccataattttcattcctaacttagcacaaactaatgtacatagctcgactaaacaaacacgataagctttaccttgagatagtatggtcgatgatggctgtgaggccggtgtagctggaagtgcgctgccaccatccatttctgcatttatagcattcacttggaaggaaacactgctataaataattgtgctttcgcaacggactgattaacagtattaatttcattgtatgtatgcattgttaaatattccaccggttcactgatgaagaagtctatatgagaagttactttgcagtgtgtttgatattctggaagataggcaactcgtagagttctttttttctttattcactacatatcattgtgtcttctctggtatatgatttaaa

SEQ ID NO: 60240 - DNA, 350 bp, Zea Mays
cgagcactgaagacgacacgcaggacgcgcactagtgagataccctgacggcgactggcctgccctttggttcagctttgaccggtttgttacgggccggaaactgccgccccctgatatgatccctgtatgctggttgctgatgaatctgctgctctcggaatccagttggaaggctgatggctgggttaattttcagtgcgttggttatcaggtaaacttccgcattaactaattgctgccagtttggtctccgccaaattcgtccacggaaatccggcgatgcatggcacgtgccgaaacgaacacgtgctgtctgtggcgcgcgactcgtatagtatcagttccgg

SEQ ID NO: 60241 - DNA, 424 bp, Zea Mays
ttaacctgagcgaagagatactcgatcgtctgattgtagccgtcaatcaagagatcaacgcacaaggttgtttcacctccgcccatgtaccccagcgcagaccgagcggcggtgcagtagcaaccgcggcggcggccatggccggtgaatagccaaatcccgctagcgcgcacgaaactcaactctgactggttccaaacctagaacacgcggtaaagaaagggtaggaagggttctcatcgtgtgacgcacaacaggatgaccgtgcgacgaagcagggcggaatcacggcatgatctcgcataggtgcgcaatcccgggtcaccaggtcgtcaatcccacaaggcaaagccgcaatccatccccggagttgcgcagtgaagcttcgacgacagagcccaagcgcagcggcacccgatccata

SEQ ID NO: 60242 - DNA, 443 bp, Zea Mays
atacaattgtgggtgtgattactcaaacaaaataaaacactagcaaagtatgtgactggagaaaataaagagtcttgcttgtccaattttcgtatagaggagacaggaaacaaagattttgctctctatgcatcctagataccgcttagtcgatttggcacatggcaaaaaaatgagtacaaagttgcccatgcatgttgtacattaagagcttaaatgtgtcacatccagatttattgtagggagcctaacagttgtcaaactataaccgttatatattcatgtgatattaggtttattgtgatgatgcttgtgttggcattgcagggtgggtcgaccagtttcgtgtgttaggctgccaattgcaccacatggtaacatgacccgtgatgagcgtatggtaatttactttcacggccatcgacaatgtatgggttccttgc

SEQ ID NO: 60243 - DNA, 367 bp, Zea Mays
ctcttgttgggtcctacaaggttagtcaaaatagtttttgaaactgatatgcaagttttgtctcccttgcatttggatcccaacttcctagccactacttttgcattcttacatgaaagaataaaagaagtgttgcaagcatgaaaaacagtagtgggttcattgcacattttcctaggcacatgagacacaacattattcctcttaggcgcatgagacacaacatgattgcgcctaggcctatttctactacaatcataagtagagctggaagcaatcatagcatgatcatagtctctattattataagcattcctagaaaattttctatcataaatgtaggcatgacacttttgagaactactag

SEQ ID NO: 60244 - DNA, 453 bp, Zea Mays
tcttgttcctcattcaatcgcctgcaatctctctgctagggtttcgcctgctcggttccctatccgcactgccgccgtcgttcatggtccggcacacgctatggcggttggtcgcggtgcactgcctgggccacgtccctgtcggtgaggctagcgtgtttgtggtcgcggcgcactgctagagggaatatggggtctaggaggttgacgttgatggacgacggcacctgggtcttctcttgctccatcatggtcgcgatccatgggattggcccagtgagggtatcatgaaatcctctatgctactcgatctcctcctgatatagtaaacaacaacctctgctatttccttctccctcgcacatcacccactatacgtagaagaacctcgattcgatcttgcctcacccatgtcaggccgaccgacgacggccgcaccctctctctccttcc

SEQ ID NO: 60245 - DNA, 1182 bp, Zea Mays
cgcaagagcgcgaggctagcagccatcgcttggccgcatggagacattcagagccgcgcgcgccaagtgctcatgaagcggcttggaattctaccagagtcagactctgatcagatgcagaaccgggcgactgacgaggagctcaagcgctacttcaacctgttcaatgtcctgctcacccacctagccaccaaggctttggtagccctctgcggattggaagaccctaatgaggctggcctacagtcatcttgagttgtggcatgatgtcgtgggaaactgctttgccatgttaggtttgtttattgtcatctgctttgtctgtggaaggtgtgcgcccttctgcttgttccaggggatgtgatctgccacttgtatcactacattagttcttgttagctcgctggggcatgaggtagcagcgagaggcctacagttactgattaccttctcaagctttgtctacatatgcaccttcaagtgtgtttcgtgtgttcggttgggtcgccacaaactccagtcgtccattgatgtctacatgtactctacttgaatatatgcaaaagtttgctccactacttctatgctgtcagcgctcgttgtgcttgtgatgtttaccttcaattccagaacctgcacgccagtccaaatgacggacgttgcagctaggttttctatgttacaggaatgactcaacgccactaccaaatcctgagctggaatgtgagaggcctcaatgaaggggtgagaagggacactgtgcgggatcttgtttgtgatacaggtagcacaatcgtatgtctcaaagaaacaaagctatcggtggtagaccaccatgacatcgcacacactttaggggtcaaaattcattactaactctgttgctcagctagtaaaccaaaccagagggggcattttgcttgctgtgtcagaagacttcttcacgctctctaatgtctctacttccgacaacgccatcacagacatgatcaccatgaaagcggacgacacagagtggtggattacagtggtctacgggccccaatccgatgcagacaagctcttatttcttcaggaatgagggcccttgcttccaaggggcacgagaggtggctagtccttaaggattttaatctcatttaccaggctttagacaagaacaatctaaacctaaataggtgc

SEQ ID NO: 60246 - DNA, 476 bp, Zea Mays
aatagaaattctgcagggtccgctttgtcgagagagagagatagggtggccagtgactttatgctttgaacaagagcggatatggtggtcgtaggggttttgcttgtactacgatgattggccttagaggaagaaattctgaaaaaaagtacaaagagcaaggagctgccttttgttgggggtagaaggaacctagatgataggttggggtgtcaacatgagagggacaatagacctaaggaggaacaacttaaagaaatcaagtacttcaagtgtgcccaaaccagccaccaccaatctgaatgtaccaatgaacctttgtcttacaagtgttaggagtttggacacatggtagcgaatgtctttcaaggaagaagatgagattgttcggatttaggatgccagaacagagattctttggtattgacatgccggagaacaaaatgcatgatgctggattgtctggtgtaattcat

SEQ ID NO: 60247 - DNA, 733 bp, Zea Mays
caaaaaccccacagactcagatctatcgtgcgatggacggcgggtttatttggttaaaacagggggtctcttttgtaaaaccaccggccgaaagggtattatcggttctcggtcgtccgattgatcaccgacggcgaggattagattgggccggcccgaatcggtatcgcacagaggccgcaggattcgaattctacggcacagatttagttttagcgcgatttgcctgtatccctccgatcaggatcctatggatcacaatttatgcggctgaaacactactctgcgactaatccctagcgtctattctagatcgagtggcccaggtttcatccatgccgtggcactcactggaccgtcgatctcatcgaccgtccaacgctcgtcttcctaccctcgaccaccctccatcaaaacagaggacggcggcgaagccatcaccggcgaggctaatcctcggcataggcgcaccacacttcgattgaacaaccctacttgctgcggtaatgaaagagaaaacgggtgcgggttccataccaagaatcactggcgcaggcgagccgaccacgggattgagcagcacacggcggagacgacacgacagcgagcaattcaccgacgactccgccgtcaagaccacccagagtgcaaccaaaccatccacgcggccctgcgaaggtcactggcatgattaccgggccccatacgccatcgctgaggaagtcccccaaag

SEQ ID NO: 60248 - DNA, 321 bp, Zea Mays
aggtgaaagtgaggaggaactagtccgaggccaaattgctgggcaactgtcacgggctggtaagattcataaccaggcttgatgatcctgttagaagtactcatgccaactgggaggaaaccaggttgggtcatgagtgagtataggtgttgagtgtcactgtaatcggtagaactatccacaacctaaaagaggtcgggttctcaaactcaatagagtcagagtaaggaaagaaaagagggttgtccagaccctagaagaaaagtttgaaccagccagatgcatccctaggattcagtttgctgccaggaagactgtata

SEQ ID NO: 60249 - DNA, 524 bp, Zea Mays
gtgctccttctagggtggatgactcaatggccctcgtgttgaaccctccggccttgactgacgttgtcgctagacccaagttagggtcacccacgtccattcctatcatcgatgggtcaggcgttggcgagggatccctcgggttcacgtgcgggctggtccatcggtggatcgctctccctaccgaatgcgatggacaaggagcgacgacttgtcggtggtctcgctctagatagacgaagctgtcgagatgagggtaatggacaccatgatggccctccaaattgaggcatttgctttgatccaggtatgttatcccaaccccttgtgtctgcatcctccaatcttggtttaagcctttcattcctcaggacctgaagaggagagaaggtttcctcttttcgcaggtagaaggaggtgtggggcgtctttctagagaggaggcctggcattaggaggcactagagattctgttctggagacagcttgtcatgccacagccgacgctcgagaagtggagatcg

SEQ ID NO: 60250 - DNA, 689 bp, Zea Mays
gtcgatctggtgactggtactctaatcatcctctcctatccctccggcaaccctctcggtaaccctaatcctcaatctagtcactttggtcttcgtgtctcctctcctctcgttgccttgtcagtggatctggtgctccggcgtgcaggtatgaatctctaaaccctaatccttgatttcgtttgttgttcttcgattattcgtttctcactgagtccctctcctctctgcttgtgaggaaccggagtcgtcgatgaggtgacgagttgggctggccgattgacggctggtgcattgtggccttgttcctggtgcaatgccatccattggagatgtccaggagctggacccaatcgccgaggatgaggagaagaggctagaagacaagtacgaagccgatgatgccctccagttcctcgtcggtggtgctagtgtcgttgaggcggggaccgcggctggatccacgccgacgagccccatggtcgaggcaagcagtggctctggatcccgcccaatccagccacccattcgaggaggaggggatcaacgtccaaagtctggctagactttaaagaagtgactgccatggagggacgtaaggaggtaagaatcgttgtcgtttgccattactgcaagcaaagtttatctgctaagtcttcttctggtactaggcacttgattagacactc

SEQ ID NO: 60251 - DNA, 465 bp, Zea Mays
atcgaacagtgggaagaagaccaactcataatgagttggtttttaagtttggtaatacttcccctccttttataatgaagaagactttatcccattctgtgtgcgtttctttgctttcccatcattccttttccagtcggtcgatggatcgtgtttatgcttaacatagtcgttcttctcaaaagtaatgtttgagtaccgacttggaattgtcgagtcgcctttttagatctacctgcatattcgtaagaaaaaacggctgatttaccattagtatcttcagaggtagtaaccgagtagttttttgcgacgccggcgttttagaggtaacggccgagtccttttgagccatgtcagcgtttttagggataatggccaagagattactggtgatgtcggcgtattagaaataacaaccgagtgataacgggtcacgtcagtgttttagaaataacgaccgagtgg

SEQ ID NO: 60252 - DNA, 882 bp, Zea Mays
ctcttgcccaggttaatagactcatcattccacccttcatcagtaatattatcaattttaaagaagatgtcatacagaaaaggtttgacaccaacttcaatgatagggggaatcatagccacactcttaacatgaactttaaatctaacaatctctttagagtttaaagaggtaatatccacttcttccacagccccaatagtagaacccaattcacagatagcctggtaattctgaagttcttcaggcacattctcagccacaatccataccgagtgcagtttggatttgggcttagcctgagagctccaagaagatacagagatttttgcacccgacaatttcattttcagttcaggaaaattaatcatctcatccagcctctcttgagaaggaaattgcattagaaaaccagagtgacacttggtagctttccaagtacggccccaggggaaatgaaaaccgaaatccttctcaagatcctcagccgagatcaaaccctcaacaattttaaccagaccaataaaactgcgcttcggtttgttagataacggcttggagaaatgagaagagtaaaaccctagcccatccgccgccatcccgacaataggcatgctgggtttgttctgtttggggagaacacaccaagcggtattgtacgtttccttgcgacagatctcacaccacaaggatttgaagcactccctagcatgatggccatccatactgcatttttgacagaaaaccctacgcaccatttcattctctacttttagaatggtagggggaggggttttaagaatacctgaatggccgccatcgccggaagaagagatagggatgtcatccttgctctcgggttttccagaccccggcttcaaa

SEQ ID NO: 60253 - DNA, 721 bp, Zea Mays
gagcaataggtgatgtcccttctcttccttcttgaggaaggaagcccgaggttgaggcgaccccttctgctacctgtgaagtagtggaaaaggagtcagagggagagagtgggagaggaagagaggcgcaccttttgatgcattatgtgaagaagcgcttgctggctgacgtcattccgataggaagagtggacatttaatgcgatgggacgctttggcccacaggccgaccgttgcggcgctcgtgcacgtggaatttgaagcgacctagtccactcctggttttgacttgggacgactcggcccacgcctcggtgattccgcccatccctataaattctcctgagaggggctcttcgattctttacctcccgctcttgctttcttgccctagccgccttctgccttagccacaaaaaaactcctgtgatcttctcccatcttcttctttagctttgatggccgagaagttgagcgttcttcctccttgcgacttgtggcctatttcctcagtcactgacgaggatttggaggcgttggtcgacgttgggcagttgggctatttcgcccttgctcccatgggccacagcctgagtgatatgcaccaggtgacgagcaagagccggctccgcccgcgggatgtggtgagcttcacctcctacgagcgggggtttggggtcctagtgagtcgcttcatgcgggcactcccacactactacgg

SEQ ID NO: 60254 - DNA, 740 bp, Zea Mays
accatacacaatctcaaagacattcatcttatcctccacataagtcagccaatctgctgcctcgaccggagtaccactgccatcaaaagtgtccaacttcatgcccatccactgcatcagagaaagaccactgacgggaaggggcacctcagccctgccacctggagcagcacccatagggacagcgcccccgggcactcctccacctccagcaccctgagcagcacccgcaggggcaacaggaatagcttgcctcagaatggccaactcctgctgcatgggcctacatcgcgactaacattgccgccggactcatagaatccccactaggaacttgcgggctgccacgagccctacgaggcggcataactgcagccataggagtaagtaaataagtaaataagattggcatagcacctcatcaaatattgtcaaaccagcactgacaataatataatatatcaatagtaaagcaggaaatccatcctatatgtgcagtgtgtcaatttatcattattccacttgctaggacctatagcctatccctctgataccaactgtaacaccccattgctcccacacaatgaatgttaccaaagacccttcccacaaaactgaaacaacataagaaaagaaatggagacagaaagtaaagaaaaatccggcagcaccttccttgaaagtagcataacgagagtaacataaagtttatacataatgtaaaaagaaaggtaatacac

SEQ ID NO: 60255 - DNA, 450 bp, Zea Mays
ttgcacgtgacatgccacgcctccccgttcccactgtcccacgcacacaacacgtacagaagaagatatccatacatgtacacggacggaccgaggtgtcagttggtcggagatttctgaattgaacacctcactgctcatgaacggccgtgaccgtggacacgagagagaaaaaagaggtaatccgatccacatccacccacgaacacgaagactgtcccacgcacacaacacgtacagaagaagatatccatacatgtacacggacggaccgaggtgtccgttggtcggagatttctgaattcaacacctcactgcacatgaacggccgtgaccgtggagagagagagagaaaaaaaaagaggcaaaccgatcctgcgatccacatccacccacgaagacagttctggtgcgtggacgactgtgcttgtgcgtgcccttaggccgcac

SEQ ID NO: 60256 - DNA, 777 bp, Zea Mays
ccccacatgacatctctccccgcctcaaaaggcagctcgtcctcgagctggaacgccggaaacttggtcatgaaggagtcgacgtcttcccatgtagctgacgcaggggactgatccttccactggatgagcacttggcgtatgccgcgggcgactcggatcttgacgacgcgttcgggttcaggggtgaccgcaccatggtgcaggaccggcaggggaggtgttgtcgctggtggagtgccatggaacttcttgagaacgcccacgtggaacacgtcgtggatgtgggcacgggcgggcagctctaggcggacatcgacggtgttgacgatctccgtcacccggtatggcccgtagtactggggctttagtttgtcggcgacatcggtggccagcgacgatggggaacggtggcggagttggagcaacacccattcacccacctgatagatgatgtcgcggtgcgtcttatcatagtgcttcttctgtaccgcctgagtctgctccaggcgatgtcgaacgttagccaggaactcctctcgttcttccatcgtgcgtgcaacagctgccacacgtgtttcctccggctcataggaggaaggagggtcacgaccgtagacgaccctgaatggcgtgtcgcggagggagctctggtatgcggtgttgaagacgtactccgctcacggaagccactgcaggcactggcggggttgatcatcggtgaggcaccttaggtacatgacgatgacgcggttggtcgactcggattgaccatcg

SEQ ID NO: 60257 - DNA, 632 bp, Zea Mays
gaacatatcttgcatgcgcctcatcggccatatagtttacgccacatccaatctctgcaaatataatgacaaaaataagttagcaaagtcaggataaataaattgtactaacaaaattatagtatcatttttctcactcacttcccttgagacgatcaccaagattatccaacatctgtttctcggctcgagccgcttcccattctcttgcatcctgtgctctcttctcatctgccgccttcaacctcgtatactctgcatgctttgggctgtcataaaaggcagatttcgcgtacctacgcatgtcgtgtatgcgatgattaatgtatgaatcgacgagctcagatccacaaagaatcttctgtcccattagtctcttggaccctattgtgcacatcacctctcctttgtcgtcgtaaccctcccaactgcatttccttgtctcctacaaaaaaatagtaagtaccggtataacattacagctggtgcaaaacaataaataaataccaacctcatcgtaatcgaccatatgtccataaaagtacccaacaccaagctcggaaggaactaatccatacttagcttcaataccacatttgcagagtactggatcaaacttcaactcttccgac

SEQ ID NO: 60258 - DNA, 860 bp, Zea Mays
aaaaatcccttttctatattaattttctgaatttcctaaggatccttgactgggcacataattttctaagagatcaggggctcgactgctaaaaacaggactcaactatagtgaattgtatgcatacggggatggctggttagtttagtacttctccagggtctctttcggaaaagtgtcgctgctcgcaacgcgcacaagttctgggccatccgatcatggatctaaggcccatgttacatcaagctatgcatcgaaccggtatgcgatctcatccatccgatacgagatcagccgcccggatttaattaaggcgagacccagccgtggccctcagatctcgatctaacaccccaggcgcgatactctgaagtggtagacccagtctaacctacgccatcggtgtaagatccaacgacgatcagtgcgtcttctccccacgctaccaagatgcggcggcgcagggcaagggcacgacggcgccatggccaacataggtcaatccctgccaccaggcgcccgaatacacaagcgaaaagtgcaaaacactgtacgagatctagcgaatacaagggtagagtccataccacggattggggcggcagtggccctgcccacgcagcacggcgggaccatggcgaaacccatctctggcgacaaattcactactccccggctgttaaatctatatggtgaggtcacggacaccacccacatttcaaggcgaagctccctagcatgaatccggaccttgaatggcaacgtggatgaggattcaacggcggcggtagcagcccaggttttcacttcctcgctgtgacggcgggcacgagcactgggcgcggcggcttcggtcgcga

SEQ ID NO: 60259 - DNA, 768 bp, Zea Mays
ttgcatctaggaaccttctattgtcaattggtcccaggtcacaattacatttatcttttgaggtaacttctccttcaccaccatcccttctttgaacacattcctactcctccttgtctgagtattctaattcaatggtatcatcatcacgaagcatgttatactcctattgctcccactcattttgcgtgaatgaacccacatcgaagttgtcattcacaactacttctaaatgtcatgtagattcactggctgccaatggagtagactaaagtggctcatgtatcaattgactatccaaaaaccatgttgcttgatggttccttgacatggacccccaattggttttcattacctccaacaccatcaaaggatgacaaatccccccttcttatgtccattctccaccgctacctcaagcaacgccacatttgcttcttggactaccattttgtagcgcggctaatgagcctcgttgcacaaaggcattaacacacagtgtgccctactcttcccacaaccaaacttccccctcaatttaaaatcaccatcaaacttcttaacctacaaagaaagatcattaaagctagacaatttctcaaacatttccacatcatattacatattctcaaattcccatcttgtttaactcttccaccatgaaacaaatggtctaaaatatccatctactaaatcattcgagcaaactacatcaattcttcaaaattattctaagaaatataatctaaactaactacccaactaaat

SEQ ID NO: 60260 - DNA, 429 bp, Zea Mays
tactcaattttggcatgtttctaggaacaaatgcaggaatcacttggcaccaccttgattaggagttcaactttccatccacaaactaatggccagacaaagagagtgaactagattctagaggatatgttgagagcttgtgtaatacaatatggtaaaagaattgggataagtcgcttcctctggcagagttctataacagtagctatcaagctagcttgaaaatggcacctttttaaaccttgtatggcagaagatgtagaactcctctaagttggtcccaagccggggaagagaaatctttggacatgacccaagccggggaaagagaaatctttggacatgacttagtaatcgagactgaagaaaaagtcaaagtcattaagaaggatctagaaactgctcagactaggcaaaagagctaccatg

SEQ ID NO: 60261 - DNA, 453 bp, Zea Mays
ggacaggaaacatgaagtcatagttaaatgtttagaggaaaaaataaaggaacttgaaacttatctagaacaaaaagtcatcctgctgcaaacagccaaaagttccctcgcagaatcacaatcccaaaataccaagttaagtgaggaattgaacgaagctcgaacgattttggatgagagttcacgacgcttcgaccaggagataaaggaacttaaaacaagggtcgaagccgaaactgaaaagaatacgaagctgtacgagtctattaaggaccttcgaaacaagtgtgtagactttgcgactcggtgtgcagaccggcttaaggggatattcaactcggttggtgctgcttctgaaaaaattaccccttcagctgaagacatccctggggcctttaatcatattgaaaatgaagttgaagccctcgacgaagttataagcgggcacagaga

SEQ ID NO: 60262 - DNA, 522 bp, Zea Mays
ctcaaattcacatcctgtatgttctccaaatttatcaatgtcatcttcatttcctgcttcagcttcctcttcactagctgacatatattctccatcatcagtcacaaggatcacacgattatttggacactcctttatgacatgaccacgacctccacacttgaagcactgaataccactactcttggctgttgaacctactgatgttgaagtggatgctgctggtttataactcgtgtttggagcagcaccgttctttccactagaattgccttgaatattggatcacaagcctccagttaaaccttttgttgctgaggatgcagcagtaaaccttgagagcgatttgcttcctccagtcatggttcatgcaccatatgacaagggcttgctgctcttagcatcttgttgtagctggcgttcagctttggtggcttgatgtaccaaatcaataaaacattggtacggctgaaactcaacaatacgctgaatgctgcggtgtaacccagccatgaaatgtgc

SEQ ID NO: 60263 - DNA, 334 bp, Zea Mays
aaaattatgggctagattgtctcaatgccttcaactaattttaatatttaactattagctctagtgcatttaaacaccgtcttaaactcttcaattcttcgtctccccttgctctctgccttaggacatgtaacctagatattatattataattcttcaaacattagatacatctacaaaacttgtccatacaatccaatatatcttatccactagaattcctgaagacacatctcattatgtgagttgtatgggtgaaactgtatcttatacttagtgaaccttgctatagacctttattcaccaacatatgtttgtgttttttacatttaac

SEQ ID NO: 60264 - DNA, 1045 bp, Zea Mays
tagctctccaactttactgcagagcatggagtatgttaccatagggatttgtgagcaaatcgagcctaaatattgactgtcacgccaactgaatgagttagcctatggtacagtaacctgcttgggttcagaacacttcatcgccgtcgatcactcctccgccgcgattcgtgccgccggcgttaggattcacgctcggggtgggtggataacgtcgcgagatgaaagatctttgccgtcggtgagctggaggtcactccggtgactcaccatcaccttctcctttctgttttgcgactgagcagataagctcgccggggaaccgtcgtcgcacgaccttgcgccacgtatccgagtacctccaccgcatcgccgtgattcgttttagcttcctgtcgatcaccggagtagtcgacatgacggttgccacgagttcacttgcaccagtaacctttcccctctccggccgccaccgcgccatcatcaattcaagcgccaccgcccctggaatctataaattgagcccaccgttagctctgcaacctcatcacgcaccacaccgtctagtatcgctcccaatcttgcaaccgtgagctctaatttcaagttttccccaattctgttctgaaacaccgcagggtcgagctcaccgtggctagtcctccacaggtttaatcataccatccttgttcttgttttagcatctctgtgtgctggtgatgctcaccaactcgcccaattaagctaagatcccatgaatcaccgggaacgtgtagcttgttagttcatccgcgcgctcaccgtggccacagacattggtgtagttgtttatgaaattaacttggggaaaaccttcactcggccctgaatttggtttagaccaacgtagagcgccagtacttgccccaatcggtcgacctacgtgctcaccggagctcgaccgcgcgcgacgccgtcgtggatcaagcagtgtaaagaaatagaaacttagggtcctttctgcagttgtcagtgacgtgctaaatagtgcttcggtcccgcttcc

SEQ ID NO: 60265 - DNA, 784 bp, Zea Mays
gaattataccgccccgtcccgtcccatattcccgtttaaaaccgtccgttttcgttttatcgggaaaatgtgaaaacggtacgagaaccgggataggtatatccgggaacgggaccggaaacggttgaaggtgtttcccgcccgtatttacggtatcccgtattgtatcgggaatttcccgttttattccgttttacattttgcggatcgtgtgcatgtatcaaagcccatgaattcttggcccattggtcactgtcgtttcccatagggagtttcaagtgtacgaatatacaacctgtgtgtgtgcagcagctctgcctctgctcggctggacgactgcatctgtgcttgaggccttgagacattgtagctctgtttcctgtgtgactctgtagtgtgcatgtgcctcatggagctagggaccctaataagtgaagctgctggcctggacgctggactactgttaacctcgcgttggtcgtgggcgtactgtgtagtgcgctgttttttttgttccggcgcttgtgtgttgtcaccgctgtgtgcatgtagttgttccgactactgtccgactaccgtccgtttccggtgaatattcgttcgtattcgatcgttttcgcatacccatatattccgtaaccgttttcgctaccgccttttccgctcccgctcccgttttcggtaaaaaaaatggtaatggaaatgggagaggtagtttcctgcccgttcccgttcgttttcatccctactcatagtctttgatcaactctagccatcttcgttg

SEQ ID NO: 60266 - DNA, 661 bp, Zea Mays
taatgatatatccttctaccccctaccgatctggattattagtgtaaaaatgcggtttctgaactgagttaattaactgcatcatggtgcagttacttaatgtggagtgtggaattgtattgcacactaatcacacaaattaagaagataacgagtaagctttcttaagttgatacttatttagcaactgactggagctgtctttcaattaagaagaaagagttcttaccttcaagtgttgtcgtcttacattggttaccacctcccaactattgatcaaacataaagcgctactgatcaagcatttgtgttaacagaagtacctatattttaattgtgattgatgcccgtgggctgtggtgttcatatatttacatactgctattactactactagttgaagggcggatctggtgcagtggtaagagctgtctcattgagttaccaagtcacggtccgaagcatgaccccactcacgtggccatgtgggagccttcgacactgggtctgccctttattattactactagttacatcatgcttattctctgaggtatatgatgagccaaattagttccttctggttgcataaaccctcactcttatggaaattaccatgtttatatgtgtttcaatgttggcaataacagtatgcattttt

SEQ ID NO: 60267 - DNA, 439 bp, Zea Mays
ctaggatccaatttcacaagttcggaattcttcgatttctgtgagcaaaaaggcattcagatcaagtacgcttcggtagcacacccgagggccaacgggcaggttgaacgagccaacgaaatgatactggaggcactcaggaagaaggtctttgaaaaaaatgaaaagttcgcagggaaatggataagggaattaccctacgtcgtttggagcctaagaactcagccaagccgggctctacatggaaatactcctttcttcatggtctatgggtcagaggcagtattacccgctgatctcaagttcggggccccaaggttggtcttcgagagcatagcagaagctgaggctactaggatggaggacatcgatgtactcgaggaagaacggctgaatgcagtaattcaatcggcgcggtatcagcagactctgagacgct

SEQ ID NO: 60268 - DNA, 295 bp, Zea Mays
ctgagggcatatggttgtcttgttcagttatcagttcactttggcagtatggctatttgtctcagcctatttgttgttgtgctgttgtgaccctaaaccctcattcatgtttacagctgcctgtttgttcagctgagggaatgtgcctgtttgttcagttgtcagttgccctatgatgatttctttgaaattttagaactgtatactacatatgatgtttttttcaaaaactgagggcatatggctgtctcagcctgtttggtgttgtgttgttctgaccctaaaccctcagttc

SEQ ID NO: 60269 - DNA, 493 bp, Zea Mays
tgcatcttgggtagaatcacataacatccccatagaaccaatgatcctgcctttaagagttaattcagttggggggaaagttcagaccgataggatttttccgattctaaggattgaaataagggggatagacttccccgctagcctagtagtaatgggaactcaagggttaaatgtcattctacggatgaattggctacacagaaatcaagccactgtcagttgtgacaagagaacagttaagctggtgtccccatccggaaaggaagtagtaaccaagctatacttacctgaactagaagaaggagcatgtcaccatttatcagtagatgacaaagagtccaatccgattgaggcaattagaattgtgtcagaattccccgatgtattccctgaggggttaccaggcatgccacctgaaaggaaagttgaatttgccatagagcttatcccaggcaccaccccaatttccaagagagcctatcgagtgtcc

SEQ ID NO: 60270 - DNA, 424 bp, Zea Mays
cccaactacacagatcacgaaagaaaagggaaaaatacatttaacttcttttcagaaaattgggtatcacagaaacatcctcccataggtttgattttaccactgtaggcacttttcgccaatcctttatcctaatatcaacacgcatgtgtgctatataactacaatagcttgagaattcattgacatgttttatcggtgactgggcaatcccatttttatcaaacgtaagatgacggggacctcctttttctagcttcttgcatttggcgtgacctcgtttcgttctatgcctggcagaagtacaagaacctttttcgacaatgtcctttgaatgcaagctagtggaagatgagctacttgtggacccagaggtttttgaagttgatgacccagatgtatcataagatgactcaaaactcat

SEQ ID NO: 60271 - DNA, 401 bp, Zea Mays
gaaagacaagattaaactaactatgtatgatcctttagcatcgtgcagatggtcaatgggacagttacatggtttatatagatggacctatctatattccttcagtagttgagaaaaaggtaaaggtgtgtcacactcacacatgcgctgcctccaccgagacaaggcatggcgttgcaaggtgaggcatggcatggtgcaacacgatcgcagtcatggtcgtggcgcggtgtagcattgttgtggatagatcgataaactattgttgtagttagagtacatgagtttttgaatgcaacactagaattttctcaatttaacttaattaagaaattatatcttgatgacatagagttacctgaccattgatctcacatgcccttttagctctctcgttctct

SEQ ID NO: 60272 - DNA, 331 bp, Zea Mays
ccgtccgtcgctatacgcgcaccgtctgactgggtagtttagggtttgcgcagtacgtggcggctcgggcgcatgtctcggtaattcattaaaaacaggatcggccgccgctggcccggacggtccgcgctcatgtgcggacggtgcggacatgtgctgatcggcgaatttatcaccgatgtgcgtgggaggctgtggttgcccagggtacgtgtctatcggcatcccataaaggggttgtgactggtcgtgacaacctgtaaccgatgaatcacgcgttttttcccaattcaacctcgtgcgaaggaaaatttgcaatagtagatttgtc

SEQ ID NO: 60273 - DNA, 545 bp, Zea Mays
agagacgagtatgtcagcctaactgataagcatgacagaggccctcaaaatgtttcctactacgagaagaatctagactactggaaagcttggtcatgacatcaggtcctgggtggccgagacgacgatgccaagtggtggaggtggtagcggagactaggacgggaggtgtggacgcaccggaggacgaagggctgagtgtgtagagtggcccggtgctgtcacatcgggcgagaggggtcctgatggccagatccttcacagaaaaaccaaaagggtcaaactcaatggaacagaaattgtcggtggtgaaccgatgaacagaaaggagattgtgagtgatgtgaggggcgacgagaacgtcattgagatagaaagatccaaggagaactgaggcacctactgaggtgatcggtagagtggaaccattcccaacgacgatcgaagtgggatgggaggaataaggtgggtgagaatgatataacatgcctgcaataggggtggtgtggtaggatgcaccagagtcgatgacccagttaggggag

SEQ ID NO: 60274 - DNA, 437 bp, Zea Mays
caattcccaaattgccattaaaaaaatccttgaatatgtttacaatctcaaccttaatagtattctagaattcctaaaaaatctctacagataagccatcaggacgggagcactgtgttttaggttgtccaccactttaatctcgctaaccgaaaagggagtagtgaggctatccctatcatcatcattcaacttttccatctcaagatcattgatgttaacaaaataactaactggaggcccaaacaaatttctgtacaaatttgcggcaaccaagttaattccctcctcgtcttccaccaaacctccattatccattaaggattgaatcttcaaccttctcctattcccatttgcttttaagtgaaaaatacttagtgttttcatcccattcaacaatgaatctttctctggctatctacttcattttaacttcc

SEQ ID NO: 60275 - DNA, 522 bp, Zea Mays
cccagtgttgtggtgttaactatgcttgctaccatacacactgttctcacttttgcactctcccgctcgtggctggttcatcaattggatgttaagattgccttacttcatgggactcttaccgagatcgtctagtgtctagtgtctactgcagccagcatgctagatttgtggattctgctcatactgtattgtatgcaagctcaacaagtctctgtatggtcatgtcaagtacacccgcttgccacatacctgctctctcttggctttgttgaggccaagttggacattatctaccaacgtggtagtgacaccgtgtacctgttcctctatgttgatggcatcgtgctcactgcctcctctttagctctcatgtctcggattatcaccacacttaagcatgagttcgtcatgaaggattttggccccctgaaccattttctggggaccgccaatgagtcttgcctcgagggcttcttccagcagcaacagtacactatggacatcctcgagcgggctaac

SEQ ID NO: 60276 - DNA, 288 bp, Zea Mays
aagatatggaggcactacctaattgggaacaaatgtcacatcttcaccgatcacaagagtctgaggtatatcttcactcagccagatctcaacctccgtcaaagaagatggctggaactgatcaaagattatgaccttgagattcattatcaccccggaaaggccaacgtggtagcagacgccctcagccgaaaaccttttgggataaagggaaccaactttttagaagattggaagaaggaattagctcaactgaatgcatgtttgggaaacaacggcagtctcaaa

SEQ ID NO: 60277 - DNA, 943 bp, Zea Mays
gtcaagtaagcgtgaacatgtcgcaccgacttaagtcgtcgccgacttaagctaattgctccgttagcagggtatagtggtcacccttagttaagtaagcgtgagcatgtcgcaccgacttgggtcatcatcaacttaagccaattgctctgttagcagggtatagtggtcaccctaagtcaggtaggtacgctgatttcaagcccagcccaatcgaagtcagctgtaagtcaagagtttgaatgcctttggaaaatgaaaactttattgatgatgaagtcctcagattacatagtacaatgttccttcaagaattttgaggcctttgctaaggatagaattttctgaggtgttctatgttccacgagttccccacttctgtgccgtccatctgattaagccagtgtgatcctggccatgtgacctctgatacaatgaacgatccttcccatagtggtgctagcttatgccgcccttcccccgttagtatttggtgaaggaccaagtctcccactgcaaaagatcggtgtcgcacaactttgtcatggtagcgcctcaaggtctgttggtacctagccgactgaattactgtgttcactcgttcttcctcaagcacgtcgatatcttctagcctggttgcttctgcttctgctatgctttcgaaagttaacctcggcgccccgaagattaggtcggtgggtagcactgcctcttatccataaaccatgaaaaatggggtatttccatgcagagcccgactaggttgagttctcaggctccaaaccacgtatggcagctctgtgatccattttcctgcaagcttttcactcttgtaaaatactttctttctgagtgcttccagtatcattctgttggctctttctacctggccaatggctcttgggtgtgccactaatgcatacttgatctggatgctccgttg

SEQ ID NO: 60278 - DNA, 485 bp, Zea Mays
tgacaccagtcctcgcactccctgattttgctcttccatttgtgattgagactgacgcgtgtgatgatggattgggggcagtccttatgcaacaagggagacctttggcttatttgagcaaagctctaggactaaagaaccgacacctttctatttatgagaaggagtttttagcactaatcatggcagtggataagtggagaccgtatttacagagggcagaatttgagattcgtacagaccacaagtcctttagtttcttgggcgatcaggtgttgcattctgaattacagcgcaaggcaatggcaaaactcatgggtttacagtttaaagtggtttacaagccggacaaggagaatttggtggcagacgctttgtctcgggtgggtcagttgatgtccttgcaggctgttactgaagttcagcccctctggattcaggagatactgaactcctatgagacagattctaaagctcaaattctg

SEQ ID NO: 60279 - DNA, 527 bp, Zea Mays
gaagtccctatagattcagagcttgctgagtccagagtgttgcttgcagagatatgtgcattgaaggacaaaggcttgactgttcaagctgttgttgttgattttgttttcaagaatattcaacctttgaaggatagagtctaccctgcctatctgtacactggggttaatgactctactcgaattaccagcaagcagatttctgaggaagacgtgttgagtcgagttgatttgatgctgagaggtaaggtttcgaatgccggtgctcccttttcgtattctgcctagaatcctcctccacagagcccctttaccaagtttgtattcaaccctcctgttcaagatggtagtccgggccatagagtgcgaccctctctagagaatattgaggtcttcattgctccatactgaaatctccctgaaaaacaaaaacagacccatttctagatgaaaacgactactgatgaggctgaggtgaatgctattctcagtatgctagtgggtgagtcgtctgactctgcctgcac

SEQ ID NO: 60280 - DNA, 684 bp, Zea Mays
acgctcaggagcatgcgtgtgtgggactaacggggcgggcccgcctgtcggcgtgcatgatccccgactgggccgcgcggcgggaaaaattagatgggccgaatatggggactcaaggccatccagattttcttttctttttcttttattcttcctattttccaaattcaaggattcaaactaaattttaaattcctattttgaacttcagatttccaaatcttaaacaaaatcctaatgtgaatatagctcctaccgttggcatttttattatttatctttcttcctattatttaaatataaaaagggtaattgactttactaaaattatctttctagattttaattttcctttccttaactcttttgctcccatattttcctaatgtgaattgggggaaaacacacatgattcatcggctataggttgtcacgactagtcacaacccctttataagatgccgatagacatgtatcctgggcaaccacaacctcctgcgcacatcgacgataaattcgccgatctgcacatgtctagcccgtccgcacgtgagcacggaccgtccgcatgtgagcgcggaccgtctgggctagcggtggctggtcctatttttaaaaatgaattaccgagacatactcccgatccgccacatactgcgcaaaccctaaactacccagtcggac

SEQ ID NO: 60281 - DNA, 676 bp, Zea Mays
tgagccgctatatgtggctcaccctcctgcgttccaaggcggatgcaccggcagcgatcatgacattccaagccaaggtcgaacgggaaaacgggaagaagctgaaggtgcttcgaaccgataatggaggtgaattcacttctgtgcaatttggcgagtattgtgcaggagaaggcatccagcgacacttctcggcgccaggcacgccacagcagaatggcgttgtggaacggcaaaatcagatggtcgtggggacagcgcggagcattctgcgtgcccgcaacatgccaggacatttttggggagcagcggtacacactgttgtcttcctgctgaacagggcgcccaccagtgcactcgatggcatgacgtcgtttgaagcctggcatgcaaagaagccacccgtgcacttcctgaaggtgtttgggtgtgtggcctacgtcaagaaagtgtgcccacacctcagcaagctcgatgatcgtggagtcaaggtcatcttcatcggctaccaggacggctccaaagcgtaccgcttctatgaccccatcgccaatcgagtacatgtctcccatgacgccatcttcaccgaggacgagggctgggactggggagcatcttcggacgtggactgcgagcaacccttcaccatcttggaccactacatgctggaatgcca

SEQ ID NO: 60282 - DNA, 456 bp, Zea Mays
aaaagatgctcctcgacgaaaaaagggcaggtgggccgatttgttacctgaggcggtctgggcgctaaacacaactgaatgcagggcgactgagttcccccctttccgccttctatatggatcggaggccatgaccccacaagaaataaaacatgggtccccgcgaacagtttcgtcagctgtccccgacgtggacgaacccactttgaaggatctcatcgatggagaccgagtcttcgctctacaggctctaaacaaataccaagcccagacaaaagcatggcgcgaccacgcagtcatcccgagggaattcagcgaaggggacctcgtactcgtccgaacagctggacagagtccaggggcaagctggagcccaagtgggagggccctttcattgtcaagacaaaggcctccccaagcgcatacaggctcgcaacgccaaacggcgaagacttg

SEQ ID NO: 60283 - DNA, 655 bp, Zea Mays
ggtttcacgagtcgcgccaaagccccctcggtcgtgatgatgaagtcaaaggcctcgggatgcacaccgatgcctaggacctaggtgacgacatttttggccattcgtaccatgtggtgtaaaagatgtcgtgacttgcaaacgagcccctacctagcatgcccactatcggtgttctaaaaacactatcaagtaatcctaagtgctttgcgcatctgacacagatggtttgcgagggagacataagtaatctacaagtgctagctaacgatgtgcgctcgttgccttgccctggtcaccactacctctttccttttatagaccaagaaaagggggtgtcctatgtatatggatgtgtcgctcggaatgatcagatgaagctttggtcttgtcatattgcccctttgccctctagatcgatcattgctcaatagtttcctttggttaacgcaaccattccttattgtaccttcatggtgaggcatgttgtgtcttgacttatcctactatggacctcgagatgtcctttgggggcgtggcatggtgtgtgttggtcagctttcttatatgcatgtagcccttctagagtagtcattcggacttatcgtgtcattagggcatgcatgcccattccctaattattgctctgtcatcc

SEQ ID NO: 60284 - DNA, 346 bp, Zea Mays
atcgctatggtttcccacgagatggtgtggcaattgttgaacctactacttataaggaagcttctaggattcttgagtggcagctagctatgattgatgaattggctgctcttgaacacactggtacatgagatatcgttcctttactctcgcatgttgttcctatcacatgtaaatgggtcttcaaagctaagacaaaatcagatggttccattgagaggtataaagctcgtcttgtggctcgtggtttccaacagactcaaggacttgattatgatgagacttttgcacctattgcgcatatgactactgttcgaaccttgattgcagttgtagcctcatcttc

SEQ ID NO: 60285 - DNA, 361 bp, Zea Mays
gttatgtgtagcacagggttatgctgagctgtgtagcgcatggataagagatcgttttggttctattttcattttcatatattacttcacgcgtacctttaaattcctaatttcaatttatccttgattaaaatgtttacgaattgttctccacaaatcattacaagactaaagaaaagcgcagggatgctacaggaaacaatttgccctacgtaaagaacaataggaaacaccttaaggtaaaccgggactctcccagattaaccaggattgatcaaacattcagtagggcctttaatcttatgaatgaaataaggtaactaagaaagaaccatggtaaattcatcaagattgagcaaag

SEQ ID NO: 60286 - DNA, 1270 bp, Zea Mays
ggattagggaagtcacctgcgtgggccaaaacctattaacctggcccaacaccccctcctaattcctctccacggatggcccattactctttcccccgtgactgcctaggagcactggtgcacgcgcgcttgctcctctcagtcactgaccaggtaggctccagcatcagattcgtctccctggaacgaactcctgcacctatcgtcgagtctgtagcttgctccgtacgtagccgctgtccgcgagagaagtggagtgcgtgggcacggcgcgaagccaaaatcagcgccagtcttcgcgtgtgttgagcggccccctcaaccgaattcctaggatcatttagctgggcgctggggactcggttcctccctttctctctccccagtgaccctatcagccgccgcgggcaacaccaactcgtcagcatcattcgcttcaccagggctgcggctgaagccttctctctctactcattccttctcgcacggccaccattttcgttgaccggagatctcgcgggagacatcgttgttgtgcgatgccaggcggccgggagcatccagcctggacggtctataaggctacgatgccatggctgactccccaacaccaagcccctggatctggcgcaagctgagtcacctccacctatacgccatgactccgccgccgtggaaacatcactcgccaaatccgattgcgccgccgcaaccacgctctgcgccgctgggtgagaggaattaaaggatcgggatttcgttgtgggctcctcggcgtgcgtcatgcagtcaccaatttgagcaatagctcgttgggttcagctcagcgtcagcctaccgccattgggagtgtccgcgccatcaacctcggtgagtgcctgtccatgaggtctgcgtattatcggattcgcgtaactgcatcccatgtcgtgatccgtctgcctgggcactggtgttatcctctctggcataatcaccaatgcgtgttctctgttgccgtggggttcgatgtcggggaggaagaagggtgttagccattaatgttaggattggtggggcctacgccggttgaagtcgcgccgccgtagggagacctgtgcgccactttggctctggccggaggtagatgatgccctgagcaccattggattgagtatgggcgtgtaggattagatggtgcggtgagtgatggcttgccgtcgtggatgattaggcgtcatcgcgtcgtcacagttctcgaccggagttgaggagagagagtgacgagggt

SEQ ID NO: 60287 - DNA, 712 bp, Zea Mays
ggatcatgccactgccatgccctcccaaagacagcttaccagcatatctggggcatagcacagaaaacaagaacccagacccccttctccctgggcaggagaggagacacacctactttttttcctgccaagggcacattagaaaaacactagtaggtgtcttagcatgtaatttgcttagtatatgcgcatatatatatatataaattgtggcatgttgttgcaagttgcaacgccggggagtgatgattacacccacacaacacagactagcaaaatggcccattagtttattgctagtgctagacaaagcacgcatgattggatataatacaaacaacggcatcaagaagagagccaacaggcaagtgaagtgcagcaatgtttatataacaaggccatgcaagtgagctaggagctacaagatcctcctctcctccaagcctctgattatttgaactaaattattgcgcacatgaatagaaaacgaagaacggtcagaagaggacattctgcaagatcacacgtccaacttaaacgaagaagagcaggatctcacatcaaaataacaaataattaataatatagacgactaaaatctccctactagtatggaatccacacatgagctattgagagaaacagatgaaagaacaaatatataaataaaagatagatagatagatacaagtatgaaaatataatagcaaag

SEQ ID NO: 60288 - DNA, 1139 bp, Zea Mays
ctccatccagacaccagagttgcatgtataaaaaccatttggtcccattgcatagtccggtgggtgtcgagatttgggagtggttgccgcaacgacaagcggagacaccctcatggaggtcggtgatggaatacggcggtgctatgcaatgtgtgcttgcaaggaactccatgcccttctgcctgttagatggttgctgatccacgccacaccgacaagtcctcgaagccgaggtaccctagaggttggaagagttgcctcaggagccgaaagaagagttgccctaggggtggaatagatgccctaaggacaagcacaagaagtactctgagggtcagcacatgaagtgtcctgagggtaaaaaggatgtcatagaagctagcgtaagaagtgctccaaaggtttgacgctagtggttgatgcatgaagtgatccaaaggccagaacagatgccctgagggacaaaatacaaattctaggagccagggcatagggcggacacaagaattgctttagggaggtggaacaggtgtcctagcgagtgaacgctgcctataaggaaactgcttgcaatagttgagccagttcaagggattctccttaccgtcataggtgaaggacatgaacatcgtccatacccccatcatcccattgggaaagcttgtggtatgacgaccaccaatgaggacgcctagtggctccccatgggggccagatgcaaaagaacggtgacctgctgcaccttaaggttgatcaactgtagcatggggttttttctaagggcggatggtggcactccctgcggtgtcggtggcatgttgtgttgtgctatgggagaagaagtattggcatccgtcaccgcggtagcgtcaaaacctgagatcttcaataataccatatgttatggcggcaactggtattgaggacgaacaagggagactgttcccacgatcgagcaagagggaaaggttttccttcttaattcttgcttgccttcatttagttacatgacctctatatttatagtccctagatgacttgttttctgaaacaaagtagtgaaggagcccatattgattttgactctccgcttccgcaaatcgggatgaaaacaggtacttattcgaatatcaattttt

SEQ ID NO: 60289 - DNA, 1284 bp, Zea Mays
gtacaatgatcaaatcacgtgtccttatcgacttcgtcgcggaatggaccgagacctaaatggagctagcaccgactaccgagaaatgttggatcatgcattttgatgggtcactaacaaagtagggagctggcggtggcctcatttttatgtcaccatcaggagaatatctgcgatacattgtgcgactatgttttcaagtttctaacaacgtggccgagtatgaagccctcatgaagggcctacgcattgccgtagagctaagtgtccagcgtttggacgctcgggggggctctcagcttgtcgtaggataagtaatgaagaagttggagtgttgcggccccaagatggtagcgtactatcgggaggtacgacaatcagaatactagtctgatggccttgagttaaatcacatccctcggcgagataatgaagcaacagataccctcgcaaagatggcatcaggacgaccgaccgtcccacagggagtatttgccactgaccttttcaatcctcccatccgatacgagaggccggccaaagagacgagcaacccacaggcatggagccaccggtcccagaactggtcgatattgtggaagggacaaaccttccagccaaccccatagatgactagagaacgttgtatcacagtttcttaaccaatggcctacttccccaagacaaaacagaggttcaaatgcttcatcgatgggttaaattctttgtcatgattagaggagatctgtacaaaaaggggcatatcaggataagacaattgtgcatctcgatcgaacagggaagacaactcctagaagacatccacgacgagacctatggataccacgcttcccctaggagcctcgtaggaaatgccttctggtagggtttctactggcccaccatgatgttagacgcacaccaggtggtgagaacttgcgagggatgccagtactacgcatggcagacccacttgcccgcacaggcgctccagaccattctagttacctagtcgttcatcgtctggggacttgatttggttgggcctctcaaaaaggcacctgggggctacatacatgtcttggtcgcgattgataagttcactaagtgcatcgaagcgtggctaatcgcgaaggtcacctctgggcaggctatgaaattcgtcaccaacattgtccatcgcttcggggtaccgaactcaaacataacaaacatccgtgtcgattgggccgtcgtggcccaccctcgagcaaacatacaagtcaagcaggctaacaaaatgat

SEQ ID NO: 60290 - DNA, 1858 bp, Zea Mays
gcaaccatagccgccaagctacaagacaagatggggaggggaaaggatgaggaagggagaggcagcgtcgtccatggccggaggatggccggcagcgagctcatggtgtttgtggctaggggagggaactgggaagggggaggaggttggcttgataccatgttagaatagctgaaaccctaacactgattagggtgggtggactgttgtatatatatgatagagaacagtacatggactggatgcctggatcaaagcccattacatcagccaacacacaaataatgtaacggattctaactctactgtgtacagctgtgtgtgaggtgtgccatgtgtttttggttatgctgtaattgcagctctcatgtgtattcaagaaataaaagggtgagtgaactatattttagccacacctttccaatcaaaacatcaacaggcagtttcgccagatgatacccaagaggtgacaactcttcatgtccttcaaaagctccaacctagataaaacaatagcagcataaccatagagtttggttgagaccagagaactaccaaaagaaaagccaagattgtcatgcatagttatgcttctcacaatgcatatatgtataacgggctaataaactgaaagagaacacaaccttgtataacaagtcaactgcagaggaaatagcttcttcattagggggctctactgcctggcgcaaaacaagataatatgtgataacaaggaatgatatgtataacaggagaactaacataaatatagctactactaagtacctcgcaacagaaactacaaaaaggtgcacatgaactcagcctttcttataaaagttacagaggaacttacggatattgcatagaatgtgatgagatcaaaagtaaatagtgaaaaacattggcaaatgtacctttagcaggaaggatttgatgtcatcaagatgaagtgattttatttgcaggcacagctcagtcaaaggcatccgtaacatctcaggcaccttcagcatgtagagtgcatataaattcccaaagactatatgtgctatttaggaaaattttgatagccttgcccaatgatattaaatagctcattcgtgtcatagaaatgcatattttcatatcttgcaaattagtaaccatatgcagagaatgtgggtttgcaattaatttgtataacttccctaaaagaatttgattgatatatattgggaatggattagcagggtgagatagtaagcaaggaaacagaaaagcatataaatataagtaatcactatataatgaatactgagaaggtcaaggttccatggaagataactggcatatatgagaggcagaataagggaacattaggaaaatacatatatataactaacgctggtggtaacctgaaatggacgcatgacgttttcaaaccgatgccttgtatacagacagaaacataaaccaggcttcacacgaccagccctaccccgtctctgttttgcatttgcacgagaaatccaatcttctactatgcttgacattttctgcacagatacaataaagcaaccaataacagaatttactttatattatatctaaaatcaatgctcattattgcaacttctaaaattatagttccataacttacattatgtcaacagatgcataagtaacaagagctcatgcacaaaaacagaactgtcgagctacgtaaacactcattctgagcaccatgtgcattttactttggggctcttaagacaatgaatatgaaagcccaactgtgcaacaaaaacatgagcagaacacaatgtagtactcatggtagaagattataactatgaattccactattagtgtcaag

SEQ ID NO: 60291 - DNA, 452 bp, Zea Mays
gggagttgtttctttcttggtgtaatcgttcattgggagtttcccccacttccgaggcttcgccccgggacacaggttgtgccggatcccgttctccggcttcatgatggcaccgcacattttggcgtctgtttctttgtcgccaggcgtcacgctggtgatgttcctccccatgcatggtagctcatcgtcggagatgtgcgctgactccaacctcccctggatgaagaggacgtcagggtagaaaggagcgggtatggcggtgttcttcttcccatcctcttttgagggcagaggtatcgagaggatggctcagtgtgttctccttccctggtacaagatgcttacttccttcttccgagtgatccgcgtccactccttagtgggcaaggtggacaacagagttgctcgggttagtgaaaccccgactaattggtcttccttctttcgag

SEQ ID NO: 60292 - DNA, 557 bp, Zea Mays
agccaccactttgttgagccggttttgattcgggtttcatggcacctgtgcactggattgggaacgcgccggtgatgccgtcgttgtgcgctctacgccgccatgggtgaccagcggattgggggaagaatgcgtgctgctgttggattctaatcaacggtggagattaggcaggagagtaactcttcgtgaaatagatctgggtcgtgtaccttggatcgtgcgtacaagaacggatcgggatcactttaaatctggactgtggatggtcaatccaatggaaccctttagcataccgtttagggcgggtgtgggcgttgatctgcctcgtccgtttttaatctaacggctggcatagcataccgcttcgctttaatggaggatctaattgcgaccgcaaaactcagatccaacggccagtagttgtccatacccattgaccgtgcgcaatttgttaaagagtccctggtttataggatttcaacccgcgctctaccactgtgtaaaagtaattcggtataggcccctggtttttataaagtgcaccctgtgctttc

SEQ ID NO: 60293 - DNA, 442 bp, Zea Mays
agggaatacagcacagccctaagcccaaattacctgggtaaaaacgcccgacctacggacatcggatagccttccccgtgtgaccgtccctgtcatgtcgcgtgctagaggcctccatagcatcaaccagcagcaacatcacacgtttctttgttgagccggttctcttgtcgtgtagcagcagcatcgtcacgctgagccgctgaggcaacaacagcgtaaatgagcacctgcgtttatttgtttttttctccacgaacaacatgtcagcctcccaaatggccataggaaattctctcaagagaggtcttttcacacagggaaacgaactgacgtggaaatcacctggcgaggttaatttccatgggttaattagcaagtagctactaaactagcccttacatgttggtcaggtacttgagacgagatcttctgcggagcc

SEQ ID NO: 60294 - DNA, 587 bp, Zea Mays
ttttggagttgtttaatgaagcagccggtcacgtttgattcgcgcgcttttttttgtttttttttttttttttgctatgacgtttgaccccagcacgccggccgccgcctagctgctggccgggggtggtcggaggaaagttacagctgccgggcgtttgaccctccggcgttctcttctctggactggacctattgattgttttttttttgtgcgtggcgggggcgtggcggtgagtgggcgactggcggtacgtacgaggggcagatcgggcagaaaaagcgggaggagcggagaattccccgtccgttgcgtcgtccgtatgcatgtgccctgacgatggctcgttcacgtcaacagcgtgagccttttgtacatgtttgtttgttttgtctcgcccgccgcgcgcggactctctctttccactctactacacgcgagcactgctctggctcctgctgtgattggtgttgcagaaggcaccctggagaaacgatttgatcgtactacgacgcccggtccgtacgtagtaacaacgatgtatgtatcaccagtggcgcgacctgtctagtcgctatctttttttg

SEQ ID NO: 60295 - DNA, 313 bp, Zea Mays
cttttttcctttcctcaaggggtagcaataatcaagatatacgaatccaattgcatcaaaaaccttgtttaatcttttcttgccccgacccccgaaggctgcggacaaggcatcatcttcggccttggagtatgtcccaagcagcttgtcgcttgtagcttcaatgcatttcaaccagtcatcatttggttcgtcaaatttctctctgaatctgaaggtatatttcaatcgaactaggccaccttcactggattcaacagtagtctcctttggcatttcccagctatccacaagtggccacaccctataggct

SEQ ID NO: 60296 - DNA, 704 bp, Zea Mays
ctggagattcagttgacgtgcacatgctcatgttatcggtccatgtgttgtatgtattggagtgttgtcctcattgggctatctcctccctaatcttttctaccacatctagcaaccatccactaatcttgggagtgaaggcttcaggtggcaaggcattgccattccaaccttccacctatggacgctccaattgtgtgctcggtgtgtgactggtgccacctctcattgacctatattttttggctccctagaggtcgaagagtattcagtcccaagggcaggaggtggtgttgcaaggctataatgtgtcacaggtgggatagtgtaatgttgttgggatagatgtggaaattgtgcatatggtgcggctccctattctgcgtacacatagctggacggtctagggtaggatctcaaatggtctaactagactctggacagtccagcgtgcataggatctcaaatggtctaactagactccggacagtccgacgtgcatcgtcggatagtccgctactagtccacagagtctggagttatacacagaatgtctggccatatatggtgctgcctgggtggtgtgcgcatagctcagtgttggaccggtcgatctggtaaaggatgtcggatggttacgaggtggtcggattgtcagagattaggctcggacggttcggccatgcctagagccagccatgtgt

SEQ ID NO: 60297 - DNA, 947 bp, Zea Mays
gacagataaggtgctgaagaatgtggttaatgcttgcaagaagttttgtttgtatgcgaaagctcccttgtgggttttgttgtcttgagtgtcaacacaattaaaagtctaaccagggtgttaagtgttgagcaggtgctaagtgaaaatactaagaagttcaacacatgtagatagatatgatgtgatgaaccacacaagctgagatggttgtggcctgtggacatcacaagtaaagtcgaaggatggacaattactatatggaagtcgatgtgcataacttggagatagctgatcaaactgaggatgaaggctagaataactttgaagaactgagtgcataggagaaggtcaataagatagaggtacctaaagccagatgtgaagatggcttgttaaatgtcaatgttggtcaagctgaaaagagtcatgttgcattgaagacgacaatatatggacgtgacttacaacctttaaggtaatgaatatggttaactggtttaagtcgtacgactcaagatcctgctcaagtagagacttggtacaagaacgagctaagtatcaaagtcaaaacctggtagggcctaaagagctaagtatactttgacttgtagtttgggtcattcttgtgattggactcgttcttgttaaccattccatgtgttggagctcattaatggctataatggtcaagtcatggagacttgaagttttggagtccaaccctgacctcaaagaggccaaaaggtgcaaaatgatgaaaaagattaagtatgcaaggtttgagtgtttgaatatgttgcatacaccttttactatacatttggaactttggtttgctctctaacttggtttatagagaaagtgctattcggggccatgtttgaggagaaatagagaaattaaggagagattgagaaagaggtaactttctaggacttagccaa

SEQ ID NO: 60298 - DNA, 321 bp, Zea Mays
aggacaaaggaggcagctggtgaccatgcactcatcaccgggttgcttgaggaattcgaggctgaaggcagacttggcctttgctcttgtggctaagtttgaacgtattgtggggtgtacggtgaacagtatgaagatgtactaaacacctcttacatctgtgaaggttgagcagttgacgaagcaagctcttttgcttgttaatggtgtgatggcatgtccttgtagtgtggcatttgtcctcaccacaaaataaatagaatggcttccttagaggcgcaccaaatatgccacttaatctttgtcctccccttcctctcg

SEQ ID NO: 60299 - DNA, 671 bp, Zea Mays
acaaagactcacatagaaccctataatttcaaaggctttattgtatatatattctcataatttgggtattacaaatcctaccccccttagaagaattctcgacctcgagattaagatgaactagggaaaaggtggggaaattctacttgcaattcttcttctctctcctaggtagccttgtcttatccatgatgactccattgcactttgcatatttttatcactttgttcctcgtaactcgagtgagggtattgatgaccttgataggatgctcgatgtaggttagatcacaatgcacactaagttcttccataggcaactgctcctctaggacacgaagacacttcataagctgggatacgtggaacacatcatgtacatctgacagatgatctggtaactcaagctagtagcccatctccccaactcgctttaggattttgaagggtccaataaagtgagggggatagcttgcctttaactttaaatctcctcataccccgcatcggtgacacttttaagtatacgtgatcacccacttcaaattccagtggtcttctccgggtatccgcatagctcttctgcctcgactgtgctattctcaagttctctctgatcatccgaatttgttcttctgcctcttgaataatttcaggcccgaagaactgcc

SEQ ID NO: 60300 - DNA, 725 bp, Zea Mays
tcacgagtgttggctttcccgccttctgccatctcgagactgtcttgaagagctgcattttttccttcaattccttgatttgctgctctaggctttccacctgggagtttaggtgggtgcagtgggagaaaaggtcatcaaagtggttatcaagggtgtggatatatccggccatgtagattatggcagggtcatcttcattatgctctctccctgacagggcctggagtcttctcctccacgtagggttatttttgttgctgggtggaaagtagcggaggggtgtctcggagacttctttgttgtagttttggcatagttggcggagggatttttgggtagcattttggcaggtgtctgggaagcggtggccagtagcggtgatctaaaaaggagggtgattttgttagcttcgactttctcctaggttgactgccatagagcacttctcgactccattctcacggtattccttccagacatactctggcttcttgttgatccccatgcgaagcgcacaactccgaagaaaggtgaggaaatccttccacctctgagcaataggatgtcttaaggacaaaggtgccctccatctggtagcaagagaagaagggtcattaatattgggcaaagaagagaagattccttaagaagttaagaggtttttcttttaaagaaatctttttaggttagggctgtggtctacggccagtcctatggctctg

SEQ ID NO: 60301 - DNA, 1061 bp, Zea Mays
aaaaaaaatccgacacataaaacagggaggcacaaaccaacccgacccaacccgacactagacacgagtcgggtacgggccatgctaaatggcctatgacttgaccttgacctgactcgacccaacgtttgaacaggtctactctgagccctaaaagcatatcagtgtgctaagggcctatgcttcaaatgtggagaatgttggggtcggacacaccggcgttctaacagcgtacaattgcatttggtggaagaaatgtggaccttagcagacaccagtgataaccttgaaagtactaaagagctgagtgagttgaaagaagaacaaggggatgagagtgtgttagcaatttctatggttgttgttatgggagtgaaggcaacataactattaggttgtgggcatcagtatactatcagcaagtgttggccctagttgattcaaggagctctgccagtttcatgagaaatcaactgatgaagtctatgctaggggtgcaaactttgtctaaactagttcaggtaagggtggatgatggaggcaaaatgtggagtaaatacgtggcacccaattgcaaaatggatgtgtggaggggtgacttttagtacacacttcaagatattagctccgggaggctatgatctaattatgggtatggacccaaaaatggatggagttaaatataatggtagaaccgttcatttgcaaggggtatgccatagttgcaatcctatccaagtataaccaatgttcagtttaaagcattattgagaagagaagccatagcccaggtcttagagctctaggctatggaagttgacaatgttgccttagtaccaaaggatataatatagttactggaaacatttcaacatcttttttagaaacctcaaggtttacaacctcaaagagtggttgaccgctgcattcccttgatacctggagcccaacctttcaggttaagaccatatcaatatacaccatagcaaaaagatgaaatagaaaaacaagtgaaggagacgttggatagttttattttacaacaaagctctagtcctttt

SEQ ID NO: 60302 - DNA, 416 bp, Zea Mays
ggaaaaccaagtgttatctaccttccgagataacttggaaggattgtacaaagatgcagtttctgatctggctactctccaaaatagccacaatcttacgatgcctaaacttgataagaggaggagtgagttgtctcttttgcaagagtcggttgatgagttgcacgagtcattgtcttccaaggattctaagattaaggagttacaagccttgtcgagatcgcaagcaaagaaggtggaggtcctagagtataacatcgatgtcttgaagaacgagtgcaagttattgaaagcctctcttgataaagtcgtggataaggttattctcgtcggtcgattgctcatgacgaaacctgacatcattgttcctgaggacattgttactgatgtggtatctgagcccagtgtgaaggcta

SEQ ID NO: 60303 - DNA, 882 bp, Zea Mays
cgggcggatccagtccttgaagttgggcttccagggctgcaatcctggcatgggcattctccagctccaaatgcaccctagagagatccagggtggcactgtccaggtcggtgttgagaccggccactacaccagctagggtgttgaggcgatcctcaccagcttcacctgggacaatgctggtctggcttcctccactcagacgctgaggaagatgcctgaacctcgtgttttgcagctgctgccggtaggtgtggctgagcgaccacagggttcgtcgggcagcatcgctgaccgaggcagcgtaggtggatagcagtgtcagggactcatgagcagacagagtcctgaatcccctatcccctgcatccatcaccctaacgtggatgcgagtgatgtagtagcaagcccggggaggctcgctcactcgccttgtttcatacagggggcagacgtaggttcctagcgcgtgagcacttcttgcagtaggttggggaagtgccccgtctcaaacattgatgtataatgttcgacaacaggaccaaaccacatgaagtagtcctgctgggcgtagttagcttcctggttgacgtgttcgtctcctccttcatcgtcgtcgtcatcctcgtcatcgtcgtccccagagtcgtcggggtcgtcaccttcgggtgcaggtgcttggacggctggtgcaggcggtgccgatgtcgatgacctagctgcgaaggccagggactgccaacggggtgggcatcggcagctgttccaagttgtcctccaagatgactacattctccactcggatgtgagggagatccaccggaacttcctcgactaccactgggtagacagggatttgccggggcggaggggcgtagctag

SEQ ID NO: 60304 - DNA, 338 bp, Zea Mays
cagggaaggagagacgggtggagccgttgttggcttcgtgccagatctcggtttgtcgccaggatcaaggtggtcgcgaccttatcatcggcaggtgagtctcccagggttgtcgctttctccgttccttttcgtacggtcgcggttgacgaggactcgcttggtggttgtggtcggtctaagcatcgaccgcctaggtgtatcggtcgcccctagtactggcttgcgaggagagaggataatgggcgtgaggtaaaaaatggactaggaccgtccaattgataataagcgtcttagattagattagcttaccccttcgcctggatggaaccccgtcc

SEQ ID NO: 60305 - DNA, 750 bp, Zea Mays
ctcaaccttaatttgttgatagatgttggagagtaaactctagccaagtggcggaatgcacccgcctaatcctaagaacatgaggcaatctagggtttatctgatgagatggatgaacacaataacacacaagggtttagagtgatttgggccgccggtgcgtgatcgtgtactccattgcgagttgtattatcgtggttgtggatgaacttgggtggactccagagagcttgaagttgtttcattttcctctgtacaacatgtgccctcctttttatagcctaagggaggcatgtacatgggcgctaggccccaacagttgggcccagaaatataataacatgaagaatggagcgacaaatagagattggtggaccaaggtcttcccccgcggtggacagatgtcttctcttggtcactatgatgattttttaccagactcaccttcgacatgtcttgttggtgtgtgggcgaaggctttggtgtagcttgctacgtagactagcacatcgacgtgcataggggggggtacatggacggtgtcgtcctgtcccctccacctgtcactgaagcgggaacagtagaagtcatgatgagagctgcccatgcacggcgcaaagcgtcaatggtcctctcttggtaatgcccgggttagtggcgtggcccatgccttgcggactgcgcacaccacctgcatttaatgtggggcacacattgcctgtcactggtgcggacaaacgtgcatcctgc

SEQ ID NO: 60306 - DNA, 732 bp, Zea Mays
tttggaaagacaccccttaatacaaccgcaagcaggtgtaaatatgtggaaagacacccctcaattcaaaaaatgatgtccttctatttcttgttgagagtgtagctagtaggacttaggtaatgttctcattcatccatctctttttggtgcagagatgttgtttcatagctttaaagtcctcctatggttctagtgtatctttgtcctttccatacatgcctaggaaactaagtaggttcacacaaatattcattgtgaggtacatcatgttgattgtgtgatgaatgtgtaatactttctagtaaggtacatgccaaaatattgacttcttattccacattggtgcctttccatgttcacttagaataggtcagcaaccagatctattcctaaagactattctaaagttctttaccaactagaatacaagattgccattttggtgaattatcttgcatgatgatcttctttcccattccaatgcttactttttttcctaagtgtttggccacaagaaatcagtggtggtccatgtaaacaacttttcaacagtgatgtagatacatgttgttagtctcatctaaacaatggatgttggccctaaatcccttattggattgtcctgataggttcgaaagtgcaggtcagtcattgatggttacgaaaaacaaaacacataggtcaaaaccctcctttttatgctcatcccacatatgtacaccttcagac

SEQ ID NO: 60307 - DNA, 566 bp, Zea Mays
ttgggactagctagtcttttcctcttcggcttggctccatgtttgatcttcggcaccgttttaagccaaagctatcatccttcgctggtagcttcagtattcgccatcgttgcttccagggagtatcttcatctcgaggatcttctgcatagagagagagtcctcaaaattacttttccaatgatgtctttgtcttgaggaccttcgaaagagaagaagaccccgaacatgcctaaaatgagaagggatgtggagcgacatgtccttcgatgcgaatcatatcataaagctaagtctcatttaaaccctcatggattttatactccactacctattcctagtgtgccttgggaagacatatccatggattttgttcttggtttaccacgaacaaagcagggaagggattccatttttgttgtggttgattgatttagcaaaatggcacattttattccatgccacaagagtgatgatgacatattgctgaattgtttttcaaagaagtggtttgtttacatgggattccatgaaccattgtttctgatcatgacactaaatttttg

SEQ ID NO: 60308 - DNA, 493 bp, Zea Mays
ttcaaccagagcatgcaacaacgaagaatgtattgggtgttctatggagaaaacaagggccacactacaaagttctttgaaattataatctagaaataaaaagagctagcagccatagggcaaagcaaccaaccgaatgaagtatatccaacatcatcctattgtccaccgccatacattccgcaacacgtccagtatcaagaccctctaatctttggcatccaatgcttcgcttctctcacaatccagtcactggggcattctccaatcttatcccctaggaccttcaccatatgggaagccacccttcggccaacctcaatattcaacataagagccacatcaaccgaatagaagggagccctctgaagccatgatagtcaacaacatggcgccatcctttaaatacatattccccatcatgggaggattaagtttcgaaccaaagaataaaagacaaagaaaagaagcacaaaggaaggttcaacatgtt

SEQ ID NO: 60309 - DNA, 529 bp, Zea Mays
gttcccatgcgaatacgtcggcatttgcctagaggaaggcgacgagcgtgatttcctatttctcctccagattgcccgcaatgcgagtggtctgggaggaatccacgccaacctggatggtcttgacggggtcgccgtgtgctccagatggttgcaccttaggcaccttggtaggctccttggtacaggaagtcaaggggtccctcccccgtcatccgggcgagtggtttctgccgcaagggcgtgcaacttctcgacagcttcaagcgcagcggggcggtcgccccgcacggtgaggaccccagcaggggacggcatcttgaggaccaagtacccgtaatgggcaatggccatgaaccggtacagggccggcctgccaatgatggcattgaaagggaggttaacctccacaacgtcaatctagacgttctcagtgcgcaagttctcctcagccccgaatgtaactgggagtgcgatgctcccaaggggatacaccggttgaggccccactctggagaatgggcgagag

SEQ ID NO: 60310 - DNA, 392 bp, Zea Mays
cacaaatctacggccatgatttaatgtacgaaggggtatgcgcccacttaatcttatccgtgcactgcaatatcaacggtctgcgttgaacctggtcacgatccaatccacatcgcccctgctagatcctacggtccttatgcatcttcttcctcagtccgagctgggcgatgccttgccccaaccgtggcggcggcctgaccgagccccggaccaccgccgctccgatgaccaccgttgcacggaacccaaatgttgtgacggcccgagcactagcctatccacggtcatacaccaggaaacggaaacagtgataacacaggaagaaaagtactcaccgactaagagcctgctacgatgcctaccacagctcgccgacccgatgaaccttg

SEQ ID NO: 60311 - DNA, 720 bp, Zea Mays
ccaaggccaccttggcctctcggggaacaaaccagcttccaatcagccaaatggtattttttagtattatggccaccttgccacaagagtcttctccgaaaaatgtccatgtttctcaaaatatttttaggggctttatacatcgataacatgtatagagggacgttagtaagactgctgttgatcaaaactaaccgaccccctaagctaaggaatttcccttgccaagagcccatttttttctcaactttttcaactgtgggtaaccacaaagacttgcacaattttttgtcatcaatcggaacccccaggtatttcataggaagacatttataaggacaggtaaaaatatcagcataccagttttccttaacagaagcttcacctaagcagaagatttcacttttatgaaagttgattttaagaccagacatctgttcaaataaacagaggataaacttaagatttctggcatccagcaggtcatcctgaagtaaaaagatggtgtcatcagcgtattgtaaacaacagcaaccattaggtatgatatgagggatgagacccttaataatgccttcatctttagctttctgaatcaaacaagccagaccatcagcagcaatgttaaaaagcaatggggagagtggatcaccttgtctaacacctttgtgagtggtaaaataaggaccaagtttgtcatttgtcttgatggccacttta

SEQ ID NO: 60312 - DNA, 549 bp, Zea Mays
tggcattgagagaacagttgacaacgtgtatgctatgtcaaagttgttcgtaacagagtttcaaagggagttcttttgtggccagttaactcctgagcttaggttgggtttcttcaagaaatggtgcagggacaacaatttggagtagagaattgttatctcatatctatgcatagtagtgaacctttatctatgtggtgtaatgaacctttatctatgtggtgtaatgaacctttatatatgtgtgttcggtcttgaagtaatatctgtgtgtgtaatgaacctttatctatgtgtgtgaggtcttgaaatattatatatgtgtcttgaaatatttgaacttatctatgagctgtgatgtatagtcttatgcaacgtccttatagtttgttaaatgtgttgaagcaggaagatgatgatggcatcatgtatgacgaagaagtagccgatggaggcagctcaagtgaggatgaaattatatccaggtgtcgcaacaatttggtgcaacaacaaaaaatgattgtgcagttggttcctatcttgggtatg

SEQ ID NO: 60313 - DNA, 534 bp, Zea Mays
ggcttgcatgcattgagcctgtttgaggagatacagaaaccaaacaaaccatgctttgagactccgcgggttcaagtgcatgagtagagaagccaaccaatcacgttgagtgtgaacaagtcgcagtgcgcttcatggcccgcattcctcctgaggggttcaagccagaggtcaccaaaacctctagcaacgtctggaaggtcactcgttaaagatgctagggcttatggggccctgatcattgtcccctctttgttgacgatgaagtcaagactcacgaagcgaatcgtcgctctaggggtcccagctgtgccactgtcatcgctggccatctggagcttagagggcttgtcgagaatgcgtaatgcccctacctggcattccaactataggtgtttcaaacctagttcgaccaagtaaatttgtgtgcccgttctaggcttcagatggtgtgtgcggtgggagcaagatttatactggatcgagcggaacgtccctacatccagtcttcgacggctcatggttcttgcacct

SEQ ID NO: 60314 - DNA, 642 bp, Zea Mays
tcatcacaagcatagacaaatgctagagttattacagtccatagtgttcattacataaataagagtgtttagcccctgggagctaccaagccaggctaccaagccatcaatccttctccccctttttggcaacgagcaccaaaaaaaaggagaagagaaacaaccacaaatcaccaggaaggggatggatcgaagaatcacgacgccagattgactgcaaagttttcttccccagggttagctgggggaggggtgctgctagaaggaccctggggggaggataggatgaagatggacccggatccccttggtggggaggcgggacgaactgatccctgtcatcaaataattcttcatcttcaacttcttcatcttcagccgtcatgaatggaactccataagtttgctgatgccattcatttatttctggcggaggtgcatggaggggtacgtcaggcgagcggggagcaaaagggatacccatagatgtagcctgatgatggagattgtcatcagtctcccactgtcgcctggccatctcatgaacatcagaagaaatattcctgcacatggagaagaaagctgctatcccatgagccaatcttgctcccatgccgcgaccacgaccacgaccacgtggtg

SEQ ID NO: 60315 - DNA, 523 bp, Zea Mays
cagcccccatcacgcaaagggccaggttataggaatagtttgcagatgctgggcgggcaagtattgttgcttcgataggaactggcatgctttgcatttctgaaccaaatctgtcgcatccttctttgttgttggctaatagaaaccagacctaaaggcttttcctaccaatgttttttatgctgcatgtatgccacattgccctgcgtggatttcatccagtagctgccttcctatagccgagtgaatacatttcatgaggactcctcctgcacctcttctatatagtagaccccctatgatggtataatgggccgactgccttgcgatgcattctgccgcggccttatcatccagttcttcctcgttttcgatgtacctaataattggctccctccagtcgttgggatctgtttgtgcttggtctatagtgttgcattcttcagcatgccatgcagtgacgctaggttgttgtacttcttggacgaaaatcccaagtggaacctgggcccgactggacccc

SEQ ID NO: 60316 - DNA, 388 bp, Zea Mays
atgatctgaagcatatgttcattactaacttcaacatgaccgttgagctagggaatacataatcaatatgacctcgagcaagtcatatagaaggaagatgaaatcttgtgcaactacatcaagtgttggcgcaaagtcaaggtcgatgcttagagcatgtcggaggaaacaaccatctacgtcttccgcaagggccttagggatagggagctctcacacaagcttatccaaaaagctccaacaactctatccactctcttccaaatgtacacaagtattccatgagcaaagaagtgatgcaagatatgtccttgacctagaaggataagtgaaaaggtaaaaccaaagaccaatccagaaaatgtcagaagtgtaggctagaacgtca

SEQ ID NO: 60317 - DNA, 498 bp, Zea Mays
gcaactcttctgggaccatggcttgtaggtcttctctcctttgtccttatggtccttcattatctgcttgaagctccagatgaaaagagccatttccttctcatcgaggcttggttcttcctcttcatcctcactttgtggctcttcttccaccatcttcaccttttgcttcttacttcctttcaaggtgatctcttgtggcttggtggtagtgatgatcccctaggagaggttcttcatgtgcttggcctcaccctccatgatctcgtggttgattatattgccaagtacttcatctgggtgaccttcttataattaggtacttcatggattagtgtacatatttttgtgttccttaccgagaaggcatgcaacatacttttgacaacttcatggtcattccaccttttgctctcgatgctccaaatcttttgatgatcttcttgagcccattgtacatctattgtggatattcatcatcaaacatgtcaaatctcc

SEQ ID NO: 60318 - DNA, 1362 bp, Zea Mays
ggccctcatcggccattggcattgcctgtttcccccgacggccagcaatgtcggcacagtctccctccgggtaaccgtcatacgacaaatggttcagctcaaaaacgcggttcaacctagcgttggaaccgcgaatatcccaactccttaaagtctccatcttcgacacatacttccctacgatcttcatggcctcggcctcgacctcacgcacaaacgcggccacgtctcgaccgcgaagatccaaggcgaagactggacttcgcaccagctggtcgcccagtgtaggcatctggcgggggtcacttcacctaatgtcctaccatgagctaagggccacaccccgtaggcaatgaattcctcgaccaggttgcgtccgctgctcaggcgggccgcatatcggagggccccttcgtcttcgtcttcttctgccacctcgaattatggaaacgccacataacaatgtgagcacagaatggcagcgggcaaactcggcaagccttcgacatccccgagagccacataaaaccaaaagtcccaccagttgccccacttattcctagcacaagggactatctcgacaacttcagccgaggtcttcccagtccttggcgtgaaggtgcacgatccaaattttgccatcttatcacctatttttctcttctgccagtgcagacaataatttttggcgaagacctccacagacggctgcccatcgtaggaggagatggcctagacatacttcgcaagtgccaccactgcattcggtgtcaactgatggacttgcacctcgaacttccgcaacacctccactacaaaccgatgcgtcgggaggcgaagaccagcagcaaaaaatgcctgaaaaactatcaattcacccttcggctcagggacctcttccgcgcctagggcccgccagacactgttaacaaaatagcacagccactgcatctctagcacgcggcccaaaaaattctcaaagttccgaactcgacagtatggccgggctacagttcaaccaccgccaggtcgctcaacgtctcctcggacgacggcgtggccggcgacgtgctcgcagcagacgaagaagaagacattgtcacgtactgttggcggcagcgcagtttgtttgatacgggccagatctccggcacagaaggagcaaagagggcagacgagcaaggagggcaggcgagcagttgtcaaagctagggttttttacagcgcaaactcaagcgggcaaaaccctcgatcgaggtcgggtttttataggggcagagcgacgcctcgggaagcccgcaatcccacagtaacacgtccaatcaacagtcacatttcaaaaacccccgcaggaccatttcg

SEQ ID NO: 60319 - DNA, 423 bp, Zea Mays
cagaaatacaggtggtatggattgaagagagatgtggctgcacatgtgcctatgtgcgatgtgtgtcaaagagttaaggttgaacaccagaggccagctggactactgcatccactaaagatactcgagtggaagtaggaagagattggtatggatttcattactggattgcctcgcacccagaaaggatatgactctatatgggtgattgtggatagactgaccaaagtggctcatttcattccagtcaagactacttataaaggttctcaactggcagagttatatatgacttggattgtgtgtctacatggagtaccaaagaagatcgtgtctgatcgaggttcacagtttacctcaagattctagagaagcttccatgagaatatgaatacaaagttgaactttggcacagcctatcac

SEQ ID NO: 60320 - DNA, 853 bp, Zea Mays
acatgaattttctaggcattatacaagttctagtaattatttttgcaacaaaattcaatttctattttattttcccctgattttctagttttctggactgagcgaatgaattcagataatagcaggggctaacacgcaaaagttcctaagactcaggattaactcgggtggtctgtgggttgattttactgaaacccgagggctcatatgcactttagcgcgaccgaaggggtatgatgacatgtggaccgcacgatagaaaccagacggcccagattagaccgtcatcataaccgaaccggtatgcattattggccatgggatccgagatcagcggcccagaatgatccacgtcatcacataccacaagcccttggatggccaatcaacgtcccagattgaatgcgctgaaagggtaccttctgcgaccaatctgagtcgtacaacacgatctaacggtgtcggtgcatattctccaacacgacccttgcccggccgacgttgtgcacgctccggcgtgattcagctcgtagcccgatgacccaaaccctaacctaacgtgagctacatcatgcaggtaaccaggcgaaaccgaagggtgtgcttaccagatttcagtagcgacaggcgctgctggcgacgttggacagcggtccggtggtgaaattctcgccccgacctaaaattcgtcgagcacagaccgcccccagcccaagaacacgacacagagatggccgtagaccattggcgaagcactcgagcgccaatctcgcccagacaacgacgacctaaactctctctatctctgtcttgcggcgcactctctcatgcggaattggaaattctagggttt

SEQ ID NO: 60321 - DNA, 443 bp, Zea Mays
ggcaacatcggcgttttagaggtaacagccgagtgactgacggtggcgtcggcgttttagaggtaacagccgagtgattaatggcaacatcgacgttttagaggtaacaaccgagtgactgacggtggcgtcggcgttttagaggtaacagccgagttagaacaggccgtgtcggccgttttggaaataacggccgagcgatgacatggcacgacagcgtttttagaaataaccgctgggtgatgactggacgctttttggaaacggtatctggccgggaaaaaccccatatgtactgcatcgttgcgcgcttccgctttccgtgccctaattcttgcttttttgcatccaagctttccttgcgctcgcgcgatactgcctccgtcctgctcgccagcgagattgagatggcgcccaagcggaaagcatcaagttcatccgct

SEQ ID NO: 60322 - DNA, 432 bp, Zea Mays
ggaaagcattcgcaatggcaacagtagttgccttactatgcaggaagaacatttacaggcagaatgtggaggatatcctcatccagattatatatctgttgatatggttgatgaaagatcactgcatgatttgccacatgggttatcacaaaacaatgagcagtatgagatggagcagctcccatagaatatatgtgaaagtggttctatgcagatggtctctccggaccaatattgttcctctccggaccaatattgtgatgatacatctttatcagatttttacatggatgtatcctccccagagtcaatatcctgtgagaagaaccagcctgaagatattttttaagagcgagtctagcactgactcttctccagtaccctctagcagaaattccaccacagaggatgctgataaatacttaggtcaac

SEQ ID NO: 60323 - DNA, 473 bp, Zea Mays
gaagtttgaggaggtgatgatggatgtacaataggaacaacaatttgagaaggcggagacggttgggcctgcgacaaattcgaccaatcaaccaattcgacatcccttcgaggccaaaggataaaattcttgatagcttgtccaagtgtctcgataccttcgggcccagggatgtctagcatgttgtcctcgtatccttggacgactgtcgtcacttctaccctacaatattcttctggaatgtcgtttccatggaacttgcgtcctgggatcgcaaggcctgtggctactttctttgtacgctgattgttaataccatatcttataactagtgtgcatgccacaagccttgtgatgtcatcaactggatagcggaccttatttcccgttgacgcgacagagcttggatggtcgtaccctcggtggaagccggcgtttgagctgctggaattatttgcatctgtggagtggtc

SEQ ID NO: 60324 - DNA, 746 bp, Zea Mays
gtgaaagagacccacgtccgggttagctgcagcatgagcgcggatatgtcgggccagggttgttttgcccacccgacatactgaaccaccgacgataactcgggcgcgggagcaccggatttccctaggataaaaggaggctgtccgctacaaattaggggataagcaaggaggttgtaatcaacacctgtgcgggggagctctctctggttgtgtatataaggccaggaggcacccctaccattgtcatctcatccacagcccaccattcttgtagtcacagcttgtaaatccaccccaatacagaaaaccaccataggaagtagggtattacgcttctcaaagcagctcgaacttgctcaagcctgtgtgtttccctcaacgtgctgcaacacgaaccatcgagtcacaatctacgatgtcgtcctacccaaaagcaccaagagtgtaacccgggtgtgcggacgaacaataaacgtcgacagtcgtcttcccgagatgccctcgagcggccgtcatcttgaggtacttgttccccatcttgagttagggattgcaccatcattgaggaagaaggttgatcttgtactcggtgttcctgtggtcgcacatcgcctatcgcctatcgccatagtcatcattgcggtcgttggaatctcgttttcatcaagaccaacttgctctattggagagccattagtctcattaaactagtgacttcaactaaactagaaaatttgttgaag

SEQ ID NO: 60325 - DNA, 790 bp, Zea Mays
gtaagtagtaaagtagtgtaatgtaatgtagtaagtagggtggaaaaaggccgactcataatgagtcggctttgagtttgtgtaccccccctccaatatgaatcaaggaattagttgcctcaagtgatcactgttttgctgcttttctgtttgggtgtttgaaagtttgtccatatgtctgacactgctaacattttagaggtaactgccgagcgatgcttgatgctttcgcttttccgagtagtgatctggcactttagagatagtgcccgacccaagaaaccccatttatactcgcgtcgacgtgcctttttgatttccgagccctaacttcactttttcccttcagccattcctccgcttccctgaaattccgagcctgctcgtcccgccggaaagatcgcaatgaccccaaacggaagaggcagagcgccgccgctgcaatcatcccgcccatcgaccccaacagccagcttccattcgctggtaccacatgtctatcatctctgaatccgaccttcttcatcttgttgagattggggttttgctttcgaaggagctctgctcttggcggatctgtcgcggtgtcactgttccgatagaggacactcatgaatctgtcgtttacgttccatttctcattcgcgggcttgctcttcccatctcccctttttatgtggcctccttgatttctatgagttgaatctgacacatttgaaccctaaatcaattctgcaagttgccatttcatacatctgtgcgaggcttttcttgggattctccctgtcgt

SEQ ID NO: 60326 - DNA, 524 bp, Zea Mays
cttgttataataatttaactcattctaggatctatgtcttttaagcattcggctcttgatgtgctctagccttaacactccactatctagctagctcctgttcaataaagaacctgtcaatgtctacatgctttgtacggtcgagttgagtaaggttgtttgcatattatattgatggccacagtgttgtcacaataaagcatcatagtcccattcgtcagcactcatagctcaggctatctccagcaaaatcttgcaaactgggcgtgcagaacactgttttgaactgtagctacgctgtttactcgagatagcttgaaaaagtcttttaaccacattatctcacacaagcccaatgacgttgccttgctgcgcagtgagacaagattgcctgtgcctcctagaaatacacattatcctaatgtagagcttctatcatccccactacttgtccaatccgttcttccctttagttaactcaagatcctaatgcaggctcctctctacctccatcgtcgcgccgg

SEQ ID NO: 60327 - DNA, 525 bp, Zea Mays
cacagatcctaggtgcagctcccctcgccgctggtgaacagtgcgcccggatttgcgctagccgtcacgactcgtgcctcggatgtatggattacgctcgacggaaaaaagatctcgtcgcggatgagctcgggacattgtggacgctctgtcactcgtccacttgcaccaacgacgtggccaagcaaccatcgtcgaggtatgcgtcacccgccgtgatcgtgacacgttatgaccctttaaccacgtagcagtgcattgcctgagcatgtctattcgtcgccggtggtcttgccacggtaaagtccacgaatcacttgcgccagtagcttcttccctctccgaccgccagcgcaatatcttcaaattgaacgccaccaccctcgaatcctataaattgagcgtgtcattggatccgctatgtagtcaagcacccaacgcacccacccgtgcctccgattatccaccagatagccccaatttaagacttcccccaaatcggtccagaacaacgtattgagtgag

SEQ ID NO: 60328 - DNA, 935 bp, Zea Mays
cggacctcgacgcacttggaaaatttgttgatggcgaccaacaggtgtgtgaagcccccaggtgccttctgtagaggaccgacaaggtctaacccccatgcaactaaaggccaagtgattggaattgtctacagggcttgagctggtaggtatgtttgcttagcataaaattggcaccccttgtaggagcgcacaatcttagttgcatcgacaactgctgttggccagtaaaacccttgcctgaaggcgtttccaatgagggttcggggcgtcgtgtggtgcccgcaagccccgtagtggattttgcctaacagttcttggcctgacagatgtggatgcatcgctggaggattctcgagggactgcgtcagtacaactccttttcttccccaagtagtatgaatgtcttggcatgccaagccagtcgcctagcctcggccttgccgagaggtagttcccccggaggaggtactctaggtacggggtctgccagtctaacactggtgtggcctcaccctgttctccatcaatccgtatggcttcgggctcgtcggttggaggtgtgctagtgttgggaacaggttcgagtgcttccttgatcacaacaaaaggtttgtagacatccctagaaaagatgtctgggggaatcgtggttccctcgaagctatatttgccagttcgttggcaacctcgttgtaatgtcacacgatgtggttgagctgtagcccgaagaacttgtcttccaagcgccaaatctcttcaccataagcctccatcattgagtcgtgatagcttaagtttttcatgacttggtcgatgacgagttgagagtcccctcgaacgttgaggcacctaacttctagctcaattgcaatgcgtaggccattaaccaaggcttcgtactcagctacattattagacgcgataaagtggag

SEQ ID NO: 60329 - DNA, 439 bp, Zea Mays
gaacaggagatcaacccccgagtcgatgaagaagcaagtcggcaaggcatgtagcagcccaacccccgagtcggcgaaggagtcggtgaggtgagcaatgactcaaccccctgagtcaacgagactcatcggtgacgcagcccttgagtagtcgacgagttggcaaggcggcaggcaacagagcttcctccaagttgacaaagaagtgggcgaggcgggcaacaacctagcccccaagtcagcgaaggagttggtgtggtgtgcaccagcccagccctcgagtctacgtaggagttggccaaccccctaaatcggcgaaggagtcgacgaggcgagcagtagcctagcccccgagttgatgaagaagcgggtcggtaaggtaggcagcaacctagccccccgaattggcaaaggagttggcgaggcgagcagcaactta

SEQ ID NO: 60330 - DNA, 509 bp, Zea Mays
gagggtacgactccaggttcgccacatgtgggaagcagtttggtacgacgacgtcgactactacaaggatcgtcggccgctggatgctctcattattgcagtcccgcccgagatgtatttttcgctttcccaaaagtagactaccaaggaggcctgggacgccattgctgcgacccacattggcaacgaccgtgcccgcaagaccacactgcagacacttcacaaggagtgggagaacctgaccttcaagccaggtgagggcgttgatgactttgctctccgcctcaacactctgttgcagaagatggtgcaattcggcgacgacacctacgatgaggagagagctgttgagaagctcttctgttgcatcctctagaagtacaagcagattgctcgctcaattgagtctctgctagacctctccacgatgacgataaaagaggcgataggtcgccttaaggtcattgacggtgacgaaccacatgctctctctaggcctatcaccatcg

SEQ ID NO: 60331 - DNA, 328 bp, Zea Mays
gtgtggttggttctttgagagtgtggttgggcgaatcctcgattcaggttgccggttaaagacggtggttggcttcgagttttatttgtcaggttgcactagttatcgctgcttgtagcaagttatcttggcttcttcgaagctagttatctgaagattgatcatacgtcgtgaagatcgggcatcgtggcgcatcatctggtatcaaaccctcagttgtcatggtaggactctttacccttagctacatctattttttgagttcgtcctatccaccaaaaagccataaaatatttttgccatagccctttgttcaatctgttgttct

SEQ ID NO: 60332 - DNA, 724 bp, Zea Mays
agaccgacctccgtctaatccaaagcgaattataattcagtctactcaagagtgctttagtgtcgacataccccattttctggcaaatactgtcagacacaaaccaatgtaggccggtgacgaggacgatgactttatgccataatcgaagaagcgtaactttgatgacattcctccaaaagtcttgaagaagatagttacaaagcggaggaaagcagtggatctccctcgacaggttagaattgatggtcaatgccaatatatcattttctgcgtgaaattatgttgtattgagatttgatttaaacattgagttgtgattatgcagatgtaaatgtttacgttattcattgtatacattatttcagcagaggcttaatgtgagatgcaatccccaagatgttatagtaagcattcagattttaaatgacagacaacgtcaagctattgcatggagggggttctctagtatacttgatatgagagttgacgcgcttggcagtagatctcatttagcttggctgatggaaaagcttgaccataatgatatgacaattcgagccgccccagggaaggagctaaaaattacaaaggagacggtgcaccttattttggggttaccaaatgctaggggaggaaaggcattaagcattgatgaagctgttgctgcaaacaatttaagggctgaacttggtttatccaaagaagaatttggtgttgcagc

SEQ ID NO: 60333 - DNA, 494 bp, Zea Mays
ttccaataaagcggtgttctacactttcgtccgtaaagtaattcaaatggtgccatttttagacttgcttgataactattgttacgagaattctgcataaggcaaacttttatcccaacttctaccatgcttgagagcgcaagctcttagcatatcttccaacacttggtttgttctttctgtttgcccatccgtttgtggatgataagctgaactaaagtttagcttggtatccatggactcatgtagtcttttccaaaagcgcgaggtaaactgggttcctcgatctgatacgatcttcttcggtactccatgcagacaaacaatcctcgacatgtataactcttctaactgggctcctgagtaagttgtcttcacatgtataaagtgtgccactttagtcaatctatctactatgacccatattgaatcatagccatcccgagtacgaggtagtccaactatgaaatccacaccgatttcttcccatttcc

SEQ ID NO: 60334 - DNA, 734 bp, Zea Mays
gtatgttcatctaaaacagtatttaaccagcaaaataaacagttatgcagtagtagtagtgactaagcaacaaaataaacatttatacagtactagaataaacattcatatcccaacaaacaaaaaaaataaatttatgcagtaaacaaaaaacaatttagcgtaagtagataaccaatttagcgtgaatagatcttaacgtgtctgctgagacaacagaaagaaaacatgctatcccttactaaaaccaaattggcaacatgcgtgttgttaagggtttcctacttattatgtttgactgaagccacttgttatatagctttgctaaggtcctgagagacgcacatttcaaatatctgaaagcatttatctccgaatacctaacatgcacacagattcacatcattgcatatatcttcacccacgcaatttgagcattcaatgattctaaaacaacaggtccgtgaacctttatcaaagctaaaggctctatgataaacaactgaaccataatcgcacaagaacagtaagatcaattgaagaccgttagtgggcgtgtaaaatacctatgggacgcggtggcgaaggattgacagcagcggccggctcgacaacactgtcaacggcggcgccgattagggttgagttcgcgcggaacaaatgaaggcgattcacactgccggaaggaggaaggagattaggaagttgcattgtaaagcataaatttaaaaaac

SEQ ID NO: 60335 - DNA, 454 bp, Zea Mays
agtgaatgctcgatgacatctctgttgataccacaaagatcgttctcttcctattgaatttcttcatcaaacttcggtccatcatctcctggatcactatctgattcccattcacctttttcattcaacaacattattctcctacttggatattaagcagcaatgtgcccatgaccatgacacttatggcacacaatttctcttgtacgggtagaagaagtagcgactgaagcttcagtcgggtctgatgtactagcagcaggctgctgcttatttgcagggaatgaccctatagaagtcgccatctttgatgtaccattggatgcaggagacttagctgcattttcttgggatcgtcctccaccaaaagaagcactggattgttgtttgcgccatgggacaacattataatgacttacataagattttccacgtgactcttgctgaatttttc

SEQ ID NO: 60336 - DNA, 316 bp, Zea Mays
tgaaaccaggcatggaggtccaaaaagattcaaaccgaaaacccttgtagaaatccaaggtaacatccccctgtaggagcaaaggagcatgatctgaagtcatagtcgctaaagcctggagatctgaattggggaaaaggttatgccattctgtagaacagaaaacatggtcgatgcgagacattatgggcgagtcttgttcatttgaccaagtgaagcaccgaccccttattgctaattccactagttgcaggtcatctattacacgtttaaaacaattcatcatttgagtgtttactctagcgttgcttttgtc

SEQ ID NO: 60337 - DNA, 319 bp, Zea Mays
gcgagatttctcgccggggttagatttccgccgagcggtcgctgcgcgatgcgggcagctccaccaacgcatcgaccttgggtaagtgctcctccagctgactccctttaccccctggaacctgtaggaccttgtggtagtgtgtgagcgtcgtgtgtctgccgaccattgctcaccagagatcctttatcagtagaccgccgtaactcgagtattgccttgttctcctcaccgttgcgagcaatatgcacgtactgggtttcgcatgatccctcccatcgattaggaccgatagtagattggttgaagcaccaccctg

SEQ ID NO: 60338 - DNA, 285 bp, Zea Mays
ctcatttctaagaaaggaaatagaatcattgcaaacatttaaatccttagccttagcaattaatttatcattctcgatcttaaggctagaaattgattcattcaatttgtcaatcttagcaattaaactaacattatcatttttaatattgacaagagaatcataacaaacatttaacttctcaaccttagcaagtaatttggcattctcagttctaaggttagagacagtgtcatggcaaatgctaagctctttagacaagttttcatttttctctacttcctg

SEQ ID NO: 60339 - DNA, 933 bp, Zea Mays
tcatgatcgacttcggtttacgcctaattccacccttggagctccactgggaatcactaatttgatcggaacgccattctagagcttggttcacacacaccgtggaacatgagtctttcccgtcatgttcccgacgacacagtacgacaacacacaaattggaggcacggtaagccttagcaacgtaccaaggctcaagaaaggcagctaagtaggtgggtggaaggccaggacagttgatcgacggaggaggtgttcacggcggcgcggagagtggatatggggggaattccaaattagagcgcgatgatgtacgataggagctggctgggggtgcgatggatgcgtacaaagaggcggagcagagggcatcgtcaatttataggtcccgattgaactgggcacgaattttgggattaagatcacggttatccgggtaggatatttcaccgtggcatgctctccgtggcatgcaagggggaactggtctgcagacgatgatcggcggcttgccatgactcttaccacgcagaggagtggttattacgtgtcatggccggaaaaacgacgagctccggtgatgccagcgcgattgaccgcggcgggacatgacggccggtccggccagcgacccgattcaccccacactggatattttcaccccgcctcgacgttatctactcttcccgctgcaagaatctcctaggcgggcgtgaattgtggcggcggatcaccggcctcgagctcacggcaccggagatctttatggtcactataccatgccgatcttcatcagacactctgacagcacgatttggagagctttgttctctatttttcatggaacaactcggtcacttatctgcaacaatattgtcgtccaaagaaccaactacaagtttgttataaagatcttactcagttacctaatca

SEQ ID NO: 60340 - DNA, 809 bp, Zea Mays
gagatttcactctaagtctgaatttcagatttgtgggctcaacttttgagccttgtaactttcaaactatagggtttttccctatgtcaccacatcaaagtagtagagcaaacaaaggagaacaacttttctttagagtgtgagcttagttgttgagaaaaaattagagataattaagcccaaagttggactgtcagactacttaaagtctgaaatcagactgacagtggactgacatgaacttcaggcttaatttcaagcaagatccattgactttttgtggcagcacaatatagcaatgttgtagatggtatattgctctacaacttttctacagagtgttgatcatgttgccatataagtttgggagaaaatcaagctcaaaaacggtctgtcagactgactgaaccctattcgccatggtacagtgctctattgtggatcagatcggccgcggcagaaaaatctcaccgccggtgactcccagccgtgattcgtgtcaccagcgtcaggattcacgctcgtggtggatggataacgtcgtggggaaaaggatctctaccgccggtgagctggaggtcactccggtgactcaccgtcatctcccccttctgctttgcggctggtgcggatagcttcgccggtgaaccactgcctctcggccctgtgccgcgtggctttgcctttccaccgcgacgccgtgactcgctacggctgtccaatcgtcgccggtgaggtcgccacgatggtggacacgagttcatgcgcgccagtaactccctgcccctccgaccgccgcgcgtcgccgt

SEQ ID NO: 60341 - DNA, 493 bp, Zea Mays
cgccccctagccactcgaagtggcgccaccccgcacagcacagtggcgatcttacgccggcgaacggcggtccagccacacagggcacctacatcaactaccgaggggtctacatgctgcgaagaacatagcgaacaagataggttgccacttactactgattatgcagcgtagcaacctatccatggcacaggacgagatcatggcggtgccatggttctggtgaggaatttgccaccactggaggccatcaccgcccaacaaggacacgaacaactcccacgaagttcgtcaaccctcacaaccccctgtggcggttagacatcgaccagccgtgagaaatccccatggcggcgctcagcagcacaagcctctctatctctccctccctcggtggcaatggctaccggagttctagttggatgggtgcgacatatgcctatatttatacttcgagccagggcgcttagctggccagatcgtggtggttact

SEQ ID NO: 60342 - DNA, 334 bp, Zea Mays
gccgcgaagaacatctccgtggccagccttcctcgagtgagtacttacccaattgtttcatgttcttgcttacaattagtctcctattgcccccggtatcaaccaatcaaatttcggccgaagcctttcaccagaacgcgtgttgtcctgaagaacaccgccgtaacccacccccaccgtcgacccgttcttcgggtcttgttctacccaaatcaaaggatgtccgtagaccctagtgtacccatgaaccttttcccagccttaattcggtcgtcctcgccgtcgtttgctcggaatgcgtttatcctcttacccaaccgctcggtcaccgtgg

SEQ ID NO: 60343 - DNA, 352 bp, Zea Mays
cgattgagatcccgtatgaggtctgaatccagctgaaccccactgcgagcgctcctgattgagtccagatgcgcggtctcccaggccctttccatggccacctccggacgcgcgttaccacctccaccttgcaccgtcctcacgacttcggcgtaagaaagtgaatgcggcgagtctgcactgtgtggcggcgtcgaagggtacagaggagagacagcagaacgcccttcagcagacagaacgcccttcagaaattatacatggatcgtgcgtagttagtttatgggcatggcattcttgcccgatgatcagttggatgtagcggtggagtacctgtgccataatctccaaa

SEQ ID NO: 60344 - DNA, 483 bp, Zea Mays
tgatcacccactctagaattggttaacaaatcttcattaattgttaagcattcgtgatttttgttaagccattctagggtggtaatcatcacctaggatgtcaaatagcatatatatgtgtgtcgcgcgtgtgtgtgatgattataggaaggaaatgactgattagtcaccctaattctaaataggcgcttgatcggttccctagaacaaccaacaaattgtcagatttaaaaactatgctcctcacacataggtagggtggacacttttttacaataaaccaaaaatcgaattgaactgaaatatcattttttgtagtttgattcagtttcggtttttgcatctatgaagttcggtgttgatatcgtaatcaattttcgccttgtaccaaaccaaaaaaactaagaaattgaaataccgaacttaagctattctaaaatttgactctttgattatataaactaaatgtgtgctgcaataaac

SEQ ID NO: 60345 - DNA, 661 bp, Zea Mays
ggattgttcagctggctttagtagatgaaatggctctgcacttgtagttgcgtaatgtttgtgtctagctgtctggattgtaccggccaagagttggctctaggtaccttgtaaatacctctggtttggaccatgtaatcttattttggaccagtttccagctgaaacaagcctcaacgtcatgctatggtgcatgtttaagtgcggtgctacaactttaatgtgaattattttcgagctatctgtgttctatgttctgttgagtatctgttttctttctcactgaactaaacaattttggtttgagatttagtacatcctccttttagtttgattatagcgtgtataattatgtattcatatttcccggtgccggatagggcgcccgaaggggcgccgcttgatctagtatattttagatggagcaagtattatcactactactagtcgttcacagccacgcttgcccctgtccagatgtgcccccgcccccactcgctattcccccgcgcccgccgcatccgtcgtcgcctctgtgctccttggcctcagcgccgcacgcccgcacccaacccccatcatcggtgtcgtcgtctctgccccctcctcacgatgtgaatctatgtgtcaccccttccctccctcatcgagacctctccac

SEQ ID NO: 60346 - DNA, 309 bp, Zea Mays
aggattcctattgtggatttggtgacccgactggaaatgatccttagaggcaaagtatcaaatattggtgctcctgttgcatattctgcttggaatttgccaccttccaagtcctttttcgattttgtgtccaatcctcctgctggcgatagtggtttgggtcttagagtgcgaccctctctcgaagaagttgaggttctggttgcttcacttggtgatcttcccaatgatgaaaagcaagttcactttgagatgcatatgagtccaggtgatgcagagataagtgctatgttggacatgttggctgag

SEQ ID NO: 60347 - DNA, 806 bp, Zea Mays
tggcctccgtgctactgtcgtctactagcttgcaacctccacaatgtcgtcgtcgatggcggtatgcagcttcggcatggcaagcaacccttagccctagccaaggtaggtcagtcgagccgccccgtcctgttccgcggtccagacgttcgattccacttccaccgttccacgccacgttgaacataatgcccacatgttccattccattgcactcagccacccagtcgtggagccaccactctctctttcgctgaaagcatagtagcataccagtctcgccgagtgaccacaacgatccccgcacacggcgagcgagtgggaaacctccctgcctatatttacacagtgtgggctgggctctcgtgtcttgtcccggcatcgacatcggcgaggaaggagtgtggagcttctacttccaacatcatgggccattgggtcggctcttcctagtgagctaaaaatattcagtagtttcggatatccgtcggggacctgtaggtgagaggtaaattttgtttcaaaccggtcaggtatgggtgtgacccgtgggtcaaaattcgtgtccgaactcgcgagtaaaattgatatccctagtaaggccctacgcaaaggtgggttccaactctggtctttctttattgacttgtggcatgggcgagccatcgattggtgctgactaatccaggtccaacactggcccgttctgaccatgttggagttgtatcgattggtatcgatcaatcagtaccaaacgctaagttggagggtctagtcggtacgaactgccttaagtcatatgtggt

SEQ ID NO: 60348 - DNA, 391 bp, Zea Mays
ctgactccgatgataaaaaccaactagtcagggaagatcttccctacttctcttagaccaagagaagaagaggctctcggcagttcatttcaaatgatgcaggggcctcgaggtctcatgatgggcgtggtcagacaactcgcacctcaaccagtcaccctcgtccaacactaaacccctaggcctaggagcaaacaagtgatgatgaaggtaggaaggatgatgttgttgctctttctccccctgatgctcctatggttagaggtctggttcttcacaaggccaaagctcgtaggagtaccagtaatgtgccaacagatttctgtgctagtggtggaatgacaatctatcaagatgctcattttgtgaatccaaccatttgcagtcgaga

SEQ ID NO: 60349 - DNA, 294 bp, Zea Mays
atcatggaccatctgcgcctgatctgatcaaatcaaatatcaaatgtaaggtgccgacaatacttgacgatcaaattcaacattataggtaaaggatgcgcttgatttgaggtggggagagcatacgatatgacaaggtctattctctacttcatgatgtggtgtgcctcccgctttagtttgttgcggatcttcacgaaggacatggcgacgacattgccaacttctggtttggggagccaaggaggtgctacgctaggctattgtagggcaaagatcgagcagtgcccaggc

SEQ ID NO: 60350 - DNA, 504 bp, Zea Mays
tggacccaggggatatctatcccccacaggtacaaccttggatattcagagacctatcagtgttcgcctaaaacgcccttgccgagccaatcaacttgattctcctgctgatgagcggaaaaagaaaaagagacgtcttcggcgagtatctagtttggatcgggatgttggtcattcggttcctgttgctgaggaagtgcatgtgcctgaatttactgacgctgaccccaatgggtgtgatccatctgccgctgatcccaatgggggtgttgtctgtgttgctgatgaaaacgacggggaggaagaagatgaggtccctttgactcagaagaacagtcggcaatatgtcgccagtggggaaagtagtggagttccttctcctgctctgtctgccctcattggtctacaagaattatccctggcgaactttgatcagactcttaaagatatggttccagaggatctgttatcagagccagcggatggtggtgcaacggatgtttg

SEQ ID NO: 60351 - DNA, 909 bp, Zea Mays
tcagtaatgtacaagagagaagccaaacacttacaaaacccaagtactcatgggagagagaggcctaacgcattccacgggtatatctcatatatatctttaaactctagccacatcacatcaatgttgttgaactagtggtcttgtacaagcacaccaaagtttgtcctaccctgactgataccttcatatagcagtcatggaaactgcacaattctgttgtcaattctgtgacctcttctggccacactagatgctaaccatgctagaatctccatgcaaactgatgggacgacacatttttattcatagattttttcttttctttacccagcaacgactcatagtcagagatagactactttattggcttactcatctttgcaaagaaggcttttattgaaggatatattggtgcttccttctttagaacactcttctagaagtgttccttcacctctaccatgaagtatggtctataatatgattttcctaggctagacacaccgacacacaatttatatcgaaacaacttagttatttcctctcaaacttcatccatagtggccgttggtaacccaccggtcctcgagacgtggggctcaagtgactgattattattatgtcgaccttctgccccaagatgatcaaaggtggcctccggtttaagcccccgaggcataccagtaccgcatcccactatcatctaacatggggtgaacctctctggctccctagtgattgaaaatattcagcctaatgcatgggaaaggtggcatgttgcgactttgatgtgctatgggagggagatagtagtgctgctgaggtgggtagaaaactgtgtgttttgtgcagcaccttgtcctacatagatatactcggacaatttggcatgggtggccgaacggt

SEQ ID NO: 60352 - DNA, 405 bp, Zea Mays
atggacatgtaatgaagttggatctttgtaatgattgtcaccaaggtgtgggtatcccctacaacttggtgtagttattaataaagtcagttatttagttgggtaatccatttatttccacttttctctttatctaagaagctgtcagtgaagatggtcatttcttcagtgctatgaagattctctatacatcttttgttatggtgaaagactgcagagtcagatttgatatatgtatgttatttatacagatgtctgagaacaggcgccgaggtgcgaggcgtgctcaaccagaatagcaggcaccccaagaggaggcagctccgcagttgcatttgccaccgccaccaccgatgaccattgagcaaatgttcttgatgcagacccaagcagtttaggcaatcg

SEQ ID NO: 60353 - DNA, 461 bp, Zea Mays
gttaggctatgggagcacttgaagcaccgagcttgtgctctggtaatggcggctgtggggggtctccctcgccaacgtgttagacagactaggggttgaagaagagtgcgaaccgttggatccacacggacggttcagattaaaacacagatatcttttcgcttcagtaaaccatgaccgtagatcagtggatgtgcgggtagggtttggcgatgagattttaaaatcacaaccattgatcctcgatctggcggtcaccgctcctcaccagttcgatgtagtttcgatttaatctagaccgtgcgtagttgatcgggtggccgggatttaaccatacccccttcgtcgtgcatatctttcaaaagagaccctgtgtttggtttaatcaacccgacgtccttgcggatgctgttgagtcttgggaacacttgcgcaggggcccctgtactctacagaatttg

SEQ ID NO: 60354 - DNA, 336 bp, Zea Mays
atgttataatgctgaaggaccccaagaacaagctcgcagacatccccagcccaaaggtcgtttgctgccaccaaatgtttctagccctcggtgaagcccacaaataatgggttgtcgtggtaaacgacaggccataatctcttcttggggtccttcagcattataacatcatagcctgccttctctgtctaactgcattggaaagtgcacttatgtctgctacgtgcttcccggcccgatcctgctccggaatttcgtccttcgtaggcagtaaagactctgggacctcacagttactagacattctgccttcctgtttggggaggaaaggaggga

SEQ ID NO: 60355 - DNA, 397 bp, Zea Mays
tgaaactgaaattgaaagcaggaatggtcacagtggtatggaggccaaattggacgcgccatatctttgaattcactcaattttgacccaagtatcctatagtaagtttgaagatggttgttaggtgaacaaactttattaatgaagtttgctctatccttaacaagaatcaagagatcgagaggctggaaggtggtcgtttcaggaaaaaactgaagatcaaactttgcaaatatttgaagaacacgggtaaaagatctacggcactgttgaatcagatgagctcgagcgatccagtgggggaatcgatccgggggaggatagcttcgaacgtggcaccatctcatgagttcagccgggcgtggccggagttattcaccggtggccgccgtggctc

SEQ ID NO: 60356 - DNA, 323 bp, Zea Mays
cttttaaaagagagcgaaatctttgtttttgtgtacaagttggagggttttttgttagtggattggtttcaagcagcatttagggtgctttatgtttgatatcacctgtcggaaagatgtttcattctcagaagccatcctgatttctgtgtgtacttttcaggattctggggagagcgcccaggcatggtggacttactgataagctgcactgccatgtaagtactttgaacttgatatgtttccaaaattgtaaaggtttcttagtggtgaatttttatgattgaaatctacctgctggtgtgcttctagtgcatgctttg

SEQ ID NO: 60357 - DNA, 426 bp, Zea Mays
ggggtaggactttaggttgcgttgtagcctgatacgatgttgaacgtaggggtgtacggatggagtcgtcctgtctcctccgactgtctactcatgcctcggtaatgcatgaggaatagtagaggccataatgaagggcaccctttgagccaatggtcttgccttggtaacagacgtataacaatgaatcccacatgttgcacactgggcgtgccatatgcatttaatgtgggggtacaccacctgccactagcgtgggaaagtgtacatcccgcccgcacctaatgttggtgggcccatgtgagaggcttacgtcaggagccacccatggcttacatcaggcgtccccggccatgcgtcgtcaccggacctctatctggggctctgggcaaggatcaggttcgagatcgtgtggcgatccagtac

SEQ ID NO: 60358 - DNA, 503 bp, Zea Mays
gtctcatttttttatagtcaatagtggatgattaggagagcataggtatccagttagttattctgtaggatataagagatggatgggttagggtaagaatagccagggtaagaaggtttatggtgtggaagaattccgtgttgggcgtaatgcatctgaagattgagtttgacttctctcctttcttgacgaggttgatccttttccttttccaatcttgctctttgctgtctctatccgggattgggacaagaggttaagatagatctattatgtaggtcaagttgttggatatggccgagttgatctagatcaccaatttaggcttaagtgtatggacttatcatttgtaccagcattaagtaaccctcactagattagatcatattagattagctcagatctagattagattgaatatgattagattagactagtttagatcacattaatttggattagatactgtttgttactctagtgtgagataaatatgcttatta

SEQ ID NO: 60359 - DNA, 375 bp, Zea Mays
gttgcattgggctcgttatgaggagacgaagcaagggaggtgctcaatttatagaggttggccacggttactctgaatttgggaggaatttatagacattgcacaagcgagcatgccgtggcactcgatggcctacaaacacagggacagtaattctaagcatgacatggttacgattacgtggtaaaggaccacagtgtggtggtagtcgagctcactggcgacctctgacaaccacggccattcgaccacgtcgcccagcccccaagccctccgataagctactgcctgtgacccaatccatctccccgccatatcttttactcccccgcgattatccactttgcgccgagcacgaatcgtggcggccggcgc

SEQ ID NO: 60360 - DNA, 817 bp, Zea Mays
tagatatgtcgggaagggtatcaagtgtgttcctgaggtggtaaggttttgaaacccacacttgctttttatgaggggttctcataggctgctcaatcataccatgtctctcaggggtgatagacttagatggagtgattttgataagcttaggagtggctgagggtttcaaggtttcaagccactccactaaccaaccttgccaaactgaacatcactcccagacctagaagcaaagagtattctcagtccgccagttctcctcttgaactaactgaccaccatgcccaattgaggctcactacacgacacccaactcaagatcaatcgactccgatcccttagtcaagttccagcactcgtccttcaccactcccggtccatcgacccgagacgctacctattggcaatcactcatcatcaattcgaaccataagggaaaagtcagccttgtgttcgcaaaggctcattatggtttcttgttttcatttaatctatgaaattagcttggcatacgaggcatctgtgtgtactttaaatgtcattatgtttaaactttgttgggtgtgtttaaagatccgggcattgttgcgtctgacgggaagctcaacgagagtccaattcaagcctgtgcataccatctaaaggagtcgttgccactagacctccccaataaagcttttgagtttaaaaggatgtgcggactttgtggcggaggcttatttgcctttttcattagattctgtctttgttgtgttgagtagcttttttgttggttgctcgtgttgtcggctgttgtgtgctcctgttgctagag

SEQ ID NO: 60361 - DNA, 505 bp, Zea Mays
gtattccttcatgagttcttctgaaccccgaggtagaacaaacctcgttaatagcttattccatatttgattcttgacatcatctgacacatctttccaatgtcggattgtgatgtcaagattatccctaactaagaacccaactgcattccgaaacttagggagtgcctcttctggagctaggggctgacctttcgggctcacatctgagattttatatgttttgtcagtaaacttgttcagtcctctatcacctcttttccagtcgctctgtgtccttttccttgacctctcggtggttgtatcggtcggtaccggtgcgtctttgtcttgattcagccccggtgcgtcttggtaatgtgccacgacttcatcaagtatcgcacgatattgagacaatacctcctattcatgtgtaatagacattatgaaatcaactaattaggtatacacatatgaaactaaagatgtgtactttacctcacactcttgtggatgataatcc

SEQ ID NO: 60362 - DNA, 1098 bp, Zea Mays
ctttggtgaagatgtcggcaaactgggaagtcattgggacatgtagcacgcgaacaacaccgagggaaaccttttctcggacgaagtgaagatcaatttccacatgcttggtacgctcatgctgaacaggattggaggacatataaagaacgctgatgttatcacaatataccaatgaggtcttagggagaggaacatgaagctctgtcaacaactgacgtaaccaggatacttcaacaattgcattgacaacagcgtggtactcagcttcggcactggagcgtgagactgtgttctggcgcttggaggaccaagagatgaggttagcaccgaggaagacatcataactagaagtagacctcctagtgtctggacaaccagcacaatcagcatcagagtaaatcacaagttccatctgcgaagaggggctgaggtgaaggccaaactaaagagtgcctcggacatagcgcaggatacgtttgagggctgccaaatggggttcccgaggatcgtgcatgtggagacagacttgttgaatagcatacacaatatccggacgggtgaaagtgaggtactataatgcgcctgcaagactgcgaaattccgtgggatctgagacagagtcaccatcagctgagagtttggggttgatatcaacaggggttgtatagggtttgcagtcactcataccagctcgctcaagtatctcaatcatatactggcgctgagagagagtgatgccagaagcatactgttgaacatgcatgcccaggaaatgatgaagatgaccaagatctttcagtgaaaactcctgttggagagcagtaatagtgcgccgtaggaggggcatggacgaggcagttaacacaatgtcatccacataaagaagaaggtaaatcatatctgcacccttgtgatagacaaacaatgaagtttcagatttggcctcaacaaatccaatttgaatcaggtgggaagcaaatctgttgtaccaagcacgagggcctgtttgagcccataaagtgatcaattgagacgacacacataatcaggatgagtggaatcttcaaaaccagtgggctgaacacaataaacagg

SEQ ID NO: 60363 - DNA, 494 bp, Zea Mays
gcaaataaaaacaaagaattgagtatgacaactttaaagttaacttctgtacctttatactattgtaagcaagggtatcagtgagatcatccatcgacatagccaaaaggccttcctcaagcttcggaaatcccatacttttagctatctcccagcaaacggatatctctttgttgtccgggaacagtataggaagtcatcttcgtcagtgccattacacactaaggcccccttcggatattttagcttctgggcgtagtgtctggcttctaagatttcttctttggataattttttccctgaagcatgtcgaataatgtaatcaacatctttggacgaagcttcgggggcaggagattttgcttcttctattatacttcgccccgccatcataccagtatctaaagtttgttgcttagttttatccttaggcacggcagccttcatctcaatgggcaatgaggacctagctttggctctggcctggactttga

SEQ ID NO: 60364 - DNA, 1188 bp, Zea Mays
agttcgtctttgcgcctcgttgccggcatttttagaaataatcactaagtgataactgatgacactggtgttttagaggtaactgctgagtcgtgcttgacactgtcggcgttttagaggtaatggccgagttatatctgaagtctcactttcctgagtgttgacttggcactttttagaaatggcgcccaacccgggaaacccccatttatactcatgtcgatgtgcgcttttgatttctgagccctaacttcacatttccgcctcgaactactcccctgttttccttagatttcgctcctgtttgttccatcgacaagattgcaatggcgccgaaacggaagaaacagagcttcgtcgtggctatcatcccgctaatcgaccccaacagtcaactgccattcgcgggtaaccatatgtctgtaatttcagagtttgatcttctgcgccttgtggatgttggggttttacctccaaaagaactctgttcttggcggatttgtcgcggagttactgttccgatggaggacactcatgagtccgtcgtctatgttccctttcttatctgtggtctcgctcttcccgtttctcccttcttccacgatctccttgatttttacaatctgaacttgacccacttgaaccctaattctatcttgcaagtttccatttttattcatctgtgtgaggcctatctcgggattcttccccattttggtctctggaagtatctgtatcattgtcggcccgggatggctgggggacagcaccaacttgttggcggcgctagtctagaactgcgccgcgggaggaaatcagagtatctcgacatttccctgaaggatagcatcaaagggtggcgcctcgagtggttcatcatggagaatcactgcaagtcccttacccctcggtcgggaaggcagccagatgtccatactccaagctgggtagagtctccgaccccttcggaggtaacagaggcaaaagtgttgcttgctgaggtctgcttattaaaagacagaggtttgactgctgaagctgtggtccctgatttcgtcttcaagaatattcagcctttgaaagacagggcatacccagcttatctgtacagtggtgtcaatgactacccaggtcaccaacaagagaattcctaccgaagatctagtgagccggctggacatgattctg

SEQ ID NO: 60365 - DNA, 289 bp, Zea Mays
gcgaagtcctggtcttgctcacgtgccctgtgcttgaatttctcccctaatatacttattaagccaataaatgcacgataattttgtagatcgacggttaggttatgtccagtggcagccacatgggcaatggaaaacacgaagtgtgaatgcgcgtgcgtaaacaagaggacgcctctatctaataaaaacgcgtatgcagatggcacatatagacttgtggagaagagataaaccgtggatttgaagtatgggaaggagggcactcatttttcgcatcctcgttcac

SEQ ID NO: 60366 - DNA, 368 bp, Zea Mays
attagatgtgcgtaccccattgcgcataattaaatcttgaccgctaactctagatcgtgcggaggatattaggttgcgcgtatgtgaaacctggacgtagatctatgatccaacgacgggatgcgtaccggttcagtaagaggttcatttaatctggtgcgttgaatttaaatccgacgaccgagaacccaccataccctttcggctgtgtagttatgcagatgagcccctagagtttttataaaacaacccgcggtcctggtcttttataaagtaattacgccaagcccagaaacttacagaatccaccctgaagttctagaattttatgcgtgcagtacaaaaagttaataaatcggaggaattaa

SEQ ID NO: 60367 - DNA, 652 bp, Zea Mays
atttttcgtgctatctagctcactgcgttgtgtttgccattttgagtttctttgctttcttgagctcgattgacttttgagcttcggcatctgcgcaaccattgtctaaatggctgagaagaagatcactgaccctgcgctgactggtttttatgaagctatggagaagaccaatacagaaaaaatcaccaatgagatgttggttgggttatctgagagttccagtgacagcgagagtttcgatgtagagggtgggaaggaggaagttgaagatcggccgtggaggcctagccatgttgtttttggaaagtcatctcttaagcaagggtagatcgaagtgatgaaaggtagatactttcgtgacatttctattgtgagggccagaggggagaatatcgttcctctttctgaagctaatgaagtggtagttttcagaagcttcatgaaagctggacttcatttcccactgcataagatgttggtcaaagttttgaaaacttttgaaatataccttcatcaacttataactgaggctcttatcaaagtaggggtttttatatgggccatgaggagccaacggttagagccagacgccaggtgcttttgtaatattcatgaattatcctatcagacgaaagcaactggaaaaaaa

SEQ ID NO: 60368 - DNA, 533 bp, Zea Mays
gccatacatccagtgagtcgctgaaccttcttttgcgaccgaggagcttccattttcatgatagcttcaatcttatctggattagcttcaattcctcggtggctgacgataaatccgagcaactttcctgctggtaccccgaaaacacatttttcaggattgagcttccatctataccttctcaggctgttgaaaaccagctgtaagtcttcgatgaagttttccggattctccgttttgattaccacgtcgtccacgtaagcctccacacgcttgccccagtgatcggctaagcatgtttgaatggctctctgataagtcgctccagcgtttttgaggccgaacggcatggaggtataacagaaagcaccaaacggggtgatgaacgccgttttttcctcgtcttcttttgccaaactaatctgatgatacccggaatagcaatctaagaaagacagcatagaacacccagcggtggaatccaccacctgatctatcctcgggagcccgaagggatccttcggatagtgttt

SEQ ID NO: 60369 - DNA, 673 bp, Zea Mays
atggcttcatctgccatctctcgatcaccattcatccacacttccgaatagaatttcccactaagggcagtagcttcgactgacggctccttgatgtcagtcgctgaaactgagaagtatggatgaattatagccttcgcatggtcacaactagctttttcaagtaaagatatagcttcccgagcgcctacacatgcacaaaacccccctgccagagagaacttcgtcgaatgctttgacttcgccctcaatccatttgagtacaccctcggggtcaccacgaataaaattccgctcagccgagaacatgccaacactaataaaagaattttttagttcgtctgagcacttcttggcaatgttatagcattcctccttcgcctgccgaagctctttaatattcttttgaaccctcatccgctcggtgtcagatgtctcgcgttttgattgctccatgttgaaattttcagtaacttcatcaagtttcttttccaatcctactacttcagatctgtgcaatccaacttgaatagataaggcatattctagatcagctatacgctttgcatctgcttctttttctttttcaaatttctgaattttttggtccacttcagagaatttggccaagctagcttcgcttgcttttaacctttcaaccaaagaaaccagg

SEQ ID NO: 60370 - DNA, 354 bp, Zea Mays
aagtctctgagtgattaaggctagtgctaatatcaagagtagagggcaaacggtgaattgttgtcctatgttttctgggaccctggactccttttatagccataaggggggagcccaagggtacaaaggtcgtcgtaatgttgagagggggtaaatccgagcccctgtagcggtatggccgtcagaatggtccttgtcctggctgttgcttatgatcaggaggaggatgtatggttcctgtatccgtgttttgaccaagcagagggccgaggccagggtcgggggcttggatgcgtacccgagcccatactgggatgagacgtttgagtcgtagtggttgaactaccgctcaac

SEQ ID NO: 60371 - DNA, 537 bp, Zea Mays
tgatgtatgtgcttgtcttgtttacatactttaatcaatatcaatatcacataaaaaaacataaccatgatttcattattagtaaagtattgtcactacatactttactaataatgaaatcatggttatgtttttttatgtgatattgatattgattaaagtatgtaaacaagacaagaggccgcggaggcagaagcaagcagatgggcgtgacgccgtgacgggaacgacgacgggtgaggaaaggggaaaataaagaaaagttttgtttgtatgtaatggatggcagtggtgggtaattacactccaacatcataagaaagttgaaaactagtctttgtgaagcaccattttacctgcttcataaaaaggtgaaattcaccctaacttaaccattttcttgtgaagctgggtccgtgaagctggaatgtttagcttgcaatttcgaaagcagagttgggtttcatgaagttgagcccaaacactcccttattttaggcttttttataatatatcgttaacatccttgctcctgtc

SEQ ID NO: 60372 - DNA, 315 bp, Zea Mays
ggagaagctagtttggattacattgaattagattggattaagttgagtttattaggattgtggctataaaacccaaacattcggttattattaattgtataagctagagattgaattaatcactctcgctcccctgtttcctgacaacggtgctccggagagcgatagagactctccaacccgtcggcctcggcgccccaacctagctaggcggagtacatctggacgcgcagtgagagtgcacggccaggccaaccctccatgccttgcatccctcccaatctcccattatgcaaactggcagcatgtcagagg

SEQ ID NO: 60373 - DNA, 868 bp, Zea Mays
aaataactgaaattacagggctgcgaactgggcgcgctatttatagggaactcaggggcctcggggtaaaaatctgtggacacaaagcactattcgtagtactacgggttaatttccatagaggttagggtctcttttacaaaacctacggtcgaaggggtatgggccacgatgggccattggattagaatcctacggatcagatcagacctacctgagattgaattggagcgaggtgagaaccgcacgatccatgatctacggccagatcgcgcactagcaatcgttacgcgactatctaaatcataaccgcccattgaaccacccacgacctagatttaacccagccgaaggggtatcctatttctaatcgtagccacccacgcgatgatcaacgggcatgaccacatctccttcctccgaccaaccgagacggcggcgccgccctgaaccacggtggtccattgccggaccacacccaaaactctactctggccgccgtgaatcgatccaaggagcgtaaactactgcatatgggtagtgagatcggtggagggcatcataccggagtaattcgcgacggtcgagcgggtccactgtaggggatttctcggagtagatttgaaatccggcgagcaatcaccggcataccagtcaccaaccgcaaccagaaagaagtggcacacggttcacgtgatcccgtatggcaccacggttgagctccagacctggagcgccctcgcggacgaacgttgtcggtggcggcacaccttcacacccggcgatgttaatttgggcggctggcgattacccaacgatatcggctgctcggtttttttcttttcgcgtgggttaatggagggtccag

SEQ ID NO: 60374 - DNA, 385 bp, Zea Mays
cgcgacactccgcggcgctgtggcgaccgttatattatattctaacaataatatacatgcacaggctgaacgtacgcacccacgtggattgtgtgtggtaccgatcatgcttgatctcaacatctgttggttcaatcaccgggtcgatagtaaccacattaagaccttgttatagttaacgttggtcaatatcgatcagtccgttggatggtagtctgtatcgattgatcggttacacgtgtccgctcctgattagtcagttcgttccatatcgatccgaacttgtgctaccattttatccatgtggtgcatctaattggtccacacgtgtgtcatattagctaactgttttaaaccgcttgtagtccaaaaaaatcaaaaaaac

SEQ ID NO: 60375 - DNA, 528 bp, Zea Mays
ggagtgcataggtatccagctacttattatgtaggatataagagatggataggttagggcaagaatagcctagggtgagaaagtttatagtgggaaagaattcttggtgttgagtggtaaagtatccgaagattgagtttgacttctctccttccttgacgaggttgatattgtccttttctggtctttgtctcattgagtcggggtcagtgtatatcatcgaagttgggggaatatggttaagataaatataggtgagatagactacatgatgtaggttaaaagttggtttgatactaggtggggatgattatacaattcttcatgactctattggttgggttaactcttatgctcacgattgagttggtctaaggcactagtttagttttaagtgcatgaggggtatggttttatcttttgtaccagcattaagtaacttactctagattagatcaccatagattaggttggatatgactagattagactagttaagatctaaataaattttggattagctcctgg

SEQ ID NO: 60376 - DNA, 467 bp, Zea Mays
ttctttttaatcttcatcaatccagcaggtatatgataatttttgaactgtgtactgaactctgcccaagtaatagtatcagcggcatcgtggacatcagtatatgaatcccaccagtcagcagtaggacctatcagacgtccagaagcatataaaaccttctcccggtcagtgcattgagcaatgtttaacatcttctctacggacttcagccaatcatctacatccagtggatcaggagaggttgcaaatgtaggtggcttatgactcatgaactccctatgcttatctcggagtggaactagtggtggtggtggaggcagtgatacttgttgttgttgctgctgttgctgttgttgttgaaattgctgttgcagctactgttgcgcccttctttcctggcgtatctcctctcgttcctggcgcaactcctggcgtatctcttctctttcctggcgcatctcctg

SEQ ID NO: 60377 - DNA, 391 bp, Zea Mays
cgtagaggaagaggggcctccccttttatatctctaggggtaggccttacatagttgtttctcttagatacagatagagagtcctttggttgttgtggtgggccctcctcctttggtcgtgcaaacttgtgcttccgtcatggtgtcgcccggtacacttgttcctacggtgggttcgtggctgacgtccctggggtgacatacgacgagtaccatggttcaacctcggggcttgattcatatggcacgactttctcctgtcgtcgtgggcccttcgctgtccttccgtatgtacagattcttctacccggtatagcgtcacgtcctgtcgcttctgacatactatttattatggagattctgctgactggtgccgcttggtcccatcaga

SEQ ID NO: 60378 - DNA, 354 bp, Zea Mays
gtttatttgttgttatctatttcgatgacatccttatttatagcaagtctatggaagagcatttagaacatttgcatgctgtttttatgctttgcgtgctgctcgcttgtttggtaacattgacaaatgcaccttttgcacgcaacgtgtctcgttttattggttatgtggtcactctgcagggcattgaggtggatagcagcaagattgacgccattctgggctggcctacaccgacgacagtcacacaaattcgatgttttcttggacttgcaggattttaccgtagttcgtgcgtcattttagctccattgctatccctttgcatgaactcacaaagaaaggtgtgtcttt

SEQ ID NO: 60379 - DNA, 435 bp, Zea Mays
gtgtagcccttgtcctcaccacaaaacaagcaaaatggcttccttggagtcgcattaaacctgccaccaaagcttcagcctccccttccccctcttggagcaggcggatgaaacatgtagtgggaaggctgctgctgggagcttgcctgttgttggcttgactagccctaggattgggttggcttttcttcaacctacaccggattatggatgcttcggacatgctttgggttgagccttcctccaaagccctagccggctcctgtgtatctgtgcaactcctcccttctttggtggaagtcattgtcagcccttatctattcatccatcttctataaacttctctagagagtgtagagcttccttgtgaagtattgggctgctggtcctggtctgagccccttgaccatggcttcgattaaaatttcatcttaa

SEQ ID NO: 60380 - DNA, 813 bp, Zea Mays
gacacctttacttcattaagaaattatgattctacattcccttaggaacaactctagagccttttgacacttttactttagtgttcaaactttttgactctacattcccataggaatgacttcggagcctttttgacacctttactttggtactcgaaaattttgactgcattcccttaggaacaacttcggagtcttgatccatccttgatgtgaaggtcttcgggatctctttggtacctttactgcactcgaaggtgccagcctagaattacatttactatttgtaacaaaagtgcatatgtatcttcataatgtggcgtagaaaaagggaacatcgaacaaaagatatgtaaagttctttttgatggtagtttcaactttgttgacctagcccctcaagccttaatatacgtgcgggctttggacacttcccttatgtcatgttgttgcatgtcctgtacaaggaatttgatggctgattaggacctgatcaaatggaggtggtcctggaatgaagtagacggtagccagcaactaagtacaatattgcttgaagcattggaagccaaaggttgttgtgacttcaagtcctggtgttggacaggttgtggaatatagggtgaatagtacgaagatgtactaaacacttcctttagctgagatggttgggcagcaggtgcaacgactaactctttttgcttttgaattgttatctggcaggttcttgtggtgtgacctttttttcttcacaaaacacacaatacatcttccttggttgcgtgttaaacctacctccaaagcttcggtatc

SEQ ID NO: 60381 - DNA, 1136 bp, Zea Mays
atagtaagtttggagattgatgattagtgaacaacttttattaagagggatcgctctgttcctaacaagaatcgagagataatcgggtgggatcatggccggttcaggcgactgaaatagatgagccatggtacagtgttttggatggatcagaacgccagctcagctcgccgtcgttgatcaccgtccggaatcgtgcagggtgttgggtggataacaccgggaaaaaggtagctcgtacgtggcaccctctccgtgctcggccgaagttactcaccagcggccgccgtgactcagtggattccgccgcagtggcactcatgccatagttctccctcactgtatctctttccgacgtggtaagcatgtgcgtgtgttactctccgtggccgggggccatccgttgggccgccgtgcctataaattgagcagggggtcacggcgaggtgctcgctgatcttcaagtgagctcagatacaaccagaaattcacactatcctctccaccttctctcaaatcgattgcgcacggtgaaagcccagtcccttatgatcctatagcctcaatccccacccctaatttcatccagagacgttgaattgccactttccccaattcagtccgccgcgccacccaaaacagcccgcccgtggccagcgtactctggtaagtcattgtccaatccttgcgtcgttctagtgttcttgcatactcgcgaagctcacggtggcgaccgtttgctctgatcgaccgtggtttggcgagaacatgtactcccgttctcggttcccgccgtgcacgtggaccggctgttctcggggtgctagagttaaattagtgggtgttccgaggccgtcttaggtcggtaaagcctccccgataatcggcttgagcaatcatcgccggtcatggtcggtatgtgcctcggcaggcgtgaacgatgagcgcgccgcggtcgaggactagtttggagaagaaatagaaagtcgggggcgtttctgtgaagtgtcagcgactattttaaatagggtttggagttcttcaggttattcaatactgcaggggtctgttcgcaaaatcgccggagcgcgtgggcgcgcgcatttcttctggtcgtgggccgccctggactggat

SEQ ID NO: 60382 - DNA, 471 bp, Zea Mays
ggacaccagttgggcccaaaccttcacccacggcccaactgagctggcaccccacgccggcccaagttccacaccacgctctgtcactaacttgtgggcccgctctcatgaacactttctctcttcggtgccatcgatgcagtttctaaaggtccagctttagcaggagcgttggctacgctcgcaacaacagttttccttgcatctttagtctacacgctgagagcttcagcagagataggagctgatgtatttatggattccagaacagcgtctagcacgctagccattcttctcttccttggagtcactgcggaaatgcttgatggcttcggtaatcctattgtccctggtggactcaacatcttcaactgatctgttgccttctctaatttcgactcttcgatcgggtttgtactagccccgactggcacaacatgacctggttctatcgcaggagcaacccctgca

SEQ ID NO: 60383 - DNA, 427 bp, Zea Mays
cttaaattaaaaaatttcagagattgtcgatgttccaagagtgttctaagtcttcgccggatgacgttgctaacctgtaagcacttggggatgcctttgtcttgactatgtatggcccttcccacttcggctctagcttgccccgggcctctatgctggtggtcctcacaagtactaggtccctttcgttgaattctcttgggacgacagtgttgtcgcaccatgctttggtctggacctgatacttattgagggcctatagtgcgaggacgtggtctccatcgatgagatctttggaggtcggttcatcgacgtcgggacgactgattcgtttgtttggggggactcgtgctttaactcttgcggtgtcattgcttcggatccgtacatcaggcggaaaggtgtgaacccggttgctcagcactca

SEQ ID NO: 60384 - DNA, 790 bp, Zea Mays
ggattgtctcgcaccccgaagggttatgattccatatgggtgatcgtggatagattgacaaaagtggctcacttcatttcggccaagactacttacaagggttctcatttggccgagttatatatggctcaaattgtgtgttgtttctgatcaaggatctcaattcacctcaagattttggaagagtcttcatgagaacatggattcgaagttgaacttcagttcggcctatcatccccaaactgatggcaagactgagaaaactaaccaagtacttgaggatatggtaagagcttgtgcccttaagcatggaggcagttgggacaagagtctaccatatgtcgagttctcttataataatagttagcaggccagtctgaaaatgtgattatttgaagctttatatggcagaaaatgcagaacttctttgtattgggatcatactagtgaaaggcagttctctgggcctaagattattcaagaggcagaataataagttcttatgatccgggagaacttaaggatatcatagactcggcagaagagctatgcggataaccagagaagaccactggaattcgaagagggtgatcgcgtgtacctcaaggtgtcaccaattcgaggaatgagaagattcaaagtgaaagggaagttatcctctcgctttattggacccttcagaatctttaggcgagttgaggagatgtcttaccaacttgagctaccagatcatttgtctgtgttccacatgtctcaactcaagaagtgtctccatgtcctagaggaacag

SEQ ID NO: 60385 - DNA, 376 bp, Zea Mays
aaaattttgtccatttgaaattgtataaggcttcaaacccactgctcccatagatcttttgtcattgcctgtgcaggaacgggtcaactttgacgctagcaagtgagccgagttaatcaagaaccttcatgaaaaagctcgagcaaatattgagaaaatgaccaagaaatatgaaaagtgtgccaacaagggtcgaagaaagatgttgttcgaaccaggagacatggtttgggtacatctacgcaaagaaagatttcctgaataacgtaaaagcaaattacaaccatgagctgatggtccattcaaagtgcttcgcaagatcaacgacaatgcttatgaaattgatctgccagacacttatggtgtgagttccagt

SEQ ID NO: 60386 - DNA, 309 bp, Zea Mays
gttttatgttggtccattctttctcctcagtgggtctagttgccctctcctccccctcctctcttttaattttcacattggtcaaagccataacaactgtgtgtttcccattgcacctcattactttcgttgtcctaggccacaacctaggtgaccaagcccagtagcctcaaccgcttgaccttttcccctcccttcatacacgcctttgctctcttaggccggaacctagtgagcgcagcgcgacagcaataagcagagccaccacatccccatcccatagccattggcagcacaccctctttgtcg

SEQ ID NO: 60387 - DNA, 604 bp, Zea Mays
gtcaagtacaaaaataaccaaaacatcaaaggagaaaggcgtcactattttagaaataaaacaaagtcaagtagctagtaccaccaacagaattcgtttcacaacctccccctacataacagaagtgacatcaagtgcatgtttaagacttgtgtaatgaatctaaaaaggtggggagaatatgtgaacagacacatttgtgccaggaatgcaaacacttatccatgggattcttattcctaacatttgacattgtagtgcttgtcaaccaacaaaacatatttgcttataccaagttaacagaaaactatactaaagttggacactagaaaacacaactgtaattattcagaattggtaaatagtgacaaacaaaagcaagcaaatgcataatatgacagacataatagcaaaatgagtaaatgaattgttcctgaccaaaaaatgaaacacagattatgcctacagtgctgcaaattatatataaaccatgaaacatcatcattagaacaaggtgtagatcaagttacccagattagcttgtacgaaccgagtgggatgcttccccatcatgtgttgatcgacgttagtgcttctgcaaaat

SEQ ID NO: 60388 - DNA, 440 bp, Zea Mays
gcggcgcggtggtttacggcgggacggtggtttaggtgtttggcagcggtggatatgaataaatctcacggatcggagaagacgcgtacaggaataagagagagcgcttcggccagggaaaaacgattcattaatttattcctatagatcttacttcttaaaaatatttctccaccatataacacaaatgaactctatatcagctggtttgagtcgttgcttcggagcaaatggtgttgggttcgaattatgggttgctctagtttttttgttgccttttaggcttgcagtgtgctgcccacaggccagggcatgggcaggagcttaattgggacagcatatgttttcccgacagtgggcaagagcttaattgggacatcatatgttttcccgacagtcggtgtgccacgcataatcatttataccgacggatgaaccgc

SEQ ID NO: 60389 - DNA, 312 bp, Zea Mays
cttgccaaaagtattttattctagtatggtctatacttctctcaatctattagatctgatctcactcttgtgcttgtgacatccttgtagatgccccctgaccataatctttttgtctgttgggattcttcctattccgtcattaaattgctaccctttgactatttttattcccttagtattgacatgctcgtacccctagattcttcaatactcttgtttcaaatacttacatctgaatttctcctgcctacttaaacactctagtttatatatccatgaacttctggtcttctgagatccctccctatt

SEQ ID NO: 60390 - DNA, 855 bp, Zea Mays
ttgtgcatttgaaaaccataacttgaggtaccttccataaaatgggcataacttttcgtttggtgctccgtttgagctcaattttttacagcagattcctgactccattctggggttggttcgatcaaaaaattcaaaaaaaatcgggaagataattaaaaattgtttaagtgttttcaggaatttcagagatcctttgtgattttctctaggtcacaatacaactctgtttcaagtaaaattttgtgtgcttccatcctttgtgattttggatcagtggtaaaaaattcagcatatttcaagctcttttgctggtactcctttggaaacacgcttttgatttctactagtgctgaaaaatctgctctatttacagaactgccattctgctggtaaaaaaatctccttgttacctttaccttattgtgcttcgataggacacgtctgagccagcaattgtgacttgtgctttggacacttattgaacttcgctaatctgcactcgatttttgctaatccttgatattaatttttagcctcccaagctccacatactttcttctgatcaatacagctttgaccttgcaatcggcaatcgcggtttcactccctcttggtaagtatcatgaaccagcctccaattgtaccatcttttgctttgtatttcgtcagacactgtaagagcttggtaagatataatagagcgtgttcctgtgttccacctgagaggagcgtgtagtgaaattattagggataaccttcaccgtttgtttcctgtttttgtgtttcgatggcaggcgacgaagaagaagcaaggatccctacagacttcaatgaatgtgttagccgtcaaga

SEQ ID NO: 60391 - DNA, 408 bp, Zea Mays
caaagaacagatttcgcctttcatcgataggtttgctgaccgcctgctaagctggaaagcagaccttatgacaagggacgggagaaaagttatggtgcagcatgtgcttacaggcatatttggcaatggccattgatattcctccttgggctttacatgctattaacaagatcagaaggggatttctatggagaggtcgcaaagatgccaagggtggacattgcttgatagcctggggaagggtatgtcggcctctagatttaggacagacaagtggctcttgggtcagagagtgagtggtctggctcataggttgtttgcaattttaccaaaaagaattgtaaacaatagatctgtgctagaggctttaaccaacagaaaatggatctctgacatcaaaggggccct

SEQ ID NO: 60392 - DNA, 604 bp, Zea Mays
agaagtcttactttgaagtttgagtagaacaagctgtcaataatgtgttgtcacctatagcaactaatgtccttttctagcttcggaaatccaacactcttagataaagtacttatgattttagcctcggcgcggtcgcaaatgcatcccaaaatctcttcatcgaccccgccgaagagtatggatcgggactggtaaccgcaggatatagcaaactctttcaattctgatttgtcctctttgaaaagtagttggccacccaggtgccgaaggtcgaaatccttatcttctgaagagacatctccaattctttttcccttgtcagaaggcgatgcggctacgtccttctcagcaaccacatccgatatgagtctgtcgatttccgacattgtggttgcgagttcatcagctttggctccggcggtatcttcggcatcgacaggcatagctgcttctgtcgccgaagctgtgggtggcgtctgctcaatagcttgcatcacattcatcatccgtcgtttcttctgccccctggccttcccctccgtagatggagcggtttcctttgattgcaagaggctagtcaaatctaaccttagaggactta

SEQ ID NO: 60393 - DNA, 492 bp, Zea Mays
attcaaagttcagcgcatccattactcgattcaaccttcgctttggtcgagtttcgaaggccgtagtcatcagttgatcttcttagttgcccaaaatctcattgcacatagcctcaatcatttctagccactcttagcaaggctctttgaattgtttcttgaacatgaagtgatagggcaatcgaacaagttcattctttttcttttctcctttcagcttcggcatattccattcactcaacgtcggaaataccccataggctaagaattcttgcaccagatctctagtgtcgttctgctcagtcacaactctaaattctgccgcagcctgttggcatggtgaccccgacgacatacggcacaagggcctagtcaacccgtagctcaaactcagcgggctcaatactaacgtcttcagcttctcccttttattctcattagctttaacatagaaccactcacttttccagccagttggccacttggtgcggt

SEQ ID NO: 60394 - DNA, 761 bp, Zea Mays
ctagcgttattaattatttctggcagtaaataattagtacaaaatgcacgtttaataatgggaaaatgtctttttgcaccttatgtggcgatgctcatgcattaattttggtatttattttttctgtattaataattatttctggcagcaaataattgatagaaaataattaaattgcatgtgaaggctatgttgggtatttttaaatcgctctaaatatttgtgatgcgttgagtttctgattcacgccgagcgattaaatattatagtgggtactcgacacactgatcaagctatgttattatcgactgagttatgacattagctgaatattgactgcgccctggcaacacgacgcaatatttgtgccgttcgaacttggctgcgtcatgtgattgctatgtcgcgctctcgcttaatcggatcgctcccgttgagtcggaccgccatcgccgagccacacattttttgtgggccctaaaggcattgcatgtgtgtcgcaactattgagtcacagttgcgcttgttgtgcctcttgtgcctgttgcgcgtacttatcgtgtaccccaactaccaagccacgactgcgtttgttgcgctggttacgaaggtttaatgtgttgtcgttgccctgatggccgcacacgcattgacgccggatacgcttgagcttgtattcgtgtggattatggtgggttgttcaagcccctaaagtcacattacgtgcaacctccgtaaacaattttgtttgattatatatt

SEQ ID NO: 60395 - DNA, 516 bp, Zea Mays
atcatccccaaggcaaatgggaagcttcggatgtgcatcgactacaccatcctaaataaggcctatcccaaggacccgtatccacttccacgcatagatcaaatcgtggactctacctccgggtgcgacctcttgtcctttttagatgcctactcgggtttccatcagatccgaatgggtagggaggataggaagcataccacttttgtaacagtggatgggctctactgctatgttgtaatgccctacggtctgaagaacgccttgccaacatttgtacgggagatgagtaagaccttcggggacctgattagggacaaggtagagatatacgtcgatgacatcatggtcaagactaggagggggtcgactctggtggaagacctgaccctggtctttgataagctgcgggtgacgcgcacaaagctgaacctagacaaatgtgtctttggcgtctccgctggggagctgctgggattcctggtttcacaccggggcattgaagcaaacccggag

SEQ ID NO: 60396 - DNA, 682 bp, Zea Mays
tgggagaccactagctctttgttctaccatgggtgagattgtttggatattagtttgttgtctttcccccattggtttgggttctgtggtgcattactatttgccctatatggttcataggactgacccttcctttccagccttctaggcggagccggaaagtactcacccccatgtgcttgggatgatgtattaatgggctggtgcattgtatagtgtgatgggaagtgttgctgggacaggtgaggatttaggtaacaatcctcctcaaacaaccatgtgtcggaccttccgtcgctgtatgcggatggtccgactgggtagtttagggcttgcatagcatgtggtggcttggacgcatatctcggtaactcattaaaaatgggaccggtcgttgctgacccgaacggtccacgctcacgtgcagacggtctggacatgcgcagatcggctaatttatcgctgatgtgtgtaggaggttgtggttgctcaaggtatgtatcaatcggcattccataaagggcttgtcactagtcgtgacaacctgtagccgatgaattacgcgtgtttccccccaatttaacctcgtgcgaaggaaaatttgcaacagtagatttatcaaacgcacgtactagccttctataatctttttgcatgccccctacgatattttgcatttggt

SEQ ID NO: 60397 - DNA, 627 bp, Zea Mays
cgttggggtcggtgcgaggggagaagaacggtctcggtggccgtattagctcgccgccgccgtgactgcgcctcgctccgtggacaaaacctctgcccgtgtcaatcaaggtgaggatctccgtcgagtcttcgtttccctctgtgtaatgcatagcgcttcgaacaaaaacggattgcgggccattgggtcggtaattgctcaccggagctcaagcctcaccgtggagccgccatgaactctagttagctctgtagacctgacccctaactttggtatgccccttggcatcttcgcctcattcgtaggatcgtgtggcaccaatcggaatagagagtagggattgggggcgccggctccaccaaccccggcgaacccgccaccgtggggaaggccttggcgccgccgcccggtcacctgggatgtgggagcgttcctgaccgcgggatctaaaagcagcggtcgggattaggggatggcctggtagcattgatttgataatcagcggtagagtttggatcttggcgcaggcaagcaggtgtcgttgatctgagatctgacgcgtagggttaaatcacggatattgaaaatcgagaccatagaatcttgatccgatggccagtatgg

SEQ ID NO: 60398 - DNA, 768 bp, Zea Mays
gcctccccttatgcaggcatgcatgcagctgccctcccactcacctcgcctctcgttatggcgtcctgcatgcaggcatacagctgccctcccactcacgctacatgcaagccgtactgtcatccttcataacgcacgggcacgactgtagactaggtacgtagatgttggtattgacgtagccgacggctgtgagaacgtgcacgacatcaacttgtctgatacgggagcatcggcagcagccagccccagcccctaggtcctcctactcctggcttcccgggcgagaaatttatttgtccatttgtccatatctagctggatcttcgtggctccctccactcacgctgcatgcaagcatcgaagccgacttacccaacaactgctatcggccactatgcactaaggaacgctatgcctaatgacgtgtgaacccagccacatcctcggaccatgcgtcataaggccatacaacccgtctcttctccatggtgtgtgagcaaactggcccgcgtcacgcgcgcgttctagaaggacctgcaacgcaccaagcgcttcactaacaaatggacaccgtgatgtcgtgcccccgcataacgcttgcccccgttcccctgctccgtcgtcctcgtctgacgcccccatcccctcgggacgttggttggcaagagggccggtgaggcgactcgctccgctgttcggtttgggagagatctggacctgatcggatcagtcagtgccaccgatccctgatcgagtggcgtaaat

SEQ ID NO: 60399 - DNA, 518 bp, Zea Mays
agcaagtttgtctaggcaatgactacctttggtgaaggcccaagtgcagaggtcttcgcaaagcattactgcttgcattggcaaaagaggtattctagtgttggtattgatcagtttggaagttgcaccttcaccccgaagaccaggaagacaaaagagaaggttgtcgaactagcccgctgcgtaacaaataaagtgggggggatggacggagaattggttttatgtgcgatgccctgaatgcgaagggtggccgcgggagagtgcactaagcccatttcagttagaagctttccttcatttctcgatcgaggagaggaaccactatgaccgggccatcggacgtgtcgttgttacctacagcagccaggatctggtcgaggaatacctgtagtgtgggatctggccgcttacccgaggttggatcgtgggtcctgttgtttactttttttattgttgtgaaccataaaacaaggcaacacaattgttaaacgttaaaagaccttcgtccttcgaag

SEQ ID NO: 60400 - DNA, 315 bp, Zea Mays
tgtcggaagaaaagaccgaaggtgcaaaggctgaagtcaaaagattactctctactggtgtgataagagaagttgcatatctagaatggttagctaatatagtcatggtcaagaaatcaaatgacagtggaggatgtgtatagatttcatagacctcaacaaagcatgcacgaaggatgagtttccgttgccaaggattgaatcccttatagatgcaatagctacttcagagcttatgagcctactagatttgtactgaggctagcatcatattttgatgaagaaggagggtgagctgaagaccagcttcataac

SEQ ID NO: 60401 - DNA, 271 bp, Zea Mays
gaagaccttcaacagaggtgaaaacttccatcatgaactgaagctccctgtaataatcaatattattctagaagcaaatggtgagtcatgttcccccaacagacatatttccctctacgcaaactgtctgcaaaatttgaagatattctatgaagttttgactatgtgacactgccgctctcaagcccggcactgtcggataaggagttttgatccttttatgctcaaactttatggttcacctttcctcccttgtatcttgctacctcca

SEQ ID NO: 60402 - DNA, 398 bp, Zea Mays
cgcgaagtctggctgggggaagaacgacgacctcgcgccgtccgagtatgattgtgcgactgggattaaatctccccaggaacgtctctggcggttggatctgttttatgcggcctagattaggtgagcaccaggattgggctaagggcgtggggatcgtccgattgggatcggagggccgtaagcgaatgctgatttgtaagcaggccgatctaatctgggccgcctgtgtgtaaacgaacggccagatttgagaatacctcttcggtcgtggctttttagtaaagagaccccgtagatgttagatatcaatccgcagtctagggctactgtgctctgtgtcttggagttcttgcaccgaggaccctcctgttctcagattttgaggcccagtccag

SEQ ID NO: 60403 - DNA, 1051 bp, Zea Mays
tgcgaaccaggctgaggttgtcaatttcaagggcgatatggcaaggcttttcaacatgagtgatctcgaaccactccactactacctggggatcgaagttcatcagctctatgattgtcatgttgtgccagagtacctatgcaggcaagatcatcgagaaggctgggctctcggggtgcaatccatgcgatactccaatggagccatgcctgaaattgagcaaggcaagctcaaatcctccggtggacaagaccatgtaccacatcatcatcaggagcctgaggtatttggttcacacacgccctgacattgcgtttgtagttggctatgtgagccggttcatggaggctcccacaactaagcactagagcaccgtcaagcatctgctgaggtacatcgctggaacaaagacccacaggtgtgtgtatcaccgcaggaaaggaacactggaattgatcgggtacagtgacgccgatcatgctggagacggtgatgacaggaagagcacctctggcgctgtcttcttccttggacagagcccggtcaattagcaatcccagaagctgcgtgtggtggcactatcgtcgtgcgaggcagaatacattgctagcaccaccgcggcgtgtcagggagtgtggctatcacgcctactggcagatttgttgaacacaaaggtcatcgtgtcgctgctctacaccgacaactagtctatgctcacccttgccaaaaacccggtgctacatgatcgtagcaaacacatcgacattcagtttcatttcatccgggactgcatcaacaatggcattttggtggtagatttcatcaggaccggtgaccagctagcagatttattcacaaagccactcccacgcgcacgactccaggagctacgcatccatagtggtgtctttagtatagaaccaacacaacaagattaaggcggagattgacaaggataatcttgtttacatagccgttgtgcttagtcttggtgcctaagtttaggaggtagtggttagtcagacgtagcgctcctgtgcgtccatgccgc

SEQ ID NO: 60404 - DNA, 589 bp, Zea Mays
gcatcttcttaggccaagggagccctcgattcttgaatatgtgaacaaacttgtggttggctgctagtaactgagagtgattgaggtctagttcggttctcatccccatagtagcccccgagggaatggctcgacttgatgagttggtcctgaagtccatctaaatgaagggatgaacattgcccttaatcgcatgttgggctatgcttggggcggtaatgaaatgactattacggtgtggcaccgttattggtgttacgttgcactgtgcactttttcagattttgatgcgagtttgggatataaaaatgcagtgacgctggttttagggttttctttatgttttcattgcttctctgttacgactgttgccattcctgttgctgctggtgctttcttctttactctcgcttgctcatagtcgatcgactacaacgccagcaacactggctcacatcaagcagactacatgttgccgcctatacgtgatgttgccctcttcattgtcattgtctagcagggccatgtcgatggactcatcgtcgacgaagaacgcggtgagcgcatcgccgccactgttggacaatca

SEQ ID NO: 60405 - DNA, 432 bp, Zea Mays
tcttaacaagaattaggagatagagagggtgaaaggaggccggttcagtaaaacaatgaagatcagagaactggaaatatctgtagaaggaaaagatcgctggttaatgtagttttggatgtgtgcagttgaagtggagataggaacgaccgcggaaagataactacaggctgattcatggtcccgcgagcctagctggagcctggccagagatttttcgttggtgctcgccatggcgcggtattttgtcactgtgtcactcacgccaccaccttacctcattgtgcctcttccttacatcgtagccatgcgttaatgacatgtttcgtggccgctgatcgttagccggaccgccgtgcctataaatagtgctatgaaccacggcgaggcactcaccatttcaccagtgagctcgattgaagccaaaatttg

SEQ ID NO: 60406 - DNA, 429 bp, Zea Mays
ggtgaattggcagggtttaggctggtggcatgatcccattggtgtgggatggcaggtgtggggattgtgtggttgcgggtgcggtggtggacatggtggtggttgctagaatggtgtcataacctggcaggccgtaggggtagctggctggttgaacggatgaggacgtcccaaccgaggatatgccgggaagctgcagctccatggaggacatccaggaggagagcaatgtgagttgctacaccacgaagcgctggtaaagtccaatgtggcctactgcgggtcgctagcggctgggcagattctagcaccgtcgccgctggtgtggagctcggggttgggggactttgttggaacctggcatctctgatagtagattcgtagagctcgagttacagggttggtagtggtggtgagtaggggggcgag

SEQ ID NO: 60407 - DNA, 584 bp, Zea Mays
ccggggggtgaggtttttaacgaggcgaagccatataatataataccaaaaagcccccacacaaacaatccagccagtatcatggccatgggtgttgaaaaagaccatggcaacggtcttcgacattcaccgcacaaaacagtcaccgcaagaggcagcctagactgccctcgcgtgcgacatgtccaagcaaaatccgcctaagggtgcagccgggcatgcacaataagtgagcaacatcacccatagggtgcaaagtccgagcaaaagccgcctaagggtgcagccgggcatgcacaataagtgtgcgacatcacctatagggtgcgaagtcttttctataagacacgtccgagcaaaagccacctaagggtgtagccgggcatgcacaataagtgcgcgacatcacccacagggtgcaaagtcttttctataagacacgtccgagcaaaagcagcctaagggtacagccgggcaagcacaataagtgtgcgacatcacccacagggtgcgaagttttttctataagacacgtccaagcaaaagtcacctaagggtgcagccaagcatgcacaataagtgtg

SEQ ID NO: 60408 - DNA, 711 bp, Zea Mays
ctccggccccgaatgtgaataagtctcgtattccagctctgacaggtgcaaatttggtccctttaggacatcgacagaggtctgttcgtgcccccgaaggattgatgcagatgcagcggcgttcgatttttgatcggatttccttctcccgccgctctgtccgtaatcatgttgctgttgatcgtccgcattttcaaaattattcaaatcgcagagttggccgcatggttcgctcaggatttcgggcttcgctagagacccctcacgttcccccatgggccccgcggatgttggtttggaggcccaagaagattttggaacagtgcccggagaattttggacaggattctgcccccggcattaatggctcttctgtccccgcggcgtcgggtgaccggtttttccgggatctttctctctctggaaataattctcaaatatttggtttatcgggtcagaagtgcaatcgaccggttgtctcttttcccgataagtttgcgaaggcctcctgggggtttcctccgcgcttatggtttcggcctcccctgctttcgcttacaggtgggccccctcacccacccacttttaacaactttggtgagttctctcaggcggttctttcgagtgccgacgcttcaccttccacggaacttgcactgttcacaaaaccccactccgcgccgctgccctggacgactccgtcgccgtcgt

SEQ ID NO: 60409 - DNA, 414 bp, Zea Mays
attacagctgcagcattctgaactattcgtgtttcgatatggatataagctctttgataaatatctaggtatcatagggacaatacttaaaccctaggaagacagtttttatgagtagtacattcatacagtttttaaaccatactagagtctttatcttaccctatccaactactcacgcatgaacggaaaagaaggcagagttatcatttgccttttttcttgagtcgcttcaaacttgtcaagagtgacactattatcctatcgccaattcaatttggggggtcgggctaaggttgttagagtatgaaaacgctggccgtagtggaagggcccaatactccatccagctagcaaaacaaccttatcatccacttgttcttgcgtcgtttctatataatctcttcacccgcc

SEQ ID NO: 60410 - DNA, 626 bp, Zea Mays
ttaatgactgctgccttcgacacccgcccaaagcgaaggctaaaccgtgtgatggatgctctgaactttgagtatcctgattatgaaaggattgatgaaggggccggaggagttaaaaggaagagaattgtcagcattctgaataggtaggccatgcggtcagttaaagaggaccagaatactttgaaaaagcaaaaaactttatcgtagccgaaggaatcggctcccaagaaacgaaaacttgccaagttatcttttgaggagacgaaggtacaagatgtgttgaagcagattatgagcccttcttcatcttctattgccgaggtctcggagatttttaaggtaatgactgaacctttcccatttgccctgctaagtcctttgaggttggatctgaatagcctcttgcagtcaaaggaaatcgctttggctgccgatgggaaaacggggggcaaaagaagcggcgtatgatgaatataatggaagctattgaagagaccccgccctcagcttctgcgaacaaagctactatacccatcgatgtcgaagttaccgccgcacccgaagccgagaatctcacaaccaccctgtcgaaaatcgacagacttatatcagacgtggttgta

SEQ ID NO: 60411 - DNA, 511 bp, Zea Mays
gagagcatcaaactgcctgtgttgccgccatgccacgaggtcggccttcgtcgcttcaacccgaggaccaatcgccaccgcggtggggtggctactttgtcaggctccatcttttgccgccatgggccgccgtggggaaaacccaatgtgcgccactgttcgaggtccgatccgtgcgggggtgcttcaaggtgatgtaaggaagaagagcgatagaaactactggtgctgggtcatgtgatcgacgcgaatttgctgccgtcgtatcagctccgctgcggatccgccttgatgcgtggtctgcttcgtcggtatactaagcatcggtaaggtgtgtcttaccatgatctcctcaccgccttgcgccgttcggggtattggttgggggcagaatcatggagtcgtctcacgccggcgaagttgccgtcgtgagggcttggcggcgccgcctgggcagtgtcaaaagaagtggatgagagctggagcgttgatcggggaacgagcggcttag

SEQ ID NO: 60412 - DNA, 784 bp, Zea Mays
tcgagaacgaagataatattatattacaaaagatatcgatgaagcactacgtatattatatattataatgtagtatatactccttgagtcactagtaaagttaggatgggatgcgtagtggtttgctatagggtagggccacgtttctctgtcagtgtcatgtgccccccttgctgccaagttgcaacgtagaacgtgaaaacggcccactgcacgcaccccacacacaacaccgcttggtctgttctcttgtcatggaccaatgggccatgcgtgatccctgctacgtgccgtgccctagcccctagccccgcccacatggccacatccatccatgattaggatagggatgatcgggtgcgacgagaggatgagtgattaggcctttctacgtacgataccacacgctgcatgcagaacaattaatgtgggcgatgcatgtggtcctagctagagagagagatcagaagatgagaagaagctaatcatgcaattatagatccacggatgcgagaggcccaaatgaaatgaaacagcccacgcatcgatcctaactaaccctccccaccagaaataactaccaacggccagtacctaccggccgccgcccccggtccatgcttcagttattgtatacactgtatgtgtgttcttattattgatggtggtggctgctggatcgattggatacccatgcaagcagcagcgtcctgtgtgcgccatactgccatgcttgcttaaatggcaaccctcgtgtccgcccgacggcgtacgtctgcatgca

SEQ ID NO: 60413 - DNA, 303 bp, Zea Mays
gaacaatattgtctcaacatggcctaaagcttactcataccaacaaggcacaccttttttgcaagcctatctcgaaataacctctagattaagcatgttagtctgctgttacaaatggtatcacaggcatgtgtgggctagggttcggtcatatggtgcatgacacatgtgagcatagagtcgtcacatgacatggtatattacgatactagacacgcagacgtggccaatagtggaagttcctggttgaaattgaccgatgtgcacgtcagttttctaaggggagtggattatgactttcta

SEQ ID NO: 60414 - DNA, 455 bp, Zea Mays
cgacaatggaaagcaattcgacaatcaagacttcagggaattttgcaactctatcggcatgaaggcagtgttcgcatcaatctaccacccacaatttaatggagtagtagaacgcgccaacggtaagattttcaacgccataaagaagagactccttgacgacaagaagggcaaatgggcataccaactttccaaagtcatatgggcgctgaacataacagaatctagagctactgggttcactccttttcgcttgatgtacggatccgaagcaatgacctcgcaagaactaaagcttggatctccatgagcaaatgccacgactactccagatgatggagatcgtgttctcaccctcgaggcattaaacagataccaagcgcaaacgaaggcatggcacgacaacactgtcattcctaaggagttcaacgaaggggacctcgtcctcatcagaa

SEQ ID NO: 60415 - DNA, 591 bp, Zea Mays
ctctatgattcatcttattttcgacttgtttccttgtacctagatcctcattgccttttttgtgtcttcctccaactattctaatacattctctaagccagtagctaggacgagtactttggatacttattcagcattgctacatgttactaacttgtgtgccacaaatatatattagtgagccttctcaaagctccacctttctcccgagtagaacatgtactcctttgcaatcacacccacgctctttaggctatcacaccggccgtcgtttgctacctgcagtgctggtaagcaccttgtaagagcggggtaagacgcttcataacttatgttctaccaccatccttgagagtagttgtaggattcacaccttttgcttgttgccttgtttctattttgtactaacaatgaaattaacatttcatctggagctccgtgacatgatgagagctatgtgtgatacactcaacatgaacactgaaaggttgaagagagtttgaggacttgttgaacagatggacacgacggagactcgtctaccacaccctacaacttcttctgcaagtgattctattcatgcttttccat

SEQ ID NO: 60416 - DNA, 633 bp, Zea Mays
ccgtcaaggaaaagttgaaggagaagaaggtggaggtcaggccacacagctagagcaacatgtgaagtctgccaattcagaggtgactttttgaggaaagagcttgagactactacgaacgagctgtcagttgagtgccttcgctcggtagggttcgcccacagcgtgcaggtacatgcgcgggatgtatttaatgactttagccaagtgtatgaggaattcggggcgaccattcgtccattggacctagagcggaaaagcatcttcgatcattgatcaatgtggctgtggacgcaggccacgatgctgcccgacgtgattcaagggttggtgatgttttctaccctcgttacgtacgagagtggattcgagtcattagtccgcgaagggtgtgaccatgttgctcgtttggcctcgtttgacttcgttgccaacgagaatttgtacatcgaggttggcgaggttgatggtgcggttgcggatgaaatgctcgatcgcacgtggagccccttcggcgctgaagttgccctcaagtgctctatggcagagcaggagcaggtaagtgcttagtgctatactttataggttgtttgcttagtcattttctgactattttcgaataggcgaggaaag

SEQ ID NO: 60417 - DNA, 519 bp, Zea Mays
ccgacaagttgccgtttgcgaaaagctctacgccagggccccgattgttcaacatcccggctcgattgtacttggtaggcccaacacgcggcctggtttcaggctgccacgcaaattgaaagatgggcctaaaagctccagtccggcgaggagacacagacacccccggcccatagcatacagtcctgaaaaattgtagaggtacgtgtggagtaatggtatgggtacatatataaaataccttgtgtagcgtacagtacttgtagagataatatcggcaacaacagatatataaaataccttttgctacttttgtacgtgtgatattgaagcacacggagcgtcccttttccccagccagcctccaacaggccgaggcacagcggatgggctcgcaacacggcggcaacagcagatataatcactgcactgtagcaaaagcccacgagatcatagtgcacgcagaatgcaccatacacgtacagtcgtacagattcgatcatggcttcgcccgggtcc

SEQ ID NO: 60418 - DNA, 325 bp, Zea Mays
ggcggagggaggagcagagtggcagaggaccgacggagaagtcaagggcacatgtagagatccagaatcgggatcggcggtcgatcggaattcgaggttgggggtgaagtcgagtctgcgcggatggtgagaaacacggccgggagaatcaagaacaaaggtggatggggaccaatgtttatgcagccggagaagggagatcggttgcgcgcatggcggagttcgtttctaggtcagcgctgttcttctgtgtatggtccaaggagcggggtcgttccataggtgcgctgggatccggtcaaggcacgatgcggctggaaatccg

SEQ ID NO: 60419 - DNA, 421 bp, Zea Mays
tctatcaaaatattatttgagattgtagctagaaaggttggctcgacaaagcaaatgatgcaatcattcataaaattgttaccaatacgattacgaagtattgtcttcacaattttcattgctgaaaaacacctctccgcggatgcagtggcaactggtagaacaagaactaactttaaaagtcgatagaccaaaccgaaagcaaggtgcttctttgtatcaaccatcagcttagcaagttcggttaaggtgttcaggttggaaaatctgtcatcagcttgtacattatcaatgtagatctcaagatcatgagcaggatcctttagttcttctgaagtaaagtcatctggataaagcttagctaattccactaggctctccaacttaaaatcaccataagaattcttgggactaaaagcag

SEQ ID NO: 60420 - DNA, 786 bp, Zea Mays
ctagcctgtcctccggcgcgctacgcccccgtccgcgcctcccaacgacattgttgtgccgtgatccagcccctgccaccatccaccaataccacctccatgtcccctaccgacaccaccaggtgagaagcagcggcccctatctttcgttgtgcttatggatttctcaaatactgaaatagtgttggtttcatttattttgaatgttgtaatctcatttagaattaaagatatcatccttagtgtggtaatgtgaccatattcagttcattcttcattcatctctcatcatgaaaccaaacaagagacggtgcagcttcaacccacttcaaccctacttcaaccctgtaatcaaacaagaaattaggttcaacacgtcacttaaaccaaataaggaacgggtccgacccaacccacaaaaataggtcggtttcgacccaacccactttgttccgaaaccaaacgcactataaatcgatcattctttgttcgtatttaattttgcttcaggtcatgccaattgatgaagtgaaccgatacgcattcgttcgtttctggcttggcttcacgtctgtagagtgaaccgatttgattttacttacactaaaaaaacggaaaacaaatgtcagtgccattaaatacatcggggtcgacgtttttataagccttaagattatcgatttatttcaaccaacatacttaaatttaagtacgtcggctgagtcaggaacgtgcgttaccacgacgacggcccctcgccgccaccatccctagccaccgccggcg

SEQ ID NO: 60421 - DNA, 597 bp, Zea Mays
gcactcggcaccggcgagcaaaatcccatccctatcccatgcccgagtgggagctggtgggcccttgggcctgtgtgagttgggctagactacgttatttatggtaaattccgagatgtaattctagtaaattctgactaaaatcgataaccaaatgaaacagctagtaaaagaccacatcgattactgccggggcggtaattagggacacccggattatccccctaacgaacgcactcagagaaataaggaccaaactcccgaagggtaacaaccgagccacctacaaaaaaactgagacgtcccccgagggaatcccacctcaagcagggctccacctcacccgaggtcgacatcactcactccgcctcgctcgaggctgcctcagcccagtctgtctcacccaagctggcctcaagcatataggacaagggcactcaaaaacaggcgggggacaagcgcatttaatgtgtgtgccaacccgcgctgtggcagcggagcacagtggcggacaagacaacaatcacgtctggtgcagcagtatgattatgcctacactacagtgcgcgcacgctgcctgacaccctccgatgggac

SEQ ID NO: 60422 - DNA, 383 bp, Zea Mays
ctgaaactgagaagtctagctgaattacagccttagcatgttcacagccagctttttctagtagtgatacagccccccgatcccctacgcattcacaaaaatctcccctgccagttaggacttcatcaaatgcttccacttcgccctcaatccacttgatgacaccctcgggatcaccatgaatgaaactttgctcagccgagaatgcaccaacactaacaaaagcatttttcaagttgtttgagcatttcatagcaatgttatagcactcctccttcgcctgacgaagctcctcaacattcttttaaaccatcaaccattcggtttcggatatctcacgttttgattgctcgacgttgaagttttcagtaacttcatcaagc

SEQ ID NO: 60423 - DNA, 516 bp, Zea Mays
ataagggcaagaaatatgaacccttctttcatgcatttgttgggaggggggttgtagggcatgatgaaaaccggccaacaagagtatgaagtggaactgttgtcgtaaggagtgaaaccatcagtggacaagcctagacgaacattcctagcatctcttgcaaattctgggtcaaaacgatctagatccttccaagcatcgccatctgatggatgcatcataatgtctgggtcttggctatcacggtctccttccttatgccacaacattagcttcgtagtttctgggttaaaaatagacgtttaagccttggagtgatgggaatgtatcgaagctgtttaactgccacttttgtagcaaaagtagctccatcctcttttagtacctccgcatatcttgatttaccgcatttctgacaatgggtggccacttcatattccttccagaacaacatgcaattctcttcgcacgcatcaatcttcttatccttcatgccaagaccggacacaatctttt

SEQ ID NO: 60424 - DNA, 492 bp, Zea Mays
tggaggagttcgggcttcaactccagcacctcacaccccactccattctccaggtggccatctttgtccacttttgtgagatgtttgtgggagtggtggcttgcacctcccttttccgccagtttttcgtgctggtgaggtctgggaagggcaaggatcacctcggggcctactatttccagtcaaggtcagacccgacagtgacctacattgcctcccttggcggtgcgaagggggagaactggtgaagtgactgggtgatcgccagcgctgaggctagcgaccgccttgctcttccgagtgacgggcccagcttcgagcggaaacaatggagggtgaaaccatgcctcatgccggagttcgggcccatcttggacaggattagggaactggcggttggaggcttgacctcaatgcacgtactcggggatttcctgaagcgccgagtcatgccgctgcaggggaggccgcgtctgagttgctggtttatcg

SEQ ID NO: 60425 - DNA, 899 bp, Zea Mays
ttcaaaattcatgataacaacgaagctatagtcccgagtgggggcaggaagagaaaaacgtaccttggccgaggatatgataatggatcctgtgtacttggagctggattgggagaaaaacctttcctcttttttaggatgcatgaaaccttggatagagatctcgaggaggttcgggtttgcaagatcaactcctactaggctgggccacagagggcgccagagactggttttacacaagcgaccttactgaactatgaatcgtttgtgatcagtccggatttacggggctagtcccaaccagcttgttcctgatgtgtacacctcctactatggttgtccaatttttctctccttttcccttcctcctaaagttttggcaactttggaggttcgaggccttcacaaggccaggggccatccaggacgtggtccgggtccaacgacattcccttaatgcctttgcttttattgtattcaatcctctaaaccatgtaacttaactttttccatcctagtttgaaaccagtccctagaatatgaatgtagtccgaacacccaagtacttgatccagaagatactaattcagctattcttaggtgatggaaggtgtgagcttacgatatgggacctagctaagcgactacctagctctggaccacccaggagaatgtgcacctttcccttagaccaagcccttaacaatccattccacattcatcatcaagcgggaatccaaactaagtgcaaagcaaattacataattcagttctcatgacttacatcaaacgcatggatccttagtggtacaaagcttgtaaaaggagaagaaatcgatgaatgagaacgtattcttccatcataactgggcaccagagacctgtgtattagaggtcgg

SEQ ID NO: 60426 - DNA, 785 bp, Zea Mays
ggaggcgtgaagccacttgtgcacctccatggcggcgaggtgctggccaacgggccatggtgcaaacgagcttggtgcggcgtgtgctctagaactcgttctcccaaaactcggcctccgtggtagcggtcagacgggaatatcccgttcggattaagggggcgatgaggtcagaggcggctggggaggtggattagaggtggaggtggtgagggcgccaagcgcatcgtagagacggaggacaggaatgggtgcgggatgggagagggtccgaacgacgctggaactcaggcgggcggtggcatatggaggtgtggacgcgagcggagtggaggcgaaccttccatcgactgcgcggaggctgcctttccatcgacccagcgccattatagttgggtgaggagacgagaaggcggggtgagggcaagggtggagggcagcgctgatggcgtgggcggaggaggcgagatttccgggggggacgagggcgagtgagcatgactgccatggaaggaaccatgctccacgcggtcaaagaggcgcgatttgtgggggaggcgcccgtgcgcgaagggtgcgcggtggggaacggcataggcgcggtggcagaactggcgcacggatgtggacgcctacaataggctcttatagagtagtagggattttatatttacttattttgttaaagtataaaaatggatatagcagaggatagacaattcctatatatagatgatggagtgtcctctatattttgagaaggctttagagaatatcattggagg

SEQ ID NO: 60427 - DNA, 600 bp, Zea Mays
gaagtttgttgtgaatgacacaagagataaccatagcattcctttgtcgataatccttaatatgaagatcatcttgagaaaaggtaatggggatatgagagcatttggacttgatgtacggtcctaggacgcctacatgctgcacccttcttctggtctctttcttttgctttttgttgatgagtttgaagctcgagcccccagtgatggggaaaacaagattctccagggatggtgacgaagtttgatggactgccatgctcttcgtcatgattcgggctgttgtggccgtgaaatcactggaggtgggcaccaatgttggatacttctttgaagtgttatcgcggaggacagaagttaaatatgcaaacctttgtccttgttttaacacttcttcgaagtgttatcgctaaggacgaagaacttttataaggagatgtgattagaacaatataaaatgaaatgacaatgagtgattgagtgtacaaaactcatctcatatgccttgacagttttattccatcttccttcatatcaaatgagtttacaaacatacctttgactccttaacacaagctggcacgaaggatcttcaaaggc

SEQ ID NO: 60428 - DNA, 287 bp, Zea Mays
gccatacttgcctcgccagcctaggcggtgatgcgctgagccccagcgcgttgctcagcccgaaggtcgttgagtgccttcctcatcacctccactgcctgggggctcgaggccgtctgcatcgcctgagcaactagcgctgcctggaactggcagacctgctcttccagagcccacactttcccctccaaacgcttccttttctcctctgcctcgagctcaagctcatccagcagcctgttctgccttgcccacatctcctccctgaaggcgaggtcctcctcctg

SEQ ID NO: 60429 - DNA, 451 bp, Zea Mays
caggttcgtcaacgaaaagaaacccaaacccaataactgggtgggcaaaagagtatatgttagaacaggacacagcgcaatcagaaaccacaaagtttgtcgccacaacaaccagccaaaagcgccagggccgaaacagccaaaaagcctggcgaagagaagtcctgcaaaatccccacatccggagcagcaccatcaaattagttgtcttcatctgtggaatcttgattctcatcctccttgtctcctttcccgggcttactggggcctacacagccggagggattcttcttcttcttcagagcaatatcgaacaggtccacttctgacaggttgcaaaatctttcccccaggcgtctgatgttcttggcagaaatggagggaggaccctcaaacttgtgttgacacatcaaacagttctttttctggcaggaaccctgcctgaacccag

SEQ ID NO: 60430 - DNA, 672 bp, Zea Mays
cgacagaagagatcttcaccctgaaagcaaattatgatgcctttgtccttgacaacatggcagttaacatccaagctgcaccttggccacacctatacagaccaccataactcccaatgtatgatggtttatcagatgcgaagtcattctttgtgtgttatgaagcaaccatatcttcatatgacattatcaaaattgtgatggcaaagcatttcgtcatggcaatgaagaatgtggcacaaaccaagtacacttctctatgatggcaaagtcttttgtcatggcaatgaagaatgtggcacaaacatgggactcttctctttggctagggtcaataccatcttagaaaaagcttaaggacctactgctcacaagtttatagggtttctagatgacgccaataaccgctcaagctttgttatggtggacctaagatctagatgagtatctttaggtttatgtccatcgagcccatcgtgaacaagatgtgtgccaacaagacatagcttctctatgatgatcatgagagagcactaagtttctacatgctctggattagagggtttgggaggtgaaggtctcagcgatcatcaagtcgcccacctctgagactctcaccatggacgagctattcaacaggcttaagtccaccgagattgaccactagaccca

SEQ ID NO: 60431 - DNA, 298 bp, Zea Mays
gggctagggctcgactcaatatataaaggccaactctagcaaatgtgcatctgcatccctgaaatgccctttttaggagtccacaccacatcccctattcgtaagtgccattccaacaaactcttgatcgagattcgtatctctcttccctttcggcgatggttgtcttgcgtgccattggagtgaaggcgacaacactcgagattgccttcgctggcaaacctagacctcactgtcttgaggaacgcgtgtgtagcctcggcctctagtgcaggaaggacctcgatgggcattggcg

SEQ ID NO: 60432 - DNA, 370 bp, Zea Mays
gctgaaaccgtgcaagatcctcggtcaccaccaggaggaatctgagagtgactgagtggttgccagttgaggctaacgattctagcatgatcacaatagattccatggttcattctcatctgaaggttctgtggacatggaaagaagtttattcgcctgtgttgacagttcatgaccgctccagtttggggacaacctagatttgaagaggtgatagtaattttcaccggcatgagaatgcagaggaagacactgaagaggtgtacacgagaagaagtgaagacgcgcgggagcaaggttttgaggtgaaagcgttgaagaggtctgggcttgcgtttgtccaatctagttgggcttgggcagaattagg

SEQ ID NO: 60433 - DNA, 1331 bp, Zea Mays
gtggataccaagtatcggtagatatgggatgcctggtgaagattatgttgcatggtgtagcagcagtgggcagttctacaagcatcaaaatgatgtccaatatggttgctcggtattacgaaatcatgaaaatggggctatttcgtcgcaactgaatgtaaatgagaaatgtgttgtagtgccaacacttgatcaatttatcacccaagtcactaggagagaccacatcaattacattgtagaagggcagccggagaaaatggataatggaagtcatgaggatgaaacagaggtgattgtctgtggccttgaagcttgtgtcaaggatagcagaactacttcagtgaaacagaatgtgcagaaacaaagagataaatttgctgaagatggaggtgatagtaagaagaaaagaaaagtagaaagtaacacgaaaaggagttcgttgcaattggaaggtcagaagtattcttcactccagaaagctctaaattctgattctaagaaatgtgaggagttggctcaagttgacagtgatgatgaatgcattgttctcgaacagcccaagaataaatgtgaagtaataaacctggatgatgatgaggaacagagtgtttctaatcgagaacatcataacatgcaacttgtcctagaactggaagagtttgtccgctctggtcttctctcgcaatgggaggaaagctcagatgaagatgatgtaagtggaagcaagcaagaaacccagaagaaaagcaacaatgacccctatgctgaagcagccatgagggagtaccctctgttctttgagttcattcctcagaaaccacattacagaggcttcgtgaactatgatgaaactttaggagatctaccttacagtggattatggtttttgctaattggcttggctaaggaggtgctcaagacgtcatgtgacacagatgcttctgaaattgcatatctgatgaaaaaagcccagcatttagagcaactgggtttcaacgtgacacatctcattgcccgcttaaaggagccacaaattaggcttaagaagcttcaagattctagagcaaggcttgatcatgcccgtgagaaagaggagggcaacgtagtcgagtctctttcaagccatctgaataaactgaagggcaacataaggatgatggatagtcatctggatggaacgaagcaagcttttatttcaaatatacaagataaattgaatgaaggaattaatcttgccagtttggaaaaggaagtagaaactgctgaaaaatgttgtcaggcaatgaaggatgaagtagctgcaatgagaatgaggtactcggaccgtg

SEQ ID NO: 60434 - DNA, 768 bp, Zea Mays
cagccgctgcacacattggatgccgaagtttaagcatttctcctgaagttctgtaaaggatttctgcagatttgagtatttatccacttcagtcttcaggcttgcttcaaagtatttcttttcttgctcgaatttttctgattgacggagcaattcattctttaatttgtcattttcagtttggacttcagccaaagcgccctccatggtctgaataataaaatccttcttttctagtgcaccttcgtgctctttgaccatgatttcaagatcttgaattgcgaagtctttcttttttagattggcttcatgattttcaactttttcagtcaaatcttgaatgacggttttgtttttctcttcctccagatcttgttgcatcttcagaaccttgcttaataatatgctctgtcgaaatgatcttcgtcagaacacgacacaaaagttaataataatagtaataaaataacaaaaatatttgttaccttgaagttagcataaagcaagcttccggcgatgtggtgtcgttgataacgacacaagtccacttccagcttcggtaagccaatgcttttggaaagggttctaacaattttggcttcggtgcggttccgaaggcatcttaatttcccttcgttgaccccacaaaaaagcatagcccctgatttgtatccgcaggatgtggcatattatttcaactcctctttttcggcgtccgttaattcttgtccgagcaagtcttgaaagttaaaatcttcttcttctgaa

SEQ ID NO: 60435 - DNA, 436 bp, Zea Mays
cctggtctacgacctcaccggatctccgccttcatgctgcgcccatggattcggccgtgcggttcctcccagctcggtatatatatagtggtggtggtaccgcggcgctatctccttaccttttcttctatgtaaaattgtatgcatgggggtcaacggattcacccatctgtttgtccatgtcttgtccaagttgtgttacattgatttaattatcttcaaaaatacatcagtttaattcttatcattttaacatgatattctgatagatctggttcatgctttatagtgccaaatttgtgttgtggtcttagtgctgtgttaccccttggccaagttctcgcgaggcggtcactggtaattctatattagattttgcattcagtaacactctaaacttatttcgaaagttttattccatatatctttcaaaaag

SEQ ID NO: 60436 - DNA, 525 bp, Zea Mays
ttcagctctttaattgaatggtgaatagataaatgaatgcagaatcgaatcctttccatagaagagggcatagttcatcaggataaaatgtaattgatctttaccaaaagtcgtgactgttcacgagcactatggattagatgctagttgtatttagtgtggagactgaagagcaacgaaactaattatgtagaaggcactatgtagtgatacacagcggtacattattgctttagatctattttccaggatcacaaacagcgtctgaatagccttaattctctgattatttgatagcatggtggtgtcattggtgtttctgacagttgaggagatagccatttggtgttcattcatggctcggggctccaggaccttatatagtttcagtttttctggtttagtggttgcttggtagttattgttgtgttatctgtggtgttgtgtgggttttacatatggtacttattcttcttaatgaaatgacacagctccctgcgtcatttgagatttttttttaccatg

SEQ ID NO: 60437 - DNA, 798 bp, Zea Mays
ttcgaacaccaaaaggtctacttgtaaaagcatcttgccttgcactagtttcacgctcatcttcttcctgtaatcccaacttgtcatacatcaacaactctgaagcaacctctttactcgatttctaatgacccccgatcaaattcggggacctataaatcaacacatttgtgttatgtaaaccattgccctgtgcttgttacacataaatgaaaatgtgatacacattaaacaaataattgaatcgaactcacctctggtctagttctagccgctggatctaaagctcccatgttcagaccaaaaaacaaggaatccaacacattcacaacacacattgcttcacaacgggaaatcagagggagagataacaacggggaatgtggatagggagagatcagaaaaagagattgaagtggttgctcacaatcaggaaatgccgaggctggtggctgggcacccttctccatggcggctcagtgggacatcactcagtagcatggcacgcacgttcctccgatctgtgtcctcgatggctagcgacaggaaacggtggaggagtacctcggctagcggctgcctcgactctacggtatggggtgcacgaaaacaagactaaatagaaaggcatattagtcctatagtccacggtctgacgcctacaactgttagcaaattctaatgtcccgctctttctcaaatgatcattttctgccgagtggttcacttccataataccaaaagagcgtgcagagtaatagagtggcgaagccaccagacgaggatgttacaatccca

SEQ ID NO: 60438 - DNA, 425 bp, Zea Mays
ccaaaaacgaaagattcattgttccgtattcccagcacaatgatattgcgcgcattgctaggaacttcatcattaagatgaaccttttcatgaggcaaatcaccatcagggtgaattaatcggaggagagttatcacagaccacgtgaatctgtagtcaaaatatatgctttgactaaggccgatggatcatattcgcaggcgtccccgagaatagatcaaatgccaataagtcaaatgtggatattatattaatctcaggtatatccacatctacatcaggtagaagcattcaaaccaatatggttaatcctcaacgatttctggcaaactccatatacacaggagtacacactgaacgataggttcagtttggattttgtgcgtttaatagaatattgaggcattacactatatgggcattcc

SEQ ID NO: 60439 - DNA, 274 bp, Zea Mays
cattcatttgtcatgagcacaacaaactccattctaagttttgaagccaattggatgttacaacgttgagattgtgctaaagcttgacaagaataaagacaatctcctgtaattgatgccctgccttgcctgttttgttaaactgtctgcaactttgttcatctctctttggatcttgagcacttagtagttccttcctggtgtggcatcaatcagtgccgcaagggttggtccgaggcactaatggctgggttgcggagcacgaagccggagg

SEQ ID NO: 60440 - DNA, 662 bp, Zea Mays
gctgaattatcagcagaagttaatcgcctgcagcaggaaattgcggaactcgatacagccattgactgggctgtaaattcttgctctttcgcctgggattgtgaagccaaagctctatcccgggtagcagaactaaacacatccttgcaaaacctgcaagcgtattgtaacaccctgcatgaagaggtgcacgtattgtacgaccggctgcatccaaacgtgccaccaaaagttgcagcaatgggagatggaccatctggaacaactaatggaggagctgatgcggggttggacctttttggagcccctccttccatgaaccttgtagatgaacggtctcctgaagcgggtagtggagcagctaaggacgaagagaattagagtagtatagtttaagtaatgacttatgtaaaacaaataaggaagtcgagttgtattactgagtatctataattattacagttcaacaatgtaataaagatggtgaagttcattattaccagctgtcacggaacctcccaaggtattagacccacttacagatgtccttgttctaaggacctcagacagtcatgtaggtgcgcataatcacttgacaagttcggttatctgtatcatcatcatatcgcccaagtgcgcttcacccatcacgcaaacattac

SEQ ID NO: 60441 - DNA, 352 bp, Zea Mays
cgatcgtctaccccgagccacccgtctaccccccctgtgcattccgtgcgtagtgatcgtgttatgtaatcaataaatggaaacccaaattagaaattgtttacgttagttaatacatgtaagtagttatctacctcatccaatgtcgatcaactgaaaatggtcatgattcgagttatgcatgtagctaatccttttgttagaactaattggagctaagtagaacttaagcacgtagcatctagttattcgtctacccgtaatgcgccttgagcataagccttgaccctcgcgagacctttccccgcctctttctaaccatggtaaattcattatcgtatgtactttattt

SEQ ID NO: 60442 - DNA, 743 bp, Zea Mays
tttgcaccaggtatgggcatttcgagttcatagtcatgtcttttggcttaactaatgcccctgctgcttttatggaagcaatgaataggatgttgcatgagttcttggacaactttgtggtcgtgtttctagatgatattctgatttattgaaagatagaggaagagcatgagcggcatctccgtctcgttctaggtactcttaggaagaatcagttttatggcaaattgaacaagtgtgccttttggctgtctgaagtggctttcctgggtcatgtgattaatcagcagggcattactgttgatcccaagaatgtcacggctgtggtggagtggaagagaccctctagtgtctctgaaatccgaagtttcttggggcttgccggatattatcggtgcttcgtaccaaatttttctagcattgctaagcctttgactagactcttggagaagggtgttcttttcgtctggtccagcgattgcgaggttagttatcagacattgaagaacaagttggtgaacgcccctatcctagctttgcctgagagtggtaagcatttcacagtttttacagatgcttctcgaattggtcttggctgtgtgttgatgcaggaaggcagagtgattgcttatggctctaggcagttgaggaagcacgaggggaattatccgactcatgacctcgaattggccacggtggtctttgccctaaaatcgtggaggcattatctttatggcgagtct

SEQ ID NO: 60443 - DNA, 536 bp, Zea Mays
gtgactttctgtcgtgttgagctttgtgggttttcacggtctatctgtgatgtaacgataacggcttattggtaggcaagaaccagtgatgcacactttcacacgtgacgcacaatacaggagacagaagtcttagcaagatacaatttgatctttattctatctcattttaataatggttattctagatagcaggatgcatcactaatagatcttgatggctacgacaacatcttcgttgtggggatcaatttcgttggtaaaatattagtttatggtactccgtgtacggatattaattcaggtcgttgatcttattatacatgggtgcggagacgaaatcaagcgtctaaattaaggatcaaaaggtgctgaatctgtagcctgtgcttaccaaacgattcaactgccgagtgtcaatggttcttaatgttgcatcatgtcaaaaattgacacacattttataccacacttaaagttaggcggtcaaattctacgttcattttataccacacttaaagtatgacgacttacgg

SEQ ID NO: 60444 - DNA, 276 bp, Zea Mays
aatgggtccctcttcaagcttgggtgcctaaagttcaagcttgatcctctttacatgtaggtgaactacaagaccggtgggagccattatgtaattgatagtggatgcagtcaacatatgattggtaacccatagatgttcacctcacttaatgaagatgtggatgatcaatataagatatttggggataattcaaaaggcaaagtaaaaggaatgggcaaagttgaaatctcaaatgatcattcaatttcaaatgtcctcttggttgaatctctg

SEQ ID NO: 60445 - DNA, 569 bp, Zea Mays
gtgtccaagtcagtaatgattgcttggagttgacctttttatttttacactcactcctgcattagatgcggagcatttttcatagcacgcctaatttatgattccaatgccacacaaagttttttgcgaatggttggtttgttccgaaattgaaggactttatcgtaaaagtcttatgagttgaacagacatagttcaaatctaaactacataggttgctcaggaatgtctgagttcagtgtctactagaagaggggtataatatgaaacaccacaaacaagtgtatgaattgatagtaaaggaaacttaatttttcacttagaatgttgtttggcaaaaaagtatttttggagtttcaatgcaataccacgataattgagaataacatggtattttaagcaaagaagtgttcgattgatacatgataaactctgttttcaataccatgatctccttaatattgtggtgtttttgaagtttaaaaaacgccactcatgacctcaattttcttccattttctccacacatcactcgtcctcctggcgcctccccctaccccgcgccacgc

SEQ ID NO: 60446 - DNA, 1047 bp, Zea Mays
ggcacattgttgctcaatgtccaagtaggacaacaatgctgttgaatgaaaaaggtgaatgggaatcagatagtgatccagaagatgatggaccaaagtttgttgaagaaattcaataggaagagaatgagattcaatcagaagatggagatcataactattttatctctcttcaagtgctaagtgtgactgctgaaagggaagaaaatggacagcgccacaatcttttccatacccaaggtatgatcaaagataagatatgctgcttcattgttgataatggtaactgcaacaacattgctagtcaagaattggacagattagaatttaaatcaaggcgtcatcctagtccatataagatacgtgttagccacgtggtgaatgttcctttttctgttgggaagtataatgatcatgtggaatgtgacgtggtccctatgcaagcatgtcaattactgctaggccgaccttgcttatatgatcatgatgtccagatttttggaagaaccaataagttgtctttcttgtacaaaggggagcgaatctctttgcttcctttaacaccggaggaaattttgaaggatgatctaaagaagaaaaggcgagagagcgagaaccaattgaaagtgatccacaaaaatagtaagggggagtttccaaagccaaataaaactccaccacctccaataaccaagacaccgggaaaagagggattagtcatgatgactaggaatggggatctaaaagaattgagtgaacctaatgccatgttctttgtgctcctatacaaggacacccttctttctactaacaacttaccctctaccttgccaagtattgtctttgatgcattacaggaatatgaggatgtgtttcctaatgaagtgccaccagggctaccacctaagagagggattgaacatcaaatagaccttgtttctggtgcttccctcccaaagcgtgctgccttccgcaccaacttagaagaaacaaaggagattcagcaacaggtggaagaattgattaaaaaaggttccatacaagaaa

SEQ ID NO: 60447 - DNA, 951 bp, Zea Mays
tcagtaaaatcgcgccgtggataaggattggctcgccggcgataaggatgtcgccgtggctcgggtaagacatcggcggccacggcaaaagttaccggcgacgtgtcaaagtgtcactgaggtggcaagccccggttaatcggcggccaccgtgccatcactgtggttctgccgtggctaggctcgtcgtatgtcccttgctcatcggtcggtcggataacctcgccgtcgtcgagctgtcgtcgttgcgtgccacgtgcttaagcgctagcccttatcgtggtgactcactgggtgcatgtccggtgatcaccggagtaactgccacggtgaaagccacttattccacgcacagagctcgtctctcctccggccgccacactgctcggccgaattcgtcaccgccgctcgctacgtctataaattgaccccgccgcgagctccgtaaggtagttaagcgtccagccaccaaaaattagcctcgatcgttcaccagggtgtgcgaatttggaactttccccaaatctgcgcaagaacaccgtaggaaagacctcgccgcggccagctcaactcaggtcagtccaagtccctctgttgcttgttctagcgtccctaggccctcctaaagctcttagacccgcccaattgaattagaccgccacccatcgccgagaacgtttatgatcatccgcctcacccgcggtcaccatggtcagggcgtctctgtgtgtcgttcctgaaattaacctaggggaaacgttctctaggtcctgaatctggtttaagccgaagttgggcaccggtcatagccccaatcggccggtcctggagctcgccggacttcggccgcgcgtgaacgccgtcgtggaccttggtcagcgaagaaatagaacttggaggaccccgtgtaaactgtcagtgatacagaggaacagtgaacgaacgtgtatc

SEQ ID NO: 60448 - DNA, 1064 bp, Zea Mays
ttggggtcggtgctagtttgttggggaggggagggagtccaggagcgtggctttatagtcggatacgaaaatctgggcacgatctggccagcagcacgcgggatcgtgcgacgaccgcgtcgtccgccatgtacggcaattctgttgggaggaagcagatcgaactgaccgccaagtcccaccacacagcgactcactcggaacacacgtgccaacgatctgactagttggccccgcttgtcggtgcgtttacaccaaagtaaggcgcacggacgagagactaatgggctgggcccgggtgtcggcgtgggtcggtcagttgggctgcgcggggaaagacttagtgggccaaaatgggatacgcggcccaggtaggcttttctcctttttctttttctgatttgttttttctttttgtttttagaattcaaatttgaatttaaattttggttatgggattcatccatgatcagagtgtaccaaattaaattttgaggttaagaaatatattcttatttatatattttattttatctcatttgcataatattttcctctcttttctcaatttctagggtttcttttaggactcaaattccaatttgagtatcaacatattcctttttaccttatgtttatattatcacaaaatgcacacacaataaaacctcaacatgatgcatattccattttagtatcatttgttttaattcatcactcttaattataggtacgctcttttgatgatgaaaatatggcacacaaaataagaaaatcaactatactctctttgaatacatttttgggtattacagaagggtaggtaataggatactctgactcacaatcattgggcatatggccagtattttttgccaaaaacatcagaagtgtgagtttttgtcaatatcgaaggctaacacttatgacttttttactgataaatggtctccccaaaaaacaaaatattgtggtttatgtcaagcaaacatgcgtggtataactagtaggagactcttactcatgatgaatgggcatatggctagcatttttgtccaagaacg

SEQ ID NO: 60449 - DNA, 797 bp, Zea Mays
tcttggcatgattttagccatctcttagttgttactatattgcatggatgagctgtagctatagtttaaaattaaattaatcaatgtcattagatagagaacctggtaggttgtggggttgtgattttaatacttgctcagttggtcccatcctggtagcgatagaaacactagtgagttgtttatgatctcaatacgtctcatttgactatgttttcctttctttgttgtatagttcttttttctctgagaatttcatatgttcatgatctgcagctgagcaagtttgtttgttcctctatgttttaacgatgcaagatatattaatactctgctagcaggaagcctgctattgatagtgtctagattcaaattggctccttcgggttcatattcatgcagtgtagttcatatacgtgttgatatgtggtccatggtagtgttgggcaatctggatgcaagctggaataatgtgattgtttctgtttttgtgattgttcatatactttgtttgacttggtgtttcctgtgtaaagcttcttctactggcatttatgaaagaatatgaaaatggttttctatgaatcggtatcacttgtatcagttcagattttatgagcctcaatgcattactggttagtgcaaactagctgtataaattgtatctactaattgtttttaactagattaatcttgaactctgtacaaataaacttcaaggttttaagtacctgtttgtgtggcaggttttttctttttagaaacccttgtttaaagctgaaagttaaatacttttc

SEQ ID NO: 60450 - DNA, 371 bp, Zea Mays
attttcctgctggccgacgatcgagttgttacgcaaaaattgaagaacatagcgctgtaaatcgctctatcaaaacgactgatgggggtgaccatggtacagtacaaaaaaatcttcagatacatcacccttcgccgccagcgacccccgtgtcgtgattggtgccgatcgccacgattcgagcttcaggtctgtggattgagctcgacggtgaaaagatcgcgtcgcggatgagtttggactactgtggcctcgctgttccccgacctcttgcgccggcgacgtggccttacggccgtcaccggagtccgcatcgttcaccacaattgcgccacatctcaggcctttaaccacgtcgcaatagctcgggt

SEQ ID NO: 60451 - DNA, 567 bp, Zea Mays
atcaatattgtagatctatcataggggaataactttgcttaagagagtaaatatggttgttatgcaaagttaagagaaaaataggagccaagttgggctgtcagtcggtttgctgactgaaatatggtcaccagtggtagtggttgaacttgggatcagatttgagctaaaaccagtaggaattcgactaggattgctataacaaagatacagaagatctataggactacaactttgctgcagagactcgggtatgttgccataggaaattgagaggaatttggtcctaaactgcgactgtcaggcacactgaagaagtatcccatggtacagtgctctcgggtggatcaggttgccagcgctgcttgctcgtcgacggcgacctccctgcgcgaagattcgtgctgccaccgcccggattcgcgcgtgtggctaccggataatatcgcggggcaagtaaattttcgccgccggtgagctggactccactccggctagccgcgatacccctcccctttctcaccgccctcggattggaatctcatcgccgtcgtgccatcgccgttg

SEQ ID NO: 60452 - DNA, 539 bp, Zea Mays
cgtctgccttgaacctgatagtctcggaaccaagggaatggcatcccggctgcagagggtgagactccagggtcagccaaaccctgcaacgtggcacccgatgctcctcatatagctgcaccgtatacagaggggtgtagggtaactagcgaagcagatcacctcccacaagatggagggaaaaccctcatgggaaaggtagtcaaaactgaagcgagtgtctcctccattgatgggggtgggtgaagtcatttgtgaaagatggttagatttaagtgtcatggtagtggaaaggagaaacgtgtgctcaggttgttaaaaggaggtgggttaatttagatttatctactccaagccatttcgttattcattattaacaatgcttgttaagttcataattagatgcattttaccttagcttctaatttcttcatgctttacaatgcatgcattctagaaagaacgtcttctcaccgatcagaggggtgcttctatggcatccctactattctaaggttggcctatatggcctacttata

SEQ ID NO: 60453 - DNA, 576 bp, Zea Mays
gaaccccggttgcgcaccagcgaacatggccgccgggggacgagcctcagaacctggcccctggaacggccacatggagatgcgccctaaccatgggtggtggtaagtgggccaaggcgcaccctgcaggggtcccggcgccggtgcgttgccacgggcaccaccgtcggaactgccaccaccactgccaccgcgtccaccacggcgtcgacgaccaccaccgcccccacctccgccacctcgacccccgccgcccatactcggcccgggaggacgatggccaagggcagactgtgacggagtaggtggacgggtcggggtgaaagccgccagtgcagtcgaggaggacgaggaccccgggccggagatcgatgcagcctgagcacccagagtgatctcctccagggcgaggtcgtcgcagacctggagaaaggtagggaagggcctctggcgcatgatcaatgaccgtaggtgggtgtagcgatcgctgaggccgcggaggatgttgaggacgaggacgcggtcctccacggggcagcccagatcaccaagtgagtctgccatggtcttcatctt

SEQ ID NO: 60454 - DNA, 416 bp, Zea Mays
gttaagtctggttccaaattaacatcagccacatccatagtttgatcaggaatccgaagacacttctttaactgagatacatggaacacattatgcacaacagacagtgattctggtaaccgaagtctgtacgcaacttgcccacatcactcaagaatggggaacgggccaatgtatcaaggtgctaactttcctttaaccccgaattgactaacacccttcattggtgatactttcaggtacacatgatcgccgacttgaaacaccaatggtcgacgttgtttatccgcataatttttctatcgagcttgagcttctctcaagttatgtcttttgtgctggaccttttcctctgtttctttaaccaaatcaggcctgaaaaatcacggttctcctagttttgaccaattcaaggg

SEQ ID NO: 60455 - DNA, 363 bp, Zea Mays
gaatgatagaacgcaagtgctgagttacctgaagattggagaggaatgatggtaaccccaagtcaggaggagctacgtcatagctcgacgaaggaagatcaaccggaacaatttgaagaacgttgtcaggggttggcttagccccaccagtggatgtcagacttcttgcatctggctcgctgacctccaaggcaacttgtttgcttgaagccaaagaagcatgcatcgccatcaccccatcagatcgtggtggagacgaccctacatggacatccatggaggtgtgggaaggagagctcacttggacaccctcgagggctgggttgcagctcgcgccacccactagagccggatcactaccac

SEQ ID NO: 60456 - DNA, 400 bp, Zea Mays
accttcgtcttcggcgctcttctaagccctcaaggcattactaagaattaaaccttgcaaagaagaagaaagagttgagcatggcaataaaatacttcattttctagcttcaaaattaacctctatacctttatactattgtacgtgaggctatcagcaagatcatccttcgataagaccgaaaggccttcttcaagcttaggaaatcccatactcttagccatctcccggcaaacggatatttctttattatccgggagacagtacaggaaatcctcttcgttactaccattgaacactaaggcccccttcggatatttcagtctttgggcgtagtgtttggcctccaagatttcttcttcagataatttcttccccgaagcatgtcgaacaatgtaat

SEQ ID NO: 60457 - DNA, 762 bp, Zea Mays
cgaaacgcatcagcgagcggcgcaatcaggcctccagggatggctcgccgcctcgatgccggcctggcaaggagaaggtcgacgaaggcaacctagccgcgggagaacgggacctcaggtatcaggcccccaagcaagttctcaaggaaatcctcactggagactccgactctggtgatgataacgaccaccgcaagaagctatacgttatgtatggcggaagctgggagctcacctcccataggaatgtaaagtccctacaccgtgatgtcctttcggcgactctaggggtcccgaaggcagccccacatcagcggtggcggtgcaccactatctccttcagggcatccgactgccccgaaaacatggcaggggctggtatactaccactcatcaccgcccctgtcatcgccaacatgaagctgcatcatgtgctgattgatggtggggctgggctcaacgtcatcagccacactgtgttcaagcagctgcagatcccagggtcccgactggggccctcacgcccattctccggagtgggccctcaatcggtgtatccccttgggagcatcgcactcccggttacattcgagactgaagaaaacttctgcacggagaacgtccaattcgacgttgcggaggttaacctccctttcaatgccatcattggtaggccgaccttgtaccggttcatggccattgcccattacgggtacttggtcctcaagatgtcgtcccctgctggggtcctcaccgtgcggg

SEQ ID NO: 60458 - DNA, 711 bp, Zea Mays
gtcagaagttcgccaagttgaggagagtctatggagaacgttagggaacttcgttgttgagctaggcatgggaatttctcactgatgtcgaggacatcctccgtgcgatggctcagtgtggtcagcgacatctacgccatgaatcgctgtgaggacctccttaatcgtttggctctcgcctattccatgagtagaacccttcggattcgattagagttcaccggggggcatgtgtcgtagctctccgtcggggtcgcaccacatagccgcgagatgctgtgggtaagaccgtaagagtcccgttgtgccaatccatgggcgtgaatggcaatcactggctttggtgatgggggaagaaagggtgtgtgctgttggatcagctaggaacggtggggatggtatctcgcgtaatcgttcgaccggataggtataggccgttgattttcgatccaaggggtgggggcgtgtcggttcggcttgttgctagatgccattggataggtcgtgggcattggatccaagggtgggagccgttaagggagagagggctttctagccgtggatctttgatcctgcagtgaccgacgcgtatcgattcacacgcttggtgatcgaatctgatccgtctgtttcggatcggatggcttagaccgactgcatgtaaagccgccatgaacttttgctatagagcccctgcactttttacaaatc

SEQ ID NO: 60459 - DNA, 642 bp, Zea Mays
tcattcctctgcgatccagtattcgagtagtgtaagaaactctagttttaaagtgatattttttattcgcctattcacccccctctaggtgacatctagatcttgttcctggacaaaggggactttcaagggagctttctttttggatggctgagggactctaggaaggggatcactagagatgtcgggaagggtatcaagtgtgttcttgagatgatttggtttcggaatccacacttgtttctaaggaggggctctcataggctcctcaatcactccatctgtcacaggggcatcatgcttaggtagggtgattttggtaagcttgggagtggctaaaggtttctctgatggtttcaatgcactccactcaacaaccgttccgaagcaagcagcactcccatccttagcagcaaagcctaatcctggtcctctagttctcctcttgaactgactgaccatcatgcaaaactggagctcaccgcacgacacctagctcaagaccgatcgaaggtatgtgttttcttccttgatcctggtcttgccatgtcggtaggactcaaaagcaaactataaaccaccacaaactgcacactgcgtaggtgcaagggaactcaatgaggtagccttctcaagaaaggc

SEQ ID NO: 60460 - DNA, 511 bp, Zea Mays
tgggggatacttcaaatccttggtataatgcatagcttcggcaatctgctcttctgatagttttttccctgccgcgtgacgcactataaattccaatccctcagtagaggcttcgacagtagggaatccagaccctttgctagtttttgtagcatctgaaggtcttgcttcgatattctcttcaacaaccttcgtaggccctgtttctacgggaactgagggcccagcttcagttccaacctgagtcatggcggattcaacagtttccttcacattcttttcacctatactaggtaattctgcagaagcggagtcggtacctttgttgattccatgacagcgtctaatacgctggtcattcttctcctttttggagttactgcaggaattcttgacaccttcggcagctccgtctcttgtgacgggctcataatcttctattgctttgccgacctccttggttctggtttttcgatcgcgttctccttagtttcagtaggtcgcttcgaca

SEQ ID NO: 60461 - DNA, 983 bp, Zea Mays
ctagataggccactatcgaggcatgggagcacgcagttggcacgtcgtggctggattcagttttcttaggacgaagttgtactagctgagaggatctagggttaaccctcacaaaggctatgaatcatcgtagagttgcggagaagggcttacatggcatcgataggcctcacgatgtcgtcaatgctgaagttgagacatcagcgagcctgctaggatgaccgccacttggagaaaccttcatgtctggagctcacatcataatgatcctcacgcaaggctggttgagtgggtgcgttgaaggattgtgcccctaaggaccaagaaggcatggattatgacgcctctaaggcgtggcatactccagaaggatcatggactaaagtgtgacccacatgagcatcatcatgtgaccccaccagagtaccaggccatgtcctcttgttggaagcagtagaggataagactaagcaggactacacacaatgtgtgtcatgactcgcgatccgagttagttgagtaggtgtcaaaggtatacttctatgttgattagacaacgcgatgacaccatagttgtacaacacataaagagtaccaaatctaagaaagagacttccctacatgatgcattgatgcactaaatgtcatcatggtatgataccatggtagtgtaagtatccaaaaaattagaacaaaaaatttatggatagaataagaccatagactggagtcacgctaatattaggtgcaaaattgcaacctagttactagcacgtgcacaattacattcgaagatataagggttgcttggtttgttgcctcgcttgccacagtttgccacgcctaaggttagacaaatttgatcaagttaggtatgtgtttggttcctagctataggatatgtctagttctatacctatggtgccaaaaattggcacacattttatgtcacacttgctcaaaggttaggcgttcaaatgatg

SEQ ID NO: 60462 - DNA, 504 bp, Zea Mays
tatactaaaaatcaattaccaaattttattttatattaataaccgaatttgggttatagttaatattactcaagagctcggggttgaaaacacaattttcaggacctatatggaatgatctttatataaagatggactgtgggttagtttctaaattccaggagggatttttaacaaaatagtcgggcgaaaggttacatgccgatctcgaccatccgatcgatagggacggccaggattaaatccagctagccccgaaccggtacgccacgcagaccatcggatttagatccaactgccacatttttaaatagcacgaatcaccaggcatccgtccgatcgcaatccaacggaccagatccacccatgaaacgacatgctagcatctaatctcgtccgctcatcttgcgctcaacggcccataacgcttcacccgaagcggtacagtgaccttgatctcagccgctccatttgagaccaacggccaaaagacccatcttctac

SEQ ID NO: 60463 - DNA, 682 bp, Zea Mays
gtcggggttagccagatcataactctcatcatcactatcaaccatttcatagtcaacaccatcgaaagacacaagttcgtcattaatgtcattgccttcaaggattactaagtcattatcattttgcacctcatcatcctcctcatcaacaaccatttcaatatctacgtccatttcgatagcttcggttaagtctatctcaaatcgcccttctagcccatcttcttggaagaactctccatcatatgtgtctaggtctaagttataatcttcatcgttaggaacaggtaacctcccgtgtggtgataccttatacacaacatcccaacccttaagatgttctttcgtttggcacgcatatgggagataattcacttgtgtggcctgttgggccacgatatagacattgtctcctggtaaggtggaatcttgtcgaatttcgactatcccaagattagaatgtgttcgtctcgtcacttgagggtcaaaccaataccatttgaatatcactggagtaagaggtttcgaaccataaaaattgagctcatatatttcttcgatttgtccaaaataatcgacatcgtcaaggccgggcgtaaagactccagaacacgttgttttccaattgggccaacttttgtcgtagtttgttgtgcaaaaacggtatccattgacgtcatac

SEQ ID NO: 60464 - DNA, 342 bp, Zea Mays
tggtacttctgggatgaatggaatatcgactaagatgagcttcatccaaaatttgttggcggacctcagcatctttaggcacaacgatgcgatcattgaaccataatattccttggtcatcttttctaaagcaattagctttgtcggcttctattttctcatgaatatgtttcatacccttgtcggttctttgggcatcaataattctctgtagaagaactgactcaagccttaattgtgtcaaagtttcgtgttgtatcatacccaggtttaacttttccatttcttggcataatgtggtgtctgaggtcctcactgtaagacaatgacaggaactttgcg

SEQ ID NO: 60465 - DNA, 669 bp, Zea Mays
atgcacctaaagaggagaaaatgacccaaaccctaattcaactcccttaggcaaatggagccctagaggggagtttaacaaaaaggctaggtaaaccacattgtcatgacttgggctaattataaaagttatagtacacttaataccctacaaaaaataaaaagagagtgaccccaaaaagatttcagaaaaaccccaaaaaggtcaccaaagagaagaacataaaagaaaaatcaagtttttctcaagttcaaaaccagccctctttcaaagatcaaacatgttcacctttttccaaacctcaaaaccatatggcccaattaacaaaatggtgcctaaaggcctctataacaccctggaaaaatttgaacccaaccctaagtcgtttgacatgacttggcatggtttttgtctcggtgtggacagctcggacagagccaacttcccacccccatatctttctaccccgaccatatctttgcttggaactcacatggaaaagataggatttggtgcagagaagagaccgtacaagggatttttgctgagatctgcacgctaaggcgaccaaacaggacgttgaacactggcagaagtaaaccaccacgtgttcgacgtgggcagacactcgagaacgtgccagagcacgcccgcacgcgcacccccgcg

SEQ ID NO: 60466 - DNA, 493 bp, Zea Mays
tgctccttttccgaggggggtcgcctgaggcagatgatgtttcttcctagttcggttgccgaggggagtaggaggcggtatagtcgaggggagagggtgtaccttttgaggtgagtgtggaacaacgctcgtcatgttttttcctcggaggggatatggtcatttaatgcgacgggacgttctgcctgccaactgaccgttagcgacacacgtgctcgcggaattcaaaacggtcatcgtctagccacttttcgaatcatacattggtggctctgtccgtcctataaacctgaccgagagggagggctttggaccgttacctttgtagtttcaatcctttgccttcaaacaccattttcaccttctgcccagagagctctccgtcttctgtttgtttcgatggcggaaaagatcatcgtccttcctcccagtgacccgtggactatgtattccattaccgacgtggatctagaagcgttggttgatgccggcc

SEQ ID NO: 60467 - DNA, 448 bp, Zea Mays
cgcgatgccccgccgtgacagtcgtcgcccaatcaacggcctcgccctccttcctccatcgtcccgctcgcacgaatctcgttcgcagtgacgctatcgcgggcctgcggtgcaaggagaccgccacactcgccgtcagggcttccatgctctcctcctagcacgacggcggctgcggtgagccccgaccctacttcattctcgaaagcttggtcgccgccgtttttttgacctccgtgcgggatcgggtgggttggttttttgacagactggtgaggctggtggcctgcgccttctacgatgaccactacaggtgcaacccgccacatgacgccatcgttcggcatgttgtgcagctgctcgacatccgcggtgagccccgaccctacttcattctcgaaaccgtaactggcgcccacatccctctctattccatggcggagcagga

SEQ ID NO: 60468 - DNA, 720 bp, Zea Mays
agacaaacgagtttgacttggactgccatgtctctcatcaaataaaccagtactcctcgtccagacgtaattaataaataaaaattgaattgttaataaaataataagtcttattccctgacggtggagagtgtttgagtttgaccagggatgatgcatgcatgggcatgcgagcattgcttggcaaggaatcatgatcaagtcagttatagttatgggagtgtgagtccgtgttctaataaaatctagccgctagttatgctagtacagtacatatggccccatcccatgtggcctctagatttcgtctgatttgatttggtttgattaaacccttcccagatgttattaactaaccagactgcctgcctgcctgccatttgacagtgattaaaataagcagcagcatgggtttgactggctctctttctcagatgacagtttataataacagtttatgtaagatacctaccctaccactagtagcacagtagtaagtagagtagcaagagctggggtggacagacacagacaggctgagtctgagtgattgataattcttgcttgcactaggatcaaaaatcaacttgacattcccgacaaaataccaactcggaatttgttccgtttcactcccccaactcctcccatacttctcatactctagattcctagggattgtacctcttcctacgtaccccaggttgattcttaatcctg

SEQ ID NO: 60469 - DNA, 299 bp, Zea Mays
ggtgaggaaagccgcgatgacgtctgagtcagtgatgttggggagctcggtgcgctgcttggagaatcgtcgtatgtgctcatgcagagtctcatcctgcttctaccgacaactccaaaggtccctggaatttctgggacacacatatttgccttggaagttcccccccacaaccttgaccaggtcatcctagtcatggatttgggcaggtagaaggtgcttaagctatgctcgagaagagtcggataggaacatgggtaggttaagaatggtgagattgtcatcattcgttcctccta

SEQ ID NO: 60470 - DNA, 452 bp, Zea Mays
cttttcatcctcgcgcgacaactcctcacgcccggttcagctcggtcgtgtgccatgtcgcgcgcacaaaatcacctaaaactgtgcctgacttgagtcccacccgtccgcagcacaagcatacccccttgctcaaccgtttcactgatctatcggccccacacgtcgtaatcatcctttccaaaaccgcctctcctcttgaccccgcacctttgtgtcgtgcgtgcgcataaaatggaactagcatccgtgtgtgcatgcgtagaagtgccggcgccctcctctgtccctccccacgcagcagctagagcccgccgtcgccaggaatccttcgtgtgcaggtgagccctcctcccctcctcacgtcacttctttcctcccctcccctcagcgatcttcttcctcgcgcagccccatggcggacgcggctagggagtcgttttcccctacgc

SEQ ID NO: 60471 - DNA, 524 bp, Zea Mays
tagacaaatctttcattaattcttactaaataacaacaacaaacatcaactcccactttgacatgcttcacatgatacgatcccaccattcttcgaaatcccaactcatatcctcacattgttgtgccatgctaggaacttcaaggttctcccaaaaatcttgatcctcaaaaatcatttcccacaaactctttgactcaaattcatcattgtaatcatcttcggtgcagtcatctagagtgtaacatcttcggtgcgaggatctgttgactcgaagacaaccaaagaagtgcttgtgtctaaatcttgtttgcaaactaaagtagtttcctcaagaactttacaaacatggtcaagatgattcacaacatttttcgccttcggaccttgcactttataaggcatggagcataacctggacacgctgtgtaagagagttttttgacgcctcatctcttgtatggcatagcccagagaattcttgatcttcacatgagtaaggtaatcaacgctacgctgcaaca

SEQ ID NO: 60472 - DNA, 649 bp, Zea Mays
atttgccgcgggtcgagaccgaccggagggattctgggccgttcgaccgcgagcaccatgagaccctgaggcctcaccaccttgcatcacatttctggatcctcgcccgcgcttggatctagaatgtggaggagtttcttcacggatttcttgatcatcatcggagtcagtctcaactactgatgggttcctacgacgcaccatccttaagataaaaaataaaaaaggagaacaaatgatgagcgaggagatcgatgttcaaggattttaacaaacacgtttgagtaaagacacgtatgatattgagcatgcacttcaattgttcatgcgagcggttcaactacaatgaacaataccaaactactaaactcaaacaatgttcgagacaaaacaagacagtttaagtgttgcaagcacctaaactacatagtatccttgaaaagatacacaagataatcaagaatggtgtgagttcgagtaaaaacatgaggaaataaggcaatacctcgatctgacgattcaagcatagaaatcccaatgaaagtgagggagttgatggaggaggccaagaggaacaaatctcccacaaactcccaaggatttgatggcacaaatgggatttggagagtggtgtgagtgtgtgtgagag

SEQ ID NO: 60473 - DNA, 467 bp, Zea Mays
cggattcatccagagggtatcgtccctgcagacgcgaggctgagccagaagatccgacgatggtcgaatacgaagccaaagacgttgggcaggggtagaagggtaaacaaaattgtattcaaccttatttgatttattaaacgaccaagtttctgtttattttgtcaaacggaaggattaaaatagagattaattgactttagtctatagtccctcacatgggtgctaaaaagtaatatttactttaattgtccttatctagaaaactgtcttgaaacaaaaaagtgatattttagtctttatgtgttgtatttgtttagtttatacaatcaaacatggtacatggtagggactaaactttagtccttatactaatagaatcaaacacggcctaaataattttaggtggacgatacagatgataataacatctggacgaagctcaatctattgatggtaatctggtg

SEQ ID NO: 60474 - DNA, 487 bp, Zea Mays
gcacgcctcatccaatcttgagtgcaaacaagtacatctctagttgttgttcttctagatggaaccccaaaccgtggacaagccttagacatgaactttctaaaacctagtcgctcagcaaaagcaaatggaagctcatatgtaattaacatttcagtaaaagccaccctaagcatttctggatcaaacctccaagcagtgatgctagacctactaccatcttcactacaagcttgcaaaacaggctacttgtcatcattgatcttattgggattctttttgcataccttcaagtgttttcctaatgcagatgtaccattgacctttgcctcacacttgataataatcttgcagtagttgcaccttgcttccttcacaacactagaatctttgtctatgatcttggtgaaactctgccatacctctgatctaggtgccatagcttttcttttcttcacctctttctctgcaggttcttctgcaatcg

SEQ ID NO: 60475 - DNA, 472 bp, Zea Mays
tgaaaattgaagttttgtgctggctgtgcggtgtgaatcaaacaacccaattttcattagaagtaaatctagaacaccagtactagctgaaagcgtctgaaacacaaaattcacgtgtctcgactctcgagcaacatcgctctcttaaattccgcgagaatataacacgattttcttaaaactttccaaacttaccctaacatgtcaggcggtcagcttcacctcactaggaatttctgctgttgccgtttgtttttcctcttttacgtcctgtccaacacgtacaagtgaacacctctaaaccctagtgccctgtaccgaactacggaatgcagctcagctgcaggcttcgttcatggaagtctagacaaaatttaatgccttccatcaaacattccggagaaattctaggatccgagcgaacgaaatctggcggcggcggagcatacggaggccaagtgatctactcctg

SEQ ID NO: 60476 - DNA, 323 bp, Zea Mays
gtgaaatgaggccagaacgtaccaaaaaggaaggcacccaatcttttgtttggtaagtattcatatatcagtaacttctcatcttcgtgaatgcaacaaccaagaagtataactaagtttatgtgctacagtttggcaatcagaactagagtacttcatttccaaattcctcgaccccctgtgtagattttttagtgagccttttgacagctactttgtcttccataacatatttaggagacatgtaaccactgtttgaaccatttcagagaactacttcctctgttttaggcgcgtgcttcagcaactcatctcttgttttc

SEQ ID NO: 60477 - DNA, 437 bp, Zea Mays
gggacgagccacgcactcgcgctcatgcagatgccatccttacacaaatacccatcgttgtccatccattgaatccagtcaatggttgagccttgctctgtccacataaagagtaaccggggggaaggatagatctttgtcatcttcgtgggtcattgtaagttacttcgatgcaatgttatcgccttccctttccccaaaactatacctagggtttactcaagcttctggctcagtaactttgcaagtctggtgaccatgttgccgacctagcaacctcacgcggccaagcgaacacggtatggttcgacacctttaatttggtgttttagtgcccatatatgttggtgaagctcaccaaggtggtcgtttggtcattactattatagatagctcggaacgcgatctcgacaccacgtattaaccccgtgaactgc

SEQ ID NO: 60478 - DNA, 477 bp, Zea Mays
caacgtcggagtttttagagataactgccaagcgactggtggtaacgtcggtgttttagaaataacagccgagttagaacgggctgtgtcagacactttgaggataatagccgagtgatgatgtagcataccggtgcttagaagtgactgccgagtaatgacatggcacgccggtgttttagaagttaccgccgggtgatgacgtggcacgccggtgttttagaagtaaccgtcgggtgatgacatggcacgccggtgttttagaagtaaccgccgggtgctgactggacgctttttggaaacggtatctgactcgggaatatcccatatgtactgtgctttcagccgcctctgctttccgtgccctagttcttgttttcctgcctccagatcctctatgcaattcggctcccgctctgttcgccagtggtgttgagatggcgcctaagcgaaaggcctcgagttcatccgctgcgg

SEQ ID NO: 60479 - DNA, 632 bp, Zea Mays
tttttcttaagagtgtgagcatagttgttaagaaaatttaggagataattaagcccaaagttggactgtcaggttactaaggtctgaattttcagacagacagtgtaaccactgagactttgagcataaattcaactatgatccagcaagaatctgcccatggctgctatgacaaacttgtagctgatttgtagctctccaactttgctgcagagcatggagtatgttaccatatagatttgtgagaaaatcgagcctaaatgttgactgtcaggcgctctgaataagtgctcgccatggtacagtgactgaaacggatcagaacgccagcgcgactgtcctcaccgccgacgactccctccgccgtgattcgtgtcaccggcgtcgggattagtgcctgagtggatggatagcgctgcggggtaaaagaatcttcgccgtcggtgagctggacgccactccggctagccgcgatacttctcccctttctcaccgccctcagattagaatctcatcgccgttgtgccatcgtcgttgtccgccgcatgtctctggcgatctaccgcatcaccgtgactcacccttgctccccgttgatcgccggagcaattgccacggcgctggacacccag

SEQ ID NO: 60480 - DNA, 912 bp, Zea Mays
ctcagatccgcgccggcgtcgtgattcacgcccgactgaactcagataagcgctcctcggtaagaaatatcgtgcgggagataaacttcggccactattctactccggccaccgtacacgagcatgccacgaccgctgtggataagttcaccagagttagccgtctgctgctcggatgacacgtgcctagacgcagtacttcgtcatagtgactcactctagcacgtctggtcctcgccggtgaggttgccacggtaaatgccactaatcccgagcgccagtaaccccttccatctccggccgccagcgcgtcttcgtgaaattggacgccaccgctgttggagcctataaattgcctcccccacctgctccgctatgtaattgtgcatccagtaaaccagctctcacctctgatcgtccgccagagctctccaatttgggatttccccgaaatcaaccatgaacaccgtgccttgaaccctcaccatggtcagcgaatcccaggtatgttcatgctccctgttgtcttgattcaacatccttgggctctcctgatgctccccgaccctaccaattggactaggaccccttagatcaccgggaacggactcgattgcccgtagtgcccgctgtcactatggacagggcgtgttagtgcgccattagtgaaattagttgagaggaaactctcattaggacttgaattcgatctctgccaaagtagaacgccagtgatcgagtaaatcggtcggtacaagctcaccggagctcggttccccaccgttcgccgtcgtggactagaggttgtgaagagagaaaagcgcaggggtgtttctgcaagtgtcagcgagacagaggaatagtgggagggactctttaaagaatttcaaaacgtcagggctctctgcgcaa

SEQ ID NO: 60481 - DNA, 821 bp, Zea Mays
aagtatcaaaggctcatatacacgccacatatttaccaataattaatatataatagtgacagctaggcagagatgatgataaaaggcgcgcgaagacgtgtagcattggaacggatccaaacatgtgatgccaattaataaagggaacctaagataacaacatgcatggagagagacgtatcatttaagaaatcgcagcagaagtagtagcccggcccatgctcccctctccatcagctgcttgccgcccaaaccaactttgcattgacaccattaatgcatgcccatggatggatggatcctacaccattcaattcatgaccacgctcgtgattagtagcacagaaatttattttccctgccgcgtcgcgttcgccaccatggtaggagtatgcaacatgcatgtcacggtggtccggacctgatgaactgtcctgtccataactactactgtggggaatgcttttaattcatttgcagcgatcagaatctctgtcactgctgatccactctagactctccaccaaactaactgtttcataaattaatgactggaatagtgctccctgtgatttactgcacatatgttttatttttatattatttcatatgtactttcattcgaaggaacatatacgtacgtgtacgtgcgtaggtctatgcaatagtaccaccacgctagctaaaggacggtgagcggccgagtgatgagctataaaaaatgggtcatattccttttcaactcatatatctttttaaggattttagatataaagtgtaatatttattcttaccgtcgtaaaacacgggcactgtactag

SEQ ID NO: 60482 - DNA, 522 bp, Zea Mays
attccgcaaagagttccatttggtgtctgaattaattcatctgatgttatgtgacagaattttcatgctccgtgaagagaattagccacagtgaaacaataatctttgcgctaaaaacatgggtatgcataacatacaccaatagtttttcataaagaagaaagctcgtagacagatatatccagaaaaccataaaagtttcagagattgcatgaagtaattccccaacgaagccatacatgaagatttccagagagaccaaaagaacaagcgacataagtcccaaacatcacaaatattcatgccatcaaccaaagagccataagctctttcaaagtttgttgtgacaaacaaaaaacgcgcaacatgcgcatcaccatagacaactatcttgtaattatacataaataaccaccaaaagatcccaacatcaggggcacagataaaactgcacagcccaagggaaaggcattaagcctttcttcccagcagggtcgcaagaccccacatcatcatcatcat

SEQ ID NO: 60483 - DNA, 757 bp, Zea Mays
ctcagaagtccctctccaactgaatgtagttgatattctacaagacataatcgttttcaaccactcaattcaacagtttgtttctgacagccaaataaacagaccaatttgtcttcccctaacaaaaataccaactgcttctgttaggcacgaagtgttgggttcatttcgatgactttcatagtagtaactgtttcatgcctattgcctttttgtctgaacaatccattctctcctggtagtcgaatccacgagtggggaactagatgtgctatgaaaatgatgcttatagttattgcattctccaataaccgttgcagcaaatctcaagttcgagtttgagtatagctttgttaacaatgttagaagacatgacatgaacctgattagagaactatgttttctacttgagctgtgtcttgtttgggatggaatatttgtcattatcttgttgtgaaccagctatgttgctatgcccttgagttatactgatggggatgatctcacacctttttattatgctttgatggtcgtcaactctgtacaacaataaaaggtgagtccataatctctaaattctatagagtaataccatactattctttttctccacttctcatcttacatccacttcataaatagttagatggcttgatttagtcattctatgcttgctatgttgcacggtttatttttgtcctatatactccttgtgcacaagtgcatttctataatgttgtgctggttgctttaggat

SEQ ID NO: 60484 - DNA, 603 bp, Zea Mays
ggaaaactttggagcaccgagccagataagacgtaaaattatcctcgctgggagccatgggaatagggacttttttgtgccactcaccatcggttactttcagcatccgagaagatgcctcccggaggtcgagcaaggtcatgacctcccctggctcaacgcacgtctccaccagctccttaacaaatctgttcgaggcccccacaatagccacgaccttacctttagagcacccctcatccacaccaccacgtgtcgccacactctttctcttgcgatcatcaatatccccagcatcaatagagcctccttaggatacggttcgcaccgaagaccattcaactcgaagacacgattcaacctgacattcgaacctcgtatgtcctaactccttggcatcttagtcttcgtcgaatatttctccataacttttacagcttctgtctccacctcccttacaaaagtcgcagcggctcgaccccgcacctcaatagtgaaaacaggactcaacaccattcgatccttcaaaaaggcatcgggcatagcttcacctcacccacctcccaaccatgggcaagcggccacactgtgtaggcaataaac

SEQ ID NO: 60485 - DNA, 749 bp, Zea Mays
gcttcaatggcatctagctagtcattatttggctcatcaaactggctcctatacctaaaggtataccacaggtaaactaaaccaccttggctggacctagcaatagtctccttcggcgtttcccacccatctgcaagtggccacactctgtaagagatgtgctcctacaccaagtcccttgtgcctatgtaggcacacaccatattgaaagctacttggcatgtttgtatatcatttccaagggcagtggctggcctcataatgctgaagcgagatcatatagagcgttgaatgatcccttttacatcctccctttgatttaggtcattcttcatgtagaaccattcctgcatccaggcccccgaccatctcttccgaaatgtgggaactagatagcgcaccttagagcgaggaccgaagatgtaacaaccaaagttgttgtgatactactcttttctggtagccttcgtctcataagatagctcatgcatgtttcaaaaacattttacatttggttctagtccttggctcctcatagcccatataaagatccccaccttgatgatggcttcgggagtaagttgatgcaggtaaatttcgaaggccttcaggactttgaccaataatttattcagagggaaccaaagccctgccttcataaagcttctgtaaactaccactttgtcagctttgggaagagggacattattctccccccggccctctcaatcgagatatcatgaaagtac

SEQ ID NO: 60486 - DNA, 551 bp, Zea Mays
cttggctcacgcttccgcttttcgctggagcgacgcggcgaacctcgacctttcttgtccttgcccatggtcagatggaagagaagagggagttggaaaagaagcaacagatgattggaggatgtgtgaagagaacaatggtgcaaataggctacttataggggccgaaggcaactgttcatctcctaccatgctcaccgaatagtcgcaagtattcaataagcaattcaaaccgcctgaaagcaagtcaggcagcagacgccgctttgcgtaacacgacaccatttggactaaggtcaactgctcgggcgatatgattacgtcctgcagtcacatcaagttactactctaggacagtgtgctaaacgctctgcgtaccaagacgtcccttagtcacacccattggggggacagccaggaatgttcaatagattttctaaacaagtcacatccatatagtatacgcaatcaatgtattgagacagaagtaagatatcgatagagatcaaaggaaagccaaatattgctactgaactgcaagtctagtcagc

SEQ ID NO: 60487 - DNA, 832 bp, Zea Mays
gatggcgtgaagcgctgatgtggcttcgctcatctcatcggttgttgatggtgtgacgtagatcattcggcgggtgggcgagaggtagaagatgattggctgcctaagtgagtactcgtcgataggcctccgcatctggggttcgcgggaggccattgtctatctgcgctaggacccctccaaacttgcttagcatgtttagcgcccaagaaaagtcatggtaaaggttccaggagaggagcgggttctctcgccggagcctagcgtcttgttctgcttgctcccgcccgtgcacctgagcttggcgacaatcacggtggtgggagttgcaccgttatcggtgcgttctttcgtcaggggtatcaaccatttctgaagctccgtcccgagagatgagctgagccagatctcgctctctgccctagtggtggtgtcgtagatttcaacgcctgtttcgccatcgtcgtgcatcgcgcgggggaggctcttcccccagcatggtgttttcgtcatcgtagataggagacaattccaatctcccctgaatgaagaggatgtctaggaagaaaggtgtgggtgcagtggtgtgttccttctcattctccattgagggcggagcaatcgggcggcagtccgcagcgcttccttgccccggtttggagtgtttgactcctttttctgggtaatccgtgtccactccttagtgggcgacatggataacagagttcgtcgagttggggaggccattgtcgaccggccttctaccctctgggggatcttgagcctggactcgtgtgggaccacactccgtcacaccattggcggggttttt

SEQ ID NO: 60488 - DNA, 696 bp, Zea Mays
tacacatgtatgttgtaaactagaattaatatttagacaaaatatatcatgataaatgcaaaatatatcacaatgatatgcgggtgttggctagggaataagagaagagcacagacgtttgttgtgggcgaaacacgtgctgggacgacgaatggactacgggcactaacaccgacgatagtcacgttggggaaccaaacggtgggagctccctcggcgaacagtcggtcgtcgttgccaatagatttcctctaggcactgtcggaaatgatttaggggagcgctgggtagatggtccaccattagtggtagagtcttgggtagtggaggccaatgaaatggcaccgaaaccgcctagatccgacctcaccgaggtcagaaggctttaggatggggaatcagtagtggataaaagagaccaaaaggaggctagtaggaggcatagaagtgttggagctagaggcaaaccgatgagaggatttgacgagaaaaaatatcgctcgtgttataacggatcggttgaggtgccccatagtacaacagagatacaccatggttccttcaacttggagtgtcgagctaggattggtccttcaccaagagtcgtatctttggttttttagtttacccctagaaacgtgtaaggaactatgaagttattggagttgtacatgctctaagctaggcacgactcat

SEQ ID NO: 60489 - DNA, 469 bp, Zea Mays
cagggtataaatgggaggccacacgactcttcccctcggccatctagatgcaccatgcagagagagagagagtgggggagaatctcgtgagcgttcgccggtggaggaaaaggacgccgccgtggaccacactgctccgtggctgggatattccagtgtttgctttgggtgagtaatctcctctctgtttcaccgtatcctcagctgcctctagctctagccgcgaccgcattgggatacctaggcactggctcgttctactctggcacaactccaccgggagggaacactgccaccaccactactgggttccggggggaagaagatgaagcgttaaccattggattggatatctgcgggtaggattaaatcaggttcaaacgggatgtagaccgtcgatcttgaagggacggccaagatcatatcgtgcgtaccccttcgcggcgatgcgttgtgtccgtccgattgg

SEQ ID NO: 60490 - DNA, 568 bp, Zea Mays
caccttgaatgattaattacagtgcacatccactcatgaagacgcccagaggagtcacaggacagagaagaagagtgaagtgtagcagctgtactcccacacatgcatccatggcttcagattcctggctttactgggtacgtactgtacgtagcttgtgatcataaaatatggaacatgctggtgtgcatagtttcagctcacaaaatggtcccggcagaacgtcgttatgccattgccattcatttcaatttcatccatcgaaaatggcacagctagagatcatcagctatatatatattgactggaagatgacagcgcgcgtgattacaaaatgcttgtgcagaaaagcaaaagtatcgcgccatgcatgcaatcaacaacaaccatcgctgcatgccccacgatgaaccgtcgccgtcgtgtctgcccgcgccgcgccggagctcccgacatgccacgcaacgtgtgcccggcccaacccgattcgaggggaccaccacgccagggcttttgaggtgctgcaggccatggaccagcaatcaaagagagttaaagatcgctagat

SEQ ID NO: 60491 - DNA, 603 bp, Zea Mays
gccaagccaagacaaccctaggatctttcctttctgatggagtccctcctggggagcaggatctaggttctacaggaactcttcggtatctctgcggatatcgcggacggtccgatgacctaccgcaaacaatccgtcaccttatagagaggttctccgaggtctcgtttctcacgagcgagatttagggatcgtaagtgtttagcctaaaaaatgcggcaacaatctgctactcaaacgtgtcaccatggtgtgttgagcatcatcaattataagagaattcattagccccctcatagcaaccacacctccactagattgataggagaattcatccctcactgcccacaactcatctgtaacccgtgaacaccagcaatactcaatacttagcatcaacatgacgtagggtattacgtattctagcggcccgaacctgtataaactctcttgtgctccgacgtgcattcacatgtaccatcgagtagcaatcaaggatgttgtcctgcctaaaagcataatgtgggatagtcgtgaatcaacgtcgttgtccctatctagcgcgccaactgttgttgtttatgacccgactgtgcaccaccg

SEQ ID NO: 60492 - DNA, 841 bp, Zea Mays
gtcgtcgatcgcgcccttccctctcctcggcgccctctcaccttctctcgctctctataaagggcgtcgtgcactgggccatttcattctgcctccctgcctcgctctcacacgctcctcttcactgcttgcttgtttgcgtgtgtgttcgcgccatcgcgccgctcgctgtgactggaggacctgctccttccctgtcgccggcgaagacgagtccccttcgacgaatacatgcccagaacgccgttgagccgagtgaagccgcgaccccaggcaactgctaccggccaaacccctctgctcgatgaccctccctgctcacgcatcgttctacgcataggaaacaatgaaggtagaagatgactcaatcgcgatctacccctgcaagctatatttaatatcgttcagatccctgcaacaatttctccattttaaagtcatgtatttgagctcaaatgaaatgatgtttgaagaattagctttataattatttgataagcaaattttagtttgtaattctattatgtctatatttccttttatgcaatttgaattatgcatgttgggtcgagcgtagttctccaaataaaaaaagtagatcaaattttgattagctagaaataaaatataattacccttgctcttaaggtgtgatatagaatcgagggtcatatgttcatgcgcagtatatgcttattgaccattcgcttagaaatagtaaagtttctatcataattgaaataatcttattttgtgaccatatccaccataatctaaatagtagagttaattagtagtttaagttagttcacttaaatattaaggttatgtgatttttaaa

SEQ ID NO: 60493 - DNA, 485 bp, Zea Mays
cttacaaagtacaacttgtccaccagagttttgaggtactgctattgatagaatttcctgaggtgctcaatgttccacgaattccccacttcggtgccatccatttgggtgagtcggtaggatcctgaccgagtaacttctgcaacgatgaatggtccttcccatgggggtggcagtttgtgccgtccttctcccgtcagtactcgacagaggactaggtctcccactgcgaaggatcgatgtcacactgctctgtcgtggtagcgcctcaagttttgctggttcctggtcgactgaatgaccacgttcaaccgttcttcctctaatacatcaatgtcttccagccgagttgcttttgccccaactatgcttttgaatgttagccctgacactccaaagatcaaatctactggtagtactgctttcgatccatacaccatgaagaatgtggtgtttccatgtaaagctcggcttggctgtgttcg

SEQ ID NO: 60494 - DNA, 682 bp, Zea Mays
gcacagtcaaagtcctgtgattatattgctgtgcacagtcaaagtatatttgggggatttagagaaaagattcctgaccaatatcagacacatgcagtatcctttaacctcacccaataggctatttccactgaaatatgattgcatagtggactactaaataccaacaagcagtagcagtacacattgcaaggttacatcagcctccgtcctcctgacgacggtagtggttggggctatcaggctgatccacaagtcaggaactgtcaagtcttgtttggagttttcagaagcgcgtaaatggacagatgcaggctgcagctggcgttttggcggttattaaccaccttttgcagaatgcttatatggaattaggcactcactcataacaatcttttttcccactttttactagctgagtaatggcttcagtcactgaaattgaacgatggatgctaactgagccggtagtaattcagaacgcaccaaaactaacactgcgctgatgatacgatggatgctaacttttccgagtagacgagtggcgaggaaggcaacaggaacgcagaatttccagcagagagacgaacgaacaagcccagggagaggtaggggtaattttgacccttagatgataaatacatgcaaacaaattataaaaaaggtataatacacgttaaat

SEQ ID NO: 60495 - DNA, 932 bp, Zea Mays
ataataagtaatttttccctcttatagaggtatggcatgtaccaagactacccaaaggaaggcgactggacctcgaggtgtaccccggcaccagttggctcctcaacatgaggggagcagtagcggaagtaatgatcccataggggatctcgaggtcagggttgaatgattaacaacggaattgtgtcatggaagtagggagcgtgtgcgacatagctgtcgtattgctgagctgtcagcggaggttgaccgcttgcagcgagagatcgtggaacgagatatggctatagactgggctgtaaattcacgatctatagcctgggattgcgaggcgaatgcccaagcctgggtaatggagctaagcgtagccctagagaatctgcaagcatagaataacactttgcatgaggaagtgcacttgttatacgaccagctgcatccgaatgtaccaccggaggttgcaacaatgggagccggaacgtcaggagcagctggcggaggaccttatggggagttggatctctttggagcccctccttccatgaacctcgcagatgatcgttctcccaaagttggcagtggagcgggagcaaccaaggatgaagataactagagtagtatagtagtaggtggtttccttatgtaaattaaataaggaaagttgagttgtactagtgagtatgtataatttgtaccagtctggcataatgtaataaaggtagtgtacttgtggcctgcaataattgagtgtgttttgttgtttcttcttcagatgccatccaaaactcgtgctcaagacgcagcaggaatttcccgtggtggggaggaaactccgaacccgccgcttgtacctcccacgttggctgaggctatcactgccttagttaatgccactgctgataacactcgtttcctgcgagaaatggctggga

SEQ ID NO: 60496 - DNA, 633 bp, Zea Mays
cgtcgggcggatcctgatgaggaggcatgcgttgtggtgcctaaagacattgttgtcgatgttcttgccatgcctactgccgtgagccgaccctcttcttctgctactcctgcagccgaggcttcctgcaaaaatgctcctacgtagtgattcgctcgaatcgaaaacactttttcattgagttagtactttttagtgaaacagtgtattatgaattccgtgtgcgtgtaattgtgctatgtttgaaccgatcattctgttagcagggtgctgaaaccaccctagggtatgtgaaacttttcttcaaagtgctcccattttgagttgattattttgttagtagggtatagtgatcaccctgggttgtgcaggcgtaagcatgtcgcaccgacttaaggtgtttccgacttaagttgattgctttgttagtagggtatagtgatcaccctgagtcgtgtaagctcgagcacatcgcaccgacttaaggcgtttacgacttaagccgattgcttcgttagcagggtatagtgatcaccctgagtcgtgtaagcgtgagcatgtcgcaccgacttaaggcgtttccgacttaagccgattgctccgttagtagggtatagtgatcaccctgagtcg

SEQ ID NO: 60497 - DNA, 653 bp, Zea Mays
gacccatgctgttacaaagccgtcattgcaaccatgtcgcacgaaaatatgcacaccgaccaaaactcacaacttctctaatcactccatccataagtcgctcatgtctacatgagatatatattatctcatattcaccttaccttgttttaaaatgagaattcaaaactctaaacgaatttaatatattggcatgtatgaattaggattctaggatccgatccaaaacaacataattttgacaacattaattacccatcttttgaggctcaaaataacatcttgtagggctaaaaaaattcaatctgtaatatagtctagagttcaaacaaactcacatagttcttgctccaattgatggtgcaaacttatcaaactatgatccacctttggatcatttttaaaactcacttaaatattaactaaacacttcaccccatcttccgccttttgtgtatagttggtgtccaaggagatgtgccatggtgctggtgctgttcatgcagcagtgcgcaatcccctaccgactgcttaacttcgttgaaggctcctccctaaaatcctatagcatcccaatcctagtctaagaacaaataccacacccatctatatcttgtctctctagctagttcttctctttagttttcgtgatc

SEQ ID NO: 60498 - DNA, 351 bp, Zea Mays
ctccgacctgcgcaggggagaggtagagcgcagatcgggtagaggatttaaggaaaggggaaacaaccgtgttttcccggtgcgccaagctcaggcaaagctcaccatggccaaagcgctgtcagaagtccagcggcgacagcagaaaggtgaagcaacagcggggggcggcgctgcggctgggtgagtgcgagggtagggaaagagcgagtgtgaggcaggggtgagctgagggagtgttcggggtcttcacctagcactcgggtgacatgggcaggtcgtggggacgtgggcacgctttgaccgcatggggcacgccatgggcacaggcgcgacagttgtaggggaggg

SEQ ID NO: 60499 - DNA, 776 bp, Zea Mays
cgtagctatggaagtggtggtactcgacgatgaggacggtggctgactagattctgtacacgacgaaagggaaatcgtggcgtccactatcgtgggcaccagcaacgtgtacactcacacgtgatggacctcccaccgatggcgaagcgggtgagcatggcagagaggctctcatagctcacgtggtgtttgcaggcccagtcctctggggtttcgtcaaaggtgaccgagaggggcatgtaggagatgatgtcgtcactagcctcctcctcgctagtagcggcgtccgagtccagcggtgcagggaacatgtggtggggggcagtgacatgcatgaagagcatgtgtggcgaggatagagctgcctacgacgtcactaagctgcgcgagacggtgacgagcagcgaagacgatagggacggtgcatggaatcggtgtccagacagacgataatggtggcttaatcggtgttagatggtaggagcttgtctaaacgggcgaattcagtcgtgtctcgtttctgttctatcggagccctcgacatgatctctattgtagtgaagcccattctaaagtgttatataagagcaaaaatcttcccaaaatcaaatcagataccaaataggattttggtgtgttgcattaaaatagggaataataattatcattatgttctgtgtactctgtgccggatcgtccgataagatatgcagaccgtctggctgtgtgcgtggagggtctaaccacatagctggaccgtctgtagatgtattcgg

SEQ ID NO: 60500 - DNA, 335 bp, Zea Mays
cgctcagcatgatggtgcaaatcgttgaccaccgcgtcgagactttggtagatttcgtggtggagggagaagctgcttcttccacaccataggttcccgaccgccatgtgctgggcactgctgctgtgcacactgcacggcagcgtacggctgcacatacatcccggactccatcgagggcaactctggaagcgttgtcagcagctagggagttgttgcgacaccctccaggctccacggcttcaccaggggccatgaagcaatggctggacgatgtcgaccgactgctcggtatgacacattctacctcgaccaggtcgaggccacggtcatcc

SEQ ID NO: 60501 - DNA, 712 bp, Zea Mays
ccaacccctcgttacaatgatagcgaaaatgaatctgacctcagcatttttcgagggcaactcagacgcgcaagtggttcaacattgatgagatgatgccatagatggatcaattttttgatgaattctagcatcgatcaacggatccaactccacgggaatatgataccctttttataaagggtgcaggaaatggattgcctgatttcattttctggttcaaacaggaggtaacatacttagtttgtcatttgaaattgctcttacgtgtgaataatataacaatctagcgtgtttgaacatgcagggccaaaggtcgtctatgggtgctgagttgaggcaaggagacaatggcttttcctataggtttagggcattttctaggtatgatgttaatggatactgttttcgcaacaagctacgactaaattcggtccaatcgaaaaaccacatgttcttgagtttttactcccaggcttgatgaggtcgagtattatggaagaattgaagaattatatgaactcaattttcataggtccaaacctcttactccagtgatattcaaatgacattggtttgaccctgaaatgacgatatgtacacatactaatattgggccagtagaaattcgacaagattccatcttaccaggagacaatgtctatatcgtggcccaataggccacacaagtgtattatctctcatatgcgtg

SEQ ID NO: 60502 - DNA, 658 bp, Zea Mays
cgtgtcgcgcgccgaggcgtcgtcgcccttgggttgctcagcagcggattcttcttcctcgtagccgtcgtcgtactcgtacatgtaatcggcggcggcgctgtcgtcgtcatccgttctctgagcatcgactcccgcgcccgtgtaataagcgccggagcttggtctcttgttgcggccgctcgtctcgcccttgtcgtcgtcgttctcctcctcctctcgtcgatctctcttgagacagacaccgccgccgcatgatgccatgccgcgctgcacaaggctagggcagtggatccccttcttggggagaacgagtgtattctaattaatcggacgggcattcattcattctatcgaaacatgtactaagcatggtttggatatattcggggaagaaggaaaggggataaaaccaaacaaaaacgacttggcacgatcaggatcagcggtcacgcggtcgtggctgctgacgtcccgcgcgtccactgagcacactccagtctggcctgcaccaccgtcggtctcgtcgtctctgccaaaaatagagtagaataattctactccgttttctcacttggctttttttgatgggtgacgaggcagtacaataaaatatatgcataaaacagaacagaattttagtagctttggttccacc

SEQ ID NO: 60503 - DNA, 934 bp, Zea Mays
ccgacgtgctctgcatcaacacggtggtagaagacgatccggtctctgacgatgagccgaccgtgcaagggaggagctcccgcaacgagaggcacgtcatcggcggaactgccgccataacatccgacatcaccatgccactaggaaatgagacccaacccaacctatttcccgacacaagacgtccgaggtttgggaaactcctgacgaacaggagtttcgcctgcaaggaactcccgccagcgaaacctccgcctcgccttagagcgtgagcatgaagcggctcgacataacaataggacctcttgtgggcaccaacttcctcatgatctacagccggagtccgcccaaaccatgcaaaccccaagctaggtcgggcgtgctggcaaagatagcaaatgatctaccccgtactcctaacaacgagtactaccggtggatcctccctcaagcgacaaaccacctcctaccaccggctcgtcccgacggtgacgcatgtcaccacatcaatagtcgccatgatgcgtgagcctacctctcgattgtgctgtggcaagacacactccagtggctctaccatctccctcaccacttcattgtccgctgggccgacttttctagattatttgtgcaagctcaataaagctttgaatgcactaaaacaagtgcctagatcctagtactctcagttaaatgcaaagttaataggattggagtttacatcatcgaagtctaacacatatctcttcttccacaataaaaacaataccactatatctattgaattatttagatgaaataactgttgcaggttccaccccagtaggtgccactgcattattaaaggatcttaaggtcaagtttgccttaaagaatcttcatgatttacactattttcatgagagaacttaagaaactacatgatggactattg

SEQ ID NO: 60504 - DNA, 624 bp, Zea Mays
caaacatcgtattgtgatcgcagcttggtccgaatttcctcagaaaatttttcgagctttacacgcagcaccagttgcgggacattcaggttttgcagtttcttatcagagaatcaggaacttatttgtttggacagggatgaaaaaatgattcacacatggtgcaaagaatgttcgatctgccagcaagccaaagtggaacgtgtggattacccaaacacttctgcaacctctacccatgctagatggagcttggaaggtaatctccatggattttataaaaattctccccaattctgatcattgcaactgcatcatggtcattgtggacaaattctccaaatagtcattttattgctctacaacatcctttcccacctatggtggttgctaaatagtttatggaatatgctttcaaactgcatggattccctcaagccattatctcggacagagatatgatttttaccagcactctttggaaagagttgtttcagttggtgggggttgacctgcgcatgtcgacaacttatcatccatagtcagacggcaaaacagaacgagtgaaccattgcttggaagctgaaagtcgcctagaggggggtgaataaacgaaacctgaaa

SEQ ID NO: 60505 - DNA, 332 bp, Zea Mays
cgacaacgaataagcctccgtaacaagcgcaacaggcgcaattgtggctcgatagtcggggtacacgataagtccacgcaacgtgcacaacaggtgcaattgtggctcgctgatcatggcagacgaaccgtgcctgcagggcatgcgaaaaatacgtgacttggtgatggcaccgactcaacgggagtggtccgactaagtgagagtacaacatagtaatcacatgacgcaaccaagttcgtacgacacaaataatacgtcgtgttgccagggcgcagctaatatttagccaatgtcataatttagccgattaataatatagtctgatcagc

SEQ ID NO: 60506 - DNA, 491 bp, Zea Mays
gccacttgtggaaagctgggatatgccgaaggagaccaccgccgattctagtgagggtggtttggtccgactaaagtataccttcagatttagggagaagtttgatgagccaaatgacgactggctgaagtgtattgaagctatcagtgatgagctacttggagcatactccaaggccgaaagataatgctctgtccgcagcctttggagatcggggcaagaaaagattaaacatggtatttgatgctattggctttgtataccctgattatcgctacccactatgagggcaagagaaaaagaggaagattactgcttcgatcaccccagctgagtcgaagagcaaaaaggtgaaggttctgacccactggccacgttatattgaactgattgtagtacctgaatttggcgtagggtcctcttcggctgccgaagcgaaacaaactgctccgattatgcagagcattgaagagctgactgtagtgccgaag

SEQ ID NO: 60507 - DNA, 683 bp, Zea Mays
ggatactctattctatactacttattaagactgcaatagtagtctgcctctaacatgttctgccatcaactgtgttctaccaccgaaccgtggtacacgtcttcttctaacaaatgtgggctcaccagccgtatacgcccgaccgtacgccgaaccgcatcggtcgtatacgcccggtcgtacgccgaactgtggtagcctgccagtcgtgttctgccaccggtcgttgttctactcgcaccttggttgtaatctttgtgtgtcgtctttgacaggtggtaccctcgtcatacaatgtctgacatgtggggtccatgtctctttgcgtcgtctttgacaggtgggggccaaaaaagccatatgtgtgaggtgacaactatagacaaccaatactacacacaattttccccgcacagaagcttataagcaggcgtgtgcacgttttgttagccatgtggtgctatatggtgtgaagacaaagccaaacacgtcttgggtggcccatatctcctttttgtggcccatacttccttcccagcccagcgagccactccctgctgccaccgccaaacgaaccagcgaaccccccccccctcgtgttcctcctcaagcttggtcttctcagagcaactgccctgctattcctctggcacatagcacgctccacgacctccacttctccc

SEQ ID NO: 60508 - DNA, 586 bp, Zea Mays
cgaggggccaacaaccctgccgcacaaataaataccacattctttcccctccctctttattgcgagccgggggagggcagcgttttcactcattaccgcaagacaagagcgagggcacaaaacacactacatcggctcggccttcgggataatgcccacatccctatagttgaacaagatcatttttaattcctcatcctcaaaaagattccgcagatccccctcaccaatactcgtcccaatcggcgaggacagcagatctcgttgaccacaccgatctactcgaaggcgggttcgctctatccccatccgacggcacctcccactttgcgacatctcaccaacgctatacttcgacaccacttttcgtcgccggcgctcgatcctcgcgccagccaggggatcagacacttcgcccacctccagccacagcgaggactccaccgcggtcacatctaacgcaacaaaataatccaaatcctctcccgaagactccttggtccaagaaaacgggctcccaaactcaccatcagatgaaaaagacccagattcaaaaccatacaaactatcattagcagtcactgtg

SEQ ID NO: 60509 - DNA, 460 bp, Zea Mays
cgagggttaaagccatacactacctgaaaaggacttaccttggtggtggagtgttccgccctattatacgggaactccacatgtggcagacactcttcccacatctttaaattgtgcttcaatatcgctcgcaacattgtagacaatgtgcgattcacaaccactgtttgtccatccgtttgggggtggcaagtagtagaaaacaacaactttgtccccaatttgttccatagtgtgcgccaaaagtgactcaaaaactttgcatcacgatctgaaacaatagtagaaggcataccatgcaagcgcacaatctctttgaaaaagaggttagcgatatgaacgacatcatctattttatgacaaggtctaaaatgtgccatcttagaaaaacgatcaaccacactatcgctccccctctttgttcgaggcaatcccaaaacaaagtccattgaaatatccg

SEQ ID NO: 60510 - DNA, 1303 bp, Zea Mays
cttatttgttttgctggcaaggaggtgattccggagccgaaggaggatgaagttgttgcctttaaaagcttcttcagagcagggcttcggttccctctatatgagataataggagaggttttgaagaagtttgaaatataccttcatcagctaacgccaaatgtcattgttaagctaagtgtttacatatgggctctccaaagccaaggcatgagtgctaatgccgaaggtttctgccgactgcacgagttgcactatcagacgaaggctagggcggatggccttcacaaaaactttggatgctataacatcgcgtaccgaaaggacactagaaccccggtaaccggctaccgcaccaagtggccaaccgggtggacaaatgagtggttctatgtgaaggctgacgagaagaagagggagaagttgatgaccatggttatgagtcctatgcgattaagcttcagaatgacaaggccattgtgccatatgcaactcggctccccgtgccagctggccgaggttgaattcagagtggtggctgccgaaatcagcaccagggatttagtacaggaatacctggtaaacatgacttttccgacctctagcggttgggggatgccgaagaagaaagaagggggaaagaaatatgaacttgttcggttcccctaccgttttaaatttgagaagcaattcaagaaatcgtgcactgaatggctagagatgatcgaaactatgtgcaacgagattcttggcaattacacaaagaaagaggatcaactaatgactgttgccttcggcacccgaccgaaacgaaggctaaatcgagtaatggatgtactgaactttgaatatccagattatgagagacttgacaaaggggccgagggagcaaagagaaaaagagttgtcagcattctgagtagagaaactgcccggtccgtgaaagcagacgaaaaggctctgaagaaggcgaaagtggcaccgaagccgaaggcgcaagcccctaagaaaagaaaacttgatgagataccttctggccaactgaaggtagatgaagcaccgaaggagaccttaaacccttcgtcgcccactgctgtcgaggtggcggaaattctgaaggtaatgactgaatcctcaccattcaagctgataagtcctctgagatcggagctgaccaaccttttacagaagatgaaggtgccttcggctgcggaggagaaggttggagggcaaaagaaacagcggattatgaacgtaatgcaagctattaagcaaacgttgccttcagtttcggcggtgaaag

SEQ ID NO: 60511 - DNA, 533 bp, Zea Mays
ctcgcttgtactctggacacacagtttctctgtgttagaacaatcacgtgtccatgatttcggatattttttgacataaattaggataatacaagtgcagtctgttgaaggaccacgggagtactaaagaaagtaaagaactcattgaccaacaaatgtagttcagaagcaaagattcaaaccaaatgagcagtcgaatcttgtgcaaaattaaggcccaaagacatgccattctcattgctttcagttttatcctaccaatctagtgacccaaacagtttaattacaagtgaatcaacagaaaacaagatctacagactgcaagtatcaaaattaactaagagcagtgattggaacatagaaaattgagttcactaaacataataagcatatcaaagtcacaaaatggtgaagcagtgcccagattcataggagctaacaaattattttttagcctcatacctggattcataggatggacagtaccagtcgccggcggagatgcctgggaggatggagcgcctccattgttg

SEQ ID NO: 60512 - DNA, 423 bp, Zea Mays
ggaaactaaaaggcctagaaaatatggctggttaggagttgtcccttcttatttatggagcctattacacattcctaaccttctcttagatattttatgctaaaccacttaacgctagaggcaaaatggtctaagttctcataggtgcatccaatgactataggcgactataggctcttcattactttgcttcacctcgatgtaagctttgtgatgacgccacatgcatgtcgcctcccattcatgctataaatcaaataggattttgaggcccaaaccactaaacccctcatgagtagtgtatctaatatgctccctccacaatcttggcacatgtccctccaatcctcaaccacctaatcacttctataaggtccctacttgacttggtcaacatggtctactccatatacaattgcactt

SEQ ID NO: 60513 - DNA, 683 bp, Zea Mays
caatgcatcaaatttgaagagctactaaaggagtataactttgtttaagtcatcagacacaagtgttgtgcaaaagttggagttaaatggacagaaagttgggctctcagtcagctcagaatctgaaatcttactaacattggtttgggatgaactttgggagctcttttgaagataatctagtgagtgtttgactttggctactatagcaagattgtagctggattatagagctagaactttgttacagagaaattaacaagttgtcatatagaaatcagagatctaggccttacaaaacgctcggtcagacagactgaatgagatcctgatggtacagtgtctgcagaaatatctcaggttcagccccctcgccgccggtgatcatgcgctcggattcacgccggcgccgcgattcacgcccaattaaacacagataacgatcctcgggtgaaaagatcccgtcgtggatgaacttggagcacactagttgctctgtcgctcatccacttgccggcgacgtggccgcgcgaccatcaccgtagtgccaccgtccctcgcggttaagccacaccgtcagccatcttaccacgtcacaattgatcacaatacacaacccttctattgcttaaggccttgccacggtaacagccacggtcaccgcgcctgtgactcagtccctc

SEQ ID NO: 60514 - DNA, 287 bp, Zea Mays
tcacggtctcatccgtggtcaagatcttttcacccgccacggttatccacttcacacatgcacgaatcgcggcggccggcgtgaatctacgcgcggggatcaccgacggcgaggtgtgctgcatctgaagatcttttactactataccatcacgatcgttcatcagtgcgcctgacagagcaagttagagggctttgttctccaatttttatgtaacaacacactaatccgtctgtagaaaagttgctcttctataaaccggcttcatctttgttacaaagttcttg

SEQ ID NO: 60515 - DNA, 902 bp, Zea Mays
atggattcaattatgatccagcatgaatcggggtgaggggatagtgctcggggtctcggaaatatcaccaccgtggataagtccggccggtaaaacaaatccgaccaccgtactagcttgtcgcggtggaacccgataggctcgccggtgaaccgccgtcgcacggccttgtgccacatatccgagtacctccaccgcatcgcaatgattcgttttagcttcccgtcgatcaccggagtagtcgccacgacggttgacacgagttcacttgcaccagtaacctttccccaatccggctgccaccgcgccatcctcaaattcaagcgccaccgtccttggaagctataaatcgagcccgccgttagctccgcaacctcattacacatcacaccgtccagtatcgcccccaagcttgcaaccgtgagctccaatttcaagtttccggtcagccgcagggtcgagctaaccgcggccagcccctttccggtcagttcatccccctctctccctcgtttgagcactcttatagctctgtgatgcttgccaagccaccaattcgaactaagagatcaccaatcaccgggaacgcgatcaaatgttcataaccttcgctgttctcgtgggcagaatagaataggtcaccattcgtgcaattaagttatgggaaatactctttagatcgtggatttggtttagtccgaagctgagcaccagtcttgatcttctccgaccggtctagctcgccggtgttgggtttcccgtgtggagcgtcgtcggggaccggccggtgtaaagaaatagaatttcttggacctcggtgcaagttgtcactgactcataagcatagtaaccgaacccaacttccattagccaaaaccccgaggacctctgcgcaaagtccc

SEQ ID NO: 60516 - DNA, 437 bp, Zea Mays
tggaggcgagtagcgttcataagtcagtccttgttaaaattgaagaacaatccgataagatatacacataagtgctttaggtccttcagtagcaaatgtagtcttatggagttttatgccatatgttaatgcctctatgttagacccccaaaaatatgctattttaggtgacttgtgtgttaactaatttaagttgagcaatggttaagaaacgctgattaatctgctccaacccatgtttttgagttgcgatgtcaaaaatagtttgctaagttttatactgtgttggccaactcctgtaagtaagagttagttgcgtaagtgattgttatatatatgttgtctcggattgcgataataataggcaagccgacgtgtatgatgtatagtggcctatgttgttgctctggttagccgacttgttagatgtcttggtt

SEQ ID NO: 60517 - DNA, 336 bp, Zea Mays
cacctggctagagtttacctctgacatacataattagatgtaatgcaaatatgatacaaaagctaaacaatacaaacaaaagtgaaaactattaaacaagacccaaaaccttcatcctctaaaaaaggaaccaaacacccaactcaaagcacacttaccactggttgtccctaaaaacgatgtattacttaccatccattgggttagggctagagagccatttgaggctttctacaatgtagcacgaacaccaagagttaatgagctatatgttatccacttctttgtccttctcaataaaagacataggataagaaaactacatggttagtaaat

SEQ ID NO: 60518 - DNA, 390 bp, Zea Mays
atcatatccagccctcagcatgagaagggccaggaaatcggaatagtctgcaattgttgcgccgacaaatgctgctacttggctaggaactgacaagcttcacacaaatgctgctacttggctaggaactgacaaacttcacacttctgaactaagtctgctgtgtccttcttggctgtcgcccagaagaaccgtgctctgaaagccttcccgaccgacgttcttgaggccgcatgaaccccacaccgttcagcttcatctcttccaacaagtgttcacccatagacgtgtcgatgcatctcgtaaaaacacatgtggctccacgtctgtacaggacattgccaataagtgtgtagttggcagactgccgggcgtggagctcgacaactg

SEQ ID NO: 60519 - DNA, 741 bp, Zea Mays
ctaaaatagcttttatctcagaacttccaacatgttgcctgatcaatatatgggtcactttctctccatcagtcaagcattagttggcaacaacaaccgcttattcttcttgatcatttaactatgcatttctcttgaggactttgttttcttcatgctgaggtgggtcagacaaaaacttggaaatgttgctctgcaacaatggaacgacatatcaacataaacattagcataagtcggcaaccgatgacacggggttgaggaagatgaacttaatgtcggaggaggattccatgcagaatagcctagggggcaccctcattgaatatatcaccgctcagcatcatcccaactcaaagcagaacatcttcttcagtgattgctttactagtcaactgggtagtatccttaactgcagattacaagtatgcatgataaacttgatcttttaaaggctgaatgttgcaatacacaaaatcaattactacagcttgagctatcagacccctaccttttatattggcaatcttgatcatcaaagcagtaatctcagtcgactctaagtcggttgatccctctaaacaaagtgaaccattagggagggaattgttgtaattctccaaagtgaaccactcataacgccaccccttattgctatccttcaaacaaatatccatattatcaacttctctgcctcgacaaagttccatactcactcctccaactacctgctaccttttg

SEQ ID NO: 60520 - DNA, 613 bp, Zea Mays
tattcatgataaatcttaatcataagcaggataactttctaggaacaactatggataaccatgatgtacatagccttctagaattccctacactaatcatgataagtcaaaaagcctagatatttttagaccccctagaactatggtgacacgcgcatggtgaggtgttcccccatgtaaggtggaggtgacacatgcatggtgcggtgtccccaattaaggtggaggtgacacatgcatggtgaggtgccccccattaaggtagaggtgacacatgcatggtgaggtgtccccccatgtaaggtggaggtggcacatgcatggtgaggtgtccccctattaaggtggaggtgacacatgcatggtgaggtgtccccccatgtaaggtggaggtgacacatgcatggtgaggtgtcactcatccatagctcctaggtgcctatataaggatgtgccccctcttgccatgacataccatcccactcccatccacacacattcaagggcaaggtagaagaaaagtagtgttgaagtataggagcccttgcttaatcatacgtgtccatggtgtaagtatattgttgtgctgtaaaatttctatttgcttagtgca

SEQ ID NO: 60521 - DNA, 560 bp, Zea Mays
taaagatgaatatcccatgcccatagccgatacattaatcaataatgcgtcaggaaatagaattattagctttcttgatggtaatgccggatataatcagatttttatggccgaagaggatgcgtctaaaacgacctttatatgtccaggcttcatcggtttatttgagtgggttgtcatgacatttggtttgaaaaatgctggtgctacttatcagagggctatgaatttgatctttcacgagctgttaggaaacactgtggaagtctacattgatgatattgtagtaaaatcgactgagtttaggtctcatattgctgatttacgtaaagcctttgataaaatgcatcggtatggtttgaaaatgaacccgcgtaaatgtgctttcggagtatcggctggtaagtttttaggatttatcatccatgaacatggtatagaaatagaccctgaacgaatcaagtctattcggaatgtgggacctccgacttgtaaggttgaagtgcaaaagtttctcggcaaggtaaattatttacgaaggtttatttctaacctagccg

SEQ ID NO: 60522 - DNA, 284 bp, Zea Mays
gtgctctggccacggtggccgtgaacatcacggcaataccgtcgtgttcctagcgattggcgggctcctagtttaattcagtggctcggcaagcatcgtagacttaggagaaagcttgaacgaggaagaggaggaggtgaactgaccgggagaggggctggccgcggcgaggtgagttcacggtggcggaaagagatttgggggaaaactcgaattcgagctcactggtggatgattgctaacgattagcgggggctggctagctgatgactttgcggaactgg

SEQ ID NO: 60523 - DNA, 481 bp, Zea Mays
aacacaaataaggagggcgagagcggacctggagatggttgtccacgacgcggcatcacacggtggcgcggacgaccgatttgggggaagaactaaattagggcgctacggtggctaatcggaggcgggagtgggtgctctggctttgtaacaacctagcggagctggctgtgcactcaatttatagcatccgagagcggtggctccgaatttggaagaggaaagctggcggccgaagagagggggtgagtcaccggcgcgaattaccgtggcgttcaccaaggcgatgtctcgggcgatggacatgctacctatggcgatctactgcgacgtggtaactcttctaagtacgtggcacaactacgaagggcggagaactctggcgaggacacctcggtcaatcgtgcggcaagtggcacggtgaacagtccggtgataaggctccaactcttccctgcgttgagatctttcaccgtcagcc

SEQ ID NO: 60524 - DNA, 677 bp, Zea Mays
ccctgggcttcggatattaaaggaagcccaggtcggttccgaggtctggtccgctgaggcaggcgcgcctgtgtttaacgtagtgctgagaggcggcatgcacgagagacagcgccgttacgcggttgtttgaatggcaaggcggtaaacataagggaaaggcgcggaattatagggaatagtttccacatgcaaacgtgattactatgatacgtgggcgcgtaatttatggatcttgcatgggaagtaatggcgcaggtaaaaaaaatgtagcataagatgttgaaagctatggcataaaaccgaaacagcataatagttgcataaatagtatataccatttggcgtaaaacgttgagtcattgtgcgtaaatagtttattatggatattagttttacattgacatcgccataatatcgggacggtttcggaaataatggggaggccctgtaaacgtggatgcggttacttgtatagtatccgtgatttcctttcattcgaaaaaagaccactaagcctgcataactaattggagttggagatggccggctctggagattcgccggcgatggaaggagatggcgttcgtcttgatctagagacagagggaggagttgatggtaacacactggtcacaccacctcctgctctactgggtcctgtgatcgccgagatg

SEQ ID NO: 60525 - DNA, 755 bp, Zea Mays
gattgtttgaatgttgatgtttgtcacaaacttgcaggtgataatgatgccaaatcaaagggaaagaggacgaagtcacaaatttgtagatttaaagagctattttagccggacttctagtattacaaacccaagtactcatgggagtggagttggccaagaggtggacaatgaagaggtccaatatgaacaagatgtcagtggaacaggtagtacagtcaatgagtttcatatggatcatattatctctgatcccggtattcgcattccaattgatcaatttgctcctaatattagaagtgaagataggagggcattcatagaaaaaggtccaacacaacctattggtcataattttcctaaagcacatgataaaaggtcatttcaggaacattggtttaagcaacacaattggttggaatatagtttggtgaaagatattgcttattgctattattgctatctttttagagatgattgcaaagatgagaaattcagtcatgacactttcacaaaaacgggcttcaagcaatggaagaatgccttgttgatatttataaaacatgttgggggtccgagtagtttgcacaatcgggcaagatcgacttttgaggattttgataatcaaagatcaagtttaaaacataaagtcataactcatagcaaagatgcacttgtgaagtacgaaactcgattggaaacttctttgcgtattgtaagtctgcttgcattgcaaggtgaaccatttcatggcc

SEQ ID NO: 60526 - DNA, 602 bp, Zea Mays
catcttctcacctgtggcactatataaacagacgggttggtgcagagttaccacaacattcatttccattgcacagtgtgctgttaaaaaatttaaccatagccgaagcttttttcactgtgctctcaagcgagcacttcgtcatttagagctaacttcgtcaaaagagtgagcttcgtcaaaactgcaaaaagaaacgtcaacttcgtaagaaccacaaaaaatgcaccagatggccagagtacgttcgactacaagggtgactcgtgagggagaagaaactaaggtcgctgagacagtgccaatttctgaagttatgaaacaatcaggtctagttgtgacagagggagctactgacgaaggtgctcctgctgctgaagccgaacatactgttgctgaagaagaagaagatattgatgaagaggaatagtacaatattttgatcccaagtaaacccagccatctagattttgagaaatctacagtgtctgaagccgacgtgcccatgatgatgaagctgcgctactttggagaagctgaaaggaaacttgtttgatttgtcggagaagaaaccaccccagcgccgaaggatgatgaagtag

SEQ ID NO: 60527 - DNA, 555 bp, Zea Mays
ggaaagtggggatgaagatgccgaagaccggccctggcggccaagtcataccatctttggaaagttgaccattaaacagagtcagattgatgccatgaagggaagatactttcgtgacatgtctattgtgagagttgggggagacagcgtggcccgcgcacccaaagaagatgaagttgtcgtttacagaagctttatgaaggcaggtctttgattccccttgagcagatttttggttgaagttttgaagacatttgaaaacttccttcatcaaatcactcctgaagctataaccagaatgggtgtttttgtttgggccatgaggagccaagggctggagccgagcgcgaagtgcttctgcaacatgcatgaactacggtatgagacaaaggccactggtaaagaacaatatcacaacaacttcggttgttatggctttgttcctcgctcagatgtgagttatcccattccaacctttcgaaaaaggtggaccggagcctggatggaggaatggttttatgtcaagaataatttgattgaaagggaagacataaa

SEQ ID NO: 60528 - DNA, 657 bp, Zea Mays
tctctgactccctaaccctaatcctctccagatccaatgttctagtggtcctagctccttatctactggttgacgcctctagtacgtcggctatgtaaggtcgttcatttcaccctaatcccctctgaatctggtgtctgctcactggtgctcctctctacgttcgattctcgggctgcttatgtgttgtccactcgctggtgctcctttccggtgtctcttggtttgttttctctttatgttgtgtgttttttgtccgggcttcagttgtcgcctgtcgtccatcttcacattctggtcctactctccaacctctaggctccagcggctggcctgcttggacatctatactcatcctcaattcctccctcgccctccttcctatcctatctagttgtccatgtctaccagaatcctagtccctaatcctcaactccttgcgaacgtctctagtgccctggctgcgaaaggttcgtctaatcgatccatattcctctaattttctctagatttatgtttaattgcattattggtggcttgcaattattgaggaaccgaaggcgacggttggagctgatcgagcttttggactcgtggttgaagttgaggtcatggaccttgatgtggctatagggaaggaggagcatcggcttgagg

SEQ ID NO: 60529 - DNA, 622 bp, Zea Mays
gtccttctcgggagtcacatcagctataattctgtcaatctctgacattgtggtcccgaggttctcaacttcaggcgcagactcatcagcttcgacatcggtattacctttggcattagcaggcacaacaatttcttccgccaaggctgggggcggggtcttttggatggctttcattacgttcatcattctccgtttcttctgacccccgaaatttcccccagttgccgaagcaatctccttccctctcgagctttgttcaattacattctcctttgactgcaataggctagtcagatccgaccccaggggacttagcatggaaaatgggaagggttcagtcgttaccttcaatatttctgaaataccgacacaggaagacggagaagtatcgatagtcttttctagtacatcttctaccttcgtctcggcaggagccatcttggaagactttcgtttcttgggagccgaatccttcagcttcgcaggaattttctgttttttaccagcctctgatcctatttgatggaccggatggcttgccttttcagaatactcaaaaccctctttttctttgctccccgacccctttgtcaagcctttcgtaatccggatattcgaa

SEQ ID NO: 60530 - DNA, 834 bp, Zea Mays
gaagaacaatctaatcacaggatgagtatcaacggtggataaaaatttaacgaatgcagctcagatcaattaggcagaaatgtgaccttagctgcaaacagcaagtgtcatcacgctaattttcttactaaagagcaatgtggaaagcaattgcaaggaagatctacaaagcagagaagttcttagccttctactggaagaagtggttgtgtggcacaactagggtttccggcaattggttctagctagccaagcttccagtttgggacagttgcaccaaatcaaccattgtaagatgatatggtaggtaccagttatatgcattttagctgtaacgaccaagtacagagttaaggattacagtctcttgttagctataattttatcatcttggcaatgctttctaagggcttcacctattacattttctcctcctgaaatctatttgattatggtcaataaaataatagtcaaaatgagataaaggaaaaactaaaagcagtatggttcaagcaaacgtgtactgttgaaaatgagcataccagaagcagaatatgaacctgagacaacattcagatatagaaaagaatttgaatatcaagtaacagaaatgttactaagctaaataccaggttttgtgtgcctgtagccttcctatcatagaacttaaggggaactcactaaggatatcgcagtatttattggctgcaactgcaaagaagggctgttgtttggatgaaaccaacctaaacaatcaaggtacaaaaacctttgctaagtttgatggatggccctgaatccaaatgagctgtgagctgtctaacaatgaacata

SEQ ID NO: 60531 - DNA, 1287 bp, Zea Mays
cggagatggtgggttagaaagaggatgaggagcagcatgtgaagatttagtaggtgatgatggatgtacaataagtactaaagtttgaggaggcggagatggttggggatgcgacatcccttcgagttcaaaggatgaaatgttttatggcttgtccaagtgtcttaattccttcgagcccagggatgtctagaatgtcgtcctcggatccttggacgactgtcgtcacttctacactgcaataatcatttggaatgtcgcttccatgaaacttgcatcctaggatcgcaacacctgttcctactttcttcgtgtgattattgttaataccatatcttataactagtgtgcacgacacaggacttgtaatgtcatcaactggataacggaccttatttctcgttgacacgacagagcttgggacggtcgtacaatccgtggaagccggcggttgagctgctggaattatttgcagctgtggagtggtcagctgttgaacagacatcgcactcaccaactgttgcatcaattctggaggaggatttgatagcattgagacatcaggtctttcaactctttctttgcctcctgcttaaaataatccgacaactcttctttgtatcgatcatgtttttgtggtccgaatccttccttccatcctaccttagacgagatttctcatacacgaccaggatgctcagggttaccaagaccagccattaggatgtctctctccctttgtggcttaaatattccttggctctgcttagctgccattgcatatatgtttttcgcagcttcttcaacatttggatcatcaaaagatacaccagccttagtttccttaggttttctagcatggatccacttagtcgtcctttcaccaagttgctggggagaagcttcgatcagctgggcccacggggcagcaacgaaatagggtagagggagaagatgggggccctgtttgtcataaacatcttctagctccaattcgtgagcggtggcgaggccacggcctgtgccgaatcttggccaggggagggcgcatctggggtccacccgtttcggccaaacggtcgtggcgagggaggagaggatgaaacaaaagggcgagggaggatggagaagatggggagggtggatagctgctcacgttgtgacggcgagctcgatagagctccaagcgcgacgatggtgaacgatggtggattcacggggcctaagggggtaagctccggcgtccgtgcgacgagcgggtgagcaaaacggtggaggcgaaagaac

SEQ ID NO: 60532 - DNA, 1468 bp, Zea Mays
aaagagcatcacgatcaattggggagaaggtctctagctgaaggtctatattaataagatcaatgtataaacattttctagataagagcctcaactgaaggtaagatagcatcacttaaagaagctttggatgatgggcaaagtggaagcttatatggagccgaagcaaggaaaagatatgcttcaacattttggtaatggctacaaagaagaaaagcgacgagatctctaagacgaagaaaaaggcgtacacgacatgtcaagatgtaaaatgatgtaattgtactccctcgtaatgaagggttgcaatgcaattgtaggggcaaagtcgtaatcgcataccaaggtgtatatcatctcgtccatataaataaatgaatagcgccactactacataattgggcatttgtaaccctgcacatatagtatcttctcctcgaagagcccctgatgggtataacaaaataataatatgcccctctagttgtttttctagaatttcgacatgtccaaaacatttggcgcccacctcaagtaaactcatcaaagaccacaaccatgaatctgtcggagtttggttccagctgcgcactatggcgttgcccacataatgcttttgggaggaaggtgacgtcgaccgctgctcaatggtatgtgtgggtgcatgtcgaaagacaaggtttatacaggttcgaaccgcatgaatgtgtaataccctacatcctatgtggtgttgagtatttgattgctatgagtttgcggattacaatcagttgtgagggtggatgaaggagttcctatctatctaatggataatgggcaagagctagagagagttttgtaagggtacccgagcaaccttatattgatgactagagggatatccctttacaagtcatgaagcttatctaatcaattccatgtctatattcttgagtgctcccgatctttcggagtttggtcgcttcctttcgagtatctcgccatttggttgtgcgagagacatgtcttcggaacgttaacgatcttgcgccatgttattcgggatcgcctctagctctgggcgtcatcttcttctgttgaagtctgttccgcttggatgcagcccaacagtatacccctactggacaacttatcaggggcccaccaagcagcccatgggacatgtccacgctatgaggacctagtggatatctatctcccacaagcccccgaggctcaagccaatttttgagagtaattggctcgagactctaagaatgagtcaccctatttgatcatatttccttgagtgcgactttgccctgtttggatccaaggtgcacccaatgggtgtagccctcgagcttcgagctaacttggatatcaatcaactcgaaggtccatatgatcttatttcagtaggatttgcttgacctttttggatcttattttggtctttcgacgccttgccgattgagtttggctc

SEQ ID NO: 60533 - DNA, 440 bp, Zea Mays
acttctctgccctgtgggtggtatgtaccggcaagaaatgagctgtcttggttaacctatccacaatgacccaaatagaatcgtgttgtcgggatgtgttgggtaaacccacaataaaatccatgctgaggtcctcccatttccaagatggtatgggaaggggctgtaaggtacctactaccttcaaatgattggccttgactctttggaaagtgtcgcattcagatatatacttagcaatttccctcttcatcctggtccaccaatacaaagatctgagatcatgatacatctttttactgccgggtgcatggaaaatttggaaagatgagcttcatccaatagtttcttcctgagttcgggattcttaggaacaaccaatcgatcttcaaaccatagaactcccttgtcgtcctgacgaaagcatttgtacttatcca

SEQ ID NO: 60534 - DNA, 355 bp, Zea Mays
agaggatggagctacttttgctacaaaagtggcagttaaacaacttcgatatatgcccatcactccaaggcttaaacgtttgtttttaaccccagaaactgtgaagctaatgttgtggcgtaaggaaggagaccgtgatagccaagacccagacattatgatgcatccatcagatggcgatgcttggaagacactggatcgttttgacctataatttgcaagagacgctaggagtgttcgtctaggcttgtccactgatggtttcactccttacgacaatagttccacttcatactcttgttgaccggttttcatcatgccctacaaccccctcccaacaaatgcatgaaagaag

SEQ ID NO: 60535 - DNA, 459 bp, Zea Mays
ggcagccagcaaccatccactaatttggcagaactgcagagaagggggagatggggcagagcatgaggaaccttgagatgacgagctcatctcctcaatggtgcaggtctgctggagcttgggaaggggcagggtggagactgcagctggtgaaccttaagacagtctccgcatgtggagactgtagcaggcgagcatgggaaggggcagggtggtgtagccgctgatgatgtagccgtcggtgagctgtaggtctgaaggggcagccaccggcgaccaagtgtgaataagggctggaacagtcgagctagcaagagaggagagtaggagacgtagtgcactgtttggcggctaggtattacagaggagaggagagggtagtctaaagtatactgtagatgggttgaaaatggcccaataacaaaaccctagccaggacgaccaggaaacagtaatcgg

SEQ ID NO: 60536 - DNA, 414 bp, Zea Mays
tcacaaagcaccatctctctatcaaaacaaagtttttatcttgtttcctgacggttgtttcgcttgtgtcatcacataacaggcagataaattgaggatagaactcgatgtgtggcagcggatgtaccagggcctaagtgacaaattgcgatcctacgatgggcttcaaaggttgcgttgcagtcgccattgcagcagctccagtattgggttcatatgagctaagagaagcaattccagcgttggattcacaatcaagttagaaatggcattagtccctcaaagtctatcttttcgtgactgtagatctggcagtatattatttgttagacctagtaagggtttttggggctagtccccttgtaattaactgcataccctgtgtaaggcagacccatctatacttagtctatt

SEQ ID NO: 60537 - DNA, 800 bp, Zea Mays
cgaggccccatatcccaccatgtagggttgaacgaacctacgcctggcaatcaaactcatggagaatacgacactcttatgttatgtccctatgctttgttccctttttatctctactcctttaaagcatgagtttccatcgtcgtgcgtcacatgtgaagcacgtatatctattttttatcacccatgtcttgcctatcacccagataaaacaagccttatctcttgcatacgcaagcaaccatgtgagatgcaaccaccatgagcgcttatattaacccccaacttcccttatatttctccgtctccacctccatcgtcaccaagattctttcacaccgccgttgaggacatcaaacatgctatcttactaccatctgactttgccaactgccgccaccacaccccactcgccgcgtcacctttacctttcccgttgccaaatgccttaaactattgtcgcaactctccaccgccatgcgcctctgtaggtagcatggaaagagtagctgagggggaggaggaggtgccaccgccggcgatgtttgactctcaaccgccatgcacatctgcagtcagccggacaagaacagccgagggagaggaaggaagacaccgccaactgaggaagaggaggatgcactccagatctcaagtttcgttttatatttgttgttggtaaagaatttgtgatacattgaggtcgatgataatatatgtattgttcattttcacgtaaacgttgtgcgctaacattttatcaaatatttatgttatgtcgcagcgcacgagcatttgta

SEQ ID NO: 60538 - DNA, 931 bp, Zea Mays
tgttgtcctccttactgcatgcaagttgtgccactacttcaatcatcacaaagtcatagtggtcattggtttcccgatcgaagacatattatgcaactgagaggcggtggggaggatggcaaaatgagcattcgagttggggtcacgagatcgagttctagcctcgcatggctatcaagacctaagatttagtcaatttcatctcagagtggacagaaaattaggtctctaaaaaccccgagctaatggaagtctagaaaatgtatttcgatgggtcactgatgctaggcagattgctactgaagaagaactggatgacaaagctgctactgaccaccttgctaggcagtttaccaactatactctgatcgacaatttcttatttaggtgtagggccatcagagccttcatgatatgctttgacacgcccatgggtagacacttgttggaagatatccatacagggcagtgtggtgttcatgtagcctcaagaacgttggtctggaaggcttttagaccagggttctactgcccgaccgccaagcaagatgcagccgacctggttcagaaatgtgaggcatgtcaattcttagctaaacaacaacacttgtcggcacagtagctatagactatcccaatatccttgccctttgcatgtcgcggatggacatgattggacccttcaagaaggctcaaggagggtacacacgtgttggtggccattgacaagttcacgaagtggatctaatacaaatcggttgcattactgacgacatccaacgtagtggagttcattcaggagatcatattcaggtttgggatacctaacaacatcatcatagacctagcatccaactttacatgggcagagttctttgatttctatgagaagtgcatccttctcatgtatgctttagtagctcatccgagg

SEQ ID NO: 60539 - DNA, 866 bp, Zea Mays
atgacatagagaaccgcgggcggggtcaggaggattgtcgccgcccagggaactcgccctcactgcctgtctgtgcgcatggtcgggccaaggaacatagagagtggaaagtaacggcgttcgctggctcggtgggaaggattgatcatcagggcgtcatgaattgctcaccggagctcttcgctgctgcagtgccgctcttcgccgtgggcgtggttctatgctacactaaaccacggtgagttggccctatagctttcacaatgagttctgcgttgagttgcactagttggcacgtgggatggtccaccggagcaccgagatggtgattgccggtctgccgccgccgtggtgtgcgcacagagccgcccgactcggataggggtggggaagacgcgcgtgggccgttgatcacagatggacgttggagattcgattccggttaccgcttcagggttgtgatcgggaccgtccatggggaatccagcggatcagatttggtctcatcaatttaagtgtggaccgtagatcgtgaatccagtggccgtcattggataccggatcatttataggactgggctgatctgggccgtccgcgttagattgggcggctgatcttcgccgataccccttcgtagaaccccttttacataggagccctcggatttcagtaaaatcaacccgccgtcctattcttgtataaggcaattgcggatgggccctggtttcttttaaaacagcccctggtctttcacagaatagtgtccctagtccaaccaaagaataaaaggaataaaacaattcagaaaaaggatttttagtttagaaataatctagaaacttatataattcatattaaattcatt

SEQ ID NO: 60540 - DNA, 394 bp, Zea Mays
gtgttacatagtacagcagacccgactgaagtttcagtcgctacttcttctacctgtactagagaaattgtgtgtcataagtgccatggtcatgggcacattgctgctcaatgtccaagtagaagaacaatgtttttgaatgaaaaaggtgaatgagaatcatacatcgatcgagaagatgatggaccaaagtttgatgaagaaattcaataggaagagaatgagacccagccagaagaaggagatcataattgttttatttctcttcgagtgctaagtgtgactgctgaaaaggaagaaaatggagaacaccacaatattttccatacccgaggtatgatcaaagataagctatgtcgcatcatagttgataatggtagttgcaacaatattg

SEQ ID NO: 60541 - DNA, 485 bp, Zea Mays
tagctacgtagtacatctattgtgaggtcaccggcactgctctccatgctgaccgccgtaggacgaatattatctccgctccctgaacatacgtcatcatagttcttatacatgcagccatatgtttgtaactgcaagaagtactacggtatgtctcctttctttttttttttcttcggccatgacaagccatggcccatgggatgaacagcaacagtctacgcacatacggatcgacgtgaggctgttcgctgccgtagctggatcaaagttgttcggattgttgctgtggtgtggctagattaaatctgtggttgactcgttcgtcatctcatagcgtagcatcactcgagaacgctaagcattgaggcggatcatggtgagcacggagcagtgctggcggtaacatgcatgaggccatgatcgacgctgaaggttgaacagatataactgtgactcattgagtcgtcgaaactggtgaccgg

SEQ ID NO: 60542 - DNA, 521 bp, Zea Mays
gtttggggaaggcgcgatactgttcacgcgatgaacaatagtgttggatgaacaggatctcgagtgaacagtggcacagatgaacagtaatgctaacgactagtagacgcgctgaacagtagacgatgtggtagaagcacgggcaagatacttgcttgcttgatttttcattaattgaaggggcacatttatatagttgagatagtggccttctaggtaaccaaccttatctaagatctaacaaaccaatctttatccatttgaaattatctcaaacgaccaaccgtatctaagaaaccaaaacttatccatctaaactccatctcagactaacaaactgatgtttatccattcaaacaaattagctgattttattagggttgttgggctgccggtcataacatctctcctggcctcaaaaacaggtcgtcctcgagctggaaggcacaagattaaggggtggagatcttccgcagtagccacctcgttgtcgtcggtggtcacctcaaggtagaagaggc

SEQ ID NO: 60543 - DNA, 375 bp, Zea Mays
tctctttgtgagaacaagtgcatagtgatagattatgtgttagggggatgattaagagctatagaagtgagaatagagctaaattgctgcttgtagaagctagagtaagcttataaatagcaaggaaaccttgagaaaaattgtcgagacatgaccatacgctttgctcactcaccgaagtactcccaaccttgtggagagcctctagataatttgtaaagcatcaagtggtcatagtagaaatctcgtcttttcgcggtagtgataagtttaagtggaggagcgagttaaaagagactccaagtcggttagactacctcaacaacgtgaagtagtcaagcatttgagggttggccgaaccattggataaattgc

SEQ ID NO: 60544 - DNA, 643 bp, Zea Mays
gggaacaccacatagcagtgggagcacataatggttgtagggagcctagggagatcttcgacttccccaccagagacataaaaccaaaagtcccaccaatttcctcactagtttcgagcgcacgggactatttccacaacctccgccgaagtctttccagtcctcagtgtgaaggtgcacgacccaaaatgtgcaatcttatttcctatcttcctctttgccagtgcagacaatatttcttggcaaaaacttccacagacggctgatcaccgtatgaggcaaccgcccaaacatacttcgccagggtgaccacggcgttaggtgtcaactggtggacctgcacgtcgaatctccgcaaaacctccaccacgaaacgatgcgtcgggagatgaaggccggcaatgaaaaacgccttgaacacaaccagttcgcccccaggctctgggatctcctcggcgcccggaactcgcccaacaccgtcaccgaagtatccaagctgttgcatctcctgcacgcaaaacgaggcgatcctcaaagtgccaaattccatggtgtggcctagctgcaactccatcgccaccaaatcactcaaggtatcctcggatgatggactgaccgacgacgcacttgcagcagatgagga

SEQ ID NO: 60545 - DNA, 776 bp, Zea Mays
tcagaattgtcagatctaaacagacggcctagatctgacgcctacattataaaccgacgtgtgaaactgaccactggatctgagatctagggcacacatttcttggatcgaagcggtacgctacctatgatctcactcgcccaacatcaatcccacggtcctaaacttttcacaactctttctgatctgggtcgttcgtcctgagatcaacaacacctgtgccattcccttccctgcacagtagaacagcggcgtcgctcccccaacctccggcgagctcgccatagtgcccacgaccccggaacctagtgctccaaaattcacctacaagaccccacggcctagcggacaataacatgtcgccggagagatcacttaccggcgatgagattggacgatgagtgccacccactgccaacagtggtcctaggcggggaagtcaactccggtgaggaattaactctgcagttcctagcgccagtgccaataaccgacccaaatccgcacggtgtgccccgatgatgcgccctcgccagcgccctagggcacaacacttttcaaccggacttctgcccacggggaaagattctatggttctcggcggggagattcacggctatggtggaggtcggcactgggtgtgggttgtggccagagaacgaggcgcatggccgcgggttttataccccagattgggggcaacaaccccactgaattctacggggatcccagctggcattcaacggattgctgttggcgtagtccgccaaactcgc

SEQ ID NO: 60546 - DNA, 388 bp, Zea Mays
gactgaagtacaccttcagatttagggagaagtttgacgagtcaaacgacgactggctgaaatgcattgaagctactagtgatgaactacttggagcatactccaaagccgaagataatgctttgtccgcagccttcggaggctgagggaggaaaaggctgaacagggtatttgatgctattggcttcgtataccctgattaccgctacccactgtgagggcaatagaaaaagaggaagattgctgcttcagtcaccccagctgagcctgagccgaagagtagaaagttgaaggttctgacccaccggtcgcgttatattgaaccggccgcagtgcctgaatttggcgcagggtccacttcagcagccaaagcaacacaaactgctct

SEQ ID NO: 60547 - DNA, 756 bp, Zea Mays
caaaagcagagagaggccttagcaaccaagagacaccacaatcaggtccaagcaaatctacaacatctaattcaagaagaaaaagaaaaatctaggcacctctagcaagaaatagcatacctgcaacatcatcgaggcccagatccacaaccctcactgagaagcccctcactaagggacttcaaggatcatgattggcaggtctagcaacatgacacctttcaaaacttcaatttcatagatgaaaggtgcccactctccaccaggttatagtccacaccctggccactgaactaccgctctagcacttggcccaagtacaacattaacatagaccctttgcggtatcatgagttaccaggtggtagtagctttgtcaagaggagatgataatacaatggagaagtctttcatcatagcactagagggcccaacattaatatggtactcaagattgcccccttgtccatcaacttgtggcgagcccttcaagacaaatttctgctcaactactaaggtttttagcctgacacaacaccctcacgaaattttccctctacaagcaacaatagaaagggagcctttaggattatcacaataaaatcctgctactcaagttctagctaccatctttcaaagaccgtattgcaatccattacaccattaatgaccttcgagtaggacatttgtatagtcactacataagggacccgcccagatcacttcaagagctatatcagctcttccaaaaatttg

SEQ ID NO: 60548 - DNA, 986 bp, Zea Mays
ggaaatgttctgtttgccaaatattcttgcaccaagtctcaagtgctaatatgctctgccacgactctaaattccacttcggtcaattggcagggggacccgagctacatgttacacaagggttcgtgtcatgccgaagctcagtcttaagggactcatcaccatactcataagtttcaccctcttcttctcgtcagctttcacgtaaaaccattcatttgtctagccagtcggccacttagtacgataaccaatcacaggagccttcgtatcctttcggtatgcgaagttgtagcatcaaaagttcttgtgcagcccatcagctctggccttcgtctggtagtggagttcgtgcacccggcaaaacccttcagtgttggcactcttcccttggcttcggagagcccatatgtacacactaagtctaactatggtattgggggtgagttgatgaaggtaaatctcaaacttcttcaaaacctcaccaatcatcacgtatagggggaaccgaagtcctgctctgaagaaacttttaaagactacgacttcgtcatcttttggttctggaatcacctcttccctagcaaaccgaactagttcgtcatcattctctccaaaatatcctagttttttcattaaaaccagatcttctgctttaactgtggatttcccgaactcaatatggctgggtttgctcggacctaaaatgctatcatcatcttagttttcactatcagcttcggcggtggttggttcagcttctacatcaacaacatcttctgttggaactggttctttttcttcttgtacaatcaacccagaacgcttcatcatttctgagatgggggctgtctcagaagccccagcctcttctccttcacgtgctaccctagtaatagacctcaatttagccatttcaattttctgtttttgacagacaaagctacacttaaacgatcgaacatttgtccaaagcttatgcagca

SEQ ID NO: 60549 - DNA, 396 bp, Zea Mays
ttgcttttgcaatattcaagagctcttgtatcagacaaaggctactgggatggagcggtaccacaataactttggttgttataccttcgtataccgatcagatgccaggcatcccgtgccaacatttcggaaaaagtggtcgggcgcatggatgaaacagtggttttacgtgaagaatgacttggacaagagaggttatattagggatgtgatccagtggcctatccgatcccgcttcggaataaagaggccagctatcgtgaatacagataagtcccaggcttgcttggtggcatttaacgttgtgtgcagctacatttgcaccagggatttggttcaagagcacatagcatttaaagtatggcccctcgtcaatgagtgggagacaccgaagga

SEQ ID NO: 60550 - DNA, 471 bp, Zea Mays
aaacaagcataagcataacttctcaataaaagtgtaccttgtttcagcatccaccaaccttcggcttagatatgtcaccacatgctccttcccctcagtttcttgtgtcagaacagccccaatgaccttatcttcagctacaatgtataatcggaatggtactcctgctcgtggtgcttttaatacaggagccgaagataagtattttttgatgagatcaaatgcttctttctgttctgccccaagcgaattcggcatcattcttaagccgaagaataggggtgaacggatcaatcttcccggctaggttagaaataaaccttcgtaaataattcaccttgccgagaaacttctgtacctcgaccttacaggtcggaggtcccacattccgaatagacttgattcggtcagggtctatctctataccatgttcatggatgaaaatcctaaaaacttaccagccgacactcc

SEQ ID NO: 60551 - DNA, 439 bp, Zea Mays
atttattaggaatttgaccaaggttgctatgacaaaattgtagctggtttgtagctctacaactttgctgcagaggtttgggtaggttgccatgaaaattttcgagaaaaactgccctagaacttggctgtcaagtgcactgaatgagttctcccatggtacagtgcctgaaccagatcagactgccagcacgacaacctcaccgccggtgacctttctgcacgtagattcgtgccgtcgccgttctgattcttgcgcggtatggtgtggataacgccgggaaggaataacctgcacgtggcgccatctcccaagcccagccggggacttcaccggcggccaccgtggctcggtaacttttgccgcggtgtcgctcatgccgcgatctgcctcactgtgcctcctaccgacgtggtatgcatgtgcttgtgatgctatc

SEQ ID NO: 60552 - DNA, 1093 bp, Zea Mays
tccagttggtaggcaacttcccccactcactttaggatcatgaagggtccaataaagcgaggggacaacttccctttaactttaaacctcctcataccccggatcggtgacaccttcagatacacgtgatcaccctccttaaactctaactaccttctctgggtatctacatagcttttcttccttgactgcacagttctcaagttctcccttatcaaccggacttgttcttctgcctcttgtataatttttggcccaaagaactgcctttctctagtttgatcccaatatagaggagtcctgcattttctgccatataaagcctcaaacagggacatcttcaaactgacctggtaactgttattgtaagagaactgcgcatagggcaaactcttatcccaacttccaccatgcttaagagcacatgctcttaacatatcttctagtacttggttgggtctctcggtctgtccatcagtttgaggatgataggccgagctgaaatttaacttcgtgtctaggcaatcatgcaacttctgccaaaaccgagaagtaaattgtgatccctggtctgacacaatcttcttaggtactccgtgtagacaaactatctgtgccatgtacatctctgctagcctggcacccggatatgttgtcttcactgggatgaagtgggaaaccttagttagtctctccacaatcacccaaatagagtcatacccagtagatgtgcggggtagacccacgatgaagtccataccattttcttcccactttcatttaggtatcttaagtgggtgtagcaaaccggcacatctctgatgttcagctttcaccctctggcaaacatcacacaatgctacatgtgaaacaactctttttagaccataccaccaatacttctgctttaggtattggtacatcttggtacttccagggtgaatggagtatgctaagtcatgtgcttcttcaatatgatttcatgaaggttatcaatcttagggacacatatcctgtccttgaaccagattgtgccttgatcatctctgatctcttgaatcttggcatcaccaacctgacctttatgtatttc

SEQ ID NO: 60553 - DNA, 626 bp, Zea Mays
acttaaccctaaactaggcttatgagtgacaatgaagcccaaacaagttaaaatctcaaaacttattagaaatgatcataaggtaccacatttagtggacttgggtagcaccaaaaccctaaagtgttaaacaccctaaaagacccctggaaaacccttaattgaaaccttaaggggttatgtgtaaattttgtacactttcggaccaaagtgtaaaaaccaagatattagggcacctcaaatcatatgtttcacacatttgaggatttgcaaagcaaaccatgagatttgggcttatttgcaaaaagccactctatacctctcatgtgtctaagtccaaaatcagttgaacagggctgactttggagatctgtatttctaaaattacaaggaatttgcctagggtcaacacatcaaacttgtagagctaggaaaggagaacaactttgcttaagtacttaagccttggtattgtacaaaattaggagttaaattggtttgaagtctggctgtcacaatgagactctatgatgtccagagaaatcagttgtataggaccaacttcaggatcatgtggagctcgatttaatgggtaattgactaagacctttgtaacaagattaaag

SEQ ID NO: 60554 - DNA, 557 bp, Zea Mays
gcggcacccgagcagcagaaccctagataaaccctctcgggggctaagcaccggcggcggcgatggtgatggtccctcccggcgagtgggtcccccacgtcgaggcctacgtcgacgtctcccgccccgccgtgcagcatgtaacatcctctttcctctcctctctcattcccctcgttccagttgcaacgttagttcagttaactagttagcttgtgtcttgagtaattcgatttgtagtagtaatcacaaattcacaatatgaggttggtatatttgggatgccggaacaaaccattggtttatgtgcgagatttgatagaacacctccagtttcagattctgtataaaactagtgcgaagaactactgctagtttagtttgttgtgaaaaaatgttcctttcgcttagactgatatctggtttcatgtgtatcctaatgctgtaatgatgtggtgtgcaacagtctgctagcgtggatgcacttgctgccctggtgaacaaagacaagttgaccctttttgatttggtatgctccagcagccaagatgtcattt

SEQ ID NO: 60555 - DNA, 557 bp, Zea Mays
gttgtcttgtgtctgatccaaaggtattaaggcataaatccttgtgacaaattgatagaaggttagttgttgatcaaggttcattaaggatgattcccttgttggtgtaagaagttgagagatgtagtggtgtgaagttgtttgttcaggcaaacagtagtagttgaagaagattgctccctgttgtcctagctccttgttgtatttaatttggtgatatggattgagagagagatagatatgtggtggaagtagacagctagggtccaagagcacctccccattgaattttccaagggctttggactatttgtatgcattaaaaccttgtgttgggtgtcttcttctccgtcgaaggtcctgaagacaaaaacaccttcgacaaaatgaaatagaggtccgcccttcatctgccgaaggttctcaagacgaagaccttgcgtagatgcaacgatgccgaatgccgaagctatcatcagcatcggttcagctcaagcagaagaagaaaagaccagttagaccttagtaatccaggtcatgtgtagataaatgtcgag

SEQ ID NO: 60556 - DNA, 660 bp, Zea Mays
cggtgagttacccttagatcgattcgccttgctctcctcttcgcgtgggtccggatagttctgtaggagtgaagaccgtaccgccaggccacctatctcgacgaaagcgccgccgtgacatcaccctccgctgtcgtgcctcggtaccgatggggggaagatagggcttctgtcgtccgttgccagatgtgtggcggggaataggcggggagcatacctcttcggtcacttaatccaagccactggatctttggccaattgccaagattagatcaccgcgtaatgagttagtaccattagatttagatctgatggatctcgtggcgtactggttcagtattttggccgatctaatcctaacccttggtttctaatccagcagcctagatcctagcaaagcataccccttcgtcgagccttatttgcaaaagaaaccccgcataacttaataactaacccgccatccctcaatagtatgagtatttcacaattaagtccctggaattagcaaatgaacccctggaagtattatttaggtataaatttaataataaaatacctagaaactatttaatccatatctcgtctggtttaactccgatttcactcgttccagttgtgttaacttcataataatattgcctacacaataacaatatc

SEQ ID NO: 60557 - DNA, 1387 bp, Zea Mays
agcaagaaggatcttgccttcagcaacctccgagtcagttggggcctctatccaacttggcactcgaacatcaggctgtctcccagagctagcagacagagacttgttgtgattttccatagtaaaccactcgaagcgccatcccttgatgctatccttcaaaggaatatcaagatactcagctttcctaccatgacgaagttcaaggctggcgccgccgaccaactaatgctaccccccgaccattccaggcttgaagtggtacagatatttccatgacccaaagtgtggattaatacccagaaaggcctcacggagatgaacaaagatagaaatttggagtatagagttgggatttagatgtgttaagttgagagagtagaaatcgagaaggtcgtggaagaaaggagaaactggtagacctagaccacggatcaagaaaggaacaaaaactactgactcatgggtatcctctgttgggatggtgatcccctgccagacccatcaggagcacaactccttcgacggcaaaaccccaaattcaaccaggtgaagtagaccggattcaaaaacgacagaagcatagtttccacagaatggaagttggttgttggggtcaattgggggaatgccaggtgtgacagttccttgcttcttcctaggcgccaccagacctagcagacgagcggaatcaatcgcaatcacgagggcgaacatgagttttaggaaagtgtttgcgacaaaaaacagagttagggttcgctaccaggaagctgccagcgaggatgtatatgcgtgcgctaagtcaggcacatcaagacagacgaagtaacccggaccagacctcaaccgagtggagtaagtcggatggacatgtcagtcggacctatcaaattaagtcatcagccgaagttatcagttgggtctgtcaacagaactagtcagtcgaaattgtcagttgggctcactcgactgaggttttcaagcaaagcaaaagtcgagcagaacaataagcacaataccaaacacagcaaacaaagggttccattcatcagaaagggttcattacaaaggaaaagggttggctcattatgaatcgaccctatcatccctcacccctaccaccaccactaccactaccactacccacacaaactacctactactacactataataatattcatgccggtggcgccctgccaccgacattgttgtcgtcgcccttgctccgtcatcgcccctaccgccgtcgctcttttcgccaccatcgtagccactgtcgtcgccgtcgcccgcgctgtctccattgccgctgtcgtaggcctcgtagccgctcccatcgctgccaccatcgtcctcctcctcaaagtcctcctccttcgtgt

SEQ ID NO: 60558 - DNA, 513 bp, Zea Mays
gttgaaatggtgggaatagtttagtagacacgagcgccaaataatgaaatataaaggataattaactttactccggtccttccactcatactggtttccttgaggttaatgtcatcgaaggctaatcacagcgaagtgctggtctcggtcttgcgcttcattttcttccgtttcacatgtccagaggctaatcaccgcgccactcggagcatgtgtcgtcgcattcggtccattctcttagctctcggcccatccgcactcgccctaacatccttaataaaacaaacgtgagcccgaggagcttccatttttctgtctgaacgttatctactccggaaccatcggagggagggagtatcctcacccgtcgctacctccggttccgaccaaaaccatcgcagcaacccaagccagcagccatgcgagcatggagcctgtcaatcttgagcttcacgttggcttaatgctctgcggcaaggttttggtttttcagttgcctgagctgagcaatgg

SEQ ID NO: 60559 - DNA, 562 bp, Zea Mays
accaaattgagtattatcgcaaaagttagtggaaatgttcataagagactaaactttatgggttttaagtggcacacaaaccctagagcactcaaaactctaataagaaccctagaaaccctaatttgtgccctataaggtaatttcaatttctatacacttttggaccaaagtgcctatgtcaaagtagtagagtatcaaaaactaaacaacttttacattggaagattttcaagtgttgtggaacaaattggagtaatttgtaaaagttcccaagggcacccatatggctaactctgaaattagtgtgattgggctgactttgtgtaacaccccagttgttatctctcgttaaacagcgattatggacgtaagtaagaaaggccagggtgaataacgatttcaatattagccccgtctccaattaccaagattattcgagaaatctcgtttagcctggaatttaatcatctcacaaaagatcgagtttggtgccgttttcattttgataatctaggcagttaaaaaggtttcatgaacttttgggattatcgaatgtccg

SEQ ID NO: 60560 - DNA, 539 bp, Zea Mays
aaactttgtgaagctgaagcaatataaaacatggtcatatggaggacttgcttgagcacaataatcatgttgtttgtcgttagcaagattagtgacatttgagatgttattaaagacaagtcaagaagaagacacttcatcaagcaggggcatagatctcatgtgaaaagcataagaacatgaaggacaagaagcaaatggagaaatcaagctaaagctccgtaagttaagaagataatgatgacgagcaatcctccacacatcctccatgttggtgaagaaataatcaaaagaatcagaaagatgatgaagatgaatcttatgattgttttcatctaagttggtagcatccaatttataattgaaagaaaagaacaaataaagaagggatgttacaaacatgccacaatgctgcttaagaacatcatggatgtcgcaaaatggtgctcaagaatatcgtggatgtcgcaaaacaggcccaccccgatgaggtcgtgactatggctatgctattcccccgtgatggtggcaatgttgtt

SEQ ID NO: 60561 - DNA, 287 bp, Zea Mays
gttttttggacgagggattcctatacccctctacttgaatccatagcgggttttctcatactagtggacatttgtaaaggcctcatagttgagagcacctagaaggggtgaataggtgatcctgtagaaatagctcaacaaaacagacttggtctaaaattggattagtgagatcaaaaaccaagttcgaatgaagagtatgagaggagagaacttcttcacttaattgctctcacaaggtgagtattaaacttagagcaatattgtaagtgaagtgaaatgctaga

SEQ ID NO: 60562 - DNA, 500 bp, Zea Mays
attttgactagctttattagccagagcatggtggacaagttagacttgttgactgaatcgtgcccaggggtttaggcgaaggtggctaatggtgaaataatgaggagtgacagaatggtgcttaaagtggtggtcaagataacacacttacaatattgttgtgagagttctaaagttgggggcatatgactctatcctggctatgattggatgaaattgcattgcccaatgcagtgtgattggagtaacatggtgttaacttttgtggacaaaagaagacatgtgcagctgagggtgatgctcacaattgacaagaggttatggaggtgacaattatacaaacgaacaagtggctcaaaggtaatgaagtttgggccctagtcttgttggagcaactaagagcaggagagcagtcagctcacaatgactagttatgatcctgaaagggaaatgagttatatgccatttctaactttgttttggtgattaatggccaacac

SEQ ID NO: 60563 - DNA, 402 bp, Zea Mays
gtggcctgttcccttcgtggcggaggtggtaggagtggttggaatggtcggccattgccgactgagtttttgaagtccttgcaattacgtagggtgtggcgcatctccttgtaatacgggcattgggtgtcgaggatctcatccagtgtctaggtgttgttgcttcatggtgtgccacggggccgagtcaccggaggccctaaagcatgcacttcatctcttggcctcttgtcccaacgcttgtccggatgctggttcccttccatctttagtgcctggggtgtaggcttcgtgtggccgatgaggtcatgggcctgcccatcaacggtgatgtagatgtctacttctctgaagagttgtttcgaggtggttgaagctttctggaggttggctcggacgaag

SEQ ID NO: 60564 - DNA, 903 bp, Zea Mays
aaaagttccagggctagactgcaaaaaccccacagactcagactacccccccccctcggataccgcgagttgattttgtaatagtacgagggctcttaagcaaagtttacgcagtgaaggggtatcgtgggctcacgaccgtttgattagaaacaggcggcttagaacaacgccgtgaatcactgaacttgtatctaacaacgtgtgttggatcggggatcaatggtcaagattgtaatcgacgatcacccctcagatctagcctcaacggcatggatctaatccgtacgaatggaactcaacatttaatcggggcgctttctccccaaatcctgattccggccacacgcgcacggcgacgcattacccacatggcggtgccatcgccggcgttcctcagtctacgtctctagctctcggtcttcgcccggaacactactaaacgaagagaataacgttgtgaatgtgttggcgaggtccttaccggaatccgagtggtgtcccgccttgtccgcggtgctcggcggaagtgctgcgatgacaaggaattccggtgtcaatcgtgcaccccctactccaaattccgcacgataactccacggggcccgatgaacaatgttgcacaccctccggatcaccaatcaccggcatcgaggagaacaacgctgcgtaaggtcaaccggtctgcccgagcgactaatggcagtgcacagaaatttgctggggatagactcggggttttggtagtgcttgcgcgtggtcgagacgacccccgtcatataggctttgcccggttggttgggtttccccggtgagaagcgcgcgtggcgagttcgccgatcgttacggtgcgtggttggccagttcacggggagaggacctgacgactgggccccacattgc

SEQ ID NO: 60565 - DNA, 615 bp, Zea Mays
ggggggataccggagagcttcaaggagttgagatccctgtcgtacctctcgctgaccaggaatagtttcacaacctggcatagacattgcaggtcttgcaacacctgcccaacctgacaagcttggtgctgaccaggaatttccgcggcggtgagacaatgtaggtgctcatcctgacaaactgtctactcatcggcgtaattcccccgtggctgcagagcttgggaagcctcaatgtgctggaaatttcatgtaacaagttagatgggaatatcccgccatggctggggaagctagacaactgcttcaacattgacctctcaaacaattctttcagccgtaagctacttgtcagcttcacacagatgaggagcttgaattcaaataatggctcgagcaagcggtcacccacagagggttcccattgttcagcaataaaagcaaatccgccatcgtcgcccttggactgggaactgtggtcggggttctcctcttgttgtgtttatgtgaccgtgtcaaggattgtccattgaagaatacaggagcaatccaaaggccgtagcgacagccgaagactcctagttctccaactcttgcctgatgctgctattccaa

SEQ ID NO: 60566 - DNA, 700 bp, Zea Mays
ggaacctcctcaaggctccgtccctctacgccacgcgtggggtcccccactgtcacactaaccctcaccttcgacctcaaggaccatccgattttctagcaggtttatgcaggatttgtctccctcttgtactccgatttttcttttaatgtgattttatgacttatttggtggattttaattcttatattttggctgcaatttgggacgaatttcttgaaggatattggtgatagaacatgtgaggagacttcttaatctttagttgatttaatcccctcaagcgccttcgtttttggtttcccaaaaaaatcccatttcaaatggttcctgaatctcttttaaaaaaatagtttgtttatggcttttgtgagtacgtggtgagggccttatgcctgtcagatttgattcgtttagatttaacatttttccgggaaatttgaactacagtatgttatgtatgaactttttagatgacaactagcctgctctccttaaaatttacagtccatttacctatgcctttcagtgtccatggggctgttgttgtgaagccttgcaattcatttgttgggttcagtagagtctgcaacatgaccatttaattctataccttcacttctctaaaacgtcaaatattcttcatatgatattttcctatccgagggaggctctgaaagcctatattcagaccatcaag

SEQ ID NO: 60567 - DNA, 829 bp, Zea Mays
ccgtcgcacaaggttgaaactaaggaaaatacacgtggttcatcggttgcaaaatggtacgactaatcccagccactttacgatatgccgatgaatacatctccctaccaaccacaacctcctacataaatcggggtaaatccaccgatctgcgcgcggttagaccgttcgcgcatgaggacggactgaccagacaacggtgactggcctcgtttttcgaatcgagccaccaaaatccgagccagggcttccatattctacgcaaaccctaacaaacacatacggaccgtccgactacagaactaaatactccgtgtacatagtcggactgtccgcgcgttacgccaaacaatccgacgcatagtatacaaaacgtgatgttaattttcatcggccatctacacacctatctcagccaagcttccccttactccctacaactcctcaacatcatagcatcgccgcatagatgcatggaggcgagcactttttgccccccccccctcaaggaggccagaaaaggacgaccaaccatatgagccgcctagggcaagcattaatgccccacaaaatccaaacccctaggcaagaaggcaacataatacccaatcgcccacactattgatagaccagagggtcggtggactaccaccggccgccattgacatagtatgacctctggggacagtcatatcagaaaccttatggcagccaatttgattatcagtcgtaccccctgtgaacaaggatactcgaatttgcaaaaaattcgggtgaccaaggcaaaagcacgcacgagcacataggccagttcctagcacaattaaga

SEQ ID NO: 60568 - DNA, 357 bp, Zea Mays
cagctaccaatgtacgatggccatttagacccaaaataattcttgatgagttatgaagccacaatatcttcttatgggggtaacacaacagtgatggccaagtcctttgtcatggcggtcaagaatgtcgcccaaacatggtattcttctctttggcgagggtcaacaacttcttagtaaaagctaaagcatatgttgatcacaagctttcaaggtttccaaacaaagccgatcactgttcgggccttattccaatgcacacaagatcatgaggaatacttgcaacctatgtctgaaggtttctttggctccaagctcaagcacaaatagacataaaagagatagtcatagaagcca

SEQ ID NO: 60569 - DNA, 609 bp, Zea Mays
gcaatggctagatgacatggcacacggtccgatctagtaccagcacagatggtaggtcctagtcaggatcccgaagacggtggcactattgaagatctagtggcgcaccagaccggtccggtgcgcctgtgcagagtagaattttagcaaattttctagcaacattgttggatatttggggctataaatacctcctccatcagccatgtcgagtacccaagcatccctagagcaaagaaacactaccatacacttgcacaacacctttgattcattctagagagatctgagcactcatttttgaagaagtagacatcctatcgagagtgttctcctaagatctgtgttttgtattgtgtgttgtattcttgctctttgtgttgtgttctactcctccatcttgcttccattgaaatagacacctcaaactcttggtgcttgtatgcaccattgtaatccatctgcacttgtgtgtgccattgtagttataatgggaagggttgtgtcgtgcgggaccataccaactgtgtttgtgttgtgattgccaaggtgtaccggagggaatgagacccatgacgttttactcataagcttggtagtggaaaaggc

SEQ ID NO: 60570 - DNA, 645 bp, Zea Mays
gcatgtttggccgccacgcagagatggagcgaacgatccgtttcctgctgcagagggagcctcctccagccgtgggtgttctgccgatcatcgggcgaggaagagtcgggaagagcacgctagtggagcatgtttgccatgacgtgagggtgcgccagcacttctctcggatcgtcttgttcggcgcagaggagtcggtagaagaaagcccaggcggcggaacgaaggagaagaagggtatggacgacggaggggtcatcaggtacgaaaacagcggccagaaggacgggaaactgctggtcgtgatcgagctggacagggacgtggaagagggagcatggaggaggcagttatccgccgccactcgacgatgtcgccttcccggtggcagcaagatcatagtcacaagcagatcagagagagcagcaaacttcggaaccacagaggctatacggctggacttcttccctcgagaggcgtgctggtacttcttcaaggtgcttctgttcggaagcgcgtgcgccgaagaccagcccaagctcgcgtccatagccatggagatattcgaggagtactacgggcaagatgctctgttcgggggcttcacgggctctcatgcgaattcaaagaacatcgccgcccttc

SEQ ID NO: 60571 - DNA, 626 bp, Zea Mays
gactcttatgatcggtgtagatgtcgcaagattctccataaagataatgcctccacgattttagggcaaagaccaccgcggccaattcgaggtcatgagttggataattcccctcatgcttcctcaactgccttgagccataagcaatcactctgccttcctgcatcaacacacaaccaagaccattacgagaagcatccgtataaactgtgaaacacttaccactctcaagcaaggctaagataggggcattcaccaacttgttcttcaatgcctaatatctgacctcgcaatcgttggactagacgaaaagaacacccttctccaagagtctagtcaaaggcttagcaatgttgcaaaaatttggcacgaaacgccgataatatccggcaagccccaagaaactttggatttctgagacactagagggtctcttccactccaccacaacagcgacattcttgggatcaaccgctatgccctgctgattaatcacatgacccaggaaagcaacttcagacagccaaaaagcacacttcttcaatttgtcataaaactgaatcttcctaagagcacccagaacaatacggagatgccgctcatgctcttcctctgtttttgaataa

SEQ ID NO: 60572 - DNA, 649 bp, Zea Mays
tgaaaacattccaaagcaggttagctttgagatcatgctctgaaaagattgagccactgtcatccgagagcaacgcaattgtattgcggccttgttttaccgttgcatgagcatgaaagaatctggagcagatatctccatcagtaacccatttgatggaagcctgttgcttccaataaattttttgaaactgaagcaactcagcagccttgtgttgtaataactcacggaaattccattcttcaatcaaaaggtcacgatgctcttcaataatatcaatgaattcaataatcaacttaatttgtctcacagttttgtcaatttttggcagtgaccgctgccactcttttagaatctttctggtgaacttgaattttgctgttaaattcttcgctttgtccagaaggcttggcagaccagtccatgaattttgaaaagctgccataaactcatcaaattgcaaccagaagttttcaaatctaaagatcttgggtttggggacctttgacttgaaagaaatcaggcagggcacatgatcagaaatatccctgggcagcgttgttgcgagagtgtcagggtaatactgtccttttgctatgatatatgttcggtcttaaagtccgaacccttttgtgaaagaccagaccat

SEQ ID NO: 60573 - DNA, 472 bp, Zea Mays
atttaatagacaaaaataactaccttgctagtgtcatgtgccagtagagaatcttacatatgtcgacaccattgattgttccacctatcgacagatggatgtcatcttctcgtacacacacccattgatttttgtgagctatcaacattgttcttgtaactgtaaaccgctgttggatccaagataggaaattgatgataccctgtcattcaaccatttgatgatgtctgcaaacacaatatctatgttttcctcgggttctcctgaagtcaaagcatggcacatcccagggtacaactttagtgtcttgtccttgctcgtggctattgtatatagtgcctcacttactgtggggtcagttacagcatcatcaccaccgtggactatgatgaatggtagagtaacctattcgcatgaagacgtgaacatacaaacacaagcatgcattatcctttcaatgatagaatgcaac

SEQ ID NO: 60574 - DNA, 273 bp, Zea Mays
ttcctgcatgccttcgatcacatggagatcaattcaatcggttgcaggaggtcgaaaacccattgtatacttcaacagaagggccatcctccccataggtaaaataatgttgccattatcctttagagtctccctcaatgcgaggaccaaatgataaccttcgacatactcgacatggcatacccatacattgtctagggatggcatcggataaactatccacagatattatctttggacatccatatctgcgacttatatccgatatccgaa

SEQ ID NO: 60575 - DNA, 467 bp, Zea Mays
agagcctgttctgctagccacattttgttcatcattgttcataatataatttggtgagtatatcatagcaccatcacatgcatttgtttatgacataagatgagcaacattaactgcttagtttggctattggtactgaagctaagaaaaaacttggctggattgcagatgtcagtagtggcagtctatgtgtgcaaccagaaccaagttatagaccactcattagtgcttgtggagcttgacaagatgttacatttacacatttctatatattgtctgaattagtaaattgtgagcttgttgtttgcctgtgtaagcttggttagtgttatgtgtaaccttgcattgcatcttcttttgtttgtaattggttggttgttcctcgcattgacagttactatctgccttcttttattggacaatttgtgtatcgttgcaacgcacgggtatacacgggtatacgccgt

SEQ ID NO: 60576 - DNA, 338 bp, Zea Mays
atgcttgcgaaggcgttatgtacttggtctggtgtgttttgttatgctgtgctggtgcgcatatagtcggtcttggcgcgggcagtttggtgttgtcgattttccttttgttgtgctagtccggctgcacctttagacggtttctgcgcggatagtcttcgcggtggacttcggttttttcgcacttgttgtgctagtccggctgcacccttaggcgacttctgcgcggatagtcctcgcggtatactttggttttttcgcacttgttgtgctagtccggctgcacccttaggcgacttctacgcggatttgtcgcacgcgagggtggctagcgctga

SEQ ID NO: 60577 - DNA, 2073 bp, Zea Mays
atttgttatcgtgtttgcgtgacacttaggtgactttgcttcctatgggtgatgtcgcacacttgttgtgcttgcccgactgcacccctaggcgacttttgctcggtcgtgtcttttagtaaagacttcgcaccctatgggtgatgtcgcgcactcattgtgcatgcctggctgcacccttaggtggctttttctcggacgtgtcttatagtaaagacttcgcaccctatgggtgatgtcgcgcacttattgtgcatgtccggctgcacccttaggcggcttatcctaggatgtgtcttttagtaaagacttcgcaccctgtgggtgatgtcgcgcacttattgtgcatgcccggctgcacccttaggcggcttttggtcggacgtgtcgcacgcgagggtagtctaggctgcctcttgcggtgactattttatgcatcgaatgtcgaagaccgttgccacattcttgttcgacacccatggccatgatgccagctggattgcttgtgtggggggtttgcggtattatattacatcgctccgcctcgttaaaaacctcacccacccgggaggaaaagagtgcgggcctgattgacattgtttgaagaattacaaaggcacttgggccttggatattagataaagaatatgcgcaggttatctatattccatgaatgctctaggtcttcgccggatgatgtggtgagcctgtaagcatttggcgatgtttttgtcttgacgatgtatgccccttcccactttggctcgagcttgctccgagactctgttctgatggttcttgtgagtactaggtctccttctttgaattctcttgggacgacattgttgtcatgccatgccttagtctgtgcttgatacttgttcagggcttgcaaggcgaggacacggtctgcgtcgataagatctttggaagttgattcgtcgacgttagggatggctaattggtttgttcatggggattagtgctttaactcttgtggtgtcattgccttggatccgtacatcagatggaagggtgtgaacccagttgctctggactctgttgtgttcaacgcccatatgactttgggtagttgttctgcccatttgccctttttatcgtcgaggagtcttttcttgatagcgctgaagaacttgtcgttggcgcatttgacgacaccattggactgtgggtggtagacagaggtgaacactaccttggtgccgatggagccacagaattctcggaagtcctggttgtcaaactgcttgccattgtcgactgtcaactcggatgggactccgaaccaacagacgatgttttgccagaagaatttgcgcggtctttgctgttattgtggagactgctctgccctcgatccatttggtaaagtattcgacggcgacaaaggtgaattttaggttcccttgtgccgtaggcagtggtccgacgatgtctagcccccatcgctgaagaggccaggtgtgggcgatgagcttggtaagttgcgaaggggcacctgatcgtggagagaatttctggcatgcttcgcatgatctggtgactcggttggctgtacatattattgcgggccaatagaatccctaacgaattaccttggctgcgagggcccttggtcctgagtgtgatccgcaagttccatcgtgtacttcaaggaggatctctaggccttcggtttcagttatgcatttcagcataggctggttgattccctttttgtaaagctagccctcgactattgcgaagtctctactcctgtattgaagccttttggcctcattgtgatctgatggatggtaatggccctggaggtatagtgttattgggtctcaccagtcttcgaccattataaggttgacgattcggtggcagtcggcgtcttgcgttatttgcaagccttcgggattacggatggctggtgtgccgatgacatggtagaacacgtcggagggcagggcctcacctttggttgctgctttggccaatgtatcggcctcttcgtttttgtttctctcaacgtgttgtagagtgaaaccctggaactgcttttcg

SEQ ID NO: 60578 - DNA, 596 bp, Zea Mays
tcccaagtcacctatagcagcatggatggtgtagatctccaccggtcacatcttcgagttcccgtacaggctgcgaaatgtacatgctaggaacatcccctcctaaaaagacgtgcagctataggacctcagattgatgtcaaatagtgtaatcattaattgcaagatatgataatttatggattgcccccactatcaggttgtgactcactctcccttgatctataaaagtgagagggggaggggacgaacaacacagaggagtgtccatgaaaacaggcactaaataattttagtcaatccacctcattcaaaagagaatgtagggtattacacttcggtggcccgagcctctctatgtcctttgttcccctcttaactttgtgatgttgtccatgctcatctacttgataatcatgtcgggcctcgacaagtgtggtgggtagaaagtcagcacaccaaagtctcttgttggattctatcagtggtgcatctatgtacctctcacaataagggtgtccaaaaatcactcgagagagtcactccaacaagccacaatgttactatagttaatcctctcaaatctcccacaagga

SEQ ID NO: 60579 - DNA, 1453 bp, Zea Mays
cctcaacccgccgaacgctacttccgagtggtacgactccggtgcaggatcgcacatgacctcggacgctggtaaactttccaccatttcctcgcccacttcattcactccttcatctatcattgtgggaaatggtgccctgcttcctgtcacagccactggatcacatattttttctttcccgtatcgcaatttagttctcaataatgtcctcgtgtctcctaacattattaagaatctaatttctatccgtcgttttaccaccgacaataattgctccattgagtttgatccctttggcctttctgtgaaggatttgcaaaccaggaacgtgatcgccaggtgcaatagctccggtgacctctactcgttctatgcaccctccaccagcacccctgccttcctcgctgcacccacctccctgtggcatcgacgtctcggtcatcttgggcatcaagctttgtccaaacttattacctccagtgttatttcctgtaataaagatgatgtcaaccacatctgtcatgcgtgtcaacttggtcgtcatgttcgtttgccattcagttcatctagctctcgagcttctcacaattttgacttaatccactgtgatttatggaccttcccaattgttagtgtgtcgggctataaatattatctggtaattcttgatgactgctcccactacatttggacgtttccactccgtctaaaatccgagactttttccgcccttgccaactttttcacctatattcgcacccaattcgacaccgtcatcaagagcatccagtgcgacaatggtcgtgaatttgataattcccaggcccgcacattttttctctcccacggcattgtcttacgcatgtcgtgcccctacacttctcagcaaaatgggaaagcagaatgttctcttcgcaccataaatgacattttgcgttctcttttgtttcaggccagtctacctctggcttattgggttgaagcccttcacactgcgacatatcttgtgaatcggctccccactaaaacccttgctttctccacaccatatagtgccctcttttcctcccaaccctcctatgatcatcttaaagtttttgggtgtgcctgttatcctaacatgtcctccacagcacctcacaaacttgccccccgctcctccttgtgcgtttttctcggctattcctcggaacacaaaggctatcggtgtctccagcttgaatcgaaccgcattcttatttctagacatgttgtttttgacgagtccttcttccctttcgcagccatgtctaccactcccatggcatcctccgccttggattttcttcttgatgaacatgatctaaccgctcctattcctggagcaagacttgtgcatgcaggtacacctcacgtcgcccatgggcatgtagaggcacccacgtctcctcccactggattggggacgccc

SEQ ID NO: 60580 - DNA, 319 bp, Zea Mays
tgctcgttatgttcatgcaaatagtctaccttaccttgccctgcgtagacctatggtagtcattacacctaatggggcttatgaagcaacatatatgagtcatagaatagaagtaacaattttggaagttttgggctatgcctatagtgctagaagagagtacaatagacttaatcattagtatgaattggttaaaatagtggaatgcagtaatacattgtgctagaggaacaatagaactttctagttctgatggggatagatttgaagtcacagttgcaccacccacctctaacacacctgttgtatacatgatcaa

SEQ ID NO: 60581 - DNA, 1801 bp, Zea Mays
caaacttctggatgaagggtttcaggacatcattcatgaggggctgaaatgtggacggtgcgttggtgaggccgaagggcatgactagaaattcgaagtgacctcgatgagtgcggaacgttgtcttctcaatatcatctggatgcatgcgtacttggtgatatccactgcggaggtccaactttgtgaagaagcagacaccgtgtaactcatccaagagttcgttgaccaccggaatgggaaacttgtccttgactgttttggtattgagggcccgatagtcaatgcagaaatgctaggatttatcagctttcttcacaagtaacactggagaagagtaggccgatgggcacttccgaatgatgccttgctgcaacatgtcttcgcactggcgttcgatctcgtctttcaacaattgggggtatctgtagggccgaactgcaaccggtggcatccctggcagcaacctgatgtgatggtcgtgacgccgaggtggcggaaggccacatggttcagcgaagatgtcagcgtaggacgcagtaatgcctgtagtagttcgtggggttcggacaggactacgcactgagtatgtggcgcacccagtcctacccaacgcaccttgcgtcccaagcgccagaactccatggataaggcgttgaagttccacaatatgggtcccaatgaccaaagccactggacccccaggacaacgtcaaagccggccagaggaagaccgtagcaggtgatgtggaaggtctcctcggcaatagcaatagcaattcagagcttggaatatatcctgttgctagcgatgtcgtccccgtttgctaccttaacggagagacccagtcttggtgtgacttggaggcccagctgggtggccatagcttcccggatgaatgtgtgggtagagcatgtgtccaccagcgccaccaatgtccgatccttgaccctgacctagagcttcatggtgctgcggatgtcaatgcccgtgagggcatgaagagaaatgcccaggtcctccgctgatgtatcttcctccatgtcgttgtccatttccagcaagaataccccctcggcggtgcacttgtgatcagccgagtacttctcattgcagtggtaacattctccacttgcctgtttcgctgctaattcttctggtgttagacgtctgaaacgcggccgatttgtagcagccggcctggcccccggtcctgaacctgtccctttgatggcggacgagttccggtgactttgtctatctctgagtgctacaatgttctcctccttgcactcataagcacgagccagactcattgcggtctgcaagtttgtcggggccagcagctcgacatcggtgcggaggggatctccgagacctgctgcataggagacaagtcatcacagcgacaaagcaagactgaaaactgtcgctgatatgcctccacggtgcctgtcctataaagggctttcagttctgccaggccattggatcggatgggtggtccaaacctcatgtggatgtagtcaacaaatcgcgcccacgacagaatgccatgatcacgttccagggcatagtaccactcgtctgctgctccctccaagtgtaatgatgctagccaaactttttcttccgccatggttcgcatccctcggaaataggtgttgcacttgttgatccatgtcaatggatctgattcgccgtcgaaggacggaaagttgggtcgcggtggacggtcgccgccctccttgtcatgacctcgaccgcgaccatagccatctggtcggccataacgatccg

SEQ ID NO: 60582 - DNA, 362 bp, Zea Mays
tcttaacttaaaggaatctaccttatcctaataggttcatcttgtgttaaaaaaaattatcttatcctcttaaattgtttataagataaaccagaccaactaaaagtacccccactagatatatcaaatagatccatcttatcttaaaaggttctctcttatcttgatagatccatcttatctcgaaaagattctatcctatcctaatagatctaactaatctcaaaagattctatcttattcttagagactcatcttgtcctaataagcatacttatccccaccactttgcttatctcataatagtgtaacaagcatgatctattccaaaataaattaagtagatctcatctagtctaatc

SEQ ID NO: 60583 - DNA, 751 bp, Zea Mays
attgaacaccaagacccccttcgggtatttcagttttcgggcatagtgtttggcttctacaatctcttcttcagatagcctttttcccgaagcatgtcgaataataaaatcaagattttcggacagtgcttcgagagcaggagatttagcttcttcggctacttctttatccatcgctatgccaatatctggagattcttgtttagccctttcctcagttacagcgggcttcgtctcagcaggcatcgaaggccgacttcggtttcagtatgagacatagcaccttcggcaaccttttttataggagcaggagtcaatgctcttgtctccatgatggtgtctaacatgctggccattcttctcctcttgggagttgtggcgggagctttcgcaaccttcgacaattctgcttctaccggcgggctcagaatttctggcagcactattgttttttctaactctggcttcttggccaccccatcttcggctttgactggctcaactataggcaccttcagcactatagttgattcctcaacgctctgagcggcggaagcagcttgttccgcttcggcagcggaagatgtctcttcaccaaattttcgcactgtggccgtctcaatgtacctcggccgatgcgtcagaaccttgatcttttttccctttggcacagcagagatggtcgaagtggtagtcttcctcttttttccctgccttcatgaggggtagtagtaatcagggtagatgaagc

SEQ ID NO: 60584 - DNA, 914 bp, Zea Mays
ccgagggtgaccatctacattccatatgggaatgtgttctcagtgcagaaggacaagactagaagacttcttcagaaatcggaaacagggttcgtccccttcgctcgtcttcctccacggagcggcatatcggtgcgtcaccagctcctcacgtcccggctcaccatcggcggccacggggacgtgacagtggcgtgctcagtgcttgctagttaattcagactcagagcaaagcaacttggacttggcggcttcacgcgggatggcagggctctgctaagcgacggggctgtaggcacacatgacattccctgaacaaatcatatatagaggtttccatggggtcaatgataatgctgcatgtacatctattgaccatcatatttagtacataaataatttttatttcatgtgcaaaagtgccactaacagaatatgagaaattgagagctgagaatttgatgaggaataaccaaaagttgcaaagacttggtgtcactacactagcgtcaatacttaaccatacttctgcaaagagcaaggttgacactcgtgaaaaatctggatctttgtatgaggtccaggaaggtgaaggttctgataatgaggaagtcaatcaggtattatttttcgtagcatgtagatatttcttcaatctaattttcttgtacatttcagcatacaaatttgctaatttggttcatattttttccacaagtgtgcaacaaaccggagaaacagattaaagagggtctaggcacctgcgcaacaagatgaacctacaagatttactaggcagaatacaagggatttggctttaactttcagtccagaactgcaacaagtcgaaaccttaggactctctactatcacatccacccctcaacaggaccagaacaactctagtgatcaag

SEQ ID NO: 60585 - DNA, 773 bp, Zea Mays
ggtcccttgagcatttgttgatactgctaaactaaatatgaacatcattgtgaagaaattgagaaggaaatttcttctaccaagaaacagtttgaagaacaatcttgcattattgcccagtctcaagctgaacagaaacaacaatatgaggttataacaaaattgcatgcaagaattgagggcaactgcagaatgggttgcttggtagttataggtcccttgagcatttgttgatactgctaaactgaatatgaacatcattgtgaagaagttgagaaggaaattttttctaccaagaaactgttagacgaacaatcttgcattattgccgagtctcaagctgaacagaaacaacaatacgaggttataacaaaattgcatgcaagaattgaggagctagagcatatggaacatgaacataagaagattcaaaggcagcttgatgcatacaaagagatgatgggcaacacattaagatatgctcactgcctaaaagatgaagcttcaaagcaggaaagcaccttgcagttgaaattgacgaaggcatgaagtgctcttgatgaagcaaactatgcccttactggcaagaagagtgagctgagccagttagaaatcaatctccatcatcaaaagcaagcaactgagcataaatctctataatcagtgtgcagaggttttgatgagctgtactgtagtgcatcatataaatgacatcataaatctctataatctgtatgacaaccatttgatcgatgaataagatgacattgtcg

SEQ ID NO: 60586 - DNA, 542 bp, Zea Mays
tgatggtgatgatagtccaatggatgatgatggtaatgatgaggagggtgtttgtgtttggtacaaatgagaaggtactagtgggagacatgagaatttcacaaggcttccaatgctaggcactatgctagggataaggattcttctacatgacacttccattcatttcatcaatattggatgttctagggtgtgttcattgagaggcccattctggtaaagcaacaacagatcatcttgtcctatttggagaagtttccatagatggcaatcttggtacatgcttttaggtcattggatggagagaggctatggatttttggcagaattagaatgagtgggtggttcgacatttatgtcactttggaggtgaagatggacaaggtgaagttgtcatgtatgattggtacaaagaggttcatggtgatgtttgaggagccaacaatagctagcaagtttgactctcttgagataaataggggttgtgatgacgatcacaaccttgcaatcggacgagactcacattttctgccctaggatag

SEQ ID NO: 60587 - DNA, 1138 bp, Zea Mays
gagattcactagtggtcataagtcagataaataaagaatgggattgctcgaatgactctatgggcaagtactgcacagccgttcgaaagctggaagacaaatttgaagggctggaattcatcatgtggagagagatcgcaacgcggcagcagacgcgttgtcaaaactaggatccagtcggacctaggtaccacctggggttttcgtccaagaagtaccacacccgagtatttccttagatcgggcagaagagtgcaatgttctgagccagccagagtcagattctgatgactggagggagccaatcatcagatatataaagaatgaagaggagccagatgacaaaactgcagcagaacgcatcgtaaggcagtgtactcactacactcttattggggaagcactgtacagaaggggcacaacaggagtcctcataaagtgcattctttcggctactgggaagcaactactagatgagatccacaccgggcaatgcgggatacacgcagcatccaggactctggttgggaaggtcttcaggtctggtttctactggccaacagcaaagagtgatgcagtcgagttagtccagaggtgtgaagcttgccaatacttatcaaagcagcagcatttaccagcacagcaactgcaaaccatacccgtaacatggccatttgcgtgctggagactggacatgattggacccttcaagaaagctcaaggaggatacactcacgtgctggttgtcattgacaaattcactaaatggatagagtgcaaacctattgcttctctgacctcagctaaggcagtggaattcatacaagatataatattcaggtttggaataccaaatagcattataactgacttgggatccaatttcactagctttgaattctttgacttctgcgaacaaagaagcatccagatcaattatgcgtcagtagcacacccaagagccaacggtcaggtagaaagggctaatggaatgatattggaagcactcaggaagaaggtcttcgataagaatgaaaagttcgcagggaagtggatcagagagttgtcgtatgtggtttggagcttaagaactcaacctagccgagctttgcatggaaacactaccttcttcatggtc

SEQ ID NO: 60588 - DNA, 308 bp, Zea Mays
cagctcagctacattaagacacaagtatctgttagtgtcgaagctgaaaaacttatgagaataagttagaaaatgcatacctataagtctagcctgcttggcagcttcttcagccctttttgcttcttctgaagcatcatgagattccttctcatttcttttgatggcttcatcggtaatttctctttcgcccttcagccatacttcggaataaaatttcccacctagggtagttgcttcggttgaagggtttctgatatcgtcagctaagaaggcgaagtctggctgagttacagccttagcatgat

SEQ ID NO: 60589 - DNA, 447 bp, Zea Mays
tctcaagtacaccaacaacacgttcatcctccttaggggtaaccctaatgatacatcctgcctcaaaatagcccttggcctgtttaattctttgatacgtctcaagatcaacttgaacaaaagtgtcacgatccccatgcacatggaaaacgaccacactcagaaatgcaccaccctccttggctgtaggtaggaagggttccctcaggcctacctcggcctacccctctcccccaccaagctctgccaccatctattttcctccaccattgcaaaaaccgataaatacttagtcaggcgacaaacatctctcctcaaccccatgggctgcctgatccaaatcaactctatccatgatagccacctaaactacattatgagtgttgtccaactccccaaaggcgtagtaaaagccatcgaccaacaccgtcatggcttcctttggat

SEQ ID NO: 60590 - DNA, 564 bp, Zea Mays
taccaatcgaaaggcaagaacataactatgatcacaatcaacggaacttcaagatattcaataaaattgcatagttccattctccatacctttgccttttacctgaatgccaagacaacggccatgagattcattcttttaggtagtgtggagtgagagcacctgttttaaccaatttagggctccttttgctcatgcacctcatagctcgagagggtgcattagagacataacatggatttcttgttttggtatacacagagtaccaagacaaggtaatcgtgtggacatggactaaccaaaacttctcatgcttgcacataggttaatcattaaacatcacatagcatgacttacaaaaagatacatgtttatccacatacaccaagagagttaatcatggttgatatatcaaatgagaagctacccattgaaagattcaagagatataacttatcaagcacacagtcacaattgagcaagcatggttatgatcatgtatcattaattgaggattttcaacacaagcaatctcaaaagcataactactccaaggatagacat

SEQ ID NO: 60591 - DNA, 465 bp, Zea Mays
tgaacgtgtgttccaaaacaatgcaaagaagctggtgaaggatgccatatactatgcgagaattcaggctacaaacctgtattttcaaaagcatcgggaagaagcaggccccttgaataaaaaggaagggtcctcaaagatatatttgactgaggatcaatatcgtgaggttagtattcaatttgctttaccctttttattgattgttatgattgacataatacgtaacattgtgtgtgcaagtgatggttccatggatggcgcccgtgcctgatgcgtactatgcttggtgtcgatattgggcttccgaaggcttctagaaagcgtcagcgcatcacagacaatgtcgaggaaccaatcctaaccacaagtttggcggtgatgacatgctacgaaaagctaaaagaatggtatttttgatttagctatgtcgatcagcaaatagtacgattgcttatgaatgtt

SEQ ID NO: 60592 - DNA, 900 bp, Zea Mays
tttgaaacttgtttgcgggatatagaagtcatccctatatgagcagttgtaagcacgtcatatcgccttaaatcgctgcggacttaagtcgattgcttctgtttatagggcatagtggtcaccctgaattttgtaagtatgagcatgttgtaccgtcttaagtctttgccgacttaagtcgattgctccgttagcagggcatagtggccaccccgagttaagtaagcgtgagcatgttgcaccgtattaagtctttgtcgacttaagccgattgctccgttagcagggcatagtggccaccccgagttaagtaagcgtgagcatgttgcaccgtattaagtctttgccgacttaagccgattgctccgttagcagggcatagtggccaccccgagttaagtaagcgtgagcatgttgcaccgtattaagtctttgccgacttaagccgattgctccattagcagggcatagtggtcaccccgagttaagtaagagtgctagtcaatcatgaacaaattgagtatctttgaagtcttctttattgatgacatatctcccattttacagagtacattgtcgtcccgatagcttttgaaattcaactaggggtaaaactttctgaggtgttctatattccaggagttcccaacttctgtgccgtctatctgagttagacgatatgatcccggtcgagtgatttctgctactatgaatggtccttcccataagggcgacaacttatgtcgtccctcccccgttagaattcggcggaggacgagatctcccactgagaaggatcgttgtcgcacggccttatcatgatagcgtctcagagtctgctagtaccgcgctgattgaattactgcattcagtcgttcttcttcgagtacatcgatgtcc

SEQ ID NO: 60593 - DNA, 277 bp, Zea Mays
accgaatggaagagatgttggatgatattaggaatgagtacccagaactacagaataatcaagcttttccagaggatgtgagagagttctacaagcgtcttgaagcctcgaaggcttaagtgcatgaaggaaccaatgtgagcgtactgcaggtggtaacacgtctcatggcgatgaagtcaaagtacaccttctccaataattgttacaatgattttgtgaaactgattattgatatcaccccaccgaatcataacatgccgaaggacttgtacca

SEQ ID NO: 60594 - DNA, 668 bp, Zea Mays
atctcgcccgttctgctgaggccaatatgttgcaatagccaccttttgatgcacagtcgttctatatgttgcctagaatacattgttgttatctccctactggacgatcgtcgcggcaggtgcacttctccttgtattccttgagaccgtgcaagtgcatagtatatagtacaactcagtgttgctcagttgctcctttcttcttctttttttcttttttgaaaattcggttacccggcatatcattcttgagagtcctctgaatggtcaaaatcaagtagtcttgggttcttttctaccaattcttcttcaaaagtggagaacagatcggatggcaacaccatgtataagtgccttttatttttgttatttcatcttgcaacagatcggatggcaaaagttgcttattcagatatgttttcttcagttgatttactcttctactttatttggcattcaactgtaatttgaaacaaatcactcatgtactatatgggaccaccatttttaagcatctatagctcatgcaatctgttctccacaactttagttttagtaagatgtatgttcttccctttgtaagttcaccacttttagttatagtttcagttactacaatttcagttgtaagttcaccacttttagtaaactatatgttctccacttta

SEQ ID NO: 60595 - DNA, 360 bp, Zea Mays
gccttaagctcatcagcggtggagatcttttcaccgcgagacgttatccgggcactggtgagcacgaatcacctcgccggtgtgaatccaggcgtaggggtcaccggcggcaaggtgcactgcacctgcgatctcgttcagtccactgtaccatcagagttcttatcagggtgcctgacagagctatttgcagagcccagatctcaaatttccatgtgaccacttgctaatccaccattagcaaggttgttctcctacaatctggctttaatttcactatagtcaccatacttcaattctcaatagatcatgctcgaaatagctctcaaacctggccctagtttactgtcagtctagttt

SEQ ID NO: 60596 - DNA, 602 bp, Zea Mays
agagcaaggaggatagaggtgagtttgagctaggcgacgagcgtcagagctggacactgcggcagctggcgttgttggaggaggcgccgcctagtgaatatgcagattgtggaggcgagcaaaaggagcaggaagcagacggcttaacctgggagctaatgggcctcatagtgggcctttggtaggccaaatactctaaagtgcccgaaatgtgaattaaacatccaaatatgtttaaatgatgcaaaacagacatttaaacgtgtttcatagacgttctatgtgatgtgttcaaaacgtacagacattcataaacactttttaccatttaaacgtcgttttaacaaccatgctcattaattatgagccttgagcaccataagtctgataaggacttttgggactatttgcaggggcaatatattcatattttcataattgtagtgctcttctgcttacatggatgcaagaacttcatgagcttcagcagaatgagatatccatcgaggagtattacaccgcctttgatgggacttttctctccatggttcctaaatgtgagcaagggtgttccagctgttgtgctaaaaagaacaagttca

SEQ ID NO: 60597 - DNA, 429 bp, Zea Mays
aattttgtaaattcggattgtgcgggtaactgtgaaatcatgcgcgaaagggataatggagtttggtccccgcaggttgtgccgggcagagcagtaaagtatttgggtcattaatgaataaggttggtctgattttgatagactcaaacacgacctataatatcaaagctgatgctgcttgattcggtatgtttgcttttgtccctgatctgagtatacactagcagatatggtttcggctaatttcaaccaaatcgcagagcaaattatcgaagccaaaatccgtttaattcggtctgttgcttctcgcctcgatctaaatcttcaaaagtgaattaacggtacgaattcatttgacttcagagtattcgccaaatgaaattgggtccaaatactgttatcgatctcgtttgattcgacccattttat

SEQ ID NO: 60598 - DNA, 665 bp, Zea Mays
gtatattctagctctatgctttcgtttgattttgtttggattaattcgagcatgatggattatgcatccatgctctccaccaccactcgtctgcacccacatgtcaagtatgtaaaccgacccgttcatcagtcctattctgactaatggattattacacgacatacgatggctacatgcatgttggtggctcatgttgaccacacgaattagccatataattaaggagacataatttgtttatacatttcaagattgtattgtactagctaaaagaaagcgagtaaaaatggaagaaggccaaagttgtgcattgttatgtgagaagattcatgaaaaatattctagttcaaatagaagacaacaatacagataaaattgataaaatgacttccatgaggtactcgataaaatgcataaatgcttaactaaggagagagatgactcgggataagtcgaacatacctttacataaggtgatgttttgtaaaaatggaatcatattgataatctccattgcattccatcagtggcgaatctagccgagaatatggttgaggtcagcagcatcagcttcgctatatgatataatttttttaaaactttaacaaagttttggtaaaggatttataaattttatcggtgttggctgaccctgacaagca

SEQ ID NO: 60599 - DNA, 370 bp, Zea Mays
cgggaaggagttctatagcaaactcaactttccgctctggtggcatacccggtaagtcctttggaaacacatctgggaactcagacacaaccttgatgctctcaattgggtctgctccactgctatctacagctatctgataacaacatcctttctttggctcgggcgggactaactcggtcaccacttcctctcctagtggggacaccaacttgattgtccttttatcacaactgataactgcctgatacttatctagccaattcatccctaggatgacatctattccctgagtacccattattataaggttggcgggaaacgctatcccccttatttccacacttatattcaaacaaatgagatcggc

SEQ ID NO: 60600 - DNA, 438 bp, Zea Mays
ggtttgcggggggaaggggcactcgcagagagcgcagagagaaaggtgctctgttgtgtacttagatcaagagtgatgtatattgtgtacaaaatgtctcatatttattttgtaggcgatgcaatttacgattgggcaactgttgaagcatatcaggattttactcaacgtctactggtgccaatcgaggactcgtcctcaatctaatcactaaaataacgccaggatgacgcgctctgttctcgttggtgtcgtgtcctacagttgctcttgatgccacgcatatctctcttctgtggatgttgctccagtttaggtacgccagaggccggaccgtcgacgcctgttgcatgcacacactcacgattgcgaggcttgagaccagaggtcggaccactggggccagttgcatgcacaaactcacgataagagtagctt

SEQ ID NO: 60601 - DNA, 350 bp, Zea Mays
gtactgtcaaggagatggaagaacatgctgacgagatttagaactttttgtcaaaaccatgtcaagctaacagcacaagtacctatacatagaatatactcaaacagatcctggagcttacagattggatcaataaggtatcatacaatgcagcgaagttgttagattccataaccccatcgccccaaatgcaccgaagttgttaaattcaggcaacattaaatcatttcaataaacattaagccatttcaagaaacataagtcatccttgttttcggtcgttctttatgtttttctcggacatttcttattttggtttagtcattccaaaaacagtaagtcattccagc

SEQ ID NO: 60602 - DNA, 927 bp, Zea Mays
gtgttctccaggcctccatcctgcatcaatagtaagacacggggtgagcaaatggcacagcactggggtaagtaaactgtgaagaataccagtgctacggcaattgtgaaaacaccaaacatccctggtttcgaagggaagcgatcaccacaagaaggaaactgtggtccgctggggaagtatgaaccaaagcctctgtcacgtggtccttggccatatggcacacaaccagcatcccgtcgggcacgaccaccacgtggtctcactgcctgaggtctagcagcaagaggcaaaacacctctaggcctcataggacgtctctgagcaggctgagcatgaacaccatgagaggggcgtttcatgtccttcttgctcgactcagaaacccgccgctcatctctcttcctcctaaagcaaaaacaagctagatgcccatccctctcacaatactcacaatggtatctcacctctctcttgggtggattttgtttgtgggagggggctttcttttggatggctggggggctctaagaaagggatcgctagagatgtcgggaaaggtgtcaagtgtgttcctgagatggttaggttttggaagccacacttgtttttgaggaggagctctcacaggttcatcaatcacaccatctctcacaggggtgataggcttagcaggggtggttttgttatgcttgggagtgggtgaaggtttctctaaaggtgtcaaaccactcaccaaccttcccaaagcgagcgacactcccatccttagcagcaaagcctaaccccagtccgccagttcccctcttgaactgactgaccatcatgcccaattggggctcactgcatgacacacaactcaagacagatgcatgactcaagggcatactgcaaaccctcacaaagtgcacactacgcaggtacaag

SEQ ID NO: 60603 - DNA, 420 bp, Zea Mays
ggataatagaaaagccaaaagtttagatctaaattcatgcattacagagccggaggaagtgttagatacttcgtctagcagtacccaaacaatagagaaatcagctagcgatagtccaggtactaaatctaaacttaagagcccaatgtgcccaaacaaccgagaagcccacttggattatcaatctggcacaagaggctagaaaaactcagtgcacaagagctggagacgagaggcatgacatgggcctctaatgggagttctcaagatccaggtaaggatgattcttttggaagaagtggagcaaaggcaaacaaaagaaagaaagcaagtacaagacgtttgggtgaaaggtttgccccaactcaacaaagttattggtcattgcatcgtccatatttttcaggtactccatatacg

SEQ ID NO: 60604 - DNA, 1164 bp, Zea Mays
gatttccaaagcttgatagaaaaagaaaaagagaattaatgaagagtctcgggctgaaaccagcccgagccggcccagctagggcagaaacgcgcccccgcgcgcacgcccgcggtgactttgcgaataagaccctgcagttttgaataacccaaaggaccccaatcactatttaaagcagtcgctgacacttttcagaaaggcccctgaacttctaactcttcacatctcggcgccctcgacgaaggacggcggcgcgcagagctccgacgggctcgcgcactgcccaattcgttcaacaactggcgcttgagtttggctgaagccgaatccaagacctaaggcccgtttcccctaaaccaatttcataaacggtgagctatcctgctctgtccacggtgacagtggttatcgcggacacctgaccgcggtcccggtgattaacgaggttctagcttaattggatgggtcgacgatcatccagagcaagtaagaatgccgaaacaagaacgcagatggcgagaatggacctgatttgggctggccacagcgagcttgatttcgcggcgttcttcaaccgatttgggggaaatcccaaattggggagctgtggggaacgatcggagctacgagttggttcactggacgcacgattacctagcggaacatgctgaggcttcaatttataggatacttgagcggtggtgatcaattcggtcgagcagcgctggcggccggaggagaaaaagagctcggtgtgtgaaacaggtggctttcaccgtggcagtcactccggtgatcaccggacatgtaccccatggttcaccatgatgagggccagcgcttaagcacgtggcacgcaacggcgacagctcgacgacggtgagagttatccgatcgaccgacgagctggggggggggtacgacaagcttagccgcaatcgagctcgagttgatcctatgccaatatttttacctacccgtgcttatctgctgaccacggtgcacgaatcatggcaagcaatcaaccaccggtgatgaatcaccggcgacggcagggggaatgaaccgcaatctgtttcagtttggggggtactgtaccatggaatacttcttcagtgtgcctgacagtcacagtttagggccaaattcctctcagatttc

SEQ ID NO: 60605 - DNA, 1820 bp, Zea Mays
agctgaagtactgcatcttcgccaagatgtgggttctctgtcagataaactggaggatctgctggctcataaagagacgcacaccactgcaccgaagattccctttgatgttgggccttcagatcctggattccctccgtcgacatctttgggtttatctctgcaccagacaccactgcaccggagtgatggatttggggtggtgaccaccctgactccgcctccggtcaaaggtacttccaaaacctcaccactggatgcttttcatactcctgttgttcataccatggatcctgattgggcattatatcagtctcgcttagctgctacattacctcaaccaaattttccccaatttgatggacatcatcctaaaatgtggaaaactaagtgtgagtcctattttgatgtgttcaccataccccgagagctttgggtgaaaattgccacgatgcattttgttgggtcagcagcgttttggttgcaatcatccgatccgaggttacgtttggcacagtggtctgaattttgtgcagctgtctgtgctcgctttgagcgtgatcagcacaactatcttattcggcaatttttccacattagacaaatcgatacagttgttgagtatgttgaacagttcgatactctgatgcaccaaattctagctagtgatccccagtttagtattgctgctattgtcaatagattcatagatggtctggcacctgaaattcgggccatagtctttattcatcgtccgctcgatttggatactgctgtttcgcttgccttgttacaggaagaattggcgacatcgaggggagtaactccaccagctcctaaaccactaagtcgaccacttcttcaaggaaattcttctggaacactgcagccagatggtcagcgtattccaaaaccagtgattaccaacagtgggggtggagtctggaaatcaggcacggatgaacggaaagcctcggccctcatggcttaccgtaaggctaaaggtctttgctataagtgcggccttcgttggagtacaactcacaaatgcagtgatacagttcccttacacgtcgtggaagagttgtggcaactgttggatcaaccagattcacaggataactcaccggttagtccagatcaatcaccggaagacttattggtattatcctttcatgctgttcacggcactgaagctccagagaccattaagttaatggccactgttttctctaagaaagtgctgatgttggttgattcaggaagctcctcatctttcatcagtcaaccgttggcagccttgggtcctccattaattcctctgcctgaggctgttcaggtcaaagtggctagtggacaattgctggcatgtacccattatataccccattgcaaagtgagtttgccaggtcacgtattctctattaaccttaaggttcttccattacagtgctatgatatcatattaggcatggactggttatcttcccatagtccgatggagattcattggcaagatcagtggttagcttttactcatgatcaacaaagagtggttcttcatggtcagttggcagataattccacacccgagcaaatttctgtttgccagctgtatcacttggacagattgaatgaactttggtgcacgattgaattgcagcacatagctgaaaatcaggccaacaccagtctgccccaagagattcaggatcttataaaagattttgcctccctatttgaccaacccactggtttgccacccccgagatcacattgtcattcaattccgttgattccaggagcaacccctttcagat

SEQ ID NO: 60606 - DNA, 1163 bp, Zea Mays
cacaaaagggctccaaaaagctggccgaaacctcaacctgctgctcctgttaactgaaacagaaagtgcaatcaacacctgatagaggaaattgaaacacattttactccacttttatgcagcccctgatcaaacttgcctaagggaacttgcttaccatactatagccttcaactcttcaacaacagcccagagccaaaagtgtgtggatctcaagttatgatactccggagttggtcacaatttactgaaattcgtttttagcttttgaatcacatttagttcacagcaccggttggcagtgaatgtttgagggcatttaacttaggtttctatacagtaccagacccaacccttctcaagagagttgttcacctttctatggtttaccaatatatggtcttcaattattctatagaaaccatagtccaaaacttccaagattagtcacaagagaactccaaagttgagcaaaactcactaaaattcagttttagtaagctgcactaagtctgaaatccaaatctgtcagctccactttggaccactttttctcctagttgcaagcagtttcaagggcatgtcccttactatggattactctcccaacattggtctccaggtatggtacagaaactacagcctaaaagcacatggattgaccaccgaggagctccaaactaagcactaaaatactgatttcagacttgggctattattcaaaatctgaaaactcagaattcaaacagctctactttgagtcacttttactccaagttgcatatggttttaggggcatcccacctaatacaatatgttctcctatgttcatgctacagattttctgcagtgactatcatccaaaagttcatggaacaaaagttgtaaaggtccaaagttggctcagtgacactgattcgcagtatttccaaactgaaccaaattcagctaagtttacaacctgacagtccatctttggcaaactttacacctagttccaaatggttttagtggcattatccttaatcaaacttgcacaccaaagtatgggcttccactttggtacagcactcatggcccataactacatggatcagcccttaaggagtatcccaaatctgcttcagactgaaaaatcagcaggactgaatttttatcttgag

SEQ ID NO: 60607 - DNA, 1241 bp, Zea Mays
tttctgtctgaccatctgtctaggggtgataggcaatgctgaagtctagcttggtgcccataactttctgaaggctcatccaaaatttggaggtgaactgggttcctctgtctgacactatcttccttgggatgccgtggagtttgactatctctttaagataaatccgggcgagggtggctcctccaaaggtagttttcactgggatgaagtgggctaccttggtaagacggtctattattacctagatagagtcgttccctttttgcgtccggggtagtccagttacaaaatccatgtctatttcctcccacttccattcaggcactggaaggggttgtagacctgtaggcttctggtgctcgaccttcgttcgctggcaagtgtcacaccggaccacgtattgtgctatctctttcttcatccctctccaccagtatctggttttgaggtctaggtacatcttggtggttcctaggtggatggagtaggctgagttgtgagattcatcgagcaggacttctcgtgcctccccttttggcacacacagacggttcttgaaccaaaggactccttgttcatctgtcttgaggtccggaagttgttctttgcgagctttttccataagtcttgctatctctgagtcgaggcattgagctttgcatatgaggtcttctagcattggtttgacttctaggctgttgttgtttcccaaacatgcattcagctgagctgattccttcttccaatcttctaaaaagttggttccctttatcccgaaaggttttcggctgagggcgtctgctaccacgttggcctttccggggtgataatgaatctcaaggtcataatctttgatcagttccagccatcttctctgacgagatctggctgagtgaagatatacttcagactcttgtgatcggtgaagatgtgacatttgttcccaattaggtagtgcctccatattttcagggcatgcactatggttgccaattccaaatcatgggtgggataattctgctcatgcggcttgagtaggcgtgatgcataagcaatgactttcttgttttgcatcagaacacaccctaagccttgccttgaggcatcacagaagacgacgaaatcctggtgtatatctggtagtgtcaaaatgggtgcggtcgtgagcttctcctttatgatctggaaactttcttcacacttcggggtccacacaaacttattgtctttcttgagga

SEQ ID NO: 60608 - DNA, 455 bp, Zea Mays
tcctctcgtaaactggctaactatcattcccaactagggcgcactactagacatctagcttaatactggtcaaagctatgtgttttcttcctcgatcctaggcttgttgtgttggtaggactcgagcttggactacaaaccatcacatagtgcatagtaagtaggtacatgtgcacttattgagctagccttcttaagcgaggttatccttgcattcttttccactagcttaatttgcaaactaggacaagtccaacacgtacccgatattctagatctagatcataacttatcgcactcatctagtaaggtggcatacttggtctgcaatatggtaatgtttgacatgctaaaagcgcactcatcacattcaatcttgttcaacaccaccacagaatctccaacagacttaaggtccctaagaatgacctcatacttgttcttgtactatttcc

SEQ ID NO: 60609 - DNA, 514 bp, Zea Mays
tatgtcatggatcagttgaagtatagctaaaccagcaactcgctgtttttggccaaaacaggttgcttaacaagtccaaacgttacaaaaaaaggaaacttgaatgcctcggatctcattagtgctatttgatttttacttaaacaagttggagttgcttccaaactctgctgttggctaaaacagatttcttaacaagtcaaaactttacaaacaagtggaaacttgaatgcgtaggatttcattgatgctatttcattttactaaaacaaactgtacttgcgtcagaggtgcaaactctgcagatctgttatttctactgaagcacagaatttcatcaaagagctcaccaaagaagcttaggaaaaggtttttaaactgagggctcaatcccaatcaggaaagatctggtcatttttgctatttcaggaaacacaaagaatagttgcttaatggttctcctcttactatcgtgtgttctaggaaaggaatagttctccttcaactgttctta

SEQ ID NO: 60610 - DNA, 602 bp, Zea Mays
cgcttctactttccatgtaggactaaaatttaccatttccactcctaccatatatgattgagcctttgagatttattctggattttattatagagtaaatggatgaatcctaataaactccaataatccttcactagatcttgaagacacaacgtaatggactctctagatgttcttgttggcatgggaaactggtcaacactcaacagtagtcggggcggtcaacatagaggagctaggagatcccgctacttctgcgatcggctctccattcatacccctcactctccatttcgcttgtctttcctcatattgtagtctcctactctctattttgatatggattccaggtggagaacaaactttcaaaccttcaccgatttgatcaacaaccaatctccacaacttcatgacaccccttctggtgtagggtaggtattctttgatggcctttctcgtgtacattatcgtcgagaggatgttttggtccaccccatttcctccctccacaacctctatttctatacccatatcctcctcctctatatccctatcgaccttctgtggatgctcctcctactccctaatgatgattctaccat

SEQ ID NO: 60611 - DNA, 628 bp, Zea Mays
gttccttgaaaccatgtacacacataggcagcaaagacctttttacaattcatgaattggccagatgtcgatggaatagaggagggcgtcgcaacatgaggcagtagggttttgtggtgccatctcctggtaggagagcagcgccatgctggtgaagtcaagcttgcaactcagcgaggagcaagcaggtgacggcggcagcatcagcagcagcatggtggtgacgagcagcgaaacggaggaggaggccatcggctgctctagtatgtacagtgggaagagtagtggcgattgtgacccggccatccctatcgattgaggtgtggttgctctagtatgtacggtgggaagggtagtggcgattgtgatccgaacgtccttatcgattgaggtggtggtccattttatagcccatgcatacagccgagtgctattgcgtctgcgtgggccatccctctctcgtttgatcggggatgtagagtagagcaacgcagagcagcccagtccagcagcagcagactctcatcattatcctatcactaccagcctagctgtgcactgcctgtagcaacacatgtggcgctgttggtcagaagcaggctgcttcgtgctattaaaacctggttgg

SEQ ID NO: 60612 - DNA, 304 bp, Zea Mays
gagcaaggttgcgctacacatggccacaccatgggggcgtgggctaactcacgggacttgccacacactgccacaaagatgttagtagaggactcactatagggatccttatgatgaacgaaatgagacgatacaccatactaggagtatggctacgcacgaccctacggactatgtcaggagcactacgccagaccggggcaacagatcgcccacatacctgtagagaacaagtcgcctctgtaaggtcctgcccttgagccataaaaggctaggctctcctttttcctacacacaggtgcac

SEQ ID NO: 60613 - DNA, 1050 bp, Zea Mays
gcaattttgagtaggatccagtgagtatttgattctggttgctataacaaaactcaagctggtatataggagattaactttgtcacagacaaattagggagttgccacataaaaatttgagaacaaagcattgcaagttgctctgtcaggtgctctaatgaatgattgcgatggtacagtgactgaacaagatcaggttcagtgtatctcactgctggtgaattggcaccacgatcctcgctcgcggtatgattcgtgtgcctggtgtgcggataacggtcgccagtgaaaagatcttgcgcagggatgaagtcggggcactgtggccgccctgtcgccgtacccacttgcgctacgacgtggccagacgatcatcaccgtggagatcgccattcaccatgattgtgccacgctgtagtcgattcaccacgtcgtcgcaagatgtatggactcggtagtgaccgtcgtagatagttagcctgtgagtgccacgttagcggcctccggtgactcctcccccttctcaccgtgagcgcttccccgtccaaattcaccctcctcgcagtcatcctctataaattgatgcatcgacatgttccatctacttgttacgaacccagagcaccagccctcgcctccgatcatccaccgtagcgaccaattttgttcccccccccccccaaatccactctccgcgccaccgtaagtcacctcgtcgtggtcagccgtttactggtccgctctcaccctcgttatcctcgtttcaacacccttgcacgctagtgatgcttgtcggctcaaccaattgagctagaccacgcttaatcgccgagaacacctcgattttccctcgggtcttgccgtcgtcgtgggcagaagaactccgggccggattcatgcaattaagggatagattaggatcgccaggagtggaaataggtgtagaccgagttaagacaccggtcgttgcgtattctagccggtactaattcgtcggagcgcgcacaccgccattcaccagcggtgacctggagttatgaagaaacagaa

SEQ ID NO: 60614 - DNA, 484 bp, Zea Mays
agtatggccactcgggagtgggtgggaaatgccgaaggaggctgctgctgggtctagccaaggtggcttgatttacttgaaatatacattcaaatacaggagccaatttgatgagccaaacgacgactggctagatgtcattgacacaaccagcgatgaattgcttggtgcctattcaagggccgaagatgatgccatgacagcggccttcggaggtcgaggcaagaaaaggttgaatatggtttttgatgttattggtttcgtatatccagattactgctatccttcacgaaagcaaggaaagaaaagaagagctgctgcttcggtgatttctactacgctgaagccgaaaaaggttaaagtttttacacatcgccccaaatgcgttgagacagccgaagagccgaggcctgttgaagggtcttctgcttttgagtcaagttaccctgctcctgccgaagctaagacagaatcggctaaagag

SEQ ID NO: 60615 - DNA, 680 bp, Zea Mays
actaaaacgagagggcagagggcatgagcagacctgaatcgagctggtcgcggtgaggattctttcacggtggcggaaactcagtttgggggaagtgagaaatttgtggtctctggtgcataattggaggcaagcgtgggtgcgttggcttcgtgataacatggtgcaacagacccggccatcaatttataggatcgttaagcggtggccggggatttggacgaagacacgcggcggtcagaggaataggaggttactggtgctctggttagtggctttcactgtggcagtacaccggcgatccccgtgcatgcgagacgcgatttacagcgacgtggtctaacgctttagcacatggcaggagatcgacgggcagccaatgctggtgaactgatctgcgctggccgcaaagcatgggggtacgacggccagctactggagttatccccaggcgaagatcttttgccccgaagtgctatccggtcactagtgagcgcgaatcgtaatggcggcgacgatcatggcacggattcatcggcggcgaggaggggtgaacctaggatcatgttcaggttactgtaccatggcgcagtctactcagttgacctgacagactgtcacacccattttcgaaggcagagccgggtgcatagcatatgtgtgccaggatctatttccac

SEQ ID NO: 60616 - DNA, 653 bp, Zea Mays
cacgagcccacgacgaggttagggattcggtggcatggtcaccagacagaggaatggatgcacacacttctgaagcagatcacgctaggtggttaggagagaactcaaactggcaactcagcttcaacacacactccgtactctaaacagagcttgaggcagagagaaaggtccactgaaacaaatctgcagcagctagcttaaaaggtagggcaggggaaaaaggtcaccgagctcactatggctaaatgaagaaggatcaccaagggtgccaggacctcaagcactaggacacctgtccacaaacacaccccgcgccagcccacaattccatgaatctgctttggtttatttagtcaaggcaagtagataaggatgccttgtaataatgcacacaaaagtctaaacttgatatttctctaccttcaactatgcaccacgaccttatctccatccctacacacaagtacaaccagcaagggcacaaagatcttcttcagttttctcaactcagcactgcactaactgaactagccactgctatcccagttgcagacctccccgttgagaccctatcatttcacaaatccctatggcaacaacccaatcctccttaacaagatttactctccaactctagcactactaacttg

SEQ ID NO: 60617 - DNA, 384 bp, Zea Mays
ggaggtggttatgcagaaagctacaactaaggctatgatacgtctactcctaaggcatgaatgataaagaaaggtaaataaattagattgattcgattggaatgccttcgggggttctcaatcggtcatatcccttcatatatataggggggtctggacccgttcctaggcgatagcaaacaaatcctacataattagatagataaccatgcacgagataagaatgattgcccgagtcaatctgatcgcgaggacgcggactgtccgagccctaggaccggaccatccaacacttttggtattcaacgcatgcccctgccttttggtggaccttggcgaatcaaaagcactaggacacctcaaaaacaatagatctcataagtt

SEQ ID NO: 60618 - DNA, 522 bp, Zea Mays
attttatgatggatggagtattattttggccgaacatgatagatacactagtgtgcactgtattcgttttcctacgctgcctctgccctgcttcccctgtcagcggttgtggttgtgacgtgaggtcggacgatggcaactgattcatacatgctaaaatctatctttacatcattgtagccaatagccatgccgtaacagcgaccgggaagatattggcaagccaagttgcgtctcacttcacttgcaggttaattgagattaggcaggccggccaaacagatactgctgctgccatcacaaccaggaggactacgggcgaaacgaaacccgcggcaagcagatgcagatcagcacttgtgaaccttagaacattcaacgttcaaatgtgacagtttgcttacaacaggtccaggtgcagccgcatttaaaccagtcaagaatctatatagtgccaacgaacacctaatgcgctactggtagccttttttttttttgaaggtctggtagccttgttgaaac

SEQ ID NO: 60619 - DNA, 402 bp, Zea Mays
tcttagttgtttcccctgtacaggtgctacctttctctttgcgtgtgtcttcagaaagtgccgcacaaccttccctagctgaaggcagtggcaatcctcagataccaaactctggtacgtgcaatggtctatccgagagcctctgtgcagatggtgaagaacaagaggtcaatgctgtctcccagaatcagtttgaggctaacgatcctcaggttgatatgccgacaaaagtggctcgcaaggagatcagtatacaacctgatacaatcagacatagaagacatggtttcaatggtggaaaggttgatgttcgaaagcttcgtaatgttgatgtaaatgatgcgattgaactatcgattgctgcatctgaggccatggttattgcagagatgatacttgatg

SEQ ID NO: 60620 - DNA, 337 bp, Zea Mays
aaaaactatgcacatgaaaaagtcaaagacgatatacaatttatatatgtagacgaaacccttgataaataatgtggacggtgtaatacaaattaaaaatcatggccaacaaatgtggataatttaattaggactgcagaattcatgcctgacaaaacaactttcttgttttgactttaggggtgctcctagtagcatatattactctaaatgcttcttgcaatagcttattcttcagcgggtggtagggacaggatccatgactcccccgagatgtagtgtatcccgataaatggtattggctgcacacgggtcaaagttgaggttaccattggag

SEQ ID NO: 60621 - DNA, 436 bp, Zea Mays
ctccgctcggtcgcaggtcctcactacgtgcgcgtggatcgtggaagtgtggcccacctggcggacgctctctcagcctgggacgcttccacgtgggaccagttcgtcggacccgttgtctccgcgataatcgcgggcgcttcaaccgaactctgggcaattcgccccagctggctaccgaccctccctagtatttaggtgttgcgtaccttgcggcgttcctaaaccctgagttccacgaacccttcatgccatcacaaccatcgccagtggggtgaaattgggagagagggagaagaggtcgccgccgcaccgattccttggatcaccgtcgtctggactaccagaaaggtgcgattggctagcgcggtggtgcgtagattgtctgtgagccaacctcttggcgcggggtcatcgggactccactaaattcgtc

SEQ ID NO: 60622 - DNA, 982 bp, Zea Mays
gtagagagccgaggccagggccgagggttcggtcatgtacccgagccagcctaatggggaagctgcccatgccgtagtggttggagcagtgctgagtatggtgaaaagcccttggtaatatgtcagctctattgtttctggtgacgtcagacgttccttcgttgattttatcgaggctgaggccatgctcgggcgaggtggagatcttctcgaggccgtgggcgagcctgctctagggctcgcagctatgtaggacacaatgggaggagtagccttccgcgggattcacggggaacaagttgccgagaccgggatcaggcaaggcggagtttcttccgaggctgaggcctacctagggcgaggcgtagtttcctcccgaggactagcccgcacattgtcttatgcatgtcccatcaggtgttggcagacgggaggggaacagtagctgttgtacctaggcatgtgtcatcgtagttggtgaaagccaatgggaccacggtcctgtcgctcgtgttcgcttgcgacgttgcgtggggtaggtatgagcattgaatgctcatgtctcttatggccttcggctgaggcctggctcgaggttgtctttctcgcccgagacgggctcgggcgtggcaaaaacggtggttctgtggaaaggggacctcaggcgggacgaggttttcaccaagttcgtccctcgtccgagggtaggctcggatgaggtggagttttgtgtgactgccgagtggtgtctcgggcgagtcatggtttacaccttattgtctttggggaatgtgcctcacaacaaactcgagcgagtagtgcaggatgtaatctaggtacacctaattacgatacccgatattatcctttatccatgctccttctcatttgttccagccaacatcttttgttttctctggaatcgttgacagcacttgcaatagaaaaattctcatccccttccctagctgccacatgctcc

SEQ ID NO: 60623 - DNA, 599 bp, Zea Mays
tgttatttgatactggagcaacgcattcatttattactgcatcatgggtagaagcacataatcttccaatcactaccatgttaacactcattcaaattgactcagccggtggtagaattcgagccgatagcatttgcttgaatgtaagtgtggaaataaatgtaagtgtggaaataagggggggtagagtttcccgctaatctcatagtgatgggtactcacggaatagatgtcatcatagggatgaattggctagataagtaccaagcaattatcagttgtgataagaggacaattaagttggtgtcctcactaggagaagtggtagccgagttagtctcacctgagccaaggaaaggaggttgtcatcagatggctatcgatagcaaggagccagattcactcgagactatcaaggttgtgtcagagtttccagatgtgttcctgaaggatttaccaggtatgccacctgagcggaaagttgagtttgccatagagcttcttcctggcaccgcccccatttctaaaagagcctacagagtgtctggactagagttggttgaacttaagaagcagattgatgagctgtcagagaaagg

SEQ ID NO: 60624 - DNA, 2073 bp, Zea Mays
cattgggcaaaattttccatggtctttattttattttgagaaaagatgtagcaaattgatgtgtggtgttttacttgagtggacataaacacaatctagttacgccttgaatataagggattataggaaacctggtaacacaaaaagttatttgctagcccaataatgtcttcatcctctagttgtactctaataccctctcgtgcgaatacagtgccctcaatatcataaaaacatcatttgtggtttaaaaggtgatctattgttttgaattcattatattccaactttttagcaaccgtatggtggaaaaatgtgccttacaactttaacctatgtttggatagttctctcactcaatttggctaaattttccatggtctttattttattgagaaacaatgtggcatattaatatgttgtgttttatttgagtagacataaacaccgtctaggtatgccttgaatagaggggattataggaaacctggtatcacaaaaggtcattagctagcccaataacatctttatccactaattgtactctaataccctctcgtgcgaatacaatgcccttgacatctgggaaacatcatttttagtttaaaaggtgatctattgttttgaattctttatattcctgctttttagcaactgtatagtggaaaaaagtgccttacaaccttaacatatgtctggaaagttctcacacacaatggctaaatttcccacggtatttattttattttgagaagcgatgtggcatattgatgtgcggtgttttacttgagtggacacaaataccatctaggtatgcattaaatagaggagattataggaatcccgctatcacaaaaggtcatttgctagcccaataacgtcttcatccactagttgtactctaattccgtctcgtgtgaatacaatgccctcaatattatagaaacgtcatttgatgtttaaaaggtgatctattgttttgaattctttatattccaactttttcgcaactgtatggtggaaaaaaggtcccttacaaccttaacctatgtttgcacagttcactcacgtaatttggctaaattttccatggtcattattttattttgagaaacgatgtggcatattgatgtcttttgtttttttgagtggacataaacacgactaggtatgccttgaatagaggggattataggaaacctggtatcacaaaaggtcattagctagcccaataatgtcttcatccactggttgtactttaatacctctcgtgtgaatacaattccgtcaatatcatagaaacgacatttgaggtttaaaaggtgatatattgttttgaattctttatattccaaacttttagcatcagtatggtggaaaaaggtgccttacaaccataacctatgtttggacagatctcacacgcaatttggataaatttcccatggtctttattatattgagaaacaatgtggcaaaatgatgtgcggtgttttacttgagtggacataaacaccatctaggtatgccttgaatagaggggattatagaaaacctggtatcccaaaaggtcattagctagcccaataacgtcttcatccactagttgtactctaataccgtctcatgtgaatacaatgccctcaatatcatagaaatgtcatttgaggtttaaaaggtgatctattgttttgaattctttatattccaattttttcgcaattgtatggtggaaaaaaggtgccttacaaccttaacctttgtttgtatagttcactcacgtaatttggctaaattttccaaggtcattattttattttgagaaacaatgtggcatattgatgtgttttgtttttcttgagtggacataaacaccgtctaggtatgccttgaatagaggggattataggaaacctgaaatcacaaaatgtcattcgctagcccaatgacgtcttcatccactagttgtactctaataccctcacgtgcaattacaatgcccttgacatcagggaaacgtcatttgtggtataaaaggtgatctattgttttgaattctttatattccaattt

SEQ ID NO: 60625 - DNA, 561 bp, Zea Mays
gaagaagaaagatggagagaagaactaccatgtggggcccacctgcatgcagcaacgttcgatccgattttgcgttcaatagagaagaaagaaaaacaactgcatgtgcgcttcgtccgttggctgcaagtggatggcgctagccacatacgcactcgcacaacctccttgcatcccgcatctgagcaaccattaagcacatgcaagttgaagaaaataaaaccactagtgggcctatatacatgcatgcaaccgagaacaacccagagaaatcgtttcttgtagccacaccaaatcccattgtgtggatgtgcctcatgtgacccattgtgtgtcacattttcaagccaataagattacacgacaccatttaatctgtgaattattaaatactgagcagtatcatttgtgttagatttccaatttaattcattcaagttgtgttagttttcttataacatcatctacatgttaataatattgtttcatcatagcacatgttttaattaattaattgattgcttatctactgttgattaatagcgtgtcgtcggggtttag

SEQ ID NO: 60626 - DNA, 722 bp, Zea Mays
ctaagataaccttacaaaagctaactattacactgaatgcacatccagtgcccattcaacaccagcaggactggcctacttcatctgacgatccgaaagctcttcagaattgacatcatccagtgcccattccccaccgcccatatgttcatcttcagcaaattggttattgaaatactcagataatggtggcgacggaccagcttcaagatcttctaaacgatgtgcttcctcctcaagtgactgagcaagctcatacacgcgccacattgcaaagttcactgacacctctttggccgtatctggcgaatccataatctcgtttccggccaaatctttcaactccctcccaactacaagcatttttgcaatggcttgtgcgaggtcactacgaaccgtttcaaatcgggttatctgcgaagggaaaccataccgacattatggattaacatagaactaaaaatttatacaaaccatagccctaaaattggtggaagggaaaccttaccgacactgagcgaggtgccgagcactgaatctgctgctggggagtacatcgcatctggctgttgttggattcgggatcttgctggtgagtttgctgggtgtggaacgtgcctgatgtggccacgcaggtgacgggcttgctggtggagtgctccttgccgctaccgtcgcctgtaggcttggcgaggattgacactgacaaacgactgaaggcg

SEQ ID NO: 60627 - DNA, 729 bp, Zea Mays
gcgggaaatgatattgtttggtgtattacaagggcgtgttagccctgaggattcaaacaaaagatttgtggagattatcgatattccaggaatgctctaggtcctcgccggatggcgttatcagcctgtacgcgctgggggacacctttgtcttgacgatgaagggacgctcccactttggctccagtttgccccgtgactctgtccgagttgtccggacgagtacaaggtccccttcgtcgaattctcttgggatgacggtgtggtcgcgccaggccttcgtttgagcttggtatttgttcagagcctgcagggcgaagacacggtctccgtcgatgaggtctttggaggttggttcgtcgacgtcagggacggctgaagcgcttgtccgtggtgacccatgtttgatttactgcggggtcatggcctccgatccgtatagcaggcggaagggagtgaacccagtcgcctagcatttggtcgtgttcagcgcccggactgcttcaggtagtaggtcggtccatttgcccttcttgtcatcgagaagcattttcttaatggcggtgaaaatcttgacgttggcgcgttccacgacgccgttagattgggggtggtatactgaggcaaaggctagcttggtgccgatggagaaagcaaaaatccctgaaatcatggctgtcaaactgtttgccattgtcaactgtgagctcagacgggactccgaatcgg

SEQ ID NO: 60628 - DNA, 317 bp, Zea Mays
cttcctaaaccctaaaccctaatgttgaacgccagatctatcaaccacgaacaaattaatttggtctagattcctcagcccttacgtggttatcctaataattcataggaaactattggatttcccctagtacatgtccaaacctcccctatacatatgatggggtatgaccaattgaattaaccaacaatcaatatatcagtccaattttaccttatgcaatagatctagtagttctagccatagtttaactttagttatagttcgccaaactcgatcttcacctctcttcggctttatgttgtcttgaggtgctt

SEQ ID NO: 60629 - DNA, 1232 bp, Zea Mays
tttaaaaaaatactgtagatctataagccatccaaaatccacataccttgagttctttgatgcgtttgaaatcttcatcggatagaattttaccagtttcatcagatggttcttcagccttcttggcagttgctaacctcttcagagctcgaaggcttgcatcagcagaatttagctgtccaatataatcatttaacttcctcttctgcgctttagagccactgccttttgacttgtcttcctcttcgctgtcttcattctggtctaaagcttcatcctctgaaccatttatgctttctttcagttcaccgtcgtcaccttcgtcttcatcagatatatcagtacccacatccacatcagagtcatcgtctagttcatcactatcactgttggagtcatcttgatccgtaccatcttcatcatcagatgcgtcatcttcctctttggtatctccatcggcatcatgtttgtttgcaacagatgaaccctccatattttcttctgttccaggaggggcaggtgtcaagtccatctcatcatcggagtgaaaaccatcagactcatcgtccgaactttccccttctgaagaaatattttcatctagcaactcggcaccaggaacgttgctagcaacagtgacttctccaaatgctttgggccgagcctttggatccacaggacggccacgatctttcttgactaacaatgaaggacagatctgaacttcaatcaacagaggtttagcgacaggggattccaacatatagaaaaaatattggaaaatttgtaagaaattatctgacctctctgaacaatgtgatcagcgaacgagcagcaatggaaacagctttctcatgggactttttgtataaaacgaggtcttggagcagatcctcattcatcatctgcaggtttgccatagtggatgaagtataaagataagttgaagaaagaaactgtacatctgaccagatattctagaatgcacaaaaatctcaggtttacatgtgtgttttgcatcagcaagagcaccaataaaaaaatccaccacaatgacgataatggcagacaaccacaaactaaaaccgttcacaactttattccaattcagctatttacatgtttaattctgttaggacttaggagcacaacattgcaaccttttcagtctatcagtaattaatacagaaaagaataattagtgaaaacatggtcattatcccctctgctta

SEQ ID NO: 60630 - DNA, 1382 bp, Zea Mays
caacccaagaacggtacaacatacataagaagagcgaacacatctctgaatagtcccaacatttcctttttggaaggagaccaagctccctataatcgaacaagagaatctcaagctttttgccaaaaacagacacctaattttgtcttctcaaagacacacattattagactggttcatcaaaaaggtagctaattttgatcccgctgacgcttcgccttttagcagactacctgtcgccatcaatgataaggcagcccccgaactagtccacaaccgtttctgagtcactttctgtttccctttcccacggccagacggtgttatgtcttcattgccttggccagatagcaaagttcccccttcttccaaaataaagggagccgacattacttcatctaaaagtgcgaaaaacattaattcatcttcgagattcgaaggctctttagaatgaaaaggcatgtatagatcttcatactccaccgggactatgacaaccaagaggagaaataaacacaacatcatcactctcctctgaagtgttagaaataacaataacttcccatgcacgccggacatcggaacctacgcaaacacccaaaaagtttatagtgtcatttaatccaccatctcagcaaaagtcctcaacagaaaccttcccccaagctaaagtttcctaaaccttatctaaatctttcgggacatcttcaccatggtgcgaagacccaaacgccttcgagcttgacacttgcacaatagcccccgcaccagctatcgacagtttcgggtcagactctgtgtccgagtcatctgacccactagcctccacctctaagcacatctgtcaaacaaatataaaacttcaggccacacaagtctgtcaccaaagcaaaccgataaaaagcggaaatcgatcttaatgacctgtccgatgtcctgaccagacctctccttcactacggatacaccatgttgtcctcacatgcagtcaaacaacacgtcagcagacaatcccactgtacggtcaccctcaatattgtacacactatgatcgaagtgcttgtcaatatacccaagcggctcaaagtgtccgcaggcttcgtgcacaagaacatttagggtgccttcatgggtaactagagtttaataccccattaggcccctaaccatcgtggtaagactgtcaagttcttcttcaatacagctaccaaattgcttaccaacgtcggccccttcctcatcaaatgaacggtacttgctccaaattctcgataagcattagacaggaccctaccacgaactttagcatcactctccacgaactttaacaaatcaatgacgcaaaaagattaaaactcacatagcgcagctgttcgtgtgta

SEQ ID NO: 60631 - DNA, 310 bp, Zea Mays
tccatgtgataatgaagcagcgttctgaatttcggaccacgccctcgtgaaaatttgtagccacggtcaaatatgcctactaagagaaattctgaacaagcatagaccacacagatttcatagtctgaaagatgttgcggccatgaagttcagagggaacaaacaagtgagaaccaccagttgactacagtggtaagaagccagcacgttttgtttcacaacttcctaccaaatgaataacattagcctaaaccattccagacttctgaactagcagttgcccacaaccacattgttacttcgtactcca

SEQ ID NO: 60632 - DNA, 690 bp, Zea Mays
aaatgttgtttcagctgaagcggataagaaaccacgcatgcccttttgatcctttgatgctagaaatgtcccaactatcagttttttatcagtagtcaatgtcattttttcaagcctttgccataattcggcatcagagttcaaagaagctataacaggtggaggtggttgttgtttaagttcgtttcggagatccatcaaagtagtgttgatttcatctcctatctttgccatgcgactctgtggtctcacatctctcttgactggtatggcatctcctcttggacgcttgattccagagctagatgagctctgctcgataacttgagatggaattttaggagatggtaaagtgtcagagtcatcacctaggtcatcctcaggttgaccatggttggagacatcattgcatatgtcatcatcattatcattatcattatcatcgacatgttaaaggttgatataaggatggactccagttatatatatgttacctcaaagtatggatgaaaccttcccgggctattagatatctttggatgtgtcttcgtggttctcatggtaatgaggtcacgtgataggacacataaagcatctaaaacagcgttaaagtacctactaactgtctctccagaccgcaagaattcaaaaccaacagatctatttgtccatctatggccaacaaatttc

SEQ ID NO: 60633 - DNA, 1353 bp, Zea Mays
cctgatgcgggccgtgttgggcttcgaactattgcttcctagtcctcagcaagggtgtacatttgacgcgctaagcgcatctccaacaaatacttgtgtcgacgacggctaatgttctggaggaaaacagtcacattggtttacatgtgaagcacccagggccaaccaatacttgatctatgatccaaattagacggtctgatttgccaaaccgatacacttcctcactcaccggatccaaaatctacgaccgagaatccattacaacgcaatctagtcttgatcgttggtttcgtgaccgaccgtcctgattcaaagcgatgaaatggtatcccaccttttaatttgatcccttgactctcgatccaatgacctcttcggtgtttctaccctcgacactcaaccacaattgtgcgttcactcaacgacgacccactacaccacacccttctagctctatgcgtctacgaatacagcgaatcgaaccagagcattcttacggatggttaagttggcagctaggccggccacgacacctagccataccgcagtggtgcttattcgaaagcgaggaatttgtcgccctccaatcgatctcttatgctcagctatcaactctcgggttctatgctcaagcggacctttagcacatctcgacgagagccgattgacgacgtgggcatgaatcgacgacggggcgtcgccgacgaccatagttcttcggcatgggcacacaatagcgctgagagtagatgtcctaagggggtgagggttgctcaggttttatacctcagggtcaaagtccggccaaggggaaagaatgactagcagctgagtccggcaaggactcttctttccctgttcgaaccgaacacgagctaggaggagacccctgacaaaccaagcccactactcagtgacacacacacacgatcgtcccccctaacacgactggcttgtgcccccctcacgccagtgatggagtcctagcgtgcatttggaaggggatctgacccgtcgacccaacctggtagtgtgggggtgtgggtcatgcgggatgcagaatagagggaagtgggtcgcagaggaaggagaagttttggcccttgaacaggtttgcttctctctttttttcttttacaattttagcttcactttaaatttccaatttcagttttgattcaaatttcaacatccaattttcaaatttataagtcaagtgcaaaaataaaaaatattgtcggagagtaaatctctggccgggtggcggagtgcacccccctaagtcctgagatgaggaggggcttaggcgttttgcttgatcgttggagtgaagggaaagaacacaagaac

SEQ ID NO: 60634 - DNA, 841 bp, Zea Mays
aaacgagggtgtagccggcgggggaccaaaggcttcaaaaccctagccgcccggaggttctctggtcgcagataccggccgcagtggagagaagcggagagagagagggagaaaagtaccaccaccacaattcaccaacacagttggcgttcggggctagatttcaggccctaggtgctcatcggtgctggtagggctgatgctcggaattatcccagtcggtgtgggggagcgcgatcgccagattgttcatgcccgattatcatccgccacgaaagccgcgcctcgacgaaattggacaatttggtggcaaaatctctggtatggcgacccctgtccagttcgcttttgctccctccgtgcgtagcggttatctgtagggtaagaaactcaccggggcggcgttggagcgtactccgacgtcaccaccatcacgcggagagctctgctcgccgtggctcgccgtcgggaggatgatgacagcgggtggccgttggattaaaatgaacggttgtgatcaattgctacgtcgcgattcagctggatcgtttgggaccatggatcataggatagagggacgagattagaccggggatgtaacccttcagtcattggatctgggccgtcgatcttgcatcggacggatcaagtttcttaccggttcgtagtggccggaattctaatctgggcccttgggtctggatcggtcggctcttgtgacccgataccccttcgtggcctcaactttactaaagaacccctggcttttgcactactcaacccgtggtccccatatgtgtaaagattatcacgaatcagccctgttatttgcaaattaaac

SEQ ID NO: 60635 - DNA, 807 bp, Zea Mays
agtgccaactcctcatcataaagtcactcaacctactcttgtgaaataggcaacaaagaggacaatgcgaacaaagcatgtgaagggttacctgaggaagtaccacctcctaagacaagggccatgatggttgcactggtgatagtcacatagaggggggtgaataggcaaaacctgaaatttaatccctttaaacaaaacttgatcctaattagttggttagagcaagagggaagacaattagagttagggagaaaagttcatcttgcaatgtgttgttctaatgagtgtgccgaataaacttaggagcaacacaaaatgattagaatggaaatcaacacaagagaacttagggaggaagtaggaaaacaaatcgtgaataaacaaacacaaagacatgtcaatttgtttactggagttcggtttctaaataaaacctacatctccgttgaggtgtccgaaaggatgaggtatctttcaatcatctcaagtgattccaaagaccaaacttgagccctctcattttttcgattgagagaccagagtctccttaaagaacttcacacgttgaagcctcttactagctttacaatggatggaagtcaaaacttgaagcttgaagatcacaagaacataacacataatcttgttatagctctctctcaggcactatctcaaatcacgcacacaagactatctctttgcttcattcactcttttgtggcacctgggaggatttgatcaatttggagtgtttatctagtgtataagacttgttgtgtattgaatgagttggttggggtgccc

SEQ ID NO: 60636 - DNA, 1082 bp, Zea Mays
ctcaagttccctaagcgtgctctcgtacttggatctaaactctctcctctcacgagcagcctgccaaagaaacttatcctgactagccaaagcagtgttcagctcttctatctcagcggtgagatcatcggcggaaggtagtacttcagaagtagtgtcatcgccgatgtctttgtcgtcgctagtgccgaccgcgtcctcactaagtgccatggtgcagaagcctcatgcggtgtcgacgatgaagcacagctcgttcagcttgtcctcgacccgcctctcagtctcctcgttgctcgaggaagatacaacatcatcagagttgtggtcgaggtcgctgagggaggtgaggaaggcgcactccttgatctttgccttctgaaggtacttcttcttgagcgcctccttgtcgaatcctcccttggacttgtacttgctggaggagtacttgcccttgcgccgaccagagtgatggttgcacgggatagactccgatttgcccttcttggggcagctggcaacgaagtggtcgggatcgccatagttgtagcatccgtccttggtcctgccacgctgccggctcatacggttgttgtggaaccatgtgaaccggctggccacaagtgccagcttctcatcccaaaggctctccacctgctcctctgtaatagacaacaaagaagatagagcaaacatagtaggtgagaagttagaagcagaaccacctccagagactagggcatggtgggtgcaccagggttctcaatcttggcccgagtctggtggtcaatctttgtgtacttgagcttgctgaagagctcgtccacggtaagagtctaatagttgggcgactcgatgattgccgagaccttcacctaccaaaccctccgatctagagcatgtagtaatttcagcactctctcatgaccactatagggtagatgtggcttgttggcacacatcttgttcacaattgactagaaccttgacaacatagaatcaatggtctctccatccaactgtgtgaagttctcgtactctcgcctgtacgtctcaaacagtctggtcttcacatgaccgtt

SEQ ID NO: 60637 - DNA, 821 bp, Zea Mays
ctttgttccgaaaccaaacgcactactagagagtgggaggaggcggcgacgacaagcgacgcccatgccagcatcacaacagtgtgcgggaggaaggaggggcttgtggcagcgtgcggctggcggtttgtgtagtctgttgtgtgagaaggtagtgacgatctcgctgggccgttgaaatgcaatcctacggtgggatattaaagagctacgtggataccaccaagattaggaacgcgttcgagcgaagcgttagcggcaatatttcttcctctttttttgttctctatagccataccttatttttaccttgtgctcgccactgatccttagtgtggtaatgtgacgaggaaggcgacaatattcagttcatcattcattcatccctcaacaagaaaccaaataaaagacggtgcagcttcaatccacttcagtcctgtaatcaaacaagaaattaggtttaacctgtcacttaaaccaaaaaaggaacgagtccgacccaacctaaaaatagatcggttttgacccaacccactttgttctgaaaccaaacgcactactagagaatgggaggaggaggcgacggcaggcgacgcccgtgccagcatcacaacatcgtgcaggaggaaggaggggctcgtggcagcatgcggctggcggtttgcgtagtctgtcgtgtgagaaggtagtgacggtctcgcagggccattgaaacgcaatcctacggcgggatattaaagagctacgtggataccaccaagattaggaacacattcgagcgaagcgtttgcgacaatatttcttcctctttttttgttctc

SEQ ID NO: 60638 - DNA, 779 bp, Zea Mays
ggacgaggtaatggaagccctgggcttccattagtaccaggaagccccagccaggtatagccacgtcccgtaccagcatgcgtcccattgggcacagattctaactcggacagattttagcgtaaaacgtgaatcaaaacagcgtaaatgattacgaattttcgcgtaaatcgtagatctgtttcaaaacggcgaatgcggcccgaaaattacggcgtaaaaatctcgcgcgtcccatcgagcacgggttcttactcgaacagattttagcgtaaaacgtaataaaaacagagtaaatgattacgaattttagcgtaaatcgtagatctgtttcgaaacggcaaatgtggcccgaaaaatacggcgtaaaaatctcgcgcgtcctatcgtgatcgggttctgattcggacagattttagcgtaaaacgtgaatcaaaatagcgtaaatgattacgaattttagcgtaaatcgtagatctgtttcaaaacggcgaatacgacccaaaaattacggcgcaaaaatctcgcgcgtcccatcgaacacgggttcttactcggacagattttagcgtaaaacatgaatcagaacagcgtaaatgattacgaattttagcgtaaatcgtagatatgtttcgaaacggcgaatgtggcccgaaaattacagcgtaaaaatctcgtgcgtcccatcgtgatcgggttctgactcggacagattttagcgtaaaacatgaaccaaaacagcgtaaatgattatgaattttagcgtaaatcgtagatct

SEQ ID NO: 60639 - DNA, 395 bp, Zea Mays
gggactgtgagtttttgggcacttgtactacggaccgtccggggcctgagcccggacagtactaactcccaggtcgcggaccgtccggccttgtagggcggacagtccatgtgtgttatctcaacgttgtcagagttctggtgctcaatgttgccaggtgtcggatggtccggccaaggttggcgaacggtccggacctcacttttctgatagctctgacatatttcaaacgggaaaactaatcgttacttgtacggcggaccgtccggcctaagggcgcggaccgtccgcgtgtgcgcagaaactgtgctagttgcacataacgtttagaattgtgaggtgggctataaatagaagcggagctcgtgtgtgagggttctcttggccattccttg

SEQ ID NO: 60640 - DNA, 1056 bp, Zea Mays
actatcgggggagagccagccaaagtatcttcagtaacgacagtagaactagtagcttccaaaaatgcatcatcaaccgcagccgggagtggagacacaagagcagacgatgtcttaggaatccaaacagacacagatgactacaacttcctcttgggaatccaaactcgcttcatcttcttgattgcacctttctcagcaatgaatacctccagggggcctagccgattatggaccggcagacgaggcatcctgattccttccttcacaaagacctgcacgcacggcccaagtcgctgatgaaccgacgcccgaggcaagaccgctgtcgtcgaactttttccgggagcattaataccaaaggacgaccgcctagatcgacgccgcctccgccgcctgccctgatcgggatcgtcctccaccggaggaggtgacggctggagggactgcagcaagttcggtcgatcaaggaccttcactgacacccggataggatagactaatgaacggcgcaacattccaccatcggacgtgaccggatcaacaatttgaagcttaaactccctgggaatggagctcaggctagaacaccaggcgataaccttgaacacctcacgctgtcgctcacaatctgggtgaagatcagcaatccagcaccactcattgaggagagcttgcacagattccaactcccaagcatgggcagggatgccagacacttcaatctccacatgaaaaggcagagacgccgtcacagatgagttgaggaatctgctccatcgcataacatggattttagttgtgggagataaattcacaattctgcccccatcataggcacggtccgccatttctaaacttggaaggataagcagaaaacttgcaggacccagtcgacacaaagacagagagtcatgtacaagctccagcctccgcgcaaagttggccaaaatagcttcctcaactgcttcattaatggccacagttacattgaggacaatggcacgatcaagctcttcagccctctggttgaaacttggagaccatgggatgatc

SEQ ID NO: 60641 - DNA, 679 bp, Zea Mays
cgggttctccctgaaatggcgcaattgggtagctgacatcctgggatcctcctcctcaagaataattataaatgggcaacgttcaaacgcaatcaaacacaggcgtggggtgcgacaaggagaccctctgtcccccttccttttcattttagcgatggacccgcttcatcggatgattgagaaagtcgctgacgagggactgcttggacaagttctgcttagaggggctaagcttcggtgctccctctacgcggatgatgcggacgtgttcgttagagctaacaaatcagacttggaggtactgaaagggattctcaacgcgttcgacgggtgttcagggctaaagatcaactatgacaaaacagaaattttcccaattcgatacccgacttcattatggcctgcgctaatggaggtgtttccgggcaaatactctagcctacccgggaagtaccttgggttgcccctacattacaggagagtaaaaaggattgatcttcaacctctaatcgaaaaaattaataataggttggttggctggaaaggcaagctgctgtccaaggctggtagagaaactcttgtaaaatcggtgctatccgcacaaccaatctaccatctaacggtttttccacctcaaaaatggatgctgcaaacaattgacaaaataagaagaaacttc

SEQ ID NO: 60642 - DNA, 612 bp, Zea Mays
caatgaggaatatggtaagaaaaacgtaaaatagaataatagaggtaaagaactatactttgttaagcagatttcgagcttcgtttccagccaactctcggccaccctttgcccaaatttgggtgataaacctgttgcctatgcttcgagcttcggctggaatatcaactaggttcgatggcgaaaggttgaaatttggcctgttaacggcccttgcgtggttgcacccggcttttatgaaagcggcggccataccacgagaagccactagcacaaactagtgaccgtggccagttatgacttcgtcgaggacgtcaacctctttctcgacgaattcaagtgctccggggacatcttcggcagagaggctagcttcctcggatgcagctccaactgaattgaatatactctttaatcgagtagtgcattggcttgcaaaattaaaacctttatccttaagagttccgagtgcttcactgagattcaggttccttttagcctcaaccttgattgtcatgtttaaagcttcggtctcacggttgaattggctggagttctcttccaaaagcatctgagcctctctcaactccttgctcaatttcttattccgag

SEQ ID NO: 60643 - DNA, 1183 bp, Zea Mays
gaaaactcgtgctccgagcggtttttgtcggtctgattcttcatttgttgctacacacgaagcaaatgatgcttgacaatacacaacttcttgctgatgaagctaggtactcaagtcagcatgagacatcgaatcatcaattgatagctcgaaatggcgaggtgcacgaccatacaacacttcaaactgtgaccgacccagagaggaatggaagcaagagttgtactagtactcagcagtcgcaagccaagatgaccacttggaaggacaggcttgcacaaaacatcgtagaaatctctccaaacacttgttaactcggtctgtctagccgtctgtttggggtgatatgaggagctcatcaatagttgagtacctaataagcgaaacaactctttccacagtgcactagtaaacacccgttctctaccagacacaatggactcatgcataccatgtaagcggtagatagcttgtataaagacttgtgcaactttgagagctgtaaaaggatggtgtaatggaacaaagtggtcaaacttggcagacgatccacgacaaccaaaatagcattgtaacctgctgactagggcagtccttcaatgaaatcaagtgatataatctgtcatgcctatgtaggaacaggtagatgttgtaagaggcccgggtaattagagcgattcggtttagcttgatgacacacttggcagtcagccacaaagttctgtatgaatgctttcttctagggccagaaaatagctacttgatatggccatatgtcaccagaaaccctgagtgacccccctatggcgctggaatgaagtgcagcaacaaccttgttctgaaaggcaacattagagcccaaccacacacgatcattgtatcgaatgatcccatcttgcaaattgtatggagggcattcagcaacagccaatgctgtgatcagtttcaatgcttatgaatcttcctgataaccgaccataacttcttgaagccaagctaaagatgcggtggacaaagcaaacatttcaccctcaacatgtgggcgtcgagacaaggcatccgcaacattgttatcaacaccttttttatagaccagcttgtactgtaaccccaagagcttagtgaacactttttgttgcaaggtgtatgcaatcgctattcattcaaatggaccaaacttcgt

SEQ ID NO: 60644 - DNA, 528 bp, Zea Mays
aattcatgtgcgaattgtggtaagtcgggacactctactctggattgtcgcttccctaggcgagtgagtgagcaacagttgcttatgactcctcctctcagtagccagccgaaagctaagaagaatggacatttgtgttaaagcaccagttgtctttggagctggtagagaatggatatagcatacaatctcctggagggcgtttacatactaaggagatggtatatcagatacccataaagctagttgatcacatgtttcctaccaatatgctagttcttccatatcaggacatagatgtgattctgggtatgaattggcttcgacagcatggggcggtgattgacgctctacaaaggacgatacagttggactcacctaacggtaattataagttgctgatccgattaccaactcttaagagagcagtggaaagagtgtgtgctgctacagttaaagagtacaaggatatacctgttgtcagggaatttccagatgtgttccctaaagatttaccaggtttgcctc

SEQ ID NO: 60645 - DNA, 1105 bp, Zea Mays
acatcaaatgtgctaccttatgagcatttcccatggcttatgagattattacttgtttgggcttcactttcatccaatagccctaacttagggttaagttccctaccctagggttaagcacacctcaagtcctatcatcacaacttgtttaaaaattttacctagtgaatgcactctaggtgtaacaaacacatgagatgtcaatgcacatgatgttatgctcaagtttttgtgccagtgacaccagaggtgttacaacatccacctttgtgaccaatgtatctccattggactgagcttttcatgccaatccatgcccagaactatatcataagactgtagtggaaacactcgaaaatcagtgacgaacacatgaccttggactgaccattgtgttgactagaatacttgattgcaaggaacgacccctccatctgccacgtgcaccaacacttgtgtaggcaaaggtgacatcccagaaattttagtagccagagatgtactgacaaatgagtgggaactgcctgagtcccgaaggatgataaccatgtgaccttggcattcaccaataagctgcattgtgtgccgcctggacggaccggtgaccaatgacaatgatagagacaacgattcttgtgttggggtggtctcagcgtccactggagaagattgagtattatcttctaagagttgccacatctcctcgagcacatgtaactgcactgtaggggagcaacgatgcccgggagaccacttctccgcacacctgtcccctcgcacgccggtaggccttcataggcgcaagcttatcgtccagttgacggggatgtgcagcctctgttgggggaggtcaaggtagaggtagaggagtttgtgtgtgctttggcaatgagggtggaatgaacttgcgagtttccatctgaggtggctctgagacctcctcctgcaattgaacgagagcacaggcaatatcgagagtaggaggtctgtgtaaaattacagaagacttaatatgatccttcaactcatcgataaaacacttggtatagaataaggggtcagttttgctctcgtatgccgctagctgatccactaatccagaaaa

SEQ ID NO: 60646 - DNA, 716 bp, Zea Mays
cttgaagtgcagaagttccttggcaaggtaaattgtttacggaggtttatttctaacctagccgggaagattgatgccttcactcctatccttcggcttaaaaatgatgccgaattcacctgggggcaaaacagcaggaagcgtttgatctcattagaaagtatttgtcttcggcttctgtgttaaaagcgccacaggtaggagtcccgttcagattatacattgcagctgaagataaagttattggagctgttttgatgcaagagaccgaaggaaaagagcatgtggtaacctacctaagtcggaggctggtggatgctgaaacgaggtacactttcatcgagaagttatgcttatgcctattttatgcatgcaccaagtgtagatgttatttgccgtctagtcattgcaccgtttccggtcaaactgatgtgatcaaatacatgttgcaaaaacccaattatgagtggtagaattggtaaatgggcttattcacttatagaatatgatttggcctatgaaccattgaaatctatgaaaggccaggtcatagcggattttattgtagaacatcggattaaggatacttatgaactagatatatcatacctcactgctactccctggaccctatactttgatggatcggtttgcaatgaaggacaagggattgacattgtgcttgtttcaccaagtaacgcctactttgacttcgc

SEQ ID NO: 60647 - DNA, 311 bp, Zea Mays
cgaaattgaagttattacgaagttaacgcgactggaacgagtcgtgatgggtttacgacgcaatttatattgaatagatatcatctctagaatttaaattacgtcgctcggttctattggtcaaagcgaagccatacgaagggccacatggatctcagccacaactagccaaaatgagtgggatcaaatgtggctagcatctcctccaccgctcatgaacacacgcacggacaaaaaaccaccgtgcagccgccatgggagagcaagggctcggcactgtcgcgcgcagggctccccgcactagatggccg

SEQ ID NO: 60648 - DNA, 455 bp, Zea Mays
cgactgcaacatacaagagatgtgccacccagaggcataagcatcacataccattgatcgacagctcagagacttaaacaagtacgacaacatcacgttgcaacaatagtacacagctcagagaattaacagtttagaacagagtaacagaatatgagagcagtttacaaagaacagtttagaacaaagtaacagaatatgagagcagtttacaaagaacaatttagaacaaagtaacagaatatgagagcagtttacaaagaacagaggaaacaaattataaaagtaacagaatatgagagcagtttaggacacaagtaaagctgcgagaccaaataaagtataccagatcaacatgaagctatacacataaaacaaagttaattatgagaacaatttacaaagaacagataaagtatgacaacagtttagaacaaagtatgagaacaatttac

SEQ ID NO: 60649 - DNA, 544 bp, Zea Mays
aatcggcacataagcatcagatttggttctcaattgttgattaaactgcatcccttttccttccttaactcctgaaacatcatccacctccgcacctcctttgcctcctccaatcttccatgtgacgcatagatattagcaagcaggacatagttcccggtattacctggctcaatcacaaaaagcttcttggctacctccttacccatctcaaggtccctgtagttcatgcaagcccaaaggagttcgttaacatgttcaggtggagctttttcttgaatgaatgttcaagtgtaacttattgtttgatatattattacacatcaaatataccattatgatagttgcttctccagatgaaccacattttcatatttctattctcggggacatatcgtgtgcaatcactcatatctgtgcaatcgtgcaatcatccaatatgagacgttcaatctatatctgacggtagctatttcaggggggtttggcaaatttcaacggtgtgtgaggtgaaagaatataaatataacggcagttaccattg

SEQ ID NO: 60650 - DNA, 420 bp, Zea Mays
tttcttctttcttgcccaccgtggtagcttgtcgcgggcccacggagcaaccacacaccaccctaactggatcacctccatgtcggccccgatggtcagaagcttcttccacctatgacggatggcgttccatccgtgaggtctgtgggatctcccgattaccacgtgcggaactgtagttatcagttgggaaacaaactccgtaattcgcggtacagacaaaatcaaaacagactccgcgagtcttgcatggattccggtcccggcttcgttccttctctccctgtataaaaccggacgccgtcatgacccgctgtgcaccgacgtcgtctgtcaccggtcagccgccggggatctcgggtccggtcccgccaccatcccaccttgaagcctgaccagccatatatataaggagcccag

SEQ ID NO: 60651 - DNA, 578 bp, Zea Mays
cacgatcacagaagaaagtacagaggctcactgggtgcatggcagcgctgagtcgattcatttcaaggcttggcgaaagaggaattccattttataaactgctcaagaaggtagataaattctagtggaccacagaagctcaagaagccctagaagtgctaaagaagtttctgactacaccaccagtactcaagccgtcgcgccgagctacatccgatcagccagccgaggacctactgctatatatctcctgcatgactcatgtggtaagcactgcattggtagtcgagtgggtagaagaagggcgtgcatatctagtacaacatcatgtttactttatcaaccaagtcctcggtccctcgaagataagataccctcaagttcagaagctattatatgcagtacttctgaccgctcttgaactctggcactattttgacgaccacagagtcatagtagtcacgggattcccaataggagatatactccacaataaggaagctgttggaagaacaaccaaatgagcatgtgaactcggagctcatgacatagaattctgacctcgtactgcaataaag

SEQ ID NO: 60652 - DNA, 283 bp, Zea Mays
caaaagttggcgccaataacggctgacatgaccattagcaactctcatcaaacccagaattacataacatttcccagatctcactcttttttgcggatgatgtgcacattcatggtgcacttcttggtcttcagtggctcaaagaggcagatatctcccagctgcaaatagttgtcacgagcaaactgtgcccacccgttgcgaagccttttggattcgcctcgatctttccaaacctcaatgcaatacatcacttgccagctcttgccatgacactgaagaa

SEQ ID NO: 60653 - DNA, 484 bp, Zea Mays
gcgaacgtcgttcctgtcaatgataacgaaaataaacgtatgcggaacacctctgtgtcgttcaattctcctaattgtgctaaaaactgacctatgtgttcacgtgtgctttttccttggtcacccgaaaattttgcgaattcgggcatcctggttccctgtgggtatgggtgatgaccaaatcggctgtcataaggtttccgatatgattgccccccagggatcatgctcactccgagcttatctcagaacaccccagctatttcttctctcactatatcaatagcagccggtgcgagaccacctgccctctagtcaaacataggtgggtttggctgaatattagtgttttgtctccccccattggtttgtgttaagtggtacattactattctccctatatggtttatgggattgaccgttcctttccggccttctaggtggtgccggaaagtactcgctctcaagggcctgatactccgta

SEQ ID NO: 60654 - DNA, 827 bp, Zea Mays
caaagattaatttcaatggactcatgaccatagtcatcagcttctcccttcttttctcgtgtgccttcatataaaaccattcgcttttccaactggtcggccattttgtacgatagctgagaactggagccttcatatcctttagatacgcaaagttgtagcaaccgaagttctcatgaagaccatccgctctttccttcgtttggtaatgcagcttgtgcacccgacagaaagcttcggcattaggactcataccctggcttcggagggcccaaatgtagaaactaagtctaacgattgcattgggtgtcagttgatgaaggtatatttcaaagttcttcaaaacctctcctattatatcctatagagggaaccgaagccctgctctgaagaagcttttaaagacaacaacttcatcatccttcggctccggaatcacctcctcgccaccaaattcaaggtggctaggtttcgttaggctctgaatagtgtaatcctcttcatcttcgttatcactccctccttcaattgcgatctattcaacttcagcaatcgaggtaccttcggcaacagcctcctctgacacaacaagacttgattgcttcatcacttctgagatgggcactgtttcggcagcttcggcctcatctctctcacgagacactctagcagtggatcgtaccctggccatttgtgtttatatttttttagacgaagctgatctcaagtgccaaagcgttttctcgaaaatgcaatgcagaaagcttcggctacggttaaattttttaatagcgcaacagtgcgatggcaatgaatgttgtggtaac

SEQ ID NO: 60655 - DNA, 299 bp, Zea Mays
gtgatttcgctccacttctgtatgcgttatgttgctttccctctgttcgccaatcttatcaatgcgcgaggagtatttgtgatcatcgaatcacatttctgattgccttatttgtaatgatagtgctttggtggttgcggtcgagtcatccgaaatcccgtcgttgctttaggaatgacgaccgagttacggtgggccgtgtcggtgttttagagataacgaccgaacggttgctgatgataccggcgttttagaagtaacgaccgaatctttggagctatcttaccgatttagtgata

SEQ ID NO: 60656 - DNA, 340 bp, Zea Mays
cgaacatcggacaaccttttgagatttgggcgcggtttgcacagctttggagacggctaatgcttaggtcgatcgtcttcggttgtggctagcgactcttaacaatctaggggcaggtagtctttcttgatccagcctctaggctctccatcttttagacttctaatcgtctagaaactttttgcagaacctgggtctgaagcattggctttttcctatgtgtagatcgggccacaagatttgttcgtgcataggggaggaatcatggactgcgcctccttgacatcccggatcatgtttgtgaggtcatggagctcggggttcaccggggcgtggcgat

SEQ ID NO: 60657 - DNA, 516 bp, Zea Mays
tgccaaaccaagaaccattattttatgtgaaccaaagtaagcatgagcatcaaattgacttaagaatgaagaatccaccaagcctatacttaaaagtatcatgatcaaaacaaatgggtctttcaaaaaggtaataatgttgcaaccctaataaaaaccctaagtgagccctatgagcaaaattcaagaaaatggggaattgggtatgaaaaatttaaaatcatggcttgagccaattataaacattgaagtatattcattaagcaacaagaaaggttgagaaagcttggccaaaataactcaaataaaaccccaaatcaagcttctcatgtggggactcaatggggaattctgaatttcagaccttgagccaaagatcaagcgtgttcaccttgatccctaactcaaatcctaatggccccattaacaaaaatgtgcctaactaacccctctgttgtgtttcagaagatggcattgggacgcgagccctagacacgacaaaaccctggatttgcc

SEQ ID NO: 60658 - DNA, 805 bp, Zea Mays
gtggggtagttcgattattattctgtattctgatctttggtaattgattgttcctaatcttgatctttgaattgaattatactctctcatagtgtattagtactgttaataatgcgtgcctagtctttgaatctaggctatctcatgctgtgttggtattgataaagatgcgtgcctgtgtttgtttttcgattttattcacttcgacataaatagtgaagctattaacttaatggttgtcatcatcgattgtgaggattaagctattattatggtttccgttactgatcgctggattagctttgtgtctcatcctgacgttttcttgctgctggatgtcatttgaggtataagaaatattgagcacgagctgaagagattgagagaggtattcatagagctgggtaggaaacaaagctgaataaggcattttcccatattcatcacttattttgtagatatgaattgctatagactgtgttgtgaattttctttcgtcgttgcgttagcaacacattgattttggcgcatcgtccgccactgctaacactgtccatattcttaggaattggacgcaagctacagcggagggtcagatccaattcttccttggattctctctctatctagatcactgaagaaccaatggatacagggatggcaagggcagacagcatcatttctgaatagttcttaatctttttatcttttgggggggtgggggtgggcggcatctctaagctttggcttttgaatatgatgcagcaggtagctgagtactcaaagaatcaacaaagtgacaagc

SEQ ID NO: 60659 - DNA, 458 bp, Zea Mays
cgacggtaaaaattgttgtgttcttatgtgttctacttggtctatgatttgttcttccctctctcacccaaagttcttgctttattcttcacctgtgatatcgctctaacttatatttctgcaatctaagagagcaatcaagtgtaagaactttgttccttcttgccttaatttgatctatgctttgtgctaacatctaaattatatcagttttgtttaggttgtgatttttaggcatcacctattcaccccccctctagatgactatcagttatacctttaggcctgaggtgtactgcgattgttggtgtcaccatggtatccagggctagagcatcgacatctaggttacgttctgctcttgctccttgttgtttcgagatctagggcggaacatcggtgtctggcagggtagtggtgttagggtctaccaacgccatgggagttgggcgctaata

SEQ ID NO: 60660 - DNA, 674 bp, Zea Mays
gtttggaattcgaattgaggcacgaaatgacatggaattgagccgatacttcacgaataggtttatataggtgaatatgagtgaagtgtgtgtttggtttgaatttaggcgaagaaaatgagatttgggcactcggctcggaaacgatcgctcgaaatggggaattgagtgaaattgaagcctggaatatcggattggcgtgaaatttggcaaatatgttactggaggtgttgtgaaggtgcctgaaaaatttgggttcaattggagcatttttggctggtttgggcatttcaccgaacacgtgtgcgaggatttagggttttagggaaatgactatttgaggtgtgaaaaccctcccgaaggagctaggaacctgcaggaatgttcaaggcacacataccacaacttggtttcacaagaattcacagagattttgaattggtacacaggggtggtgcactgcctcactgtcagagaaatagagagatagagatgacagaggaagaggagagctgctcaccgagcgagggagaagggacgagcgcagacacagggtcgccggaggacagatcgccggagaggagggatgatcgccgtcgagggggagcagtcgcagagaacagagagcacagagggagaaatgagtctctggctcggtctcgggctggaggccg

SEQ ID NO: 60661 - DNA, 302 bp, Zea Mays
gtatgagcatggatgtaggaatgaccaccctgtgtgatgagttgtgcagattaaacctggaagttgtttcttcaggtgacctaagttatatctcggtagaacccacgttgcaggagcagatcataagggctcaagttgaggataagggtgttcaggttatcaaggatatgatcaagcaaaaggcagagaaatacaagtgtttccggcaggacagcaaggaaatcctatggtttggagatcgattggttgttcctaaggaccctgagcttagaaagaagatactggacgaagctcacctttcc

SEQ ID NO: 60662 - DNA, 636 bp, Zea Mays
tgtcatagagccgaggttgattgcataagcttcgaaggtgccaaaggtatgaagtgactttttaatcgacttttagctagaatatgcttagtgaggcttttctttaatggcttgttcatattttcgcaggcaagttttgaggatgaggaaattgttgagttgccaatacttaacgaaacttctctggctaaaatgaaggctgagaaaaagaaagccttgactccaacaccttcgacggagacctcaaagaaggacaaacgggtaactccagtaataagtgctttcctatttgaggacatagtaaggagggtgatgaaccggagaccattctagaggcttcgaaggtaaaggtcaccacaacaacaatggtgacagaagaagctggtgtatgcacgatgattatagcaacgacgacaatcgaagagctgcctatagttatgctggtggctataatagaggaagttgaagctacaattacacttgaattgctagaagtggctggattcaagggtaatactctagagactgctcctaaagatgataaaggtaaaaatgtcgcggtgcctgaagagcagaaggtaataatgggagaaaaggtctctaggggagaaggcccttcaacacaaggaaatgctg

SEQ ID NO: 60663 - DNA, 372 bp, Zea Mays
gttagcatcagcgattaaaactatggcccaagtggaggtgcgcgtagaccctacacggtacgtacggtacatatatatatagactctgtggttcgatgtcgtcacgtccatatggttcggtcgcttaagggttagggggtttgtgtgacgccaccctagaggcgtgtggataagagagaagaaatccttctgttctgtgttgagcacgagcttctccatccggaggctgcatgcatgggttttgaccacagatactactactctatgagaggacggagcgagcaacagactttggcacagaaagcgaattccaaacaaaccacagccacctcacttgtaaactcatccagcttacggcaggtccaaagaccc

SEQ ID NO: 60664 - DNA, 538 bp, Zea Mays
gtgcggacgacggttataaaatcccagagtctagggtctcccttgcaagattactcgcggacgatgggatagggacactttgcgcccaaccactggctggaatcgggccacacacgggtactcaaagtgggcgcacgggatctggcccgtaccaaatccccactaccaatgcacgtgcaattaaacggggaccaacacggaccgctggatcagtgatctacgaccagggtttaatgttgtgaaggggtaccttctgcatctaaccaaagccattcgtatagagatctatgatcaagcgatcattgtcaacctacggtgtgcccgatggcggcacaatctcccctcacggcggagcatccgtcagtgtgagcaattcccgacccttggtgccccgcaactcgatcaaaaccttgctacgcgatgcggtgcacacccccaacacattccccgccatcatacctccgattgcgaagtgccgcgctccatcgacgaggattggcggccaagcgacgaggatcgtttgtcgacgagtaatcca

SEQ ID NO: 60665 - DNA, 451 bp, Zea Mays
ctcggtcggaatttcgagctcccttgggctacgggagccgagattctggatcccgcgttgctcattttggtttatggatggatgtcgctgtatcccactacttcccaaggaatcaaccttaagttacttttcagtgctcatgcttaaatgtgtcctgctactcctgccttgatccagctgtgtaattaggcactctagctcgcactttgcttgtcatgtttctgtaataccaaggttcgctcatccaagcttggaacaccgagtggggtttcaacggttgtgcttgcttgcttagtaccaagtgtcgggaaccaaggtttaggccacagattggggctttccatttgagcgccatgagcctaatttgcatttaggatccaatctgagcggagtacaagattacgtttagcccgttcgttggacccagggatggatcctaaacatccgaatt

SEQ ID NO: 60666 - DNA, 688 bp, Zea Mays
atagtccccaggatccacgaatcgctcggagttacaacagaccgccaaattcgtggagattagttagaacggtgtctgatttgttgtggtggaggagctcgatcgatgactatggggacccgcacggtttgctggcgagatcctgcgcgagattcatgcagggttggttgagctcgagcggcggttttgctacgccacgggggtcgaggacgggtcatgtgtaacacccctggtgttactgttactaaaacttaagcataacatcataagcatagcatatcatgtgtttgacacacctagagtgcattcactaggccaaaacttcaaacaagttgtattgtgatgacattttgtggataaaatcctagagtaggttacttaaccctagattgggcttaaagtggtaaccaaagcctaaacaagagaaaacttcaaaaatccattgatatagtcataaaaagtcaccatggatgaacttaggtgatatccaaaccctagaagcaccaaaaaccctaaaaagaaccctggacaaccctagagttaaaccttagggggctaaatgcaaaagtagtgcacttttgggactaaaatgcaaaaaccatgataataaggtatcttaaatcatatggttcacaagtatgtggaattgcaagtaaaaccttgagttttgggcttaattgcaaaagtc

SEQ ID NO: 60667 - DNA, 1075 bp, Zea Mays
aaaaatgttgcataaattgatacccaatttcatatcggtatgagtaattgggtaaaccatgggcaataataaaacgagctggactatacatctctgcatataaaaatctctgcttggcagcattggcctgatgccgtgcactttactaccattatctacaaacatattttcctatgtgcttaaacgcacaatgcaaccagtgaatgtctttgtgagcgttagaccctgatggtcattttacttgttgatctgaagtcagctaatggctccaaacgacgaatggtattcatgagcccctgaaggatccttatggataaaatagtgttgtgcatgttagtctaaatcttaatgattgactatacatttggtaataataaaaataagtttgcagaattgtaaccacgaagcaacttgttgttgcgtgtcttgctggaagttgacaactagtccttcacgttgaaggacaaatatgtagtattcatgccactacatcaatctaagtccaaagctcactgcataaaacccttatctgtaatgtgcgtaagatttcccaaataaatcaccacaatagcatacattggccacaaactagatgattgtggttggggattttatctatatgtatttagaacatctcggcattagggggaggaatgcccatatagtgtaatgcctcaatattctattaaacgcacaaaagccaaactgaacccgtcgttcggagtgtactcctgtgtatatggagtttgacagaaatcgttgaggagtaaccatattggtttgaatgcttctacctgatgtagatgtggatatacccgggattaatatcatatccacatttgacttattggcatttgatctattctcgaggacgcctgcgaatatgatccattggccttagtcaaagcatatgttctaattgcagattcacgtggtctgtaataactctcctccaatgaactcgccctgctggtgatttgcctcacgaagaggttcatcttaatgatgaagttcctagcaatgcacgcaatatcattgtgctgggaatatggaacaatgaatctttcgttttggg

SEQ ID NO: 60668 - DNA, 1182 bp, Zea Mays
gccctaagggattgttcagctcaaggaagatgaattccaggaactaactcaagatggaagatctatcagtgaatacgtgcacaaattcaccgaattggcccgctacacgccggatgacgtcagcaccgaagccaagaagatggcccgctttttgaaggggctcagaccagaactcaagaccatcctagccagccaagatttcctcagcttctcgcacctctcaaacaaagccatacaagtggaaagggcaagggaagaagaaaaaggtcacctcaagaggaaattccaagtcctccgagctcagcagcaagactggcaccagaggactcaatcctttgggtttccacccaagggaccaagattcattagaccagctggacccactccatcacagttcagtcagcagagtcagagctcctttcatgccccctcggttacaagcaaccaaccaccaacaaatgcatgttggcactgcggagaccctagtcacttcaagaacaactgcccccagttgaaggcatcaggacctgcttactccaacttggtgaatggccccaagaatacctcagcacctacccccaaggtgccctcctctatcagccagcagaacaagacccaatatcaaggaaggacacgagtaaatcacgtcgatgctcaggaggctcagcaagctccgggagtagtgctcgatgagttccttgttgaatttactcccgctgcggtactttttgattcaggtacatcccattcttttatatccactagttttgtagaaaaacatggcatcccctctacccctctagagatacccttggtcacccgaaccccagggtcagaccttctatgccagctcaaatgctcccaagtcagaattcttttaagtggggtagtgttcttggcagacttaaccgtcttgccatcccaagggattgatttgatcttaggaatggattggttaaccaagcataaaggtatcataagttgcgcaaacaagacagtccttctcacagaccaccaaggaaagtcaatctcttatcaggctcagccacccgccaatgatccaatgatgtttaatctagcaacagaaagcatatcaatggtagaagaattcatggatgtattcctagaagagttgccaggaatgccgccagaaagagaagtgggattctacatagatctgat

SEQ ID NO: 60669 - DNA, 288 bp, Zea Mays
tccaagactaattatgttgcttttcaattgtggaatatagtacacacttgtaagcaccttgtgatctccctgtctagtattcatcaccactgagcctaatccacagattctgacagtagaaccatctccaaatctcactgacccactgacagtgtcatcaagttgagaaagtgcagacttggtgcctgtcatgtggttactggcaccagtgtccagtacccacactccatctgggcagattactggcactactttatcttcagacagatgaattacttgagatgcttc

SEQ ID NO: 60670 - DNA, 369 bp, Zea Mays
tgagtgcataagatacttgacatagttagtgtgtagttcatagctgaaggtatcgaacgtgtctggtgcaaaaatcggagatgcaccggatatgtctggtgacctcgatttcaatccaccaagaggtaaccgctagatttagactcggggctataaatataccccatggccatccttgactaattcttcagtttttacacttgagaacatattttgggctagagaagcaccctctactcacttgcgtcttgtagttcatcatttggataagattgaagagctcctagtacattgcatatagttgttgcatcttatggcactggttgagcagattgagctagttctattcttgttacaattggtgatttt

SEQ ID NO: 60671 - DNA, 578 bp, Zea Mays
ctagtcgttgttgtagctctctacgcatgggcacaccggacagtctggtgcgccaccggtgcgccaatggtcggctccaatggtagttctgacagctagccgttggactgacagtgcaccggacagtgaacaatgactgtccgatggtgtgactgctaaaaatcaacttcgctaaaaatcagactaacagtgcaacgcaccaggggcctagatgctttcaatctccccctttttggtgattgatgataaccctacaagagtgtgagagtagtttgtttgtttttctgtcaatagagaagatggttagtgatactcaacaaatttgacagaaaaaattgtgtgatagaatagtaagtataagcgcatacacaacataagtttcttgttcatacaagtatgaaatgaaatccatgaataagaactgaacgactggtgacaacatcataggtgaaaacataatacacacacagtcattaacaaacattgagagcatatcatagagtttgtgagttaagcatcatacaaagtggagttagtacaaagagtatcatgcatatatattacataaaaagatcaag

SEQ ID NO: 60672 - DNA, 402 bp, Zea Mays
tcacggtactgaaggtctttctgaatttgtattgcctcttcttcaatgtgactttctggtgcttgcaggcatttgcggagctgggatacgtgaaacacattgtggatgtcagacatggattctggtagttcaagacggtatgctgcgggtcctactctgcagatgatgggatagggaccgacaaatcgcggtactagctttcctttcacttggaaccttctgacaccacgcatcggggagaccttgaggtagacgaagtctccttcctcaaatctgagttctctctgcctgttgtccgcataactcttttgccgactctgagcttcaagtaatctcctgcggatcagggcaactttctcctcagcctctgtcacacccaggtttcggggacaccaagacccg

SEQ ID NO: 60673 - DNA, 303 bp, Zea Mays
gtggatagaataccgagtgagatgaggttcatccaagatctgttggtggagctcagcatccttaggcaccactatgcggtctttaaaccataacactccttgatcatccttcctaaaacaagtggctttgtcggcttccattttctcttgaatatgcttcatgcctttatcaaccttttgagcatcaacaattttccttgttgaactatccccaaatttagtctttctatttttgggcataaggtagtgttagtgacaagatgccttacgacttaaagcatcagccactacattagccttccc

SEQ ID NO: 60674 - DNA, 402 bp, Zea Mays
ggacggggtctgtaccggccatggccggcgacgactgcccggactaaccatcggggaggcttcactaacctaggatggcctcggaacacacattaatttgacaagagcgccctgcgaacggcctgtccacgttcacggcgagaaccgcagtgtcgatcccgtgttctcaattatccacgctcggattgattgaacgaccactacgaggagtttcatgaacacacagagctgctaaaacaaggcttgaattggacagggacttaccagagtggcctagccacggacgggctgttctacgcgatgtggcggaccagttttgggggaaaatggtgttgcggcgtctctggacgaaattaggagatgggattggggctacgcggccgtaaagaaccactgattccc

SEQ ID NO: 60675 - DNA, 486 bp, Zea Mays
cagggatgcagcaaagttcttacaggccaccagctccaagaggcagaggaggaagaagcttcggaggaaggttcagctcccaacccaggaggttgttctatttgttctgtgggcaggataaaggacatacaacaaagacgtgccaagtcacgatccaaaagcaaaaatagatagctgaagctgaagcaagacaaaatcagtcgaagaaggtcctgcatactgcttcgtgctattctccatacatttccgagtatgtgggcaaccagcagcccacaacatcggttgcttcggcaagtcactctcaagcagtgtggaccctgctacctccaccaccacccatgacaccaaccttgactcacaatcagcagccagaagggcatcgccaagaacaacaacagtgtgatgcacgtgaagagtccgaagcacacacagtaaacagtattgtgcctgagtcaagacatatttactgaagcaatacagggcctc

SEQ ID NO: 60676 - DNA, 738 bp, Zea Mays
ggagaaccgggaccgggggcgagatcagcgcgcgagttcccacttttaacccccagaaacctgaacggttaggttctccctctggtgggagggagggaatacgaaaaacagaaggccaagggctctctctctctctctctctctctctatacccgtaggcgtagctttccttctccaccttctccttcttcttcttcggctgcctatatataagtgctacatgcgtatgcagtgttcctcgcccggtttatttgccgatggactcttggtggtgagcagcgagcgagagatagagagggtgaaactacatatgcatatacaaatacatgtagctagcggcgtagtactggatactgtgccatacggagtatagtatatatactcgctgtattagcagtagaggcggccgtgcagcgatcggtcgacgatggttgttgccgccatgagagacgagggagaggagggacgacgacgggcggtggtggcgatacgggactacgatcccaagacggaccgcgacggcacggaggccgtcgagcgggagtgcgaggtcggcccggccgccgccgccggcgggatgtcgctgcacgccgacctgctcggcgaccccgtcgcgcgcatccgccactcgccgcactacctcatgctggtacgtacgtctactctgtcgtcgtcatactcatacccccgtccgtacgcgtacatatacgtatacgttctactacatacgcgtcgtca

SEQ ID NO: 60677 - DNA, 848 bp, Zea Mays
cttaactccaagaccaccatgaggctcgttccccgaggacaagggagtggaaattgtgcttcgctcgaggtcccctctcaggggtcaccatagctccacctcacccgagcctgcccttgatcaaggtatgctctcgggaaaatcctcgtcctgtctgaggtcccctctcccaggaaccgctgtctcctcacctgagcccgtctcgggtaaggaagacaaccccgaagcaggactcagccgaagtccgcagggacacgagcattcaatgcgcatacctaccccatgcagaattacaggtgaataggagcaataagaccgcggtcctgtcaagcttcaccaactatgatgatgcatgtgaccactgttcccgcaaaccgcctaccaacccccggtgggaagtacaatacgataagagtgcaggatggctctcgggcgcaaactctgccttgccagaagtcgacctcagccttggtacaaactctgcctcgcccgagcccagccttgcctaccttctccccgcgaatcccgtaggacgccaatccttcaactgtggcgcgcacgtctacgaatcctagagcaggctcggtcgcgacctcgggtggacttccgcctcactcgatcccgactccagcctcgatatccgcaacggaaaggtgcccaacgtcaccatataccgcagaggtgatgtattacttaagggctttttttcatactcagcattgtgtcaaccactacgacataggcaacctccttggcagaaaggctcgggtacgtcatcgaaccctcggccctggcctcggctctcagtagaaatcggacgggcacaagtcaacaacaagtataagact

SEQ ID NO: 60678 - DNA, 416 bp, Zea Mays
tggatttcatgctatataaacttataaacagcacaagcacatatcattgaaagagaggtcatatgcataggccataggcatacacaagtttgtgacagtgatttatccaatacatgtccaacaaacctgctaggctgatcatgaggaggtttaaatagttgtgtacttccaatgctatattgtagtaatcacatcatcaaccctatgccctcgaatgattgttagttttatggagacctattcaaaacaaaaaacacaagaccatagtatccatggtgcaaacgagctcaagctttcaattaaaatggtagtagcaaccgaccatcaacatgtcactccataacatctagcaatgcacaggatgcacaggatctaacccagaccataatacttagttaagcagtaacagatctaac

SEQ ID NO: 60679 - DNA, 676 bp, Zea Mays
tacagctggtgcaaaaaaaataccaacctcatcgtaatcgaccatatgtccacaaaaatatccaacaccaagctcggaaggaactaatccatacttagcttcaataccacatttgcatagtactggatcaaatttgacctcttcttccgcccactgattgtatctcttttcctttacctctggctctggccaatgggacaaaggaccatacaaccactctctgaaacgacacttacgccatccgtatggctgcaggagaaaaaatagcaatttattgtaaataataactagttcatacatttagcgtatcaatgggctcacataatcaatgttcggacaacagaactgcttctcatagtcttcgtcgatgacagcacggtctccacaatcacatcgaggcggtgagtccatccgtctttctgttgctatctccttctccgcatccgtcattggtggaggattcgggggaggaggtacccaacgcttaaaacgctcatgactggtccttccactcaaccaattaacgaaaaaagatatcgatgatcaaatttatcaggaccgtcgatccactggaaaaagaaacacctctgatgtccctaaaataatggaaagaagcactattacacatctacaaaataatgaatgcgaacaaaattaagtgacaagtcataagcta

SEQ ID NO: 60680 - DNA, 403 bp, Zea Mays
gaggagctgcgctacgcgccgtgtcctccttcctctggcctctcgccggctcttactccaagaccggcgaccactcaacttccctccccgacgtcggaggattatccccttggtgttgtgcacggcggaagatcgaaggagcagcgctggatggaggacggtggagcttgtgcctcctctgctgcgtcactagttcagggtgacgtggggaggaaatcctatagggaggctctgttttctcccaagcctgctgcgtccagggacgttggtggttgggtgacggtggttcgtcggcgttcgagcaccttgaagtccctccccagacctgtcccggtggatttgtgcggaagatgcttcaattgtttctcgactgagcaccgtgcggcggtgtgccgtaatcgcg

SEQ ID NO: 60681 - DNA, 365 bp, Zea Mays
gtccgggttgtgcgtacaggggtcccgtgccttctgggtccgacgccgttgcctccgagaacgccaccttaactgctcacaagatacccctggggttgttctctgcgcggttaagggtagctgcgcaggcatcatgcctttataccgtagtaaggggtacccctaatccagggtatcgacaaagaccctggagaccgatcctagaaatgagatgatcggtctattgaaggaatattcggattgctttgcttggaattacactgagatgccgggattaagccgagagatcgtagagcatcggctgcccattaagtccggtttcagacctttcaagcagagagctagaacatttcgtctcgatcttc

SEQ ID NO: 60682 - DNA, 430 bp, Zea Mays
ctctcgatgcattatgcaatgttattatcaccaaaagttgctataacagctaaaataaatatgatatggtggttccaattgaaatagacgatggagacggcttcctacgtcaacagagttagctgagccatgacttttcctttgtccttagctagcctccctggccacacataccgtacccctatgcacattataccccataacgatgaatgattagcatgatataatgctgccgtaggtacgtggcctctaaatctaccttaggttgctttttctgaggtttgaatgtttgattggggttggttgctgatgtgagcttcctttgctctcgaaaagtggagggaaaaggacttgaaaccatacgtatatccagatctacgatacgtgtgtataaggttttgttgttctttatgtgcccagcgcaagttta

SEQ ID NO: 60683 - DNA, 590 bp, Zea Mays
ttcctccaggcaaatgtcgacgtgttcgcatgggaactgtcgcagatgcctgggatccctagggacgtgatcgagcaccatctgaagatcaaccctaatgccaagccagtgagtcagaagcctcggagacagtctgttgagcggtaggacttcatccgtaaggaggtccggaagctgttggacgctagctttatcgaagaggtccatcacctagtatggctggccaacccagtcatcgtccccaaggcgaacgggaagcttcagatgtgcatcggctacaccagcctcaataaggcctgtcccaaggacccatatccacttccacgaatagatcaaatcgtggattccgcctccgggtgtgaccttctgtaacagtggatgggctttactgttatgtcgtaatgccttacgttctgaaaaacgccttgccaacatttgtacgggtgatgagtaagactttcggggacctgattagggacagagtagaggtatacgtcgatgacatcatggtcaagactaagagagggtcgaccctagtggaagacttaactctggtcttcgacaggctacaggcaacccgcacaaagatg

SEQ ID NO: 60684 - DNA, 560 bp, Zea Mays
ccaggctctccacaacaaccacctctaaggttgacaggccttcggtcacttccatgggaccaggacaatccaagtcagcatcccgaccctcgagatcgcgctctaaggtcgacgaggcacgggatgacctcaacccagcatcaggcacgacagcgcaagtctctgtggcatcatcatccactggctctgataacaagtcctctaggaccatatcctcaagagtttgatcaaagttggccagggacagttcttgcagaccaatgagggcagacaaagcaggagaaggaactccactacttccaccactggcgatgaactgccgactgtttttccgagttaaaggagcttcattttcttcctcctcatcttccatagtgacaacacaagtagcacacccattgggatcagcaacagacggagcacccacattgggatcagtagcagtttgggtacacccattggggtcggcgtcagtaagtccagtcgcaggcactccttcagtagcaggaactgaggtaccagcgtcctcatcaaaactggatacccgccggaggcgtctt

SEQ ID NO: 60685 - DNA, 1081 bp, Zea Mays
gtgagaaagagcatacagtgttaaagaaacatattgcgacttcatcataagatctaccaataatttgtgtcttcagagactctgtgatgcatttaacaatggtatggaaatgtgtctcctgcttttcattgccatgaaaagaaattttacgttgttatttagtagcaaaaatctagaacaaacttaatgatgcaacttcacatgtcttaattttccaatagagtcataaaaattgatacccagatgaaaagagacataaaaatggtacacagattgtcgaattaagtggctacagtacttgtgcctcacctgggtggcggcaggggtgaacattttgggcgaggcgtcgacaaggtagacaaccatctccttgtttgcctccctctcctggttccccaagaaagcaatccagcacccgtgaaaaattgtggtgtcacagcatggtcaaataatcaaattagtttttttcttcaaaacactgatccgataggagaatagggagagaacgcagctaagagctggtacgaacctggaaactgtcttcgtattcatcgctgtaatgacccgcaaggtgagtaggtatagggaccaagaaaatgtaaacaatcaactagctgatgtactcatactcagcagatgtcaaaatcactccttcctggggtacatccaacaaccatatctaaacaaactaagatgatcaaatcaacaataccaatcctcctagcagctcacattcattaagccaatgcaggttgaaaaggataggtaccctgacacacatgcaacgaaacactcactctgggtgccgactgccaacacgagcaaaatctctgtaactactacttccttaacaacccatgacatgaaacagaatcgaaaagcaagccccgcagtgccggcattacctttgagccgacgatgacgacgccttaacaaccctcgatgtggctctgcaagcggaggcgctttacgccaaagccgcccatgaaccagtgtgcctccaatggttttgttggtattgaatccatggattgcgtcaaactgaaaacaacagggaagaacaatactatgttaatcactt

SEQ ID NO: 60686 - DNA, 767 bp, Zea Mays
tgataatcaaatcggttgtcatagggtttttgatatgactgtcccctatggatcatgctaactccgagcttatcttggaacgccctagctatctcttctcctactatgtccatggcggccggtggtagtccaccgagcctttggtccagcataattttgggtttttgagtattatgttgtctccctacccacggatttgggttttgtacgacattaattcttgccctatgtggcggatatggttggtcgtctctttccggcatcctgggggcaaaatgtaactggaggtttggctgggaccgatgtatagatggggaataataattatcaatatgttctatgtactccgcaccgaaccatccggtaagatacgctgactgttcggtgatgtattcggactgtccgacgctatgcgtggacggtccgaattgatcggttagggtttgcgcgagatgcggtggctctggcgctgacttcggtaattcggttcgaaaaatgggatcggccgccgctggcccagacggtccttagttgagcgtggatggaccggtcatgcgtagatcggtggatttacccctgatttgcgcaggaggttgtggttgtctagaatatgtgtctatcagcatcccgtaaaggggttgggattggtcgtgccaatttagagccgatgaatcgcgtgtgttttccctcgtttcaaccttatgcaatggaaaatttgtgatagcagatttatcaaatacacgtgctagcctcttataatcatcttg

SEQ ID NO: 60687 - DNA, 338 bp, Zea Mays
caccccttctgccctagaatttaataattttatccagagaaaactattcacttgctgatccccaaatttttagacagagaaacacacaccagtaacaagccactgtaattgttgcagaatttttggatttttataaaggcaacttgtagttcaaacctactccaaaaccttaagagaataaaagaaaagagaagaagaaataaacctcaccccaataagtctaacttaagaacttaatcaactctcaccaagacttaaaagaattcagtggaaccccaaaaatttaatctacttaccttagctaagtctaacccaatttaccaagtataccactaagg

SEQ ID NO: 60688 - DNA, 884 bp, Zea Mays
tgggagatattgacatgaatagggttgagtacgctgctaagattgccaatgctgaggagttcattaagatgttgccagaagggtacaattcaaatgtgggacagagaggttctagtttgagcggtggacagaagcaaaggtaaaatgctcactttccagtttccagactaccttgtatcacaaggtaaacatgttgaccatacactatccagtagcatcttttttgtaccggaacaggtccatttaatttgtacggtgtgtttttatccgcaggttatctattgccagggcaatctatcaaaattcctccatattgataatggatgaagcaacttctgctttggatatcagatctgagctgctactgaaagaagcgcttagtaatctaattgcaaaacactcagtaactgtaagttcttgtatgtgtggtcaggccattcctgcatcggcgtgctttccgatatcaattattgctaagtaacttcttcccttgctgtgactgaatacaggttatcatcattgctcatcgacaggaaatggtcctaatggctgacaggattatttcactagagcgcggtgaattgcgagagatgtcgaaacaggcatttttgtctcaagatggtcacttcagcttaccaaggatcaggagtccaaattagggtgtccaaactagggtgagacttggcatgggtaatggtagtttctctcgtgaagatttgttcatatatttggccatggaagaaaacgattgatagaatcacatttcttgcctgagccctgctcagaactttggcttcttggaaccttgtttcatcccaacagcaacaaatctgtcaacattatcgaaggtcgtctgccggagagaatagcaggctcctcagcgg

SEQ ID NO: 60689 - DNA, 853 bp, Zea Mays
acgaccaggggcttcagaggaagacttcaccccaggcatgtccgatcaatccacaactccaataccaacgatgatagggccagcaatgctcaacatagccatcatagttctcagacttcaagcatgcaacagacttccttcagaccaccagctccgagaggtagaggaggaagaagttttagtggtggaaggtttggcaatcaaccctgaaagttgtattgcctttttgtggcaaggacaagagccacacaacaaggacatgccatgttaccattcagaagcagaaggaaattgttgaagctgaagcacgacagagtcagccgaagcaagtcctccacactgcttcgtgctattctccttatgtcccagagtatgtaggtaaccaacaacctatggcctctgttgcttcggcaagccattcaagcttcttggtcccagttgccaccaccaccaccgctagcacctgtcttgggtcaccgttagcagccataagggaaacgccacgctcagtagcaacgtgaccttcgggaggagtccgaagctcacccagtcaatagcactgtgcctgaatcaaagcacatttactaaagaggctacaatggtgcgactaaagaatatcgtgatctgatgtatcttaaattttgttgcctttatattttcttgcacgaaagacaattcaggaagaattaatatccaatttgatgtaataataatactttggttacatcatcgattgtcgaagtcgtttctaagggagcgcagagtaaatttcgaagccacaaagtcgttcctaagggagcgcagagtaaattccgaagctacaaagtcgttccaaagagagcgcagagtaagt

SEQ ID NO: 60690 - DNA, 1077 bp, Zea Mays
ttagcctgaccacggtggcggtgaacaccgaacacaatttcatgcattccgggtaattgagcgtggtcaagcatagagggctgagccgacgagtatcacgagcatgtatgggcgctaaaacacgattaagaagagcaggagcggacctgggatcggctggccacagagcgctaaggattttcgcttgccggagactgagaagggggaaaatggtgtcgtgacggactctggtgaaattaggaggtgaggttggggctacatggtcgcaaagtgctactgattcaccgtgcactgctaatttgggaagaggtggaaaggattttgcgaatttgggcttcaaccgagttcactggtgaggtggtgagtacctcgccgtgggtggcggggctatttaaaggcgcgatggtccggctaatgatccatggccgcggattacatcgttcgtgcattgctaccacgtaaaaaagaggcacagtgagggaggagcgaggcatgagtgacaccgacgtggaaatgaccgagccacggcgaccgccggtggaatatctctggccacgctcggctaggttcgcgggacggtgccacatatgaagttatctccccacgatcgatcccttcaccaattcatccgaacacatccgaatctacagtgccccaaatcttagtctttgtttcagatattttcagtgctctagatcttcaatgttcttctgaaccgactcccttccaccctctctttctcttgattcttgttaagaacagggtaagctccattaataaagattgttcactaaacaatagtcttcaaacttactataggatccctggtccaacactgaatggaatcaaagatatggtgccttcaatttggtcccattccactgtgaccattcctgttcttgattcagttttcagtgacacttcatggttctgacagagcaacttcgggctattgtttcgttaatttttgtacaacaaccagagaaagatgactgcaccaaagatactcccctataaaccatctttaatgttgttacaagggtctaagtcagttacccattaaatcgagctccatct

SEQ ID NO: 60691 - DNA, 865 bp, Zea Mays
cagggctcaagatcaactaccacaaaagtgaattggtgacatttggtatggaaaaggaggaacacgacttagtggacaacatgttaaattgcaaagtgaggttgatgccaattagtcacacatacattaggatccaaacattcagagccagaggtattaccatgaatataagagacaacctacaagcatggaaggagaataaagtgtcattttggggtaggatcatgcttactaacatgtttctaagtagtcattagattcatctcatgagcatgttttgctttaaaaagaaggaattcatagtgaaatgggtagtataatatcttactttatttagaggggatgatataagctaagtaccatatgatgaaatgggaaaacctatgtatccggggctagggatcatcgacaccaaaaagataaccacaactcttttgttaaagtgggtgtggagaccatgaacaaagggagaggaggattttgtctattctatcttaaagaaaaggtatattagacatagacccctagcactatgtttggctacaggaggatgtcagttttggtagggctgaaaagagttcaacatgacttcaaatgtggagcaacattaaaaaacaatgatggcgagaatattatcttctgggaagttgtgttgctaagagatgtactgctaaagcttatcttctttgagccaacacaagtattataatttgggaagatgagtggctcatagaggtaacactaaagcttatgttccctgagacatcacgaatattatcttctgggaagatgtgtggcttagagatatatatatccttgaagcttatctcctctgagccatgtagcatttgtgggcacatgtgat

SEQ ID NO: 60692 - DNA, 328 bp, Zea Mays
gtcgatcaagggacccaactccacaggaatatgatactcttcttagaaagggtgcgagaaatggattgcccgatttcatttcctggttcaaacgtaaggtatgtgcttagtttggcaaagagattcgtttatgaactcaatttagcgtcttttaacttgcgaatacttgcagggccaaagagatcagtctatgagtgccgagttgagacaagtagccaacgactttacttaaagggtcaagaaatattctgggtataacgtcaatggataccgtttttgcacaagaaactacgaccaaagtcggcccaatcggaaaacaacgtgttct

SEQ ID NO: 60693 - DNA, 598 bp, Zea Mays
tgctggaggactataggcttgcgtgtcgtgcgggtggagcagattgtgacagtttcataatccggaacctccccccgtatttagcgagttcaacacaaacctggccctaggtgcatccagagctagcgtggacatggaagagattttcgtcggaaatttctagggcacgtacgtacgcccaagaaacccgtgggaccttaacgattgtctacagaaatccgacgaggccccgagggagtatatcctgcgcttttcgcgataattcaaccagcttaccaacctcacggacgcatacgttatcgacgctttcaccttgggaaccactgacaaaaccctggtgcataagctggaacgaaagaccccgcaatggcaaaggagcttttcgacattgcgaccgaccatgcgtttggggaggacgtagtgagggtcaccgacagtcgtcacaaatggaggactgggtgtgacaaggggtcggacgaagacgtcgacgaccacctcaatgtgaaaagggataaggggccgacgacaacgagccgatgtgttggcggctacggtaagccggacgggaggaaggcctctagctatggaaacccccgat

SEQ ID NO: 60694 - DNA, 1039 bp, Zea Mays
ctgcaagtatggcctccacttctcaatagtaaaatgagagcaaggaattctttttcatatattggaagtttctggtgttggttgcctaagggtttgttgaggaaagcaatatgtctatctctttgcatgagaattgcacctatacctaggtcacacgtgttagtctccaccacaaactactcggtgaagtcgggcagagccaagataggagcacttcgcataatagctttcacttgtaaaaaggcctcagtagctcgtgtggtccacaaaatatggtgttttctgagaaggttaatgagagggtgagcaatcaaaccatagtgctgaataaacttcctgtagtagctagtaaaccctaggaatcatctcaattcagtgatattggttggaatggaccagttctgcattgctatggtcttagaggaatctattaccaccccttcaattgatatgatatgccctaaatagttcagagaactttgggcaaaggaacacttgctcattttcatgaaaagttggtatgatctcaattgagacagaacttgtctgatgtgtgataggtgttgttccaaagtggcacaatagattacaatgtcatctaggaagactaggacaaactttctgagaaaaggggcaaggatgtcattcataaggcattgagaagtagctggcgcattggtcaagccaaaaggcatgaccctgaactgaaaatgcccatggtgtgttttaaaagcagttttgaattcatctccgggatatatggacttacaaagtacttgagagagatggtggaaggaagagcacacgtgtatgtcaacttgtggaggaagttgctctccgtggtagtgttctaattctgtttttcttgcattttccgttttggttcacagactcccctttaacaatagcatgtaaatctcacttacaaactgggcccacatgatatccacaccacttagtactatattgtagagatgctaaggtaaactatgtatcttccccattgtgccatcactgttgctgatgtggcatgcctttc

SEQ ID NO: 60695 - DNA, 592 bp, Zea Mays
gtcccctctgatctagaccaatgatttgacaccatactttttaatgagatccgaatgcgtggctgctatagcatgtgcttatcaattgtgcttattctttattaaactatttttcatatcagctgttgttttgaagccctcctttcactgagagcatttagtgtcagtaagcaatccatgaatgcataatttctgctccagtatttgtgttttaactaagttagattctggtttagatgcctatatgacactacattcttgttaagttgatcatttaattagtttggtacctccagcaaatactgtaaatatgtttatggaatatgttaaatacttctgtatgtttgcttgccttatattttgtattttttctgtatagggctttgtaaacctgtcatcctttggataggagtgcatgaaaatctgcaatccatgtgtctgaatcatgacctgctattacttttactttatcttcctaagcattaaccttgcttctttgtatccccttaactggtggcttgataacactttgtattatgcattaaccttgcttctttgtatccccttaattagtggctcttggtaatgcttt

SEQ ID NO: 60696 - DNA, 1039 bp, Zea Mays
atggtgctggccggtagatgctcaagccaggccctcgctccttccgcaaggtggacatggaggaactagatgaccaggtggtcatccttgatccccaccatgcgacacgtgaggcggtagtcctctagccacatgtcagggttcatggaaccatcgtatttgaaaatgttggctggcacacgtacctttgtggggaactacgcctttctgatctcgtgcccaaaggcacgcgatcccggcctaggtgggatggggctatgcgtgtgccttcttttctcacagtagctcgtcttcttcttgttcccgacgcctgttgtcgaggatgtgtcgggcgtcgtgaatgccaccaatgcggtgctttatatggacgcacgtcggagtagattgggaggtctgtgcccccttgcttcaggacgaggccgtgtgtgtgtcacggctctccatgccggtgtgttgccaccgatcaacctcaacttgttataccacaaccctctacaacaagttgcataggttctagtacatcgccttcgcctcgggctcatccagtttggggatcaatcggagaatcatggccactgcaaccatgttttgaccggggttgaggaagtactgcgcaccatcgctactttcagtgacctgatcgcaaatcttcctcgccccgtcctttcggctctgaggtgtattttctcaatgttgtcataaacccgatcgagcctcttgacgagtgagtcgagctcctcctcctactgttggagggcagcctcgtgggtgagtatgcgtgcttgacgctggtgctggtattcttcttcttggttgtgagctttcaagtctccccctccattgtcggctcatggtgcgtggccacgaaataggccctttcttacgcctcatcggagtccaagctaggctccgtcgaggcactgcttgagtcgtcctcgaggaggtcgaggatggatgtaggttggcgaccgaggacgaccaccatggctaatggtgggattacttccgcccattgcttaacgacaacgacagatttgtt

SEQ ID NO: 60697 - DNA, 471 bp, Zea Mays
cgaccactcaaaatgagcacgaagaagaagaattgaagaaaagaattccgaatcttcctgccggtacgtacgcagaataccaaaagcaatggatggacggagagaggtcgggaatcgaataaggtttggttttcaaccaaggcaaggggaagaaacttgggggcggtggtagttggtagtagttggtaggctacatgacatcacatcacccacaaaagacagcagcagcagcgacagcacccgaatcccctcccctggcggcctgtgcttctgcgtgcaccctcctcagtcgccaattgccttccatctccatctgcgacctcaaccatccttttcaagcatcgttttccaatggctcagcgaagtttttttttctttggtatggtattaatttgggaaaaggcgctctccgttgttgctgggtctcaccttctagaagctcaagtgaggtgaccccaacatcccaccact

SEQ ID NO: 60698 - DNA, 503 bp, Zea Mays
gttggacaactatatcttctctagagagctttcactatgatctttcacgatgtatagtggtcatgctggtgccatcgatggatgttcagttggtgcactggtggttggattaccgagagctatcttctctagagagcttttgctacgatctttcctaatgtccagttagttgtgccggtgccattgatggatgtttaattggtacgttggtggttggactgccgagagcattttagcattcaaatcatgaaggtcttcgacagtctcattgtcttcatcacttggtctgtttggcatgaatggaattacagattcattacaagtgagtccaaatagacgatcgagattctacgtctcattctagaaaaaggtaccacctagttgtatgctggctacaagtcgctagcactactgctagctttgactttgttataggttgctagccatgtctttgtaaccaataaggtacactataatctcttagttgttgtgttggggttcag

SEQ ID NO: 60699 - DNA, 510 bp, Zea Mays
cgtaaaggcaagagtggatctggctgcgttatgtgatagaccaaaccaagagatgaagccgccaagtggtggaaagacatagagaaggcctaaggccgatttcgtcctaagcagggcccagaggaaggaagtacttcagtggatcaagatgttgatgttccctgatgggtatacagctaacctgagtaggggatgaacttatctactatgcgagtcttagggatgaagagtcatgacttctacatatggattgaatggattcttcctgcgatggttcgaggctatgtccctgagcatgtctggctaacactttcagagttgagctatttcttccgtcagctttgtgcaaaagagttatctcagaccatggttgcagacttggaaagattggcacccgtgttactgtgtaagcttgagaagatatttccacccggcttcttcaatccaatgcaacatttgattcttcatctcccctatgaggcacgaatggggggcccgtgcagggatgtt

SEQ ID NO: 60700 - DNA, 838 bp, Zea Mays
gaccacttcaaccttacgagggtgacgtttcgactacctcccgaaaaagacttagggaccaactcaccaagttgaattagcccctcggggggctagtgttggagcgaaggccgtctgcccccctcgttcaggctgctttaatataaattgaacagtttccattacagacacatgaggtgaagggtactttaacctgtacataaggcaaggcctcgatcagagaactaacgaaggcttggaggcgaagggacatgtcccttaaagaggaggctcctcaagacttaacttgccatcaccactcgcttgggtggctctgagtacaagtcttggcaaagatcgaagacatgttgccccagagcgaagagtgtcgcgtcccagggaagaccgcatggtctgtgggatgggcccatgcgacgcctcgctggccactcgggcccattttgtaagccccatcttgagtagggtttgtggtgtatttaattaggttgtacttaacctcgctataatgacttgtaatgaccccctaggagggaatattccggggtgacaacaagtaaccgggtgcataatcgtacttcgaagggcatgccgacccacctggttacctataaatacccctgcattgtacattgatgggacacgcttaacaagacactgccgctccctgcccattattttgttgagcacctgagcattcccacttcccgttgtctaggcctactcgacgacgtgtcagacggttccaacaccatctaccaaccaaaaagtattttcattgtctattttcaataacacgctcaatggaaggttttttcggacctatggcacaagcctcccc

SEQ ID NO: 60701 - DNA, 338 bp, Zea Mays
taaataggcgttaccagatactacctgttttactttataaggaccctcccagcttggcgatcattttccaaacttccggtctttattccttggaggcaggatggtcttccacacctagtcccctacttgaaatgattttgctttgaccttcttattgtaggccctggctaccatgatcttgtccttttctattgctcccaaagctatcaccctcttgtcggtcacttcatcaatattatccatcattgcatcgtaataattagtgagagttagatcattttgtctggcgaacctgacaacattcaaacttatttccataggcaacactgcttcctgcc

SEQ ID NO: 60702 - DNA, 282 bp, Zea Mays
agtagatcacttgcaaagtgttcatagcttcaagattaaatatcattgactcaccatcatgcataaataattaggaaatttgtatgcctcagtagtaactgaacaattagaatggttgcattaggaaataaaaaattatacatttcctaccgatgcaaggagaccaagagctttgttttggtaccgtatcataatgaacctagatgatgtcttgcttcagttgtcaactactccagcaaacaatagccatataaggaattgctaccaagctgaagtaaataa

SEQ ID NO: 60703 - DNA, 928 bp, Zea Mays
tcattgtgaaaatccgcaaacaaggctagtaaatcatcctttattacttcccagaaagtctgatagaactccgccggaaaaccatctggaccaggagctttattacgttccatttggaaaacagccttgcgaacctcatccatagtgaatggtgcagttagaatcgtgttttcagtatccgtaacctgggggatatcataagtaattgattcctccattactactgagttgtggtctgtcttcccaaacagagttttatagtaattagtgatatggtgtttgagatctccttcttcaatacggttaccctcatcatcctcaaggctaaaaattctttgtttttgatgttttccattggccactaattggaaatatttagtgttattatctccttcaagaagatgcttaacttttgcccgttggaagagacggatttcctcttcccttaatattgtagtaagcctttgttccatataaattttcattgttaactcattaggtgacaaatgagaagtctctacctttttgtccaactcatcaagcttccgagtaagttgatacttctcctttcgaagagttccggttgtattcttagaccagcctcgaaggtattgacgcaaggatctaattttgcattgccatttctccatcgctgaatatcccctcgtatgctgctgccaaatcgatgcaaccatatcatggaacccatccctaataagccatcctaactcaaatttaaacaacgatcgagtgccaaattgtgaggcaatcttgtcgatgagtaataatggcgtatggtccgagcgtgatctatgaagcgcttcaacagtggcattagggtattttagttcccaatcgatactcataaaaactctatctagtttttcaaatgttggagggtctaagttgtttgaccaagtaaattgac

SEQ ID NO: 60704 - DNA, 606 bp, Zea Mays
attaataagtatataatctcatgctggattttgattgtgctttttattttgaagtttaaatttgaacccagaatcaaatttgaatttgaaatttgcaaaacaactagaaataataaaaaaagaaataaacaaaagggagagaagactgcctgggccggattcctattcctatggtccaagacctatctaccctcatgccagcccagcaccaacccacgcagcacctcatccggtcactgacaatcagtcctagccactagaccgtttccgttcacgcacacacgggctccgcgctgacgggtgggccttactgctcgggtccgtcgtcgacctcgcgttatggggcgtagctgtgcaacagaagaatccaccgtatatctcgcgggaccgtttctggctccagctgggactccgagtgccaccagaatatataacccaaaatcatctactctttctcccagaacttttcaatcgctcaccccgtcaccatcctacctttgatctagcgttgatttttttgctccactttccttgggcgtctactaccttgtctggtgtagaaaaaaacaatagattttgttctgttgttctgctatgggttttgtc

SEQ ID NO: 60705 - DNA, 666 bp, Zea Mays
tgattctcaactatcagttattgtcttgaacaaggatctttcacatacccgtaacaaccaaccaagccatatctcatctaatcatgtgagggttcatgcctctcttaactgtgagcatggctatcattacaatttaatctccgtagaggttgtacgcattcccaacaagaagtaacttcattcccccatccttgagagtctgaatatctccatctagttcatggttgcaagccacttacacacttccttactatgcggctaggagagcacttcaaggctttttgatggtttcaactcagttctacgcgccaactgaggtttcaaccaatagaaaaataccccattcctagaaggccccctcttgtgtcaaacgggtaataggagtacccctcctatcttccacacatcactttcccaacaggtttggcatacctaccatatccatacgaccgtttggcgcatatcataattgggctccaccatttactttggtaggccacacccatacttggctcatggttatatggttttcatgggtggttgctccacaaagtggtctataggatttaggtgatcaagggaactactagtaaaccaggacgttgttcctgagctattggtaacaccagaagtagttcccgggttaccggtaaccacagacacaat

SEQ ID NO: 60706 - DNA, 606 bp, Zea Mays
cccttttatttcttcatgcggaaaacgaacctgcacattctttttgtcatttagagccggtataaaccacataaatgattcgtatatcaagagatatctaaagagttaagtacaaaaacacaagatgcatatctctaaatacaagatacgattctatccatacaactcaaataaataagtcatgcattgatgtgttctagtgaatactaagatagaacccttaaatacactaagttgcatgaatacgtttcttaggtgtaccttgtgctcagagaaacacaaaatagtatctagtttatacatgcctttattaatcatgcatgtttaaagtacagcggagaattacacttcaaataccaaatgttagcaagctagcgtatatgtgtcatccagtatctggttccaatgagcaccacctagtctcttgttccattccacctcccgacggtcctgttaccttgtgttcacgcccttgtcatccaccccatcctacatcattgtcctctcttgatttgtcctcctatggccaccttaaaaatgtctaccggatggaggatgtggaagtaggtctagaaattaagctcgacattcgtgagtctcgagtga

SEQ ID NO: 60707 - DNA, 358 bp, Zea Mays
actttctttgctttgtggtctttgttcttcttggggttgtcttgttcattagtgatcaatgcatgagagtcccttgacttgataggggcttcttcggactcgtgttgttgaacctttgcaaataattgatgaggtgtcatatcctcatagtcatcatgatccctaatcatccttgcaagactcttatccttttctttatacgctctcatgaacaatcttgtgaccttagagtcactccaatcttcactcccaagaactcttattttgttgaccatcaccatcaagcgatcaaagagtgattgaagcgactcaccctttgtccaatcatatcttgcaagctcactttccaaagcctcaa

SEQ ID NO: 60708 - DNA, 1227 bp, Zea Mays
gtgacattggtagacatcacccttcgcagcactaggtccccgatgttaaacgacctgccatgtacctagcagtcatggtagcatctcaagtcatattggtacttggcgaaacaaatcaagactgtgtcatgtgtttcgtcgagcaggttgatggtgagttctatgtccatatttgctcgtatgtcatcgtaggctttagtccttggagagtcgtactctagttccaagggcaacatggcctccgcaccaaacgctaggaagaaaggcgtgcaacctatcaccctggacggcatggtctctaaactccaaagtaccgtgggtagctcagtagcccatcatccgacaaacttttaaacttgtcaaaaatttgtggttttaaaccttgcaggatttggccatttgcatgctcaagctacccattggattttgggtgcgccaccgctgcctagatgggatggatgtggaaatcatcacagaactacaggaacggttctcctgtaaactgagtccctttatcggtgatgatggagttgggcaccgagaaatggtagacgatgtcgcggaagaaagttgtagcctccgacgatgtgagcttgtcaattgacctggcctcaatccaattggtgaagttatcgaccgccacaagtgggtgggtgcagcccctacgtgctttttgaagggcccaaccaagtctagcccctaaaccgcgaatggccaggtaatggtgatggtttggaggtcttgagctagcatatgcgttttttgggcttagtactggcagcccacacatgtacaaacagcctgctcgacatcagccatggcggttggccaatagaatcctcacatgaacaccttgtcggcgagcgtatgtggggtcgcgtggtgcccacgtgttcctccgtgaacttcggcgagcaattgtcgtccctcttcacatgcgatgcgcttttgcttgatgtctgaggcacttttcttatagagtgttctgccaatgatcacaaaggattttgctttttgatacaaatgccttgcctcggtcatgtctttaggtagctctctgtctgctaatcggttgttgaggggctaatgctagtcctgttggtcggccaacgcggccaactggccggtgtgggctggcgaggtgttcgggccatttgtcccctcgacactttcctccttcgcctgcttgatttttactaagggttcgtagaggttggaggcgaagac

SEQ ID NO: 60709 - DNA, 936 bp, Zea Mays
gccggggtgcatactgttgttgctgctgatgttgctgattctgctggttctgctgaatttgttgaacaaccgcagtgattccttgcagaatctgcatctaggcggcgatgaactgctccatattgggattcggtggtggtggtacttgttgaccacgctggttccagttgttgttgggtccttgacgagcgttcaccatctaattggttaggaggtgaagtccttagaaaagtgaggagtagaaaagattctagaggggaaatagcctatgttttaaaatttttatatgttcttatggccatcattccataagaccattgaactcaaacaaagatccaaatcaaacatttcaatcaatcaccatcacatggttggtatttattaataggataacttaaaagagtgttcaacgtctaacgcgaagtataacttattacatcataactcaaaacacctaaagcagcctagtgacggatccgggctctccatagcgcagcctcttgtggggaggagataacgccatggcggggacctgagcttcgggcggatccagtccttgcagttgggcttccagggctgcaatcctggcatgggcattctccagctccaagtgcaccctagagagatccagggtggcattgtccaggtcggtgttgagaccggccactacaccagctagggtgttgaggcgatcctcaccagcttcacctgggacgatgctggtctgacttcctccacgcagacgctgaggaagatgcctgaacctcgtgttctgcagctgctgccggtaggtgtggctgagcgaccacagggtccgacgggtagcatcgctgaccgaggcagtgtaggtggacagtggtgttagggactcatgagcagatagatcctgaatcccctgccccctgcatccatcaccctaacgtggatgcgagtgat

SEQ ID NO: 60710 - DNA, 718 bp, Zea Mays
aaggattcgtgtacgaaaatcaatgtgtttatgcaaccattgatcgaagagctgaaagtgttgtggcaaggggtggaggcttatgatgcctttgctagtacatctcccttgggaagcttcggtaggaggacatgcatagttcaggtggatccatagttaggaaagagagttgaaaaaacttaaagtgacagtgcaaaataaggccagggtagagggttgtattgcaaaggcatttccagtgaaggagagtacaatctttttaaggaagtatttctcacgctaaaacgacatcaatgctcacacgacgtggtgccaattcaaacagcaagcccgggtaaccgagcttagtgttttccagtggttgggtaaaggggtcggagcttctaccttacatcttgtagatacaacggagcgcaacaaatatttgcttttcttgtacatcaatatggaagaacttcatccatattttcaaatctttgacaacacatatcgggtgtttggcgatccttcctttgttcagtggttccatgaacatgtaactatctccatacccattttcttgaacttctattccatatattttgaataatttagcaataccggttttcttgcacatgcatgtagtgtacgaaacctgatgttgaagtctctgaggacttggtacaaatatcacatggtcaactgatcgcaaagaaattcgatcgttatgatatcaatg

SEQ ID NO: 60711 - DNA, 454 bp, Zea Mays
caaaaaaatccaagtcatcctcagaggacttgacgtccatcttcgcgaaaaatccaaaccctcgttgctatcggacattgccgagccgaaaaaagctctccatcgctacaaggtgacgggctccaaaagaaaagcggcgtaacacacttagcagtctctgtagtattccttcccttgtttgggaaaccaaaatctctttgtgtaggcccaaccatcggaacctgcacgagtatcgagtcagtgttagtacaacaccttgacaaaacatccacaaaagtattcaaacccccacccgtacacctaatcaccccatacaacatcagtagaacaatgagaagtctccacaactctaggctcatcttcaacaaccttttcccatttcgacaccaacaacgtcaattgtagtcagcgaagcatccaagccttccaagtcttcaatttccttatcccttcg

SEQ ID NO: 60712 - DNA, 316 bp, Zea Mays
cttctaacatgcttcgacggcttcgtcaatttcaaccttcggccttcggaggccgaagcgggaccaaatggggcgcataataacttccttaacatcttctcttgccttcaagtcattcttcacgtaaaaccattcctccatccaggccccgggccaccttttctggtatgttggcaccgggtagcttgcgttggggcgggcgataaatccataacagccaaaattgttatgatattgttctttgcccatggccttcatcttgtatacaagctcgtgcatactgcaaaagcattttgcgcttggctccagtccctgg

SEQ ID NO: 60713 - DNA, 597 bp, Zea Mays
aagagcccatatgtagacactaagtctaacgattgcattgggtgttaactgatgaaggtatatctcaaaattctttaaaacttctcctatcatctcatgtagagggaaccgaagccctgccctaaagaagctcttaaaaacaacgatttcatcctcccttggttgcggaaccacctcctccccagcaaaacggacaagcttgctctcggcttccccaaagtagcccaactttttcatcataaccatgtcgtctgctgtcacaatagatttcccaaattcaatgtggctaggtttcattaggctcagaatactattgtccttctcactttcatcttgacttcctccttcatccacaatctgttcagcttcagcattggaggtaccttcagcaatagcctcctctgacgcaacaagacccgatcacctcatcacttctgatattggcgctgtttcggtcgtttcggtctcgtctccctcacaagacaccctagcagtggttcatactctggccatttttagtgctcaggctctttaagacgaagctgatctcaagtgacgaagcgtttgtttgaaaacgcaatgcagaaaggttcgtct

SEQ ID NO: 60714 - DNA, 469 bp, Zea Mays
taatttactttactaaatcatcaccacattctgagaacacacaagcagcaatttcagttcatgagcaatcctatttaacttaattcacaagcaggcaataaagatgtagcactaattcttgactatcttttgtaagtaatttggtgtgctacaactttaattaatggtacatgctctgatactacagttcaggcagtttgttacttgttttatgttggtgttccttttactcaagataaggtgttttttgagttttggttaccttctcccctttctacttgcatgaggtgattagagtaggtctttcacgatgatttgtacttacttaggtccttgattcctaagtgtggtaccttttgcccaattttacttacatatgatgatatagtttgtaaaagtgctaagtagaaaccctggtaacacatggggtgttacaaatatggaaatggcagtaaaaatagtagaactt

SEQ ID NO: 60715 - DNA, 353 bp, Zea Mays
gagtaagccgatatgatcctggccgagtgacctccgataccatgaatggcccttcccatagcggtgacaatttgtgctatccttctcccgttagaattcggcgaaggaccaagtctcccactacgaaggatcgatgtcgtatagccttatcatgataacacctcagggtctgctggtatctagctgtctgaattactgtattcaatcgctcttcctccagcacatcaatatcttctagcctggtagcttctgctttagctatgctttcgaagaccagccttggtctcccaaaccggaggtcggcaggtagcactgcctccgaaccatagaccatgaagaagggggtgtttcca

SEQ ID NO: 60716 - DNA, 965 bp, Zea Mays
gagctttgtgtgatcatgcctggggagttgggcggcgttccgtgcgaggtggggcagtcaacagaccggttgctcctcgccggagcaatggatccaccctgtgtcgtgaaaaaggggtgtctgcactcctttatccggtaaatcctctcccctttagttcaccgcacaatctgggttgttgcgcacctcgtggtgatttgtttgggctgccaggcatcgagtattgctcatcgacggtcatggcaacatcgtagtgtcgtagagaccgtggttagcagtctgggcatgatgatcagggtggagaagtaggctagcagggtcgtaatagagagggctttgtgtagaatcagtcgtatcaagtattagagcctagggcgcggagcatacgacctctagccatggcgcgccgccgcgaaatcgtctctgggtcggtcaccaccgcatctggcttccagggttgaagacaaggcacgtccattgatttgatctgaacggctgggatcaaaccgtagatatacccttttagcactttaaatctaggccgcaagtcgtgcatccgagggctgggagtgggcactgtcgtggttggatcttgggcgttggcttcggatccaacggtcacgtttgtataccggttcacataatgcgccatctaatcgcgaccctcagagtaagatctagcggctcagattcaccgataccccttcgtttggcttatttactaaagagaccccgaagaaatcacaaatcaacccgccatccagagaaccctattcactgagtctcggtaatcttgcgccagagcccctgacttttccaaaaattgacgcctagtccagagaacaaataaaaccagaaaaatgaatttaaaaatggatttttagtattaatttaatgccagaatttgtataattcatagaaaattcatgttaactccaaattgaaccattccagttgctaaaatt

SEQ ID NO: 60717 - DNA, 358 bp, Zea Mays
aaacaatatagacttgtgacatgttagaatacattactaatacgaaatcgacgcgactgaacaattaatttagaacgaacacaatatgccgcagcgctaatcgatatcatgtctatactaaccaaacataaacgaaaacgcttcggattgacacaactaccttaatagctatcgatgaagcgcgtaattaaaattacaagttcgtttttggtcgaattgttattttaatcaccgaacaaccaattactacttaattatttaatatgcacccagtggcgaaacgattttaccaaaacgtgcaactagcgatttgcgtgaacgacacgcgaatcaacacgtaaccacgggcagaaccgcg

SEQ ID NO: 60718 - DNA, 602 bp, Zea Mays
aaaagtcgcctacgggtgcagctggaatactagtatgaaaaatcgaagtctttttctacagaactccgcacagaagcctacgggaatagcctgatcaacgaaagcgcgcagcttcatcacacataattatggttacacacatacagcgagggcatcacacattacatcgtctcaaccttcgggatgatacccatctccctatagttgaacaacattatcctcaattcctcacccgcaaacagacttcgtagctccccctcacccacactcaccccagccggcgaggacaacaattctcgtttgccagtcccatccacacgaagacgaccaccctccatctcaccatgatgacgcctttcaccttgcggcgactcacccactctccgtttcgccaccgctcttcgccgcctacgcccagcactcgcacccagatgatcctcagcacccatcacacgtggaggagtctccgccgcagccacatccaacgctgcgaaataatccaagtcctcttccgaagacccctccgtccacacaatcgaactcccagaatcatcagactcaaaaaacttagacacagaatcatcagaatcgccttcagcaac

SEQ ID NO: 60719 - DNA, 646 bp, Zea Mays
ctggccatggcaaggtgttcttgcggcttgtttgaatcgatttgggggaacagagaaattcgcgggctctggtgagtaattgaaggcacgagtgggtggattggatgcttgaatacctaatgaagctgagggtgtgctcaatttataggctccgggggcggtggcttatgaatcggggatggcgcggtggcggccggagagaagagggtgtactggcgcagtgattagtggcttgtaccgtggcgagctcaccgacgatcaccgaatatgcttaacgcgacctactgcgacgtggtaagacgcccgggtacgtggcaaatgaccggcaggcagccaacgccggcgagcttatcggtacaggccgcaaatcatgggggcacgacggctggccaccggagttatccctaggtgaagatcttttgtcttggagtattatccggtcattggggagtgtgaatcataacggcgatgacgatgcacggtgaggattcatcggcggtgaggtttactgaacctgactcgaccagggcactgtaccatgggaatcaccattagagtgcatgacaacccatgtttagggttagatttctcttaaatttctatggcaacttgtccaaagttctgtaacaaagttgtagatcaaaga

SEQ ID NO: 60720 - DNA, 654 bp, Zea Mays
ctggaaatcatctgaagtcaactgactcaaatcacgcagagcaaaattaacaaagccgaaatatgtttgattcggtccgttgcttttcgcctcgatctaaatcgtcaaaactgaattaacagtacaaatttatccgagttcaaagaattcaccaaatcaaatcatgtccaaatactgttatcaatctcgtttaattcgacccagtttatatcgctaaaaatcttgggtctaaaatatgtaacaccccaggtgttacttagggttttcactgaagactatacaagtaagcccatcatcacatgtgacttaagttgggaaaagtacaccaaagttggagctcaagatcctaagtaagtgcaacctatcttagatgtcaagccttggcttaccatgtactttaaagggggagaaatttgccaaaaccctaatgcaccccctgtggacaattggagtactataggtaagcatgaccaaaaagttatgaaaaccacttgatcatgtcttgggcccattataaaagatgtagtgcaattaataccctacaaataatagtaagaaagtaaccccaaaaagatttcagaaaacccccaaaagattcacaaaaggggtgagcacaaaagaaaaatcagaattcttctaagtccaaaaccaccc

SEQ ID NO: 60721 - DNA, 486 bp, Zea Mays
aggggatgggaatgaggagtcattcaccgaataagaattctccgctgccatctccagtggggacggtggtgctaatggtagtggatgaaggcgagcagtacaaggtagcatgggatgaagataagaaagaaaggaggagatggcaggcagggcccatgctacatgttttagtggtgttaacaaacaaggtcaccccatctctattgattcaaccaaacaaaaaattaggacatatgcctatccactcaaccaaatgttatagtaggacgatctcattgatgaagttagtgatatgatcatcacatttctccttatccccaaactaaatactaactaagtcattgaatcaatgcctcacccatcttatctcacccatcggcctatgatcaccaatgatacaaaattatggttgaccatttatctttcgtcatctactttctttcttgtctttggcgtaggatctctagctccgaaagctaattctcc

SEQ ID NO: 60722 - DNA, 482 bp, Zea Mays
ataaagcactaattaagcatctcttataattctcatattgctcacacgaacactcagctctctaacttaggtttctctcccctacttggtcgccttgataatgagttcaatgatcgagttgggttctagacctttgtatttataccctaggaggcactggtaaaagcaggggtggtaactgaaacgaccccgttttctgcgatgctggaaaactggatttttacacttctatgatagtcctaggaattcaagctatcgtagaatatgagattccagttgccatcacatccataccaaaatttaagcgtgatagtttgcttacatcccctaacacttggggtaaatatcatcggctcgcaagcgtgatagtacttctagcattcagaatatcagagtagcggtcgtggtccttggtcctccacaggcatcctttagcgttgctccgtagcctagtcggaccatccgtcgtcggcgaagtcgta

SEQ ID NO: 60723 - DNA, 591 bp, Zea Mays
caacacaagtaatcaagtgtgatggtccaataggctaagttgactatggaatgtggacatcacaagtggaggatggacattgttaagtgggactcgatgtgcatggcttggagatagttgactgaaccaaggacaaaagcaagaaggactttgaggtactagagcaagggagaaggtcaagaagactgaggtacctaaagccaaggtgaagaagaggttcttgcaagaagtcaaggttggtcaagctgagaagagacatggtgcattgaagaccacaagataaggacgtgacttacaaccattgaggtaatgtttatggtttaagtgataaggctcaagattctagctcgagtggagtcatggtatggattggttatgataatgatgttccttgaagatgatatattgctaaaactcggcttatactaataataattacctgatggattaaaaacaattgttgttgtttgttagcctaaccccacataaagctactacggcttagccaactgggtacttgttgagtacgttgtgtgctcacccttgctttcatacaaacattaggttgcccgtggtgcaagccttgctcag

SEQ ID NO: 60724 - DNA, 617 bp, Zea Mays
gctgtccattttcttctttttcagcagtcacacttagcactcgaagagagataaaacagttatgatctccttcttctggttggttctcattctcttcttgttgaatttcttcatcaaactttggtccgttgtcttctggatcactgtctgattcccattcacctttttcattcaagaacattgttcttctgcttggacattgagcagcaatgtgcccgcgaccatggcacttatggcatacgatttctcttgtacgggtagaagaagtagcgactgaagcttcagttgggtctgatgtactagcagcagaccgctccttatttgcagggaatgaacctatagaagccgccatctttgatgtaccattggatggagaagacctagatgaatttccttgggatcgtcctccaccaaaagaagcactggattgctgtttgcgccacagaacaacattataatgacttgcataagattttccacgtgactcttgttgaatttttctctctgtacgcattgcttgatcaacgagatattgcaaggtacgacatgggaacatctcaacaaatccagaaatctcttcattgagtccgcctaaaaatcttgccatggttgactca

SEQ ID NO: 60725 - DNA, 305 bp, Zea Mays
ggcgagtccagagtgcgtcgaacacgtggtcgttgctttctgcccttgttcttgcgcctgctgagcagccaaacgtgcgaatctcgccctatggcttgtgtaagatttcttccctgcacctagggatacctagttcctgtaagttccaagggaagatcgagtctggtttagaagatatggtggcgtcaagtcttgtctgtctgcattgttcaacccgagacaaaacaggtgccaacccatgtcaaacggtcttgtcttgggttcaaactcctccaaagggttccttagataatttggctcctttt

SEQ ID NO: 60726 - DNA, 535 bp, Zea Mays
cagactgaaaaaggtttaatttttcgttaaagctacacatgattattttcagtactgctctttgacttttaaagtatgatagtcactatggggcagacatatctattcatagaaagtaaggaatgtcaaaagtgctagtgaacaggactgaagaaggatgaatgaaaatatatactttgaaacatgtctaagggaactccaaagcctaatgaagtaacaatctatccaattcttgtggtgtttcttttgcaggtttgatagttcatcgtttcattgccaccatcgattagtaacattatcaactgcatggttccttgatcttagtaggtttaaagcacttgtgggcgttacagtgaacgataaagaaaaaatcgttcggtggaaaaaattgcagatgcagaggaatataaaacatcacccaccaaaaacatatgaacaatgtagtatttgtgtgatgggttactaacaaagcaactccccgatgaaggagcaaaaggacactatgtgaaggatgggaggaagaagaaaagatgat

SEQ ID NO: 60727 - DNA, 819 bp, Zea Mays
cttggaactctcaaaaccagggggctacctaacatacaactcttcctctatatacccattcaaaaaggcacttttgacatccatttgaaaaagattaaaaccctttgaagcaacaaaggctaaaaggatcataatggcctcgaaacgggcaacaggagcaaaagtctcctcataatcaattcccttttttggcaatacccttgggcaaccaacctcaccttgtttctcactaccaacccatcctcactctgtttgtttttgaaaacccatttggtaccgatgggatggcagttagaaggaggtggcaccaaaacccaaacatgatttctttcaaaattttcaagctcctcatgcatagcattaacctagttaggatcagataaagcgtgtccaacatcccggggctcaaaagtagcaacaaaagctgagtgagcaaaatgagactattgtgacctagagcgagtgactcgctcgtgaagctccccgatcttctactgaggtgggtgacaacattgaatgtgctatggagcctccctcgatgaattggcctccccctcaacagcagcctcaactcctccagtctcagcatgagctagatcgagtggaccccaagtggtggaagaagtggggtcaggtccgtcagctgtagtagtggaagcaggctcgactagggcagtcggtggagtcgactcgagagcaccccaatcggcttcgtcgtgctcctcctccacaaagatggtctatcccatctgatctagatctgtaggctcaaagacaggggatgtgcaatgtgaagtctcatcgaatgtaacctcatag

SEQ ID NO: 60728 - DNA, 1250 bp, Zea Mays
cgaaaaccggggacataatagaatttgtgttcggcgggggaggctagcgtggacttactccaaatgatgagtcaagagtggtgagtcaagagaccaaagcaggggtacatattggttcaggcttgcaccctagtctagtgtagtgctgatcgtagtattgctataaggaacatgttacaatgggtgcaagtgtgagaatgagaggaagtggataactcaggtcgaatgctcccctctctttggctgtttggtcatccccttttatagttcaaggggaggctcttacaaggggatttgttgtctgaagcaaggagcgtcgcattgtctatggcggtcctgcttacgaagttctcatgacgtcgtcttctggtacgcgagtagtcgtacgcccaatatggcggatcgctccatctacctggtatgcgggtcactctagggactctagcgtttaggcggcacccacgggacagagtcaggggatactgagggccgtacgtggcgatgcctcaacccgttgttagagactctctgtcacccctcagcgcatcgtggcatcatccaaggcggtgtgtggtggcgatgtgccttaccatggctggcgtggggtaacagtgcatgtcttgcctccatgtcaggcgagtattggagtgctcctacgcgcacgtgataggagggcatggcaccagggcccacatgtaccaaagagaaagtcaacgaaatgatataaaggacatgtcctcataaaaatccccggactggatggcttcacgaggcacttctataaatgttgttggtctattattaaatcagatgttttagcaaccctagtggctttccagtgtgacgatgttcgtaatctttcggtgcttaattcagccttcctcgctctcattctaaaaagggaagatgataatcaagttaaatatttatgactaattagcttgatctacaattttgtgaagcttgttgccaagatcttagccaaccatctcacaaagaagctagacattctaatagctcctaagcgccttcatcagaggaagatgcatccaagacaacttcttacttcaacaaaccaccaaacttctccatcaaccaaagctccctcgaatattaattaaacttgatacccccgtctacctcgtctacccccctcatgtatgcgcgttcgcgccgttcgcacgtgtcgttgttgcctttcgcgtgcgcggtctgtgcgcgtcgtcaccgtccattcgcgctatgtcgcg

SEQ ID NO: 60729 - DNA, 351 bp, Zea Mays
tcacctttcgagggagttaagcttcgtctcacttagccttcgaagtatcttcgagttgtcgtgcatgtaaagccgaaggtacgattgtaaaattattgcatatggagaaagatggaataagaattctaaggcatatgagatgtgtgtcatatttggttctttgttacttttttacacgttattgtttcatccaaattcccacctttttatcttctctttcgagttaccctttggagaaggggtaactcaagggaggtctcgatcccctaacttatgttgtcttgtttttgataccatgtagtaattgaaagcaagtgaccaacattgacgcccaactccggtgattccatg

SEQ ID NO: 60730 - DNA, 427 bp, Zea Mays
aaaaactattttctaaataatttttctggttttatcaattatctgaactgcgcgtcaaatttccgaaagggcaggggctatcctataaaaatccctagactcatactacaccagagatgcaccgtgggttaattctctatttcccaggggtctcttttataaaaacacacggtgaaggggttcgcaaatttcgaaggctttgcatcctattttcccccgtagcatgcagatttatggtgtggtaactagcatgaggggatgtaagggtagtcataccagaggtaaggcacagggagctccggccacggggacgcacggtttcacgccagtacagcgagtccagcgagaaatcgccagccacccagtggttttctccatctacgaaggtagccgactgcaccacggaagcgcggcgaagctccccgcc

SEQ ID NO: 60731 - DNA, 581 bp, Zea Mays
ttaattcggaaaaacagtcggcgctacctagtcagtggggagagtagtgatgttccttctccagctttgtctgctcttgttggtctgcaagagttgtccatagcaaattttgatcaggctctcgaggatatggttcctgaagatctgctatacgagccaacagatggtggcatgatggacgtttgcactaacattccggatgtggggttagagttatcccgagcagcgtctcgtgcctcgtcgaccttggagtgtggttttcagaatcaagaagctggtctaggttgctccattcccatggaggtgactgagaatcctttagccttagaggtggctgctgcagagaacccggtccccaaggatggtgctagcggttacccagcccccgagggtgttgccgataatgatccggctcgactgggcagcgcgagctacaacccagcccccgagggtgctgtcggtggtgatccggctccgatgggcaatgtgggctacgacccagcccccgagggtgtccgagcgggctccccttctcatacctccatggatgtccacgtcgggtcttctcctccacattctga

SEQ ID NO: 60732 - DNA, 509 bp, Zea Mays
gggggatttcatggtatgatagggagtataaattttatatattggaagtggaggaagtatcacattgaataaaaagtgcagtttactagggaacgttggatcccctaccaacatgctcaaggtggttgagtcatatgagttgttgatttttcatgtttttagggtagctaggttgaacaatgacatcaatttgttcaactaattattgttgttcactaacatgcttaagggagaagcattaatgagaacttcacgttgaatgaacatgactacaaccaaagatactatctcgctaatggcatctacccttggtgagccgttgtttgtcgagatcattcctctcccatagactctaaagtaatggatgtttgttgtatgccaagaggacgagcgaaaggacgtagaagagcatttaaggccctcaaggctcttttccatattctcgctagcccatatcattctttttattaccaagcagtcgttatgatcatgtttgcatgtatcattcg

SEQ ID NO: 60733 - DNA, 582 bp, Zea Mays
ctctggtacacggtaatccaactatgaaatccatactgatttcctcccatctccatttgggcactttcaggtgttgaagcaaacctactggcctttgatgctcgactttcactctctggcatatgtcacaatgagctacgtgagcggccacatctctttttaaaccaatccaccagtacttttcctttaagtcatggtacatcatggtcctttcgggatgtataggataagcggagtcatgtgattccttcaagatcatatgccaaaggtgatcagtttctagcacacagattctacttttgaaccaaatagtaccttgatcatcctttgtaaatttgggagcttttcccatcttaatcagggttttgatttctttaatcctttcgtccaactcctgacctttgcggatttattgctccaaggtcgattctacttccataagtgttgcttctatgtgggtgaccataccaagattaagttgttccatctcccaacataactcttggggcaccaagtgagcaatgactatgttggcctgacctttacgacttaacacgtcagccacaacatttgctttaccag

SEQ ID NO: 60734 - DNA, 972 bp, Zea Mays
acaaaccagaacggtgggaaacttcccatcaaccaaaagtagataaactagtgaaactaacttcaaccatcctactagaagagaagaagttaatcgccactaatctcctaccaaactgccccacagttttaagctaagcttatttacatagagcaaaacccaaaaggatcagatcaacaaagtgtaaacttcagtttctggccaaaccaccaacacaattttcaattccaaaaagaactaactgggctgaactgatcgacaacagccgacgccagaggccaaaatgaagtcttcaaccagaaatacgtcgatccctcggacaccacccgaacgtcctgctcatcgcttcacttattatctttcgaatgagttggcttcctcggaccaccatccttttttccttctttttctgtcgaatggcccaagaatccaaccagaagcaacaaagaaatataatgttagcaggatcaattgaaattttttcaccaaaaaaccaatcatttctggtcctccaaatagaccaaaacaaagccccacagccaaaaatcaggagatttgacatagattttttagggtttttcatccagctatcacaaacttcctcaatgttttttggaacatactccaaattaagggcaatttgaatcactctccagacaaatctagcaacagagcatttaaaaaataaatggtcaatagattccataccaccacaaaaacaacagtcatccgaacctttccaatttctttttttcagattatctttagtaaggattttgtttctaatcaccaaccacataaaaactttaattttctgtggtaatttagatttccaaagaaatctgtaaggaactttgatctgatccaaagaatttttcttgtataaagaattaacagtgaaaccatttttacccaatctccaaacaggtttgtcttcatggcttgacaaactaaaatcagaacataaagcca

SEQ ID NO: 60735 - DNA, 752 bp, Zea Mays
aatgattttagttgtttgtcacattacatatctcaggctgactttctcctcacaactttttaaatggcatgcctggtacagtgttgagtgtctcatgatcatgagttcgaagcttgcctcagtttatccctttcctgaacaccactcatgtggaagcctctggcattgggtctgcctttttttaccttgttctgtacagtgctctcttgagaagaaaatgtacagatagataaattttaaaatgtgtttgttgtcgaaaacttgaggtgaataatttctactagctaggggaaatctctgaagtataccaagctatttacagtcgtaaccaaatgctgaatagactagcatgtggtgctacagtggccgggtgttttgctcatggaattttaaaacaacagatatgcctaatttgaattgctgcgtcctttttgggaagaaaactattcttccactgcttcagaactatttagcgttagctatttttcatcctggcaaaagccatgagcccaggggccaggactttgcttgaaagattaccggattagagtgccgttcctggatcttggcccctttttattttgtttgttcaatcattattgtcatcatcaccactctttggggtggtataaagctaggggggccagggccatgggtgtgttggtctggtggatctgttctctctggcacaggcggacccagccggttggtgctgatggcccgaaccaataaatgcatgtccagaaccagaa

SEQ ID NO: 60736 - DNA, 407 bp, Zea Mays
atacgcggcgcttgacatgtgaccctctttgcatgccttgtgccttcctataaatgatcgctcccttgagcggcttcaccatgccttgccatactttctttgttgaggggtgatttcttagcagcttcttatggactctggtaagcgcccagtggtagagcaccccagtgtcacgtcctctctggcaaaagatgacttactcgaggtacatacccttcttccttctgcttccagattctcaagactgcttgcctcatcttgtttcgtgtgtagccatgtgatctcaatgggtcaaaggaaagacttcgagatgtcattttttagggtgggatctcgaccctctcatcgccaacctcctctgacctctaggcgtgtttggcccctacccacgtggcgctcgagttgcc

SEQ ID NO: 60737 - DNA, 629 bp, Zea Mays
aaaacagtgcataataaatttttatacgtcaaatattcaataatatatataggcatccatgtcggatttcacactggacctctaaaaagacaggatcggccctgcaatgcagctgtggtctagatcttggttaaatgggttggattgcctgcgaatatggcttcttgggaagattgtacaatcttgaagacgatatttccatcggcaccagtatggggaccagttggtacccaaggagggagtattgttagggatgacaatcaagacatgtaatagtgttaatattgtggcttaatcgtttaataggcctagcggctaattgatggcccatgtaataggcatggtggctggtattaggcagccaaattagcagtataaagactggagatgtaatcgaaggaaggacaaagaataaattagaaacttatctttccctcgtaatactcctgtttctcttctgtgtttctccttcctttctccttctctcttcttcctcaccgagctggtgcttcaatagcaccattgcctttgatgagcgaccaccatacctagtcttgccccatattaaaaaatgaatagaaagggatctaatcctatacaatcccgtcaattcatccctaagaccgaaa

SEQ ID NO: 60738 - DNA, 375 bp, Zea Mays
gtggagatcgcgtggaccgtctatcgagggttggatggcgtagattagatccggcgtatcggttagattagattagatctatgtcattggatagaaattgtgcgggtggaaatcgatctgaggactttaaatctggggcgttagtcttgcatcggagggctctcggttgcgcgctggatcgcaggggcgcgatctaagcttgacccttagatctaaatccaatgggccagaactctccataccccttcgatcatgctgttttactaaagagaccctaagcttaattgaaatcgacccgccgtccgcagccagtgcagattaatttcatccgtgccctgggtttttataaaacaacccctagactttgtcattttt

SEQ ID NO: 60739 - DNA, 559 bp, Zea Mays
gattgctcccagttactcagttagccatgagtaccatcacatgattctttccagttagccatcagtgtttcaattaatctcgggccttgcaaagaaatgcaacctgtggacttcggtccccatctgaatgtattatcggaagaaccggagaccctgtggccatggtggtaggcacgggaaccggcactcttgcagcgacatttggggaacactaatagttgtttggcccattttaagatatctttttattgcataattgccgtcgtccctctgctgtttgttccagtgtccgcggctatctgctatggcctgtgttgtccggctgccagagttgtgcattattgcggcacgatgcctatgattagtagttgattactgtttaatataatatctactagactgctactaataatctcgttagaagaaccacaaaatatggcatgccccaattcctaggtgtttttctttactggaaaaattggggccgactgtacctgcttccaccactactgtagcaggcaagcaggaaggaaaaaaaatccccctcatacgaaatgca

SEQ ID NO: 60740 - DNA, 469 bp, Zea Mays
ctcgaactcaaaactaaatctcattagctgattaaagagaaggtcaacccaaattaattaactttagctagcactggcggggcatgatgttccatcttcacgctcgctcctacaaaccaacactaagcagcacgccatggctgccaactgcggaacctttcgtctactcatctttgtctgtttgtacagttagcagctagcgagtgatgtctccttcgccattgccactagcccactacacctgagcaagcaaggagcagagcatgcacaaaccctttattctcctcttgccttggagcaagcatcagagcaccacggctgcacgccgtgccgcagtcaacgccgccatcctcgccgctgctacaccacgagccatattgagccacggacaaacgccgatgtgatgtgtcgccgcgattctctcccgcatcacaccgctcgcgtcgcgacagtcaaactcgaccaccta

SEQ ID NO: 60741 - DNA, 670 bp, Zea Mays
tgtcaaggagcgcatgggaatgggaatggcagcctaccccttaccgtcttaatagtagtatatatatatatatccccacacgttgatcaagttagcgcactaagatcgcaaacatattacttctgttaatgtaaaatgatttgattgagagcgaaaagtagagaatggatctctgtgtctattacacaattgatgatctaacgtatatatacagatgacagtgcgtccgttcacccgttcggttattagtttattagaggtttcatctaatcggtgtgcatccaaatctttgggagattattaatatagatgtgtgcaagcccacactaggtgaagagatgacactggagatgatgcaagatgtgcatcacaatgctcaagccatgagctgcattatcaaagggagtttgagtgcggaagagtaccgcaaggttcaagaagagaggatgctatttggagtatcctcaagatgtcttatgaaggtgaccctaaagcgaagaggcataggatcgaggcgttggaaagtgagattgcaaggtatgattggatcaagggtgagtcacttcaatcactctttgatcagttaatggttttgatcaacaagataatagtgcttgggagtcatgattggagtgactcaaaggtcactaggctcttcattagggcatac

SEQ ID NO: 60742 - DNA, 1067 bp, Zea Mays
ggttcgaatggtgtgctcagtgggcataagatttatacatgttcggattgaacatccctacttatagtcttcagtggctcgcactaccggcacctgattcctcgtagtaggggttacaagcaggcgagagagtgaaggatcccaagtctctaaaggttgtttgctagaggatctatgtatcgagtatttactctcttcctctgaccctccttatgtagatcaaggaggggcggttacaaatgtcgtctcttggaagggatcgttgcgctagggtaaacaaaatagttcttcctcgataaaagcattaccgtgcattattattcgtctccgcataaatctagtcatgtctcttcaagacttctggtgaagcgtgccggcgatgggagtccgaacatcattattactccttttgtccacctctgtctatgttgacccttggtttccctggcctgacctcgggcctcccttcaccgtcttgtgttcttcgtaggatgtcaaaggactcaggtctaggttatgtaggtctaggccatgtaggtcatgaatggggctcatgcctagggcccataggtcataagtggggataacgcctagacccaaagatcatgagtggagctcaggcctaggtcccgtaggtcatgaatgtggctcgggcctaggacccataggtcatgagtgtggctcaggcttaggacctgtcgggcatgagtgggagacagacttgccctttcccacgccgcgactcggtgccaaacacagttaatgtggcgtgtgtggtgttaatggcaagagttttcctagggccaaacgcggaatccactcgagtggctccatgtcggttcgtctgatctccttgctaggcttcgcctcgcacgaccctaggcacaacgctgggtcattcgggggcagattcacctgggcgggcttctccctatcttccttctaactcgtgaccccctagaagcccagggatctaatccgtgacgtagccctcgagcccccaacaagagtgtgtctccccctggtggcttcttttgatggtggggtcggttaacattagggaaatg

SEQ ID NO: 60743 - DNA, 633 bp, Zea Mays
gcgctagcctggctcactgcggtttcaactttggcctgttttatttcagcttcgatttgcattttcgaagcctcggcaattttccctgaaggaatagaacttgaagcctttactgactctggcacatctagtacacttgccatcctttttcttttgggagtcgccacaagacctttttgtgccttcggcactgtcacttctgccgaagggcttaaaacttctaatgtttttgttcctttggttcttggctcctcagttttattagtcttcggctcagctaacttggttgagggtgccttcggcattgcagccgactcttcaatcttctgcgtgggaggagcatgtccttttgcttcagtagctgaagaagtttccccgctaaactcaggcactatggccggttcaatatagcatggtcggtgggtaaggaccttcaactttttactcttcggcgcaggctcgcttggagcagtcgaagcggcaacctttccagaggttgcaccatttcttttctgccctcgtggcgggtagcgatagtcagggtacacaaatccaatagcatcaaaaaccctatttaatcttttcttttttcggctcccgaaggccgcagatagtgcattatcttcggacttg

SEQ ID NO: 60744 - DNA, 521 bp, Zea Mays
catcatttaaagcttcagccacagtcttgtcaattatcttgtttatatcttgaagcatggccaaggcatctttaagctccggatcattctcaggtgtgtacgacttgtgtacaggcgagagggtagttgtaagcaatacaatcataatgtaggaacaatcttccaaagcacaaataaaataggcaaatgagatacctataagttcttctaaacgtaaagcttttttagctgcctttgttgcctggtgaacctgaaaaaacaatcgatgtatgtgagtacagtgtaaataactgaagccacaagcataaaaattaaaaagaaaccttctccttactatctcttacaactttatctgccatttatctcccatcagcaagcaagacgtcagaatagaatttccctcccaattcaacatcttcggctgaaggatctttgatatcattggcggagatcttaaactcaggctagatcacagattttacattatcacaaccagccttctcaagaagcgagtttgttcc

SEQ ID NO: 60745 - DNA, 576 bp, Zea Mays
atttcttgttcattgtagattaattgatgtcatgttcaatgtttgcttaaacaattttttatgtctagtgattctttttaatagggttattatacacagtatggatttacgtttatatgcttaatgatgtttatttacacattttttatacattgggttatttagttttagaaatggatgacaatagaagaagggtgatgtatgatggattcaatagcgtgactctaggatactcaaaggattgggttagggttgcaaaacaattcgtggatctcgcattttccggtggacctcgtgtggtgaagtgtccgtgtaccaagtgtcggaattttaagtatgtgagaaagatcgaagaactggagcatcacctttgcaagaatgggtttatgcctaactatcttgtgtggcgctcacatggagaagtagagcagaatatcatagagtcagaaagaattgatgatgaggaggatcagatggatgacttggtggctgatattagtagagagtatccaacattggcctcggaacagggtaccccaaaggaagtgcaggagttttataagcttcttaacgcgt

SEQ ID NO: 60746 - DNA, 426 bp, Zea Mays
tgttttgatgctctttgagtaaaattgggtcaagagctaggggattgtctcaggaattgtctgaaaaaaatggacaacctacctcgtaatgacaatcattcctcctctgtcttcccacatattttattgtggcagagacatcgaaataatctacctgatggaggagacattaaagtattcgtggcataactgttctttctcgtcgaatgtctgtagtacgtacggtgttcaggttgtttcgataaggcatcttgttgttgttaatatttaattttatgatgatattttgtggctgagatttataattgacttgtactagatattggtatcatctggctggtgtggccacagcaagtaggaggcatgctgccaaaaaggcaaactttaggctaccgttctggtggtctccaaaaaatggaaccatga

SEQ ID NO: 60747 - DNA, 694 bp, Zea Mays
ctgccggagatccacaccgtgatccaagctcggcgctacgatttgcacacggctaaggacagattctacccctgggggtgaaaagatcttgggggagggtgaatccaggcactggacaacctcatacgccgtacaccctagccggtactatggcgaagctgtcgccgcgggggtggtttccactcatcctcatcgtaccaagcagcaactccttcaccacgtctctacggtcatggaaagcagtaatttattgtctctgagctattgcacttctatgcgccacggagagtaagttctagtgaactatctggtcacgccgacaggttcggtgtcatccaaattcgtggcaagagtggccgatgcctttaaattgagtgttctccctgctccgcccctatgttaaacacccagtccatcgccagccaccttccttcgtccaccataccccgtaaactctcggattcccaaaattggtcaccaacgccaccgtgatgagcttgacattggccaacatcatccgaggtagctgcagctaaattgttgggtattctaagttcccttatacgccttgatgctcactggcccggccgtttgaactctaccgcagtgtagtactgggaagtgggaacatcatgtcgacatcggtgaacgccaccaaggacagccttcacctcgaccggttgatttgtgcctg

SEQ ID NO: 60748 - DNA, 401 bp, Zea Mays
caagagtatatggtaacaggtgtgcgttgagagtggcgacacgcattcgatccagctggtatcgtgtcaaactggcaacaggctactgctagagcagatttgagcgcggttaggggcaggctaccgcgcgcacgcatgcatggaatcggacgatcatggatatcgacgcacccgacgaacgcctctagatgcgcgcttgacaaaagaacaacgcaacacgccaacacctatttttgatcgcaacagagcagaggcaggggacgaagacacacgtacgcatggcaggccatacggatcggaagccaaatgggatactggatagagacgagaggctaggcgatgtccatggcctttgcacatatgcgtgggcagatcacgtgcaatgcatgtctacacccgca

SEQ ID NO: 60749 - DNA, 1335 bp, Zea Mays
gttgggctaccttcttgtatttgttagattttgggcccggtttttccttaaaacagggttaattccattcttaattgagaggcggaccattacgttcaaaaaaaggtttgccaaaccctaccggaggggagaagctctttttttttgtactaggttggtgaagccacctaaatgtggctgctccagattctgtcttcttagattagttgtttgcaaagaagcccgaccaaacatggcctaaggattacctgtacttttagatctgcatttttcctagatttgacattttattattttgcttgccccaacattcttgggatgtacgttttttggattctaaatatctgggttgatatgtaagcatcatgtcatagaaaagaggtgtcgtgtactgattgtcctaccatgaataagtgccctgtatttgatttttaggtgaaaggatcttctcgtcatgtttttatgtgttggcttatatgtgcagcttttgtatcccatttgatggttctgcccaaactcaaagtcaaccactttgtctcctttcgtattggtcttctccatagcaatcagttatcagtatatgtgatgtgtaggctaattgctaatgtattgtaaaaaaatatagagtttagtctgacaaagtacctgtaattttaaattggcagtggtttgattcctatatttcacatgggttccctaagcttgtgaggtcggtgtgtttgttatagtgctagcaatattagccttgcttaataataccagactgtctgatttccatgtctaggtttgcttggtactggccgatttttgggctgttctttattttccttccctttgttctgcctccatctcctatagtatggttatctcgtttcatactttgcaaatatcagtattactgacactatccaaaccggatgattccttcttttctttcattgacatgtttttcatagtacagtactacatggtagatctagagggtatgttgttggataggtagttagaaaagaggaaaatctgtatgtataatattgtgtatcatgttcctttcaatttctttgatataaacctcaagttaagcatcgtttgttttcagtgctgaaatgagaaattgcaacatgagagtagactggctttgtcattaagatttataagagaactgaggctaactttgtgcatatatgatgcattcactcgatcaaatgtggtttgtttccgccctgtagttatgttatcattgctctattaggtgtctttctgttcattcattcgatcaaatgaggtatgtttcatgtgcatatttcttcagtttacagaaggattttttttttt

SEQ ID NO: 60750 - DNA, 1651 bp, Zea Mays
ctcatggagcggccaacaccccgcggcaaaaagacaagaaaatccacaaggggaggatagggtgcccaagccaggcgatggggcgacaacgcgccatgacgataaaatcacctagtctatagcaagggcgtggtgtcgtgtttccctcaggcaagccaaaacgtcgtagctgctgcggcgcttctggacaagctccccaggtggaaactgcaagcgaatgaaaacccaccaagagatccaggtccttctcggtcttgttgtgcaacaactagacgatagctccatgtcttgacgccgcaaacctgagaccaaccactacaccgtgtctacaccaatgacaaacaatgccacatcgcagcaacccctcaagctcaaaggaagcatgacatgggtcccacctcaccggccccaaaggccgagtccaagcgtgcggagcatgcctggtcacaagacgagggaggagagatgtgacgagtcgtgtgtctcccgttagtacaaacagcgccacggaggtcgttttgatctcgatgggaactaaagcttgagcctgccaccaccagggcctcgggccttcagtcgtcatatccttcgagcactggtgccacaacgctatagggtgcccaccaatatcacaaaatattcgggagagtcgaaccccaacctttggcagagaaattatcgactggtgtgccatgcgtgggagtggataacgacgacttcataatccgcaatctccccctgtacctggcagactcaacttgaggcccgactacattcggaattaggccgaccttgaggaattttttgtggggaacttctagggcacatgcgtccgccctgtcaacccgtgggaccttaagaaccatcgacaaaacccgatgagaccttaagggactacatccgatgtttctcgtgacaatgcaatgtgatggcaaaccttatcgacgccgacgtcatcagcatgttcatttcggcaaccacgagcaaaactctggtgcacaaactggggtgcaagagctcgcggaccataaatgagctattggacatcgcaacgaccaacgggtcaggagaagatacagtgggagaaatttttaatcatcgcaagcagaaggccaagcgtgacaaagagtccgacggggatcacggacggtggcccaataagagaaagaaagaaaggctgagacacgatgagatgctagtggcagtgacaagttagaagggaaataaaccaccaatagagggtcagagtgtgggttgctgagaaaattcctaggtgggggagcaccacccgagaaaggaacagaacccaggcagggcagcaagcgagagaaggcaagggttgccttgccagacgagactgggtgcctgctgatcttcgaagggttggagtactacgcgccgagaagatatcggaagtcggaacgacgcgaaatattctagactcgacaagcatctccgattgtcctcgactggtccgaccacactattacttacgaccgtaccaatcaccagatcacatcctccgacccgggtgatacccgctcattgtcactcactcccattgttggatcagtgcgactgacgaaggtattgatttatggaggaagtgggctcaacatcctctactctgctacacttgacgccatgggcc

SEQ ID NO: 60751 - DNA, 858 bp, Zea Mays
ccaaaacacactgattaggacaatcacgctgcacgtgtccatagcccttgcatcgataacatagaacatctcttgttctacccgtggaggctactgaagggcactacttgctggtttctgggcagatttggctgctgaatttgtggaagatgcatgtggtttgtcgccagaggaaggtggtggtgctggtcgactcgacgagggaattggtgctggtatacggccggtcatggacgtagtcatgcgctgctgccatggtgtatattttcctgcagaaacattagaccttgcacttccctttcagctttgcaagcaagatgaaacaatcgggttacattagcataatctttataagcaaggatgtcctgaatttccctatttaacccgcccaaaaatctagccatagcagattcctcaccctcctctatgttacaacgcaacatacccatttgtaattcctgataatattcttctacacttttagtaccctgtctcaattgttgcaacttgtttaacatatcacgtgcataataagaaggatcaaatctagcctgcatgacccgtttcaacccatcccaagtttatggcatgttattaggattcttcttaccatgttctatccaccaaacagaagcaaattcagtaaaatcactagtagcagctctaacccgcgcattctcaggaaattcatgacatacgaacttttgatcaaccgcaatctcccaagtaatgtaagcatcagggtcatatttaccatcaaaaggaggtattttaaatttaaccttactaaaagcatcatcattaccatgtacctcacgttggcgaaaaccacccatacctctgcggttagtacgtagt

SEQ ID NO: 60752 - DNA, 330 bp, Zea Mays
tgcgtatgcacatgcgtggtttgcacctttgggagttcctcactggtgatctaccatgtccttcttgttctactgctcctacatcgcatataatactagggaaggctactaatgaggagttgcttccatactatgaggtgttgccgataagtttccattagcgtccccacgatgtctctctcagggcagcaactatggtcatggcgtcagtgacggcaccaactttcggcggacaccactactactgtgagccatggtcgccatccgtgccatttggagctcaaatttcctcgttgtgatgagaagtctgatcgcttgccttggctcaac

SEQ ID NO: 60753 - DNA, 937 bp, Zea Mays
cttttcttaggagtcgttattgcagtagttgttagcttcggcaaccttgttgtggttgggggactcaacagtttcgaatgctcttctgcctttgtgctctttgtttctgactcttctgctggaccagcactagcttcgaccgtcatagcaggaattgtcttcaaagccaagggggtagctttggcctgttcagcaatctctatcctctttgtatcaggtattgtagctatcctttctaaagaatgaggcttcagcctatgtgtcaaaaccttagctctcttcggcttaggcgcgatggaagaagataaagttgtcattttttctctttgacccttgttttcggacaggaaagcagtaattaggataaaaaatccaatcacatcaaaaactctattcaacctcctctttccgcgagcgccaaaggcagtggtcatggcttcgtcctctgccttcgtgtaagcacccaacaactcgtcactggtagctttgatagcctcaagccagtcctcattcgactcatcaaactgatttctgtagggataggtgtatctcaggtaaaccagaccaccttcgctagaaccaacagcagtctccttcaacatctcccagtcattaacgagcgaccacatcttataagcaatatgctcctgaactaaatccctggtaccgatgtaagtacacaccatgttgaaagccatcaaacacgcttgcaccttgttcccacttgcaatcgacagcctcctgaagccaaaacgtgaccgtatggggcgctggattatacccctcacatcttccctcttgctcaaatcatttttgacataaaaccattgtttcattcaatagtctggccattgtttttggaacgttggcacgggacacctcacatcagcgtgcacaaagctgtagcacccgaagttgttctgatactgctccttcc

SEQ ID NO: 60754 - DNA, 1740 bp, Zea Mays
gcggggtgtttctaactttccgccaaagtaggactcctacttgcatgtatgagagtcttggagaggactgtataaacaaggggacaaagggtgaaggccacaggcatcaacgaaaccaacacaaggatctcattcaaggcttgtaaggagcaactgaaagcgccaaaaagaattagggtagacagttttaatgcactagattcatgtatggggcaagaataagagggtcctagagggtcaagtagggttgtgagagagcaaggaccatggagttatgcttataaaatttgtggtcggcttcaccaaattctaacctcttgttgtggctgcttcaacatcatcttctagggttttctaagagatccgtctacgttgttcttgatatagtggaagcttgtgtcatactggcaatatcctttcaaagatccgagggcaactacgcataggggtatcaaattctaacaaggcggcaccacctttggcagggatggtggcccagatggccatgttagggagccatggcgccactaggagggccaagtatgagtcaatcgggagtgtgacctgaagctcttacacagaaactttgaactgcccactgtcaagggctctatggacaactcatctcgacctccacgccactaacaacactgtcagcgggcaggcacagcgttaggagtgatagtgtgataccacaaccatctccctctatttagggccacattgcatagggcctaagaagtaaagggaaagttgttagctgcataggttggtctcttaatgtacatataacatttgacaatcttgaatttatccctgctgcaaagcttatatatctaatgacgttttgaaaaccacctacctatcgattatatcatcttacaacatagttttgaaccaagtggcacgaactggaagttgcatatagtatttgtttttgataaatggatggtcctataaatagcactcattttccgcttatgtgtgtaagatgatcgttcaccccacgacgtcatatctcacgtgatcagaagagtgcgaaaacatttttttgtgggggaggggggttgaggtaattgaataccaagttcctgacgcacctacatcttttcattagcttattacctgaaagaatttataaaaatacagtgacctgaaggcagagtaggcgaagtggcaaacatgagtaaaactctcaatctgggcagattataatcccaaacaaacaccccattaactaagttgcaaaattctcaaggaaaaaactactgaggttctatttccgtaactgctcctaaatgagatatataattttcatgttaatcgaagtaagtgatgcggccagcggataacaagacttttcaacgaatagaagtatctgagcgtaatccaaaaaaaaaaaacaaattgctaaagtcaagagagatcattgacaccatgtctcacatcaggaacagtagtgcacagcattccgtagtgagcagagcactgagcacaaccacgaggatgacacgagttattagttagtacagtcgagtttgacctttccacctcggatgtagatctcccagggcgggtccaacagagtggaaccctccagcctccacgccgtaataccctcacaaatccgcaaacactattaggaaggagtgatagtagtagcagctagcaagcatattccctgcggttttaattaaacggtaatggtacagtggtactactcatgagtcatgacgcgac

SEQ ID NO: 60755 - DNA, 288 bp, Zea Mays
gtaacattacactttcggattgagtgcctcggtcgatccgatccacgagcacgagcgcgtacgtaagggtgaaaacggtcaataatggtcggaaaaaacctctcatcgttttcactcgtataattttttgttaggtcgtaaaccggaagtcggaaatggataatggcaggtaaattccgttatatcgaaaacggataaatccgagcaaaatagttcgaaattgaccgagaaacggtaattgtaataggaaaagctcacaataaacaaattctaaccacacaattgttc

SEQ ID NO: 60756 - DNA, 940 bp, Zea Mays
tcagactaaacttctgatccaacatttatcaagatctaatgggatctatttatttttggatcaacggctacaggcccttctcgctcctccgcgctggacagtggcgcggtgccttcctgcgcggcgacggagcacttcgcctgtgacagtcgtttcggccctccgatgtgccaacctccctgctgaacgatggcgcatgactcggagacgctaccggatagcatagaggcaacgcacctgcaattggaacgacacccgagtctacacatgtcgtgcagcgggtccatggcggcgccctttctccggcgagcaattccatatactcagaggagcatcgcactcgccccctacctctagcttgcacgcgatccatgagccaaggagaccctccttaatgccacgtcgtggtccatctagcaccgtgcttgcggtttgttgacagcggctctcgtctcgctcttcctcctctctctctgtgcaagctcgagcctctccagcgccatcttcaaattttttagtctcctgggcgaaaccataaatgaggcccctaattaaaaaaaatacataatcaaaatacaattcagtttacataatcaaatacagttcaataactttatattctgctaaaaagcaaaatccttctagtatttcttgaggtaaaagcttcgattagatcttcgtacttaatatgctccaacagatcactttcaattgctatggtcgtcaatccattgagtctttcttgtgttattgtagaacgcaaataggttttgacctacttgaatttagaaaaactccttccacagatgcaacagttacaagaactgttaacaaaattcggtatgcaataacaatattgggaaaacacattaaatgtttcacatgcttcaaaatgtcaagagggcccatagattccttaattaaatctcggataagtttt

SEQ ID NO: 60757 - DNA, 643 bp, Zea Mays
caaaggttcactagtaggttctctaaagaggaagttaaggccgcactcttccagatggaaaataacaaggccccgggccctgatgggtttccaactgagttttggcaggtgttctgggatgttattaagaaggatttgatggctatgttcgatagcttttatgatggcttgcttcctattcatagtattaactttgggataatcatcttaattcccaaaagttcggaagcgagttccatccggcagtatagacctatctgtttgcttaacgtgagcttcaagatttttactaaggtgcttgctaataggttgactactgtggccaataaggtcattagtcccacacagtcagctttccttcctggtaggaatatcatggagggagttgtggtcctccacgagacccttcacgaacttcataggaggcagctggatggggttgtttttaagattgacttcgaaaaagcgtatgacaaggttaagtggccgtttgtcaggcaaactcttcgaatgaagggattcgatgataaatggtgtgcctgggtggacgctattatgaagaaaggtcatgtagccattaaagttaataattatacagggaatacttttgagactaagaagggtctgcgtcagggcgacccgt

SEQ ID NO: 60758 - DNA, 718 bp, Zea Mays
cttccgcacagattgaactgctggtctacttagatgctgattgggttggttatcctgatacccctaggtctacctcagactttgatgtatttttgggtgaatagtctcatctcctggtcctccaagcgttagaacactgtctcctgctccagcgtcgagcctgaataccaagctgttgcaaatgccgttgctgaagtcatctggctgcgtcagttactacaagaacttcatgtccccctgcaccgcaccgccttggtttattgtgacaacatcagtgctgactacatgtcctccaaccccgtctagcatcaacacaccaaacatatcaagattgatcttcactttgttcgcgagcgcgtggccctcgttgacattcatgttcttcacgttccgacatcatcgcagtatgctgatgatatcttcaccaaggggctacctacttcggtcttcacggagtttcggtccagtctaaatgtccaaggcttcgatgctccgactgtggggcggggggtgttagcagtgcatgtttcctttgttgtaatggcgtgtgctttcctgtaatggcatgtgtttagcataaatagaatccagggctgttatggtaggagatgccttgattgatgtagggatcaatctgtatcagacacattgggaaggtctgatcctgattgattgaggagatcactctggcactacttctataagccacaggatctcc

SEQ ID NO: 60759 - DNA, 608 bp, Zea Mays
cgataatcttgatatgatgctcggtgtaggtcaaatcatcttgtacactaagttcttccataggcaactgttactttgggacccgaagacacttcttaagctgagatacgtggaacacatcatgtacatctgacatatgatctagtaactcaagctggtatgccatctccccaactcgcttaagaattttgaagggtcctataaagcgaggggaaagcttgcctttgactttaaatcccctcataccctagatcaatgacaccattagatatacgtgatcaccttcctcaaactcaagttgtcttcttcgagtatctgcataacttttcttccttgattgtgcagttctcaagttctcctagatcatccaaacttgtccttctggctcttgaataatttcagacccaaagaactgcctttcaccagtttgatcccaatatagaggggttttgcattttctgctatataaagcttcaaatgggggcatcttcagactggtttgataactgttattgtaagagaactccgcatagggtagactcttgtcccaactgccaccatgcttaagcacacaagctttcaacatgtcttctagtacttggttggtt

SEQ ID NO: 60760 - DNA, 276 bp, Zea Mays
gccgtagggataatagagagaggccgtgcacaagtgatttattacaggatctcagaactaggaacacgacatatcttcttggcatgcataccaagtggagtatgagtacgatccacaatccaggtgcttgtctgctagtaaaagtgtaaaaccgtcaggtggtgaagctctgtagccatggctagctgtcctttgcagttcctcggtaattttttatcctcatgcttttgtgttataatttaattatagcatcacattgtagccattggctttttt

SEQ ID NO: 60761 - DNA, 279 bp, Zea Mays
cgatcatgcatatcagagaattggccatcaaaggtagattgcatgtgatcaaagcggtcatcgacatgtgacatcatgccctgaaattgaccatccatatttgtctagagcctgtgctgcatttgttgaaaataaggatcaaaatatccaggtgcaggctgctagtactgtccttgctgctgaggaggtggaggaggaggcatttgctgagctgaatgcgcttcaggctgagcagcaaaatcatctgcctgaactccctcatcatcaggaaaaggagtg

SEQ ID NO: 60762 - DNA, 465 bp, Zea Mays
tcaagaaatgagagaggtaatggcaatgaaaaacaaaagcgcaacaaggaatggagttaaaaactcgcaagcgacaaggaagagcatacaaccaaggttaaaaatagataaagtgtaacactcagattgagatgaaaagaggagattttaaagggccggtacaagataaacatcaaggtaagatatagaggttataagggtaaaggtgataatgatgaaaagcataaccatggacagagttaaggcaagactgacaaagtggagaaaacaatcaagggtaagataggtaaggttccaacaaaatggttgaagtaatagaaattattaccgagggaaattacaaggaattaacgagatcaccaaggatatgaaaggtaaaaatgaccgctcatggatcattaagagacaagggtgatcaagatcatgtaagttgaaatgtcttaaacaaatattggggtatgaaga

SEQ ID NO: 60763 - DNA, 329 bp, Zea Mays
cgccagtgttaattcacaattttcatagtcggttcctaaagccagccgctagtgttaattcactattttcacagctggttcctaaagccagccgccagtgttaattcactattttcacagccggttcctaaagccaggccccagtgaaactttttcactggcggttccttaagccagccgccattgtaaacaagaactgctttattcattagaaaggatcatcctagtacaaactacttttcctacgagaataagttttcatgctatagacgacgacgcttgctgggaggcatctcatcgcattggcttgccccgccatcatcatcgcc

SEQ ID NO: 60764 - DNA, 428 bp, Zea Mays
tggtatatattctgattatgcagattgtgatgttgtacctatggaagcatgctctcttttgttgggtagaccttgggaatatgataatgatgcacgtcaccatggtcggagtaatacatacactttcatgcataagggcaagaaaattactttgcttcctttgactcctgctaagattgtacaagctgacaaggatagagctgcaaatacaaataatgaaccacctgttaaatctgaaaatcagaaagctattcatttgaaagctcctctaatgcttgttacaaaatctgatcttgctaaaatacatgttgatgatacttgctgctatgctttagtgtgcacatacgctttattttccaatgatgatattgctagcattgtgcctgcgcctatgactaaccttttgctggaatttagcgatgttttcc

SEQ ID NO: 60765 - DNA, 783 bp, Zea Mays
ggagggatcactaccatagcagaattctggttcttccgcttgggcgccatcgcaatctcgtcggtggattgaatagaagcgaaatcagagagaaacagaggtatggcttgaggcggaaaggtgaagttagggctcataacgcagaggcatgcgacgatgtgataaagatggggttttctcgggttggacaccgtttctaaaaagtgctaagtcatcactcgggaaagacgagatttcctggcataactcggcagttacctctacaacgccgacgtggcccaacataactcgattgttacctccaaagcgcggacgtacccagagtaacttggttgttgcctctaagacgccgacgtcgccaagcaccacttggatattacctctaaaacgccaacatggcccagcataactcggctgttgcctctaagacgtcgacgtcgccaagcaccacttggtcgttacctctaaaacgctaatgtggcccagcataactcggttgttacctctaaaatgccggcatggttcagagtagcttgacagttacttctaaaagacaccagcaatacctgccataactcagccgttttctccatgtaaataccggcagaaccaaatacgactcaacaattactagtcattactcgggtgttgtctctaagaacaacgacaacgctggtcatgaatatgagctatcaattgactataaaagaacgatggaaaagcaaaggagatactcagaacaagctgaaattttcttcaatatattaagaagggaagttcttc

SEQ ID NO: 60766 - DNA, 868 bp, Zea Mays
gagagagagaggagggagaaaagtttatgggacgtgacacggtgacggagacagagttgcgagtagaactggacagtgatgagatgtgtgtggtggtcagccgcagcggcagggacgacgggagcagtgctgcaggaagcatagccctagatttagcccagctatcgtttgtgtttgtgtaaagcgcgggggtggagtagattcaccgggaatattcagcccgatatcaggcgccgcatatgcttccggagccgaaaaggagaacgtgcgtgtcgctgcatacgccgagcatgcatgacaacagcatgaacatgaacagctagctagcattgtttcattcgccaattcctttcttctagtcttttctgtattatttttggagctgatgaggaacgaagccggctagtaataatacgccacgccaaccgtgcagcagctagtctgatgatgatctgatccctgacgccactgctactcagctaagctggcgtcagaagatagctgcacgagcgcgtacgggtacggcagcaaagctgtaatgtaatcagccctaatcaggcgtgggtgtgccctagctagggtagggtcaactagatgtccagatgtaagcccgcggcgagcgcttcgtggacgatcgcagcatgcaaacgatcgctgcgataggatgcaataatgcaagaagctagccaagaactgggttcaatgcaaaggttcagtagctaccataagcttaaaacgacgctgcgataggctccttccacagttccaccacatgaacaatcaccgatgtcgttcgtgcgtggtggagtaccaccagatcgatcgatcgagcagcatatcaagcccgaacacgcacgcacgcacgcac

SEQ ID NO: 60767 - DNA, 701 bp, Zea Mays
agcaaagtgaagggatagtgacatagtaaagggtggggaagctgttagcagcccagcacccgcagatggagtaacccatttgaaggcccaggctgatcttcctgtgacctagcagaaacaggttgtacttttagagggagatctggagaaagccttctgtccatctcttgtgctgaaccagaatctgtcctagtgaggtaggggccatgcctaaaatatgaaagcaaaaattctccaaagatcatatttactatttctattgagagcaaatgtcactaaaatagactatgacagatttaacattttatcatgtgaaatgaagaccactttccctccttgcaacaaaagtgttcgaaaatagaacatggatctgacaacttggataggagctagcaagctaaaacagcagtcatgaaccaaatgctagcacttggtccgacatgcttaactttgttatggaaaaatgtggtagtgaaccaaacttatttcagtaactcagtaagaggccacaatacacaaacagaatatatcaagcaaaaatggttcagtttgtgggcttatctcagaaagtaataaatttctgctatttagcctcatggcagagtaaggttagctttcaaaagttgataacttcattgctgcaaattataatgatgcagaaatataatgtcgtaacgcatagtaaggcgaggcatggcgac

SEQ ID NO: 60768 - DNA, 411 bp, Zea Mays
cgaagctactgagactgttcccatttccgaagcgatgaagcggtctgggctggtaacatcggaggatgcacctgccgctgaagtagagcaggctgatgttgaggagactgatttcgaagatgattacaatagtgcagtgccgagtaaacccagccacctggatttcggaaaatctaccatctctgaaggtgatttgcctaagatgatgaagttgggctattttagtgaagcaaagaaagagctgattcgctttggtggggaagaaactactccgaagccaggaaaagatgaagtagtggtcttcaaaagtttctttaaagctggtttaagattccctttgaacaagatgattgctgatgtgctgaagaagtttgggatctaccttcatcagctaactcctaacgctatcgt

SEQ ID NO: 60769 - DNA, 1273 bp, Zea Mays
ctagattccacgcgatcaccaaaagtattccaggtttgcggccacatgttcgcctacaggctacaggtatctctcaattcctatctgagtacctgacacatcacagatggtctatagtctaagttcagtatagatgcatattcaaacataaacatagcgttgtaaaaataaacgtagttggatggcctatttgatcaatacaagaatctcagtcttcaccattcgattagctgtcatatttattgatccctcataggctcgaactagaaaatccatgctattgtgtttatttattgatccatgtattccgtctaatttagcggttgtggccgctgtagatccatgcctagctccagccaccgcccattgtcgtaagcaccatgacttcctcctcaccgcctcaaagttcaggcaacaacggcgacacaggaaggtgagaactgagaacttagttcccactccatatttactttggatctacctgtataatcttatatgattgtggtcttccatggaccatggcttaattgttgagtgactaacgctaacccaccggtgatcctcacaaagggacaccttgaacaagaactggctaccacatgctaccagtgatgcagcagccgcaacccctattgtgtcttctgctactcccaaaactgctgctggaactactgtcatgccatacgctagtgtcggtaattcctcgatgtctgacgcaatggctcccgtcatccaccaaaaccacgtgttaaaaagaccatcgccaagaaaataagtcgccttgctactgaaggaccgccttctactccgactactcaagaacaagacgcgtcaaccgtggctggcacacatctattaaaatcattggggtttgatttcaagcacgctaacctcttatttgatcttgttattacagttcgcttaattttatggttgcacatgtatatgtggaatgggtatgcatttatactatgtatttatacatccacatgtatattgttgtcgaataacgatgttgtgcatatatattctgtgttaaaatgcaagagatggttgtacatgtaagtttatatgatctaatgcaactgatcactgctgtgcatattttaagtatgttattttcaattattgttcattatgttaatttatatttatttttcaactttcagatttagtggcagccaacaggaaatattgtcacaacctcaaccagagtctataaatgattcagagccaatacaaatagatgatgatgagcctcaactagaggatg

SEQ ID NO: 60770 - DNA, 456 bp, Zea Mays
cagctcatgaatattgcaaaagcatcttgcatctggttccagtcattggctcctcatggtccaaataaaaacccccactctaataagaccttcgggggtaatcagatgaaggtatatctcaaatgttttcaaaacatcgactaacatcttatgatgcgggaaacgaagcccagccttcttgaagctcctgaagactaccacttcatcgctttctggcaaaggaacggtgtcctctcccctagccctcactatagatacatcatgaaagtatttccccttcatcgattcaatctgaccttatttgatggtggatttcccaaaaacaacgtggctaggtctccatgaccgatcttcggcattctcattctcactctcaatatcgaagccttcactatcgcttgaatcaccagatagcccagccaatatttcgttggtgatcttctccacattggtcct

SEQ ID NO: 60771 - DNA, 509 bp, Zea Mays
tagctagcttttggatggggagacgatgataatatctcgcagtaaagcaaagcgcggcattagccgagatcgagacgcacttttgattgtgagcaccataataaactaaccacgcagagagttccgcctgtctcggcgcgctgtccttcgacgacgagaccgggcatgcacgacccgaggaagcacgcgagctcctcacctgtgatgtgaagactgcaacgggattacgcaacggtgacacgacgacacaacccggccggtagtggtgcactagtgcagtgcagtgcaggacgagatggtcactactggcctggtgtgctaggatttgacgacacgatgagctgtgacaaagagacctttatttggttctcatgtgggtccaggactggacgacggcactggcatggcatggataatggattggtgtcactggcatggccgcacgccgatggagctgtccctggtagccccgtgccaagccacgcactgttcaacgccatggcgtggaa

SEQ ID NO: 60772 - DNA, 388 bp, Zea Mays
tgacattaagattaagagctagcacaacattttgatttccaatataagattagttaaggatgatttccaattcctcctagcttcatcatactaccagagtgtacaagtgtaataatccttaacagagatcttttgaaccttatagatttcagagcatgatatccaaataatctttctgatccaagagtatttctttgagcacaattttgggagaaagacttgagcaggactttagggcagctagaatagagcatcacattgtttgcatatagcagatgacaccatactttattctctttataaggaggcaaaacacaataggtgcgaaagattatccaaatttattcatatattacttagcactattacaaatccttaaaggggcaac

SEQ ID NO: 60773 - DNA, 453 bp, Zea Mays
ccggctcaccatcgtctggccccttaacaagctcgtagacgtccccagcccgaaggtcgtttgctgccaccaaatgtttccagccctcggagaagcccacaaataacgggcagtggtggtaaatgacaggccataatctcttcttggggtccttcaacattataacatcacagccatgccttctctgtctaactgcattagaaagtgcacttctatctgctccgtgcttcccggcccgattcaggcattcagccgatgccattctccatataagtcccaaacagagaatagggatgaggtagtcaagattgtaggcgctagtgctcaactactagcatctatagatatggacacaagtccaaatttggtgctactcgacaccatcgatatcactagggaaaacaaatacatcaaagagatccacttcccaatagtactcgaaggtagttcatt

SEQ ID NO: 60774 - DNA, 314 bp, Zea Mays
tcctgctcccgaagctttgatcgaaaatattgactacatcatttgacacgcttcggggaagaagctgtccgaagaagaaactctggaagccaggcactatgcgcgaaagttgaaatatccgaagggagccttggtttttaacgggagtaatgaagatgatttcttatactgtctcccgaacaacaaagaaatatccgtttgccgggagataggtagaagcatgggattcccgaagctggaagacgacctttcaattttgtcgaaggatgatcttgctgacagcctagcatacaacagtataaaggtatagaagt

SEQ ID NO: 60775 - DNA, 685 bp, Zea Mays
aaaggaaaagactgaatagtattgggctggtttcagcccaagcggcccaatccagagggaaaagcgcgcccgcgcccgtgcgctggcgactttacagaagggtccctgtcttcttgaatatcccgacagagtccaaggcactatttatcacagtcgctgacaattacaaagacaccctcgcacttctatctattctcggtttgaagtccacgacggcgttcgcgcacagccgagctccggcaagcacctgtaccggccgactggggcaatgactagggtctctgagcggctgacacgcaattggatccatcccgaccattttccccaacccaatttcatctaaggcctattggtttgctcgggccacggtgaccgtgagcatcgcggcaagacagtcgcgttcccggcgaccagagggttcctaacccaattacgtgggtcggtaagcatcatagtcgtaagagaaaccttaaacgagggagagaggagtatgaactgaccggaaagggggctggccgcgatgaggttggtttcgggtggcggaaacccgaattgggggaaatccggaattagagctcgctggtggagggtttggggtacaggtaggtgcagaagctgcttgattacaagacggagctgagggcgcggtcaatttatagagcccgcgagcggtggccgcgaattt

SEQ ID NO: 60776 - DNA, 665 bp, Zea Mays
ccgtgaggtcctgtcagcaactccaggggtcccgaaggctgccccacatcaacgatggaggagcaccgccatctcctttggggcatccgacttccctgacaacatgacaggggccggcatactgccactcatcaccgcccctgtcatcgccaacatgccgctacaccatgtgttgattgacggtggggcgggcctcaacgtcatcagccatgctgcgttcaagcagctgcaaatcccagggtcccgtctaggaccctcacgccctttctctggagtgggcctacagccggtgtatccccttgggagcatcgcactcccggttacattcgggactgaggagaacttccgcacggagaacgtcgtgttcgacgttgcggaagtcaacctcccctttaacgccatcattggcaggccggccctgtaccgattcatggccattgcccattacgagtatttggtcctcaagatgccatccccgactggagtcctcaccgtgcagggtgactatgccaccgcacttgcggccttagagaagctgcacgccctggtggcagaaactgctcgcccagacgatggagggtggaatctcccaatctctggtaccaaggcgcccctaaggcaccaaaggtacaaccatccggagcggatggtgtccccgtcaaaac

SEQ ID NO: 60777 - DNA, 399 bp, Zea Mays
gagactgatatcttttttcatatttggttcttgtttggatctttcagttccctaacgaaccaacaaggtgacaaagacggtatgcaaaggagttggtaagcacaagagacaacccaattaactttctttagaatttgaatacctaggacttggaaaccaaaatgttgttgtgaagaggtttgaatacttgctgcaactgaaatttactctcatggtttagtactatataatcacatctttaaatgtgaaaatgatggtagctacatcctgacaattacagagaataggtttcatgatctgagtacacttatacaatcctcctttatgagtacagagaataggtttcaattacagagaatattcctttatgatctaattcccatgttaggcgggttagtg

SEQ ID NO: 60778 - DNA, 679 bp, Zea Mays
agacgacgggggaggtggaggtggaggttttggggtccatgccggctggcttgtgtttgagcgcggtgcgaacgcgatgagggagggagtcagggagagagtgcgaggatttccggcggcgaggtgctgtgcgaatgggagaagcgccggaatgggaatgccagccggcggtagtaaatagatctgctaaaaagaggaaggtagctggtgcctgatggagcgagctttcaaagtcaaattttttcaaactttccagttttagcgagtccaaagaaatgcctaggctggactggccgaaatggatgggccggaccggaagttggtagcagttaccatgcagcggccctggtatgtacattgattgaccaacccaatatatacgtggagctctgctttttttaagtgtatttggttcagctttcaaaacatacttatgcttctaaactaaagaggttcagttttttcagctattttgaaaaacagattttctatagtacaaatttgaaagcagcttggaccatgctttcgctgcttactatagttcgttatattaataaacacacacaacaaattgaaattaaaatagaattaagataattaagtgttataataaatgaaataaaaatgtttttaataaaagaattattacaaatggaatttatttgtaaaaatatcacaa

SEQ ID NO: 60779 - DNA, 636 bp, Zea Mays
ccgacgggcatcccagcagcctggggaccttcccggactggatggtgacgtcacaggacaacggcacctcgctggtgctgaaccctcctccggacagctctaacctgaccgagttcttgcagttcagcctggggcaagtgagcctgatgcggtggtctgcagcggcgaacacgaacagcagtggctgggtggctcgctggaccttcccgtcggattgcaaatccagtggcttcttctgcggtagctttggtgcttgcaggagcaatggagaatgcagctgtgtccgcggatttgagccttcctatccagcggagtggagcctcggatacttcgcaaccggttgctcgagaccgagatctcttccgctgagctgccagacgaacggccagactgaacaagacgactcctttatcctgctagacaagctgcaggggctcccgtataatccccaggatggtttagcagcaactgatgaagactgcaaacaagcctgtctcagcagatgctactgcgtcgcgtatgcgtatcactccggatgcaagctgtggtactacaacctgtacaacctgagcttcgcttccagaggacctcctccatacagcaaggtttatgttcgttggggctccaagctcaggc

SEQ ID NO: 60780 - DNA, 690 bp, Zea Mays
tggtacctcttctttcgagcaaatacattatgttcttctgcaaactataaacttgtgaagtgtgttacctccttcagtttaaattgttctgcaatacatccttcaactcttgccttattgcctaccattgctctaagcttctttaatgttctttctatatgaaacatccacctatactaaatagggccactgactttagcttcctatagaagatgtataaagatatgctgcataggattgaagaaatccggtgggaatagtttttccaatttgcacaaaagcactggtgcctcttactcccactgctccatcacatctcttctatttttttagcacacatctgtttatagaaatagctaacttcagttaacgttttccacacagcatcggaaacgtacccatgaaatgttataggcatgagcctttccataattatgtagaagtcatggctcttcagtcccttcatcttcattgtcttcaaattcatagatcttctaaaaccagtagcataaccatcggggaatttcatatccttcatccacttcatcacttctttccattgcctaggttttagagaatagtcagcttttggtttgcctccaatttctctaagcattttggtttgcctcagcttttggaattttagatccttcatccacttcatcacatatcccagctaagtccatgtgt

SEQ ID NO: 60781 - DNA, 1042 bp, Zea Mays
cttgtcagtgtcgccgcatacgcgctcgtccttgcatcccctgctgctcaatgtaatgcacgtgttgccgggcggcagaattcagagccatgaatgaatgagtgccaatgccctggatctctgtgttcgaatccggctgtgtgtgccccccgtcaagaatctgaaaccggcccctgatacgtcatgtgacccggtaaggaaaaagagttggacaacgttgtacagcgagttctgcaggaacgacgtacgtacgtacgtggtgccgtccggccggggccgagcacgggcgaaccatcatgcatcgacgacgcgtttgatccgttcgatggtatagacagtgtggcgattttgcacccgagtcgcgtaccaaacatcctctccggcgtcacgaacgaggccatgtagcatcacgagacgaggcctgcccgtgttgcgacggacgtgtcatatcctgcatcgaattcgctgtgtgcatttgttgagtagtagctggacgcatcatgggaaatggatttggagaatcggtggcaggacggaaatgaatgtgcatggatgtaggaggagcagtctgccagtctgatcatcggaccgcacctcgtctctgctcgatctgacatgtgattttgtctgagccccaactgccggtagccgagtttagccagagtcctctccccgtacgtacgtagtactaccagcagcatgccctggtcgcatataatctataaagataaaaatatcgtagaatcagcagaagctggtataaattaaggtcaatcgaaacgttctcgactcttacggtaccacgatcgacgtcgctgctttgttatagtactgatagtacgattccgagagtccgcattcaatcattgtgtcagcattttctactgaatttcaattgggcacacaaaacttagggcctgtttggatgagctcctgagcgctccggctcttggccgaccggcacccaacagcccatgtgcgttggtttctgggtatccggctccgtcggttcgtaattcacgctctcacagcgaagggctct

SEQ ID NO: 60782 - DNA, 757 bp, Zea Mays
ctgagagctgaaagggaagccgatagagaggaaagtgaaacccacctccccgcacctccgcaactacccttagatctagcccaagttctagccaatcaaacccgcctcatcgaggtcctcactcgaagtctggaaaatcaacgtccgaatggtggaagaccgcaagacagaatgggggatttcctgaggctcaagcctcccacgtttgccagatctagcaaccccctcgttgcagacgattggctgcgcacgattaaaagaaagctggaagccatcggatgcccggaaaatcagcgtgttcaactggccgcccatcaactttctgggatggccttagcctggtgggataccttcaacgtcgccatcagagatgctacctgggcggaatttgaaacggctttccgggagcaccatgtgccccaggggctcgttcagcttaaggaagacgaattccgggaactgactcaagacggaagatctgtcagtgaatatgtgcacaagttcacggagttagcccgctacgcgccagatgacgtcagtactgagggcaagaagatggcccgtttcctaaagggactcaggccagaactcaagacaattctggctagccaagacttcctcagtttctctcacctctcccacaaggccatgcaagttgaaagggcaaaggaggaagaaaaagggcatctcaaaaggaaattccaagtcctccgggctcaacagcaagaccggcgccagaagactcgatcctttggat

SEQ ID NO: 60783 - DNA, 869 bp, Zea Mays
tgaagggctacaagtttgctacagatgtattggcaagttgttgcacaaaaattcgagacatacacattgcaattcggtctgtcaggcgctctgaattgggtttcaatggtacagtgaccagatcagaacgccagctcagagaactcaccgccggtgaccatgcgctcggattcgtgcccgccacggtgattcgtgctcagcgcagttggataacgtagaggggtaaggaaatatcgcgtggatgaactccggccactattctactccggccgccgtacttgtctgagtcacagccgatgtggataggtttgtcggagttagccacctcgcgaccttgcgccacgtgccctgacatcttaccacgtcgcagtagctcgcgttatgcatatccggtgatcgtcggtgagctcgccacggtgaaagccactaatcgcttatgccagtgcatccccttccctctgatcgccaccgcgcaatcacaaattcatgggccaccgctcaagggccctataaattgagcacaccctcgactccgctatgtaattgtgcactcaacacacccactcatgcctccaattactcatagagcccccgaatcgctcagttcccccaaatcagttttccgccaccgtgaacaagctctcaccgtggtcagtgcactttaggtccgatcttgccctctgctctcttgtttcagcactcttacatgccactgatgctcctcgacccattcaattaagctagaccgtgctagatcgccgggaacacttctgttcatccgtagttcgcactgtctccgtggacagggcattttagggctcggattgtgcaattgagcgaggggaaacgattattaggtgttgaattag

SEQ ID NO: 60784 - DNA, 1025 bp, Zea Mays
tttgctataaccttagattgttgtttctgttcagcttgagactggacaataatgcaagattgttcttctaactgtctcttggcaaaaccaatttccttttcaatttcttgacaatgatgctgcatattcagtttagcagtatcaacaaatgagcaggactcatgaaattttcctagtacaacagtaagaaatatcaaagcttcccaactctccactgtttgtagctcaagggacctataactaccgcgtaactcattctgcagttgcccgataagaatatctttggattctaaatctgatatgcattcaaccaagtcattcacaagctttgtcatctgtattctccattcttcttccttatctcttagcttcttagtgcaacttctatgtgtctgctccagggctcggaacttctcccataaacttttcaatgacacaacagcatatgtgccaccaatctgtgcctcctgatactccttgagacttgagcgcaaatcctcattttcttgttcaagatgtgccttactgtatcctatttccttgagcaatgtaaccttctcagccagtgctcttctcaaatatgcaatccccccatccgtcttggagctcaacgactccatcattgatttggccccttcatattcagagaccacatagccatacatgaggcgcaactcagacaactctgcttcgactcgcttcctgcagccttcctcatgggccaacgcctggctgcacatatccaacctcgacgggaaatcctccgtgaccctggtcttggaatccaaatcatcctcaagagtgccaattcgatcaacggaagttgatctatctaagccccactccttcttgacagccctgaagccatcgtggagcttattgagagcctcctcgaggtgcctgaactgctcagccttccagttgagcttaccctcgacggtggccttctcctcctccggcttcaccagcatgtcgtccctcatcaccacctccctcggtgtcaacaccctcttctcagcctcgct

SEQ ID NO: 60785 - DNA, 1076 bp, Zea Mays
cggtgtcattgcctcggatccgtacatcaggcggaagggtgtgaacccggttgctcggcattctgttgtgttcagcgcccatatgacttcgggtaattggtctgcccatttgcgctttttgtcgtcgaggagccttttcttgatagcgctgaagatcttgtcgttggcgcgttcgatgacaccattggactgtgggtggtagacagaggtgaacactaccttggtgccaatggaactgcagaactctcagaagtcctggttgtcaaactgcttgccgttgtcaattgttagctcggatgggactctgaatcggtagacgatgttctgccagaagaatttatgcgcggtcttcgctgttattgtagagactactctaccctcgatccatttggtaaaatatttgacggcgatgaaggtgaattttaggttcccttgtgccgtaggcagtggcccgacaatgtctagcccccattgctgaagtggccaggtgtgggcgatgagcttagtaaattgcgaaggggcgcctcagcgaggagaaaatttttggcatgcttcgcatgatctattgactcggttggccatgcatattattgcgagccaatagaatccctaacgaattaccttagctgcaagggccctgggtcttgagtgtgacccgcaggctccgccgtggacttcgcggaggatctccaggccttcagttttagttatgcattttagcattggctggctgataccctttttgtaaagctggccctcgactattgcgaagtccttgctcctgtgttccagcctcttggcctcgttgcgatcggatggatggtaatggccctggaggtacaatgttattgtggctcgcctgtcttcggccattatgaggttgacgatccggtggccattggcgtcttgcgttatttgtaagccttcaggattatggacggctggtgtgccgatgacatggtagaatacgtcggagggcaaggcctcgcctttggctgctgctttggccaatgcatcggcctcttcgtttttgtttcgctcaacgtgctgtagggtgaagcccttgaactgctttt

SEQ ID NO: 60786 - DNA, 595 bp, Zea Mays
cgcggttccctagtgtctgttctcgtcggcatcaagggcatcatgttgtaaatttaataaaaggggtgggcctcggtgcaaatgtccataacacaaggaatagtagcatggtccctgcgaaattatttttgagcctagagtgtttatcgagaagtagagacggcggtcgtagggctcgagggtgcggttttctggtgagcagtgggccgctaggatggatttcagcccattactgctccatggttctcttttaagcattaactgataacttggttgggttgtgacaattaaaccctaacctctggttgggagactgccagcgtgccacacgggaagagaggaccacgatgattttataatctgcaacctgcccctgtacttggtctggctgtatccagaactaggccgaccgtgaggaaatcttcgtgggaaattttcgaaggcacctacgttcaccaaggcaacccgtgggacctcaagagttgccgacagaagtctgacgaaaccttgagagactacatctgactttctcacgacagtgcaacgagctgactaacctcgtcgatgctgacgttatcagtgcattcatttcagg

SEQ ID NO: 60787 - DNA, 351 bp, Zea Mays
ttgtatgctaaattgtccaaatgtgaattctggctgaaggagataaaatttctgggtcacaccatctctcaggatggggtatcagttgatcctgagaaggtacaagaagtaatggattggaaacctcctaccacagtacgacagattcagagttttctgggattggcagggtattatcggcgattcattccggatttctccaggattgccaagcccatgactgaattgttaaagaagggagtcaagtatgaatggagccagaaatgtgaggatgcctttcatatactaaggcagcatttaacaacagcacccgtgctaactcaacctgacaacaccaaacccctcagccaa

SEQ ID NO: 60788 - DNA, 463 bp, Zea Mays
gtaatttggacataattgcaaaaagacccaagaaaccctaagtggctaaccctgaatttcagtgagattaggccaactttggagctctgtatctatgaattcataagaactttgctaggagaacggtggtttttcaggtctgacatggttaaagagacggatgaaaaagttcaatggataaggcacaacttgaaagaggcacaagctcgacaaaaaaattatgcggataaacgacaccaacctttagtctttcaagtcaatgatcatgtatacctgaaagtatcaccgatgaagggtgttaaccgattcgaggtaaaaggaaaattggcaccccggtatattggctcgttttctattcttgaacgatacggaccagtagtatacagacttcaactgcctgagtcattatctacggtacataacgtgttccatgtatctcagttaaagaagtgccttcggattc

SEQ ID NO: 60789 - DNA, 759 bp, Zea Mays
tgaaatacctcaggacgaatgtattggccagcttcgacaggaatgcaataagtgcatagccaagctgctataaatgcagcacggtaaaccgttgaaggatatatagatcggtaagataatgtctcggcaccaagaatggctgcaagacggtcaccttgaaccgcgacatggaaacgaagcttctgaagtaacggatctttggggtcagcaaagccatccaataaagaactgccaaaagaatcagctttatcatcaaaaaagtggtctaaccaagcggtaagactcactaatcctgggcctggctgcagctctgatgggcataagttagcataaatagcataaagagtctccaagtgaccatggacgtcagagcaaggaggaatgaattcttcataaagacgacctgagatagggatccccatcgcatcagagatggtatgtagtggataccccatctccccttgactggtaaccaatgtatgtccatcaacattccaatatgtcaagaaggcagctaccaatgatgggtcagcttgaaaacaataaagtgaagctagcacaccgcgatagatattagatttttgtagcatacttcggtcttcgtggttcaccagcatcatacgggcccatattaacatcttccgacatacaggcacatccaatcgaagctgcggccgacagtcgttgaaccaccttgatgagggatgcttgaccattttttgggctagtgtggaggtcgagctaggaatgtcgagtgac

SEQ ID NO: 60790 - DNA, 739 bp, Zea Mays
acctcctaggaatgcctagccttgctggctcatagaattgcacaaattcttcaaagttgtcctcagtatacaaatcaatcccagatgagattgtatcatagtccaaactgttagcagtagcaaactcaggaaaggttgcagaatacctcttaaagccagttatccaagtgattgactgctcatcaatgtcaatctcagcagttgccaggaactgtttcacagccatctcactgaagtctgtcttctggcacataaagtcatagagaccacatgcctcgaactttggaatcaatccctccatgactgactgacccgacataaatgtccaatcaataacttgatgcttgtgaaagtttctgtccattagggttccccagaagacatcaaattgaagctgagtgtgaaaaaactgaatgtttgtgttagaggcagatcatactgattaattgtcctcctggagcagtactcagccatagagaatcttctctttggataggtccatccagtgacatcaattggataatctggatgagcatgtggagcatcttctgtgtccatagaaatgttgcccccagctgatgattgggcctctgagtctatagctggattataatctgcatcatctgcacgacgacgctttgacttaaaacgacctgcaagcttcttcttaataccacctagaccactgcaatatatatgaggaatatccactgcttaatagttgataatgacacaacac

SEQ ID NO: 60791 - DNA, 463 bp, Zea Mays
gaaaggttggggtaacaagtacaaccaaaaacacgaagatcattcatcggtggggagccagggaaggtgatgcgtggggtttagtaatttagtgcctgtaggaaggatgttaagaaggttggtgactgtatgcagggtttcagcccagtaatgaggagcaaataatgttgttgatagatcggatgatgcgtttagccttgccattttgagtcgaagtgtaggggcatgacatgcttgagttgggcaccatgtgtaaggaagaaggcgcgggcgctagattctatcaagctcgtggctattgtcgcacactcgcactagatggccttaacggaggcactgaactaagtggagacataagaaaaaaaatagagtagggaacgtgtccgacttgagtagcagtggaaaaatccaaaaaaaatatgaacaaccatcacaaataaccaaatagtatttgtaactggag

SEQ ID NO: 60792 - DNA, 302 bp, Zea Mays
tggagtagaagttgttttaactgattaagtagcctataacttaaggcactgtttggaacataaaatctcggagaaaatgtttaaggttttgaacctgaaaggaatccttaatgtggtcctgaaatcgtaaaacaaatctttagaaacgtatagtactaattaggcaattctcaatcaattgtttcttgtcacaatatctaaagttgccacatcatacaatactattgtcccagtgtatagtatcatatgttattttgtagtttccacaaggcaatgaatgatagatgtgtataagagtatta

SEQ ID NO: 60793 - DNA, 315 bp, Zea Mays
agtagttcgcattcttttcatgacaagaagaaccatgcttatttgtatgctcatgttaagaatacctctaatgttgctcatcatgatggttgttatggtcatgctgctttacctatacctcatgatgttgtctttgattctcatgccatgtttacatcgtctagctcttcatatgttcatggtaggagtagacctaggtgccatgttgatcatgttgtttctcatgcgcctagaaatgcatctaatagcccaactatgctttatcgtacttatgatgccgcatatgtgctaaattgtaaaaatgataaagttgtt

SEQ ID NO: 60794 - DNA, 461 bp, Zea Mays
ccctttctattggcttgcatgaactacctccaattctcttgtctaatggttggttgtgtgaatctagaattgaatgttgttctaccaccccttttgtagttcaaaaaggtgatagtgttacatgtataaccttttggtggccctcacttgtcatagtgccaatttgcatgtcaaatcaaaggatattcatggtgtatcttaccaaggcgtgtttccatataattatactatttcctcttatgtattaacgcttctagtacttctcacaaaagtcgtgacccttcgtattgtcctattctattgaggtggctcctctcaatctttccacaagcaagagttcaagccctcatgctgcgatatattctagtctatctatgtgtggcagccttgcgcctgccgcgtaggtcagggtggtggtgtgtgcgtatctctgcatttaatgcatagttgtcatgatcaac

SEQ ID NO: 60795 - DNA, 541 bp, Zea Mays
gccttatttacagtttagcttttagttcctaattagtttaagactaagaagtttcctattaattagaaagtgattatgaaagcatgggtatcttctatgcctagccacttttttaggcaatatgagatttgttagagcaaggatagttgatggtaagaagtactgggtaaggaaagacttcatcctggtgggtggatcatgactactttcgtgatccagttgactcttttatcctttgctgatgaggttaatatctttccatcttgggtcttggtgtctccatccgagttaggaacatgtagttaagatagctggggtacatgggtaggtcaaaatcttgtttatgaggttagaatagatggattatgtaacatattaggagtgcatggccgagttggtctagggcactaatttaggatttagtgaattaggagtatggccttatcctttgtaccagcattaagtaactcacgctagattagatcatattatattagataggatctagattagattggatatgactagattagactagata

SEQ ID NO: 60796 - DNA, 470 bp, Zea Mays
taacttctattctgaaaaagagtatggttactagaccaaatattatatatttttacaaccatgtgtcacatattactccattactcatgttttgtttaaacaaataactatgcatacctgctcaccacacataaaattaatcactcctcttatcaacggtcatccatcattattgctacaatacgcatggtcatcagatttcctatgtaattaccatactttaacctctatgtacatgtaaatatgtgcttccaataggtgctcaagtacatacgatcgataccatgttgttatgcataagtacatttacacacacatactctatactgattgacatctattgatccccctactattctcttgaacctacacacaatttttaaatgtatcttatattaagatatccttagcgtttgcgttcttcatcaacgtacaaactacaaatctaatttcattcttacttcattttc

SEQ ID NO: 60797 - DNA, 678 bp, Zea Mays
aagtcggatattgaaagtccctaaagactgacaagagccgacagagctggagtagggatgtcgctgctcccctcacttcctctataatgccgactgttcttacggatcagcaggacttcttcctcttcatcatcatcaagcatacatccaacaatctgtgcacccttggcgtcagcttctggaacggcctctgttgggacatcatcaggaactggcacagaagggccagcatcctgacccaagcacaatagtcgccggagccgccttttcttcttcttctcctcgataggtgcaattgagcatctcgctcggcgcgcacgctttgggtgagcaccctcaggtttccaattttccacctcttcaccaaactcctccccagttgtgatagccattggctcggtgcgggtagagttggatgattcccccaccagcaggctaagcacaacatctatctcagcgtcatcagtgctagctggcatctcgaagtgagtctgcctctcatcttcgggaatgttctgaattgaagtaatcgaggcttcgatatctgctggagagggtcgcactctaagacccaggctaccatcacgagcaggaggattggacacaaactcagaaaatgacctgcttggtggcaagttccaagcagaataggccacaggaacaccgacatttgaaatt

SEQ ID NO: 60798 - DNA, 887 bp, Zea Mays
ccatatgcctaagtctaaaatcagttgaatagggctaactttggagctttgtatttttaaaaatacaaggaatttgcctagggtcaacacataacacttgtagagctataacaggagtgcaactttgcttaagtaactaagctttgatcacatacaaagtttggagaaaaatgagctcaaagttgtgctgtcaatcacactgataactgaattaaggtcaccagtgacattagcaagacttttgggtcaaattggagtaggatctagtgctcgattgaggatagttactatagtcaatttgtagctggttggttgagctactactttgttaaagatggattaataagtattcacatgaaaatttgagatctaggctctgcaaagtggtctgttaggatgactgaatgagaaactgatggtacaatatcgaaatatctcaggttcagttcatctcgccgccggcgaccacacgctcggattcgcgccagacgctacgattcgtgctcaacggagtactgatagttgctcgaggtagtaaatatcaccgtgtggatgaacttgagccactgtttcactctgccgccgtgtccgcctgacttacagccgattcggatgaactcaccggagttagccacctatcgaccatgtgccatgtgccttggtgtcttaccacgttgcagtagctcgtattacacacatccagtgatcgccaatgagctcgccacggtgaaagccaccaatctcttgcgacagtgctctcctctctctccgaccgccaccacgccatctcaaattcacgggccaccgctcggggatcctataaattgagcatgtcatcggttccgcaaggtagtcaagcaaccaatacaccaactcgtgcctcaaat

SEQ ID NO: 60799 - DNA, 588 bp, Zea Mays
attccacacgctggggatttgttcacaaagtaattaccaacactttattgtggaaccacaaggtccaacataggcaatatgcttggccaaagtagacttaagatatcggatgggtcgatgctacaaacatggcacaagagggggtccaaggtatagtccttctggtgccaagggaggtgtagtggctttatttgctgttttggtagcaaccccttggaatgaaggtctatactgacacactagatggaaccctatagtggactaaaaacattcagatgactctgtaagaaattaccttgtagtaaaagtacttggcgcaaatctaggaagtgtgtgatagtcggtacaacacacacaaagtggaaatctcgtcttttaagtaaagttggcaaacctctcgagagatgttataatctgatatcagccagggtcatggttaagagcaacttgggaatcctcataagttagagttttacataacaaggtttgagttctgataggtttttgatcatctttactttatgttcatagcaatttggggaggttatgctttcaccttaataatgaagatgaaaacatggtcaacta

SEQ ID NO: 60800 - DNA, 504 bp, Zea Mays
agaagacactgttccccttcctgaaggtgatgaagtggtggtcttcaggagcttcatgaaagctgggcttcgctttccagttaacaaaatgttggtcaaagttttgaagacattcaagatataccttcatcagcttacccccgaagctcttatcagagtgggggttttatatgggccatgaggagtcagggactggagccggatgcaagatgcttctgcaacgttcatgagctatcttactagacgaaggcaaccagaaaagaacaatatcataacaacttcgactgctacagcttcgtgcctcgctctgaggcaaaataccatgtgcctacatttcagaagaagtggccaggttcttggatgaaggaatggttttacctgaagaatgacctaaattagagggatgatgtaagaggcattatccaacgtcatatatggtcacgtttcggcattagaaggccatccaccgcacttgggaatgaagtgcaggcgtgccaaattgct

SEQ ID NO: 60801 - DNA, 931 bp, Zea Mays
cccaataactaatatatggtaaccataattttcaacaactagaaggaagaaagttaaggcacatgatatgcacctgatggcctgaacatctatattctgcagtacttttaaaagagctaatctagcagatggctctgctttgctccaggtgtctgtaggtgtctgctaggtgctactaaacatttgtacttttttgtggacggtgagcagtgccatgctaaataatggaaattcagaaaatctgaaaaaatgatatcaccatgcttgagtaattgtttgtagttcgtctttctccatctctgactgcccattttcacacatatcaatctcaaatatctctaccttgaaaatagctaggacaaaatgccttggtgctagcaactcctagcgcctattgccaccttttaaacagagatattcactgttttcaggtcgggtgactagctgggcgttccagaggtccgaccaggcgcctaatcacgattagggcgacgattttggcgcctaatcggtcttggtcgacctttggttgtctcctaatcgtcctagatatttctggatgtatgtataattatgtatatataagcaatactacaatagacattatataaatctggaagtctgaaattggaacttagtaacaaactgaaaggcaatatagacatatagcagtagcattgtagcactatagcagaactgaaagtctgaaactgaaattttgaatacaatgctacaagcagtcaagcagtaatgcagtacctgctaaatagagcagatcatcatccaagcatcagcatcagcttctcctccagcagattcagattcatcttggtccatatctcgagttgtttctggtggttgttgccgttctgctgtagcaggaccatcttcttgagcatcactgtcatcttctccaatatcttgagctgct

SEQ ID NO: 60802 - DNA, 599 bp, Zea Mays
aaacacttaatctaacaatggcattaggggtcagttgatgaaggtaaaccccaaatttcttcaaaacataagcaatcatcccattcaaaggaaatcttaatcctgctttaaaaaagcttttgaacactaccacctcgttcttttccgccttcggagtagtttcctctccgccgaaacgaaccagctccttttttgcttcgctgaagtagcccagcttcatcatttttgaaaggtcagcttcagagatggtggactttccaaagttcaaatgactaggtttagttggtaccccgcagctgaattcttccttagaaccaacttcctcaacatcagcttgtgctgcttcggcagcaggtgtctcctctgctgtaactagcccggagcgcttcatcgcttcagaaattggaacagtttcatcagcttcggcctcatctccttcatgctcaactctagcagtagagcgcactctggccatttgattttcaatttcttaaaaattccttgcaaattaataaccttttttcccgaagctcttcttctgacgaagcagaaactaagttggagcttcgtttgaatgtgaaagtcaagcttcggctatg

SEQ ID NO: 60803 - DNA, 470 bp, Zea Mays
gttgcaaagtgcctgctaccttcaaatgactggccttgactctctggcaggtgtcgcattcagatatatacttagcaatttctctcttcattctggtccaccagtataaagatctgagatcatgatacatcttgttactgccggggtgcatggaaaattttgaaaggtgagcttcatccaatatcttctttccgagctcagggttcttgggaacaaccaatcggtctccaaaccatagggttcctttgctgtcctgacggaagcatttgtatttgtccaccttttgttcgaccatttccctaatgacttgaacacccttgtctccaatctgtgccctgactatttgctcttgtaatgtgggctccactgaaatataatttaaagcaccggaggaaacaacttgtaggtttaatttgcacaactcatcacatagggtggtgactcttgcatccatgttcatacaattgcac

SEQ ID NO: 60804 - DNA, 539 bp, Zea Mays
gtccgccacggtgaaagccactaatcgctcgcaccagtgcaactctccttctccggccgccaccgtgccattccaaattcacacgccaccacccccggagcctataaattgagcgtgcttttgggtccgtaatgtagtcaagcacccaagccaccaagccgtgcctccaattgctcaccagtcaccagagctcgtcaatttcagatttcccccaaatcagccaaaataccgccgcgtgaacacctcgccatggccacccttctgcaggtcagttcaagctttcttaattggtgttctagctttcctcatgtcccctgaagctcaccgacccattcgattgaactagaccgccttaaattgcctagaacaccttggattatcctcggtttcagccgtcgtcgtgagcaggcgtgctccggtccggattagtgaaattagctaagggattagtgttggggagggttgaattaagtgacaaacaaaggagaagtctagccgttgcattttccggccggtatgggctcgccagagtcgctgct

SEQ ID NO: 60805 - DNA, 417 bp, Zea Mays
gtagattgctttgagcgtgttacaacacgtgtgcttgtgtgtaagaggaagaggggccttccctcttatatcttaagggacataccttatattgttatctattttagagagagagtaggggggaaggtcctttgtccatcatggtggccccccttctcctaatcgtacaaagtagtgcttcttggtatggcaccgcccattactcccgtccctgcggtgggttcgtggttgacgtccctgcggtaatgcgcggcgggtcccatggtttagccctagggctcgacgaacatggcatggtttcctcccatcatcgtgggacccacgttgtccttctgcgcatagggattcgtccattcggtattgcgccttgtcctatcgtttccgccataccagctactgtggaagctccagtgccga

SEQ ID NO: 60806 - DNA, 564 bp, Zea Mays
ctattcctataacctgtcctttcgcgtgctgggggctggacatgattaggccattcaaaaaaaagctcaaggaagatatactcacatactcgtcgccattgaaaagtttaaaaatggatagagtacaagcccatcgcctctttgacctcagcaaaagcggtggagttcattcaagaaataatgttcaggtttgggatacctaacagcatcatcacagacctgggatctaacttcactagctcagagttctttgatttctgcgagtagaggagcatctagatcaagtatgcatcagtggcacacccaagagctgatgggcaggtggaaagagccagcaggatgatgcttgatgcactcaggaaaaaggtgttcgacaagagcaaaaagcttgcaggaaaatggatcagagaactaccgtatgtggtctggagcctacaaacctagccaagccgggccttgcatggaaacaccctattcttcatggtatatggatcggaggtggtattaccagcggatttgatctttggagcacccaaactaacatttgaaagcatagctgaagca

SEQ ID NO: 60807 - DNA, 778 bp, Zea Mays
cgccgtgggagcttgcagatggaggatagggatccgtcgccaatggtttgtgccctcgtcatactcgattaatggtcggggcgcttccatttcctcgccggaattagagcttaaccgtggaattgcatggcgccgtttgggccgcactttctgcgccgccgccgtcagtgagacctccttcccttgcttcaccttgatcttcgcttagcttagcaaagataaacttcgtagtcgcgtgccgggctctcggattaatgtgctctggccatgctttcattgcgctggctctaggagagaagagcaaggtaggcgagaaagagagagaattgggggtggaacatgggctattggatttaagatgtaaggctaggatgcaatcgggcgtaactatggattggtgagctggttatttacttggtggagaagacgatccgtgtgccgtccgatccttatcatgtggatgcgattggcgaggaaggagtggttgctgtgtctgtagatcaaataatggacggacaagattgagttgttgtgtacccctttcgcccatttagatctggccgtagatcccagaatcaatggtcctaatagcgtaccggttcaatagggcttagatctaatccaaaccactcgctttagatcggacggccagaattgatgcatacccccttcgcggatgcaatttgctaaagagtccctggccaatgttaaaaccaacccgcagtcctggcgcatgcgctctgtgtcttaagaaatcttaccccgaggcccctgtgtt

SEQ ID NO: 60808 - DNA, 507 bp, Zea Mays
gaggaggttgagggttccgagcaccgcgcgagaggaggctgaggggagtgcaggagttcccagcaccatgggagtgcgcgacgtgtcaaagtcgtgctttaaaggagtagatatgcattggaaaggaaaatttataactgacaaggacaacgtaatggatgggatgggatcggatgaaatggaacagaaaatatcataattggttagcattcaagtcccacttgtctttgcttttatctgacaaagttaaaagttcacttcatttacagtgcaagtttcctaaatttcaatctgccgaatcgcatgttacggttcttcatactttactggcagaattgaaacaggattttcagcatctgcaggacttgcttccaaaagtttcaagctaactcgtattccctctggttggtaatacactgtgtcagactggaggcttgaacaagcagcaagcaatcctggcagttgccatggcgaagcacgagataagcgaaactaaaagattaaggg

SEQ ID NO: 60809 - DNA, 754 bp, Zea Mays
actggaggctagggtggagtgcttgttggttgaggtgaagagttgagggcttgcgaagaaggctgtccagcttgagggggggagaacatagacctcagccatcaacttggagatctgaaggcgatggaggctatgaggcggttggaggcgctggcttctcaggggcgtgtagccatgatggaggccgaggtgcactgaaggcagggtgagaagaggtggaggttgagactcgggttggggtgggctcgagctttattttgcaaggcctactacgatctaggtgttgagttggtgcccttcgatgaagcggaggaggggctcaacacccatttccttggttgtcgacgggagttgagtaacctacccacgatcgttgccgagttgatggcttactcatctcttgttacctgcgagggcgtcgtcaacactctctcgtgtgaagggtgcaaccattttgagagcttctagcgcagttactcggatttttaccgtgaggtgttctgagtcgaggacctatctctgaagatgtctgctggtgcgttgtttgatcggatgtggggttcgcatggatgctctgttgttcaggagagggccaagcgggcgatggagcaggttgttttgcgaggcatttttccctaaggttttaacttgtatgttttttgtgtgggatctaatgttttggttttttggctaggcactgaaggacgaggaggctagggacttcgaggactccgtcactacccaataggttgcg

SEQ ID NO: 60810 - DNA, 495 bp, Zea Mays
cgtgcttctcgatggggaggttcctccccttgcatggtgggctcatcgtcggagacgggcgctgactccaatctcccctagaagaagacgatgtcagggtagaaaggagccggcgcgacggtgttcttcttcccgtcctcccttgaaggaggaggtatcggaaaggtggctcgacgtgctctcatcccctgactcaggacgtttactttcatctttcgagtgatttgtgtccactccttagtaggcaaggtggacaacggagtttttcgggtatgcgaaaccccgaccagtcgatctttcttctctcgagggctcccagaccttcgtccgcgagggatcatcttcccccgagctgcaggcggtggcgctgtccgcagtcttgctctggttcctctcaggattcttgaggaaggctttttcttgggtggattagctacgcggtgcagaattccctcttcgtcggctatgcatgagatggttccaaaacggaacata

SEQ ID NO: 60811 - DNA, 272 bp, Zea Mays
ggggtgaccactatgccctactaacggagcaatcggcttaagtcggcaacgacttaagacggtgcgacatgctcacgcttacttaactcggggtgaccactatgccctactaacggagcaatcggcttaagtcggcaacgacttaaggcggtgtgacatgctcacgcttacttaactcggggtgaccactatgccctactaacagagcaattggcttaagtcggcaatgacttaaggcggtgcgacatgctcacgcttacttaactcggggt

SEQ ID NO: 60812 - DNA, 279 bp, Zea Mays
gttggatcctctgtagaaatcctcgatcactactgcctccgcgacctcggggatacgatttctcatggtctggaaccttttgaggtacgatcagagagtttcgtccacccggcgattgatggatttgacgtcccatggttgcgccggtttgtcggagagggactgaaagttggtggtgaagcatcgacagaagtcgccccagtcgtcgatgcagtgtcggggtagatgtcttagccattgcagcgcgtcttgcccgaggacaatgggtaagtatgcaat

SEQ ID NO: 60813 - DNA, 749 bp, Zea Mays
accactccacagctgcaaataattttagcagctcaactactggcttccaccgattgtacaaccgtcccaagttttgtcgcatcaacgagaaataaggtctgttatccagttgatgacataacaaggccagtgaggtgcacactagttataagatatggtattaacaataatcacatgaagaaattaggaacagacgttgcgatcccaggacgtaagtttcatggaagcgacatactagatgattattgtagggtagaagtgacggcggtcgtttaaggatccgaggacgacatggtagacatccctgggcccgaaggaatcgagacacttggacaagccatcaaaaatttcatcttttggcctcgaagggatgtcgaattggttgatccaccaacgtcgtcgttgtctcatccccaaccatctctgcctcctcaaactttagtacctgtacatccatcatcacctccacaatcttcacatgttgctcctcatcctttttctaacccaccgtctccgccacaagcatcaacatttaggacaccaccaccttctccacagcaatcaagggattcacgacaatcaaagaaatataaattccttgtaccaaaattgttgtccacattcgagaaaaagaagagtaaagctactactgctggcacagctcgatttttgaaaggaattgcacgggacctcacgtcacatactgttgatttggccgagcacgaggagtctgcagaaaaggctaaggc

SEQ ID NO: 60814 - DNA, 895 bp, Zea Mays
ccgtcgtgtcccgccgcggtcagtcgcgctggcatcaccggagctcaccgttctccggccatgccacgttcttaagaacgttaccatgtcgcagtgaatcgtaagagagagtctgtccatcgccggaggctttgcctcagtgaaagccacgttagcgctcgccggtaatttccccctctctccggctgcccgcgtgtcttccccaaattggatgccaccgctgttgatctctataaattgagcgctcagtgtgctccgttaggttgttacgcgcctagtgcaccagccctcgcttccgattagccaccgtagcgccccaatttgcgtttgcccccaattccgttttccgcgtcgtcttgaacatctcgctgtggccagccatctgcaggttagttcaagcttctctgcttgatgttttagcctcccttaagtctcatgttgctcgtagacccgtttgattgagctagactaccctgaatcaccaagaacacctcgatttcccctcgggtttcaccgtcgtcgtgggcagaaaggctccgggccaaatttgtgaaattgagggtcagattagagtcgccaggggtgggaataggtgtcgaccaagttagggcatcagtcgcagcgtatctcggccgatacaggctcaccggagagtgtgctcgccgccgttcaccgtcgtggacttggcgtagtaaagaaacagaaatacaggagcctaagtgagaatgtcagtgagacatgaatagtggctatggattctttactagttattcgaacaaccagggtcctccgtgcaaagtcgccagcgcgggcacgcgtgcgggcgcgtctttttcgtccgtgggctggtttgagcccactactatttaatccttttccttttctttttctgcca

SEQ ID NO: 60815 - DNA, 742 bp, Zea Mays
actcttttgcataaagctggtggaagaaatagctcaactctgaaagcgctagccagacatgcttagggacatagcctcgaaccatcgcaggaagaatccgttcaatccatatgtggaagtcatgactcttcatccctaagactcacagagtagataagttcaccccctactcaggttagctgcatacccatcagggaacatcaacatcttgatccactgaagtacttccttcctctgggccctacttaggacaaaatcggccttaggccttctccatgtctttccaccactaggcggcttcatctcttggtttggtctatcacataacgctgtcagatccactcttgcctttacgttatcctttgacttatcaggaatgtccataattgttgcctaaagtgccttggcaacattcttttaagtgtgtatcacgtcaatgttgtgtggaaggagtaggtcatcataataggggagccgagtcaagcctgacttatgtgtccacatatgctactcaccatatcccacaaaactaccttctgtattgtgcacgagcccatctatctgttgacgaatttcggcaccagtcatcgttgcaggtgggcaatctgtcactacgaccccttttgtaaagttcttaatgtctaggaagaatgaatggtcaggagggagaaattgtcgatgtttatcgaaggacgaatatttgccaccctttttcaaccaaatgaacctaagagcttccttg

SEQ ID NO: 60816 - DNA, 614 bp, Zea Mays
ccacggtacttaccatgcttgttttggaaaatgtctcctcgaaaaacggcgcatcctctgcaacctgcagttccttgagagatttgagctgcttaacaaaattggcgcatacggtgttggcatctgcggtgttggaacggagtatccccaggagatggctgtggctgatgcacaaggcctgcgtgagcctcctgctacggacggagaacggctgcgggacgcccagaatgacgcccatttcccctgccatgccatgcggccctatcttcatcacaagctgaaagagggcagcaaacacagctgatcaaaaaagaatcaagaacgccactgcaatttgacgttattgtgtggtgtttgaatggcttgccttctctgttccatcgtcagctgttgtcaacacgtcctgaagcaacaagcaagcagcaggatcggcatgaagagtgttggagcaaggatatataaggttgtagagagaagacagtgcagtgcttaccgctgagccggagacgatgatgtagcaggccgtggaggtcaccttctggaggatgatgtccgcctggggtgggaaatactctgccctcatctctgaaaccagccgcacgacgaggtcgtcg

SEQ ID NO: 60817 - DNA, 499 bp, Zea Mays
ctgactgcagaggctgtcgttgccgattttgttttcaagaatattcagccactaaaagacagagcatacccagcttatatgtatcgaggcctcgctgattcaacccgggttaccaacagaaggattcctgttgtggatttggtgagccggctcgagatgatactcagaggtaaggtgtcgaatatcggtgctcctgttgcatactcagcctggaatctacctctttccaaggcctttatcagttttgtgtcaaatcctcctgctggtgatagcggtttgggccttagagtgcgaccttctcccgaagaggttgatgctttggttgcctcacttggtgaaatccctgacgacgagaaacaagttcatttcgaggtacctttgaatccaagtgacgcagagataagtgccatgctggacatgttggctgaagattcctctgatgcagcccctgctgaaacactggctgtagcacccatcccagagtctggcaaagctttag

SEQ ID NO: 60818 - DNA, 449 bp, Zea Mays
tcatacatccaatcacgtctatcacccattattgtgactgtgtgtacgagtaaagagtgcgtgtgagacattcatgtttctacacgtcacacatacatctataggtaagtagtaaaactatatatatatatatatacataacatcaccttcaacacaataacatgatattcattaattaacaataatgcaacatccaaatttaagtaaaacaatatttgcaacattttcagaacatcaaatttgcaacaaataacaatattaaataaagtgtaatcgcattacagttaactcctgtcggccataaaaaccgacgaaaataatcaatatttgcaacattaaatccattaaattaaataatattttcagaacatcaaatttattaacaataacatcaaatttatcaatatcgaaaccttcatacatcctaatattataagttaaatctaat

SEQ ID NO: 60819 - DNA, 441 bp, Zea Mays
aaaggttcagttttagtacgtgatcctgagcctgaatgcttactgcattcattataatttcctggcattctttttggtacttgaaatctccccctaatgcctggaaaagctcatgattcaagcaagcgtacgggccgtaaatagattctcatgaagagattctaaaacttaatgatcgacggagaatgaattctcacatagatccccagctttctgtgtgcccatacatgtacgctgtggtggtgagattgggaaaacatacccaatgtacgcatgggaaatctttcatggattcccacgtactaaaaaccataggggaatttgtacatatagtacatgcagttcatcacaagtcaggagcatgcaaaacttcctgacgccaaccataactagttggaagtgacaattcattattgatggtcattaatgatctgaaatttt

SEQ ID NO: 60820 - DNA, 644 bp, Zea Mays
cagaaatctcgtcctcgagatttgtaagaaaagggatatagaaggattggtttgtagtttgtttttttataattgcttcaaaaacccatagtctcgttctttttttagtcattagtgggtaattaggagtgcataggtatccagctacttattatgtaggatataagagatggataggttagggcaagaatagcctagggtaagcaagtttatgatgggaaaaaatcccatgttaagtggtaatgcatctgtagattgtgtttgacttctctccttccttgatttgatgaggtcgatcatcttcgatcttcgttcttgaagtctttatccgaattagggacatgtagttaggataacttgtaggtaaggatagatggttaacaggttggtggcttaagataagtgtattatggcaacatctaggatgggatggatggtcaccatgaatatgctggtaggttatttgttcatgggtggtttggtctgatgtactaatttaagttaaaacatggtcaaagggtctaatctatttcactagtatttaactattcctgttaagtgacttaccttagattagctcaacttaaggttagactacgttaggttagattaacctattaggttggatcagatctagaataaat

SEQ ID NO: 60821 - DNA, 562 bp, Zea Mays
tcttgctactccaaccttgaagggctttagctgtccctttgagttttaaatcaaaagtggaaaatggacattggccaataggaacaaaactccaagcattctgcaccacttcaagaaacccttcaatctttgtccataaggattcaaaatgaaaacgccttttaacacctttgttatctctgaaacccaataataaaggacagtgaccagaatcttcagaagctgcactttgtaacccatgtagtggaattcctcctagtcaatagagcacaacactctatcaagcttgacaagagtaggctgattctgctgattagaccaagtaaacttgcaccaatgtagtggaatctctttaagagctagatcatctaccaattttgtgaatcgacccatcatagcccgattaatatgcgagttgtttttatcctcggcctgcaatatgagattgaaattcccaggaatcatccaaggaccctgacaggctgctctaatttgtctcagctcttgcagaaactgaatcttggcttcattagattgaggtccatacctctgtttacaaatc

SEQ ID NO: 60822 - DNA, 661 bp, Zea Mays
caaaattcatgagtccttggtcacggacagttcggcttctaaggccggatggtccggtctttcacaaaacagttcggtctttaagaccgaacatctactacagcgtaaagacagtattacagatgatctagcccccgagatcagagagtccgccatcacataaagatcatctgattcctctgtgggggacatgatagaggaattcagagatctcgataaactaggacaggggtttacatcggctgatcctttggaggagatcgacataggaaatggtaaaactccaaggtcgacttttgtaaacaagaccctagagaccgatcctagaaatgaaatgatcggtctattgaaggaatattcggattgctttgcttggaattacactgagatgccgggattaagccgagagatcgtagagcatcgactgcccattaagtccggtttcagacctttcaagcaaagagctagaacatttcgtccagatcttctcccacggatcaaggacgaaatccaccggctgcttgaagctaattttattagaccttgcagatacgcagagtgggtctccaatattgtgccggtggagaaggagtcaggtaagcttagagtatgcattgattttcacaatttaaatagagcaactcctaaagatgagtatccc

SEQ ID NO: 60823 - DNA, 643 bp, Zea Mays
gtcagccttcccagaactccagttttctctcgagcagaacaggtactcctttacaatcacacccacgctcgttgggcaatcacaccggtcaccgtttgccacctgcagtgctggtaagaacgttgtaagagcggggtaagatgcttcataatttgtattccaccaccaccaccaccaccctgagagatagttgtagggttcacattgtttgttgcctttttgtctctgttttgtgctaacaatgacaggaccaaagaatcaaatggacaaggacaaggggcctaaacttaacgacgatgagtgtgtctctcagatggaattgaaggagatgatgcgcgcgatgactgaagcttttaaaaaataccaggactctgcctcgacatcctatgagcagcttgatcgacgagttgatgaacttgttacacgcatggacgtactggaggctcgtcccccaccaccaactctagccccatctcactctcctgtggacaacgacgatgacgatgatgtttatgcaccgctgccacaacgcttcgcacgtaatcgacaaggtatgggaggtaatggtagacgtcgtcattataatcctcaaccagaccatgatccacttgctaagattaagttctctattccaccgttcatg

SEQ ID NO: 60824 - DNA, 800 bp, Zea Mays
ctataactttgatgcagatgggtgatgagggtgtcacatagattttagagaaaatctgccttgattgtgctctgtgaggtgctttaaacagaggttccaatggtacaatgactgaacaagatcacaagttcagccccctcgccgccggtgaccctttgcgccgtgatttgcgctattgtcgtgatttgtgctctctcgtgaggggataatcacggcggagtaaagatcttggcaccagataggctcgggctcggtcgcggatgagtttcaccgtacccacttgctcgtcgatcagccgggatagacctcaccgccgttggccacttaccatggtcctcgttcgctgcaggctgggaccctgccgccctcgtctccgcatacaacaccatggcgttggctccaccaccctctgactgggtcatcgactccggtgcatcccatcacaccactcccaccacatgcatgtcatctcgctcacagccacctccccacacacatcctacctcgattgtcattggcaacggttccactctatcattcacctcagtaggttcctcggtactccttggaccgttctacctcaacgacgtcctcctagccccacatatcactcacaatctcctttctgtctgtccgttcaccaccgacattccttattccattgagtttgaccctaccggtttttctgtgaaggatctagccaccaggacccctctcacccgatgtgacagggtcgggcccctctacacactccggtcgtcgtccaccggtgcgtctccacctcctgtcctggtctccac

SEQ ID NO: 60825 - DNA, 644 bp, Zea Mays
caacatcttatagatcagtagatcaccgaggaggtcgagtccgtcgtcgatggacctctgaaaatttgtgcctccactactccattgcaagttgtcctcgccccaagccgttgattttgctgcccccttctagccacaacacgttgttgaaacctcgcgcaagcaactctttcttgcccctaccagacaggagtacttgaccatggtggttgcattgctgctcttcatgccgctacaaagaagggagaattgggctttgaaatgttttttaattcacgtttcctaaaagccaatagagaagggagggcaatttctaggagaacaagttctttactacatgaacataccttcaatccgccaacgcatctaatctacacgtcgccgccacagcccttccatctgccgccgccacccttcatgcccctgccacaaccctcatatacgccgccaccacagccgaccttcacgaccccataaccgtgcccttcacgttgtcgccgatgtagcccttcaagccaccaccgtcactgtctttttcatgtcgctaccgtagccacccttcacgctgctgccgctgccgccacacccgcccttcaagtcactgtctccactgttggtcacgactttgttgccctagtgcaaat

SEQ ID NO: 60826 - DNA, 1081 bp, Zea Mays
gaaagcacacacagtgggagggtgacttttggtgtagaatgtagtcatgtagatatccgagatcctttaatttgaaagtaatagcacggtgaaagaactagcatttgcttaaagataacttttttttgctctcaaaagttatcttctctcctcccaaatatgtagacatgcatgtagtgttgtttcttatagaccaaacttcctttaatttttttcatcatcagtatttccatccttgaacgaattaaatcaaataataagtcggtttttaaacgttctgaccgaattttgccatggccggcgagtatgttggcatgttgcttgtatacgtttcatcatatatatgccgtgtctactggcgagtccaaaacggtagtatgtaggtgcgcgtgcgagtagccgtttacttcacatgtcacttgtttggatgccgagatgcagacgcacaggcccgttcgcgcctgcacggcagcatatcggtcttttccaagtctctgcggatgcagccaacgttctccaaaacaatctatcttgcacccgcgcgtgcattttctagctccattacgcaggtaaccaaacggacgcacttgctcagtcatggtctggacacgtacatctgggcaaccaaacacacggatgctgaaccgtgcagtgtaggctgcctgtacgtatatatgatgcatttgtatatatcacgtactccgtacaggacaggcgtattgcaccatacgtacacgtacgtatggccgatggttccgttgaccgagatgcatgcattggttgtttaatttggaacattattggagtttgaactttgaagaggcgccgtgtcagtggctgtctcctcatcaacgcaatgctcgcagaataggcagaaagatgcacagtaaacctactactacctgagtacctgctacctctaaagtttgttcaggttttccgttttattcctgcgggctgcggtttgtgagtgccgagcatgcatgtatgtgcactcatcaagttgccgtatatatgttggagctgaaaaacaactccttgcttgttgatcgagctggtatgcgtcaaatagctgtagttt

SEQ ID NO: 60827 - DNA, 766 bp, Zea Mays
accaaatcaaactaatttaagaaaacctgttcactattatatggtctttcacttttctatagaaactataatctataactccatagatcacctacaagagagctccaaagttgagcgaaactcactgaaattcagtttcaggtaactaaaccaactctgaaattaaaatctgacaacatgtattttggcaccatttcctcctagttccaagcagctttaggggcgtgactcttactaaagattactcctccaacattgatctccatgtttgccatagaaatcatagtctaaagacacatggattgatcaccaaggagcgccaaacttggcactttttactgaaattcagatttcagtactgacaaattcagctagtgcaactctgacaatccactttttggcaaattttactctatcctttatgtgagatcaagcccaactttcttaaagaaatttcttccccatcatattgtcgacaactcccctatagaaaccatagttcaaaaccttatggattatgcacaaggaagctccaaattcagtcacaatacactgaaattcagacaggctactgttcacaaacctgaaaatttagaaacctgcgagacccattttaagtcaccttttctgccagttgcatatggttttaggggcatcccacataataaagtttgttttcctatagtcatactacgagtttgccatagtgaccacaatctataactttatggataggacagtagagagctccaaatttgagccaaac

SEQ ID NO: 60828 - DNA, 666 bp, Zea Mays
tccaagatccgtgtcttcatggccgaagctcaagaacattctcctcactagctttcaaggcttccaaataaatcccataactgctcaggtaccattttagtgtccaagaacaagatgaatatctacaggcgtatgtccaaaaatttctttggcttcgggctcaggcaccaagtgtgccggataacattatcatagaagcaatgatcaaggggcttcatctgggtccagcagctcagtacttttccatgaaacctcccaactctctagagaaactgctataaaaattggatgagtacatcagagcaaacaatggtttttgccagcgcagtcaagaggcacaaaaatatgtagaggccgctaggggcttcggagagagatttcatcccagacatgtccgaagcatctagaatccaaaccaaaacaaagacaaatctagccaatgtcaaggatagcaaaatcatcttcaagactcatccgagacatcagggacacaacaacaacattcacaaagcaactttcgaccactagctccaagaggaggaagagggggttcgaagctttggaggaagatttaatcacaattcacaaccaaggaacttgtattgtgttttctgtggagagaacaagggtcacaacacgaagacttgccaaataaccatacaaaag

SEQ ID NO: 60829 - DNA, 642 bp, Zea Mays
gcagcttcatttagtagcctgttaacagcttcgtcaacgactttgttaggtattctaattacatcaagtgccccctttagagatggatcgacttcagggtcatatgtctgcggagggggatagagttcagctgcaccatagtacaagtgtatgttagttccgaagctaaaataatttacgaagctaggtcatgaaagatatacctataagtcttgcacgttctataacttcttcaattttcctggcctcttccaaggcagcatgagactctttctcattttttctggtagcttcgttagctacctcttggcctcccctcaaccagactttgaaatacaactttccacttagcacagcggcttctactaaaggattcttaatgtcattggctgagatagagaatcctggcagaaccatagcctttgcatgcacccagccaaccttctcaattagtgacacagctccgcgggcatcggcgaaggcgcagaagtctcccctatcactgagaatctcctaaaaagcttcggcttcgccgctgatccaccgaataactccatcaagatcgccacaaattaaattttgctctgtagagaacacaccaactttggcaaaattatctttcaattaattacaacattccat

SEQ ID NO: 60830 - DNA, 947 bp, Zea Mays
attttatcttcctgctccatggatttgacctacagttttcagataatacattttatctaacccacccacacggttcctatctgccctgacatgacgacatccaaattgagcagtcaggcttgcagtttaggacctcctttgcgaaagcagggaggtccgacagcctgggggctggttccaaagaacgggaactcgttccatggaatggtccggagcagtgtagccgcttagcctggtcccgtaccgtaagcctgcatagcccaccattttgtgatgggtaccttagtatttagaactatagttctgtgggtccaacaaactggggtctggctcaggaaaatgggaacttgtctcctggggtggtccagagccgtatagtcgcttagtctggttccgtacgtaagcctacacgctccaccaccctgcgacgggagtcctagtatctagagccgcgacccaagggggtccggacacgcaacttggccacccggactaaaccctgcgagtcccgagcatgtatcaaaggatggctaatatcagacaggggaccctatgggtgtactactaacgctccctagccgaagctgtatacagatccagatcccggcgaggctgcctcccgagagttgttgacaactctttcagatacgctggtatccaacctcgacacatcaagcctgcatcccaggcggggggccaggtaccagggaggagtcaacaacataacatcacacacagcaggaacacgcggtacacataagtgctaacactgcttgataaatagtgctcaaaagtaccttacaaaaagcaaaaatattatattgccttaaagcgaaaccctagttccatctctactctgtaggtataaactaccctgcgccagcagagtcgcgctggaagttcgcggccgctgtccttgcataatcctctaggacggcgtaacaacg

SEQ ID NO: 60831 - DNA, 1049 bp, Zea Mays
catgttccaagatcatttgtctgtttgtgtgcatccttttgtgtctgttcgtcagctgtttcatttctagtgacgtttcgacttgccaacacttgctggtatgaggaggtgagttgagatgctttttgtattatcagagcttgtgcatgtaatagcttctctaagtcaactatcgatggtgatgttgtggttaatgtcatatggttatcggtagtctgctcaggtgttataaattctgctaaatcaacttgttggagtctagctaccacttgagatgttgcttgcagaaactgtgaatgcgccttcttgaactgttccatccgagacttagctagaggagttgccaacacaatgtattctttgcacttagtgacatcacttgtagttgacattccaaggtctgacatctgtatggatatagtaaggaaagaagggacgaaaagattgagctaggacaaactataaagagtagagagaacccaactatctaaggtttaacctagtaactgatgtcaatgtggacagaagtcacagaatacaccaacaatcattacaaagaagcaaatcaaacacggtcacaaagacagctaacatgaactcaagcacactagcataacacaactcgatgctacttgatcaaccaaaaagagaacatttcctaaagagaaccgtttaacatagtttttttaaatgagagtcaaggttgggaataagaaagagaaattataaaatcaaggaatcaaatcaggaataacaaggagttagacaagacatatttgttcatggacaagagtgaaataggatcaccataaactagtgaagcaaggataaatgatacaaccaaatattatgaattgaattaggaggaaagttttatcaaggagagaaaatagagagccattatcaccgatagaagtagagggacaaagggttcaatatacgtagaactaacatgtattaccatcctaaaccataattgaagattttttattagccatatacgtagaactaacatgagatgatcaaaacaaaatgcatgccctaacaac

SEQ ID NO: 60832 - DNA, 321 bp, Zea Mays
ccttaaatcactgcggacttaagttgattgcttctgtgtttggggcatagtggtcaccccgagttacgtaagcgcgagtatgtcatatcgccttaagtcgttgtcaacttaagtcgattgctccgtcagcagggcatagtggtcaccctgagttaagtaagcgtgagcatgttgcaccgtcttaagtctttgccgacttaagccgattgctccgttagcagggcatagtggtcaccccgagttaagtaagcgtgagcatgttgcaccgtcttaagtctttgccgacttaagctgattgctccgttagcagggcatagtggt

SEQ ID NO: 60833 - DNA, 567 bp, Zea Mays
ggaagcccagccccagccaggtataccgctgcgttgtaccagtgcacgtctgatcatgcacgagttctaacttgggcggattttagcgtaaaacatgaataaagcaatgtaaatgagtacgaattttagtgtaaatcgtagatctgtttcgtaacagcgaatgaggcccaaaaactacgacgtgaaaatcacgcaggttctgactcgggcagatttcagcgtaaaacaagaaccaaaatagcataaatgagtacaaattttagcgtatatcatagatctgttccgtaacagcaaatgtggcccaaaaattatggcgtgaaaatcatgcgggttctgactccgacagatttcagcataaaacgtgaaccaaaacagcgtaaatgagtacatattttagcataaatcgtcgatctgtttcgtaacaatgaatggggcccaaattacagcatgaaaattacacacctacaaccgtgcgtgtgttctagctcgggcgggtttaagcgtaaaacatgaaccaaaacagcgtaaatggacatgaatttagcgtaaatcatagatttgttttgt

SEQ ID NO: 60834 - DNA, 696 bp, Zea Mays
tggctaaacctctatattttgaagatcatgtcattgtgtaagacgacatataatttggacatggaggaagtactccgaatattggacttcaaccctgtatgatgattccttcctatttagaagatactccctccgttttttatttgtcaccagtggtacaaaccaaaattattcaaaattcttatcaccagtagtacaatgtgaaacaactttccaatttgaccacccttattatactcctctactcagatcagtgagaagtacaccacctatttttgtgtttatgcccacctcacgagacgtatccaccaactagggagagtaggcactggtgtgctcctatgctcctgtaccggatcaaaactaaagggctggtagtgctcctgtgctgaagctgccttgcctgcatcacaaagtgaggacctatgtttctgctagctggtgtgctggtcgcctgcacctccatgttttgtgtctctctacctacctagtgagtgagccaatgatgtacaatactctaagggcagaatcaaatttggatggctgccatggaatcatcaacatcaatcaaagcaactactccaaggagtatctaccaaagcactgatcaaacaactactccaaggagtattctactgccatggagttgttggcgccgatccgggcgccaatcactgcgttgagaaccagtggcgg

SEQ ID NO: 60835 - DNA, 401 bp, Zea Mays
cgcggagttgtcgcacgcgagggtagctaacgctgggcctcacggtgactttgtattggtcgaatgtcgaagaccgtcggcgcggtcttttttcgacgtagatttttgcgggggatttttcacttgtatattacatgactccgcctcattaaaaacctcaccccccgggaggaaaagagtgtgggccagaataaaaattgtttttgcgaattacaagggcgaactggccctgatgagttaaacaaaaaatttgcggagattatcgatgttccaggagtgctccaagtcttcgttgtttggcgttgcgagcctgtatgtgctgggggaggccttcgtcttgacaatgaaagggccctcccacttgggctccaacttgcccctggactctgtccgagcagttc

SEQ ID NO: 60836 - DNA, 702 bp, Zea Mays
gagagaaaggatcccaagtccctagtgattgaggtgagtgccaatatcgttgtggagggtgaaaacctgtgaagtgttctcctcctgtatgaagccctggactcctccttttatagcctcaaggaggaatcctaagagcgccacagtttgtcatgtatggagaagaggcgagtctgagcccctatagccggtatggccttcgtactggctgttaacttgaactaggaggaggacgtctagtccctatatttgcaaattgatcgaacagagagccgaggccaggatctagggcttggacgtgtaccggtgcttatctgatggggctgctgtccgaatcatagttgttgaaatagtggtaagtatggtgaaaagcgcatggtaattctctctgtatggcgtaaagcagacttgacatcggtctgtagccatcttgttgtcagcagccctcgtggaggagttggtcgcgtcctttggtagatcttatctatgccgaggccatgctcgggcgagacaaaggttcctcccaaggccttggtcgagcctgcctccgggcatataatcgtacagggaggggttagcacagttgtcggagtggcctcttgcgggattccgggggagttgttgccgggtagttggccgaagccgagttcgggcaaagcagagttttctcctgaggtcaaggccgactttaggcaaggcgga

SEQ ID NO: 60837 - DNA, 396 bp, Zea Mays
ctcacttgtatacgcttgaggacatggttataatttctacgaagttgtacctctctaaatctgaagagtcatgcaacatgactactgcctaatgcttcaactccaagcttaattggctaaagtggtgtctcacagcatggacatgatccaagtcgtatgagaatgatgcatagaggaaatacctaggaatgaataagccatggtatgtactcgttcttccatggttggtccccacttcctcagcctagtccaaccttccccaccacacaaccacttagccaatgtttgttcgttgttacccaacaccctctatgccatcattcgaagaagtgtcaacattccccatgtgcacgatagatctactcatttatgtgtttgtcgaaagtctagtcccac

SEQ ID NO: 60838 - DNA, 633 bp, Zea Mays
cagaagaatgtgtgtcgattatagaattttgaatgaactgacaattaagaacaaatacccgttacctcagattgaagatttgtttgatcaaatgagaggagctatgatattatcaaagatagatctaagatcaggttaccatcagttgaagattcgaacttaagatgtatctaagacaacctttactacaagatatggatcatatgagtttttggtcatgtcattgggactgaccaatgcaacggcttacttcatgaacttgatgaacaaagtattcatggagtatgtcgaccagtttgtggttgtattcatcgacgatatactagtatactcttagaatgaagaaacacatgaagatcatctgagactagttctacagaaacttcgtgacaaccagttgtatgcaaaattctcaaagtgtgatttttggctgaaggaattcgctttcctaggacatattatcacagatggaggaatcaatgtagaccctggtaaaataagtgaaatactaaattggaagcaaccaacagatgtgacaaagatcaggagtttccttggattagctggatactacagaagattcatcgaaggcttctccaagatagtgaaacctcttacttcactactggagaa

SEQ ID NO: 60839 - DNA, 513 bp, Zea Mays
gttaactttctggttggatcgcgctcataaaaacagagaagtccggggtctgattcaaaacaatccctaagagtcaggcttccctcgggtggacggcggatttattttataacaacagagggtcttatgtgcaaaatgtggccagcgaagggggtatcggccgcctctagccgttggatgagatctggacagcatagattaactcgttcttcatctgaatcggtacgcggctcacagcggttggattagggatcaacggtggagcaccccaaagcgacagcgccatccatccctcaatcgacgtccaggattcattccacaaaatgtgatgtggttcgtttaatcccgatttccattcctagatcccaactggcctccgtctgcccaaacctggtggcgcagcaccgccgcagcgccattgccggcgctcccaactcctcacccccgcacgccattcaccaaacgattaagcgctactctacgcggggaaaaccatgattcaacttagacgga

SEQ ID NO: 60840 - DNA, 288 bp, Zea Mays
ggaaatgctcttcatcgaagatgctatcagcataccgagccgtgaacagatccccagttctaggctctaaatatttgattatggatagagattcataaccaacatagatccccaacttccggtgaggtcccatagatgtacgctggggtggtgatatcggcacgtatacagcacaaccgaattttcgcagatgggaaaccactggttgttgaccacgcattaactggtggggagaagcagagtggtaagcagatggtctatattggattaaggccgcagcgtgcaaaa

SEQ ID NO: 60841 - DNA, 387 bp, Zea Mays
gagagaagatggtctaaaagtgccccaaggtaaaaaaattagtattggtctacacaatacacgcttcccttggtattccctaatatatgatttatgatgttaggtaaattttaccttgtggatgctagttatgctgttagacctgggtttttacccccttaccgtgccacacggtaccacttgagtgaatatggggggaggaatccacagaacccaaaagagctcttcaaccttagacattcatcactaagggtgacaatagagagggccttcggtgctttgaagaacagattaaaaatattatacaataaacctttccatccatacaagacacaagtaaagctagtcctagcctattgtatcctccacaactagattcttcgtcat

SEQ ID NO: 60842 - DNA, 808 bp, Zea Mays
attgaagagccggctgcactgtcgaaggctgacaaaattgaagaaccgagaaccgaagagatgaaaacatcagaaattctaagcccttcggcaggagtggaggcaccgaagacacaaaaagatctggcagcaacccccaagagaaaaaggatggtcagtgtattagatgtgctggagacgataaaaacttcaagctctactccaggaaaaattgccaaggcttcgaaaatacggattgaaaccgagataaagctgaccgaagccgaagctatactgagctaggccgacgccgaagctggtccttcagtgcccgccaaggagaaatcctcggaaactggagaaaaggcagcggaagaagagggtatagaacagattttgcctgaaaaagctgccgctcctgctcccaaagcgtcttctgaggaccttgattatattattcgacacgcttcgggaaaaagattatctgaagaagaaatttttgaagctaaacactatgctcgagaactgaaatacccaaaaggggccttagtgtttaatggcacagacgaagatgacttcttatattgcctcccagacaacaaagaattatctgtctgccgggagatggccagaagtatgggctttccgaagctcgaagttggcctttgtgccatgacgaagaacgatctcgcgaatagccttgcgtacaacagtttgaaggtacgaaaattgtgaatttggaattttatgaatttcgaattagtctttggttcttatattgatccattcattctttcgtgtagggcttaatacttagcaacgccttaag

SEQ ID NO: 60843 - DNA, 626 bp, Zea Mays
tctggccgccgcgcgtctcgcccgattcaccagccaccgctcgctatccctataaattgagcccgcggttaactgcgctacattatcacgaaaccagagcccccactcccaccctcaatcgttctccagagttcaccaatttcgaattctccccaaatcagttctccgccaccccgaaatccacttcaccgcggccagccctctcccggtcagttcatactcctctctccctcgtttaagctttctcttacgactatgatgcttgccgacccacgcaattgggttaggaaccctctagtcgccgggaacgcgactatcttgccgcgatgctcacggtcaccgtggcccgagcaaaccaataggccttagatgaaattaggttgggggaaatggtcgggatggatccaattgcgtgtcagccgctcagagaccctagtgatggccccattcggccggtccagacagctcgccggagttcggctgcgcgaacgccgtcgaggacctccctctgcgaagaattagaactgcaggggcttctctgcaatttgtcagcgacacagggaaacagtaatagaacccatatccagttagtcaagaacctgaggccttttctgtaaagatgccag

SEQ ID NO: 60844 - DNA, 841 bp, Zea Mays
cgggaggagggagatttggagtagctctagaagtagcgtttttcatgtcttcctttaatttaaggtgggcggtaaggtgcaacgttgcagcagatttttactgcatttctaactgtatccggtagcgcatgctttacagctttcgagtgcggacagccttatcttttatccgcctgaagatatatgttttgagctaccaacttccaattaaaacagcaccaaatgccagagctgaagcgaaaggtgagaaaatgcagaaataacctctataaattagcggacgttatatgtaaaaaatcaataggattgcaacattctgaaacaaatccgcctgaacccagtaattaggtaaagtcacttggaaaattagcgagaaatgattgttttttacaaataaatgcaaacctaaaacgtgtttacaggtactgtttaggggaacacaccagcttagtgactacaagaaggaacgctgtattcaagcctgatgtagctagaggctgcggctatatgacttttcttcttcttcttctctctctctttcccatgtatggtcttttatgtttgggattaaagattaattttgtggccgagactgtgaatgtgagtttgggtttacttgcttgggagtgtagagaagcttggcttggactgattcctctcctaggagagactgtgaaaaagaggcatgtcaggcgttagacgatcgagacatcgggagtattattagaaactgctctgaaagtgagtagtaaacgtattctctgatccaaccggcccttatcggcttcgttcctttcttccaagggaacctcgacgagcttttccgagaacgcgatctctg

SEQ ID NO: 60845 - DNA, 359 bp, Zea Mays
aaataactagttttgtttagactaataagtgcattacatgtctgattcaaaatgaattacatgtctgattcaagtcttagcaaaagatctcagaagctaattagattgacaaatcaactagttcctccattatggcttgatccttgtgagttcagaccaccctacaccataagataaaccaaatgataagtaataataaagtgtgatcaatcttattaatcataataggtggatatttaccagtaatagctcattaaagctagtaaaagatccaaagccctcaaacacgctaggattgtcttcgggcatgttttggcttctttgtctttgtctttgtgatgctctatgcaacttgtcat

SEQ ID NO: 60846 - DNA, 348 bp, Zea Mays
gtcactgaggttaacgacgagaacagagattgcttcgtgttcgccgaatcttgtgcgctagctgcgtttggtcccctaatgattccgatctctatcgttcctcgttccacagagactaccaaacaatgtgcagcaggacagaaacaaaatgaaaaggttacgcactaaaaaaatgtaggacctctgcaccgcgcagctgcacgcaggtttagtgcgtaattacaccggccgaactgtgagcctaataatctagtctggttatatgtgctagatgaacctgctaactcaatctagtctggttagatgtgctagacatgagcaatcaagtatactactttaaccacaatt

SEQ ID NO: 60847 - DNA, 369 bp, Zea Mays
ttcgaagatcgactggttgttcccaagaatccagaaattaggaagagaatcttggacgaagctcatctctcaaaaatttccatgcactccgggagtaacaagatgtatcatgatctcaaatccttatattggtggaccaggatgaagagagagattgctaagtacgtatctgagtgcaacacttgccaaagaatcaaagctagtcatttaaaggtagcaggtaccttacaacctctctccataccatcttggaaatgggaggatgtttgcatggacttcattgtgggactgccgaacaactctcggcaccacaattctatctgggtcattgtggataggttaaccaagacaactcatttcttgcctgtg

SEQ ID NO: 60848 - DNA, 1169 bp, Zea Mays
gccatgtaaaatcaggaggaaattcgccccaaacttgggctgtcaggctgactgaagaacaatcccatggtacagtaacagataggatcaggttctgatcccctcgccgccgacgagccacgcgcggattcgtgctatcgccgtggtgattcgcgctcggatcagttggatagcaccggggatccgtaaatatcacgccgtggatacgctccggccactattttactccggccaccgtacccgagtagaccacgattgtgttggaagggttcgccggagctagccactgcgcggtcttgcgccacgtgccttgacacattaacctcaccgccgtgactaattttagcttgtctggtggtcgccggggagcttgccacggtaattgccaccaatcgcgcgtgccagtaaccttcttcttctccgaccatcgcgcatctctctcaaattcactggccaccgctcaagcctgctataaattgctgaccccgcctgctctgctaagtaattgtgcacccagcagagcaaccagtgcctcaaatcatccactagaactccccaatttgggattttccccaaatcacccaagaacaccgagcggtgtgacctcgccgtggtcagctcgtcttaggtccgctcgtaccctctgccctcttgttttagtgttcttgtgtgcccctcatactcctcgaccaactctcttgagctaagctaccttagatcgccgggaacacgttggtttggtcgttgatcatacggtcaccgtggacagagcaggttagagcgccgttcgcgaaattagttgagggaaaacgattattaggccttgaatttggtttcaactgaagtagagtacccgtcatcaagtaatccagccagtacaagctcaccggagctcggccctgcgctgttcgccgtcgtggacttcgggcggtgaagaaatagaacttgggggatgtttttgtaacgtgtcagtgagacatggaaatagcgtcgtgactcgtttccagttattcaaaccgataggggcctttctgcaaaatcagcagctcgggcgcgcgagggcgcgcgcgggcgcgctttcgccagtaaatgggccgacccagaccagtttcagcccaatcctgtagcatgttttcctttttctttttcttctagactttgagaatttc

SEQ ID NO: 60849 - DNA, 678 bp, Zea Mays
taggcatcctccattcgttcgggtccaactctatgacaagtacattgttctctgctgccttgcactctgcttctaactcctgtgaaatgattggacatcgtacctcttacacaaaaaaatgtttagagcaacttgagttgtgctggaaccaagcttcgatagtgtatcggctgccacattgcgatccctttccacatggtggaactccagtccctcaaatttgccttctatctactggacgactgcacagtatttggccatagattcggtggaacagtcccagtccttgttgatctggcttatcaccacaagagagtccccaaacaccataagtcgcttgacgccgagtgaaatagtgatgtgtaccccgtgtatcaatgcttcatactcagctacattgtttgacactggtaaaagaagttgcaacacatatttgagttgttctcccttcaggacgatgaagaggatccctactctagccccttgtaacttcagtgacccatcaaaatacatcttacaggcctccatcggcttcgggttcttaggaacctgacttcctgtccagtctaaaataaaatccaccagtgcttgggtcttgatagttgtgcgaggccgaaactcgatgttatgagctcctagcttgcacgcccacttggctgtcctccccactacctctcg

SEQ ID NO: 60850 - DNA, 607 bp, Zea Mays
gtttggaaaatccactgttaagaagggacagattgaagcaatgaaaggcaaatattttcatgatatatctattgtgagggctagaggagagaacaatgttcctcttcctgaaggtgatgaagtggatgttttcaagggttttatgaaggctggccttcagtttcctctgcataaaatgctggttgaagtgttaaattgatttgaaatataccttcatcaacttactcccgaagctttaatgaaagttggaaatttatttgggtgataagaaactaagggttggaaccggacgctcattgtttttacaacattcacgagttgtcttatcaaatgaaggccattgggaaggagcagtaccataacaacttcgaacgttataactttgtgtaccggtctgacgtgaggtgtcttgtgccaacctttcaaaaaaaagtggccgggctcatggatgaagcaatggttttatgttaaaaatgattagagtgagagggaggatgtgaagaacgtaatctagcatcccatacgatcgcgcttcggcattaggagaccttcgatcgcgggtggtaacaaacctcaagcacgtctgatggccttcaacatagtgtgt

SEQ ID NO: 60851 - DNA, 619 bp, Zea Mays
aatatgattgtaatgtcatttatcacatttaatacgacacataggcccggatgcagtcatctcttctcgagacaactgtcataacgtctacaggggcgagtacgataacctaaccttatgtacgccagaccatggggcacctggcttaatataattgatagttaatgtagcctcttatacttatattatatttcttggtacactccttgtgtgcatgtgcagctacatgatcgatagacatactgtattacggtctcgatagctctataatctaagtagtatatattgaacaagtatttgtagtacttttgaattatggtgtgaacatgagcttttaaattttcttgttgatttttagtattttagtatataatgaacaagtagccataatacttttgttgtattgatggatttgggcttgaaagtgattggactaattgtattgcacattaactaatttgataggtttgagcttagatttgtcttgggttttaatccaatttattcatatttaatttggttgttaatccattgccacctctaggggtagtgactcttgtaataattataaagtgtctagggaagccatttgaaagcatctagacccctagttggtttt

SEQ ID NO: 60852 - DNA, 734 bp, Zea Mays
gccaccgccaccgagggagcgaggtaacgccgcaaccatggcccggcatctccgcctcctttcggtgtccatggtggggtctaggagaatctccagggcgagtggattgtgaccaggcatgtgcttagccgtggtggcattcggtgtccagtgaatcgctcgccgcagctccaaggccaccgcggggtcatgcatctccgtgggcgtggtgaactgcttcacaaatcacggtaataatctctcccctgcctcctccaaacccttgatttgggatagcacccattccgcgatgcgtagggccgcgcttgtaccgagattggggagctcgccggcgagctccgccgtgatggcgagttctgtcgcctaccggccgcgtgggtagggaagaacaaacatgggctgttgattgttttagggacggtcctgattagatcctaggttaccctttcgggatgagcggaccagatcaactcatagagtcatcaatcacgtgaactgatcgtgaccgtagatccgtaggggaacgattgggatatggtgtgaacgtggcgctctgtggatcacaggaccgtgatctgagcgcatgcgtaacgtgtagcttgctataaaatccaggccgttgattgtaatctgaacggctatgcgcatctgataccccttcggcctagaattttgcataattatccccgagtctattaggaatgaacctgcggtccagggaccctgttcgccga

SEQ ID NO: 60853 - DNA, 530 bp, Zea Mays
cggtgagcttgcactggccgggatacgcgatgaccggtgctccaacatggctgatacctaattcaacccttaacaaccgtttcccctcgctcaattccaccattcggactcccaaactctctgctcacggcgtccgtgcaatacaagaacaacaccgagtgttcccggtgatctaataggttctagcttaatcgactgggtcggggagcatcagggacacacaaggatactaaaacgaaagagcagggggcatgagcggacctggagcacgctgaccatggcgaggtcacaaggcgcagtgtttcggactgaattgggggaaatcccaaattggggctctctggtgagtaattggaggcacgagcgggtagattggatgcttgaatacctaacggagccgacagtgtgctcaatttataggatttgggggcgatggcttgtgaattggagttggcacggtggcggccggagagaagagttgcactggcgcaagcgattagtggctttcaccgtggcaggttcaccggcga

SEQ ID NO: 60854 - DNA, 573 bp, Zea Mays
tggagctaatattggacataggaggtcgaaccctttgttctccttcttcccctatgctcatctcgtcgatcacaggacccagtagagcaggaggtggtgtgaccagtgagttaccatcaactactccctctgtctctggatcaagacgaacgccatctcctaccatcgccggcgactctctagagccggccatctccacctccaaatagttatgcaggctttgtggtgtttttttggatgaaaggaaatcacggatactatacaagtaaccgcatccacgtttacagggtctccccattatttccgaaaccgtcccgatattatggcgatgtcaatgtcaaactaatatccataatacactatttacgcacaatgacttaacgttttacgccaaacgatatatactatttatgcaacttttgtgccgtttcggttttatgccatatctttcaacatcttattctacgttatatttacctgccgccattacaccccatgcaagatccataaatttcgcgcccacgtaacatagtaagcacgtttgcatgtggaaactattccctataattccgc

SEQ ID NO: 60855 - DNA, 445 bp, Zea Mays
tccggtggccgatactgaagacgccgcccgggagggcgtacaagatactgtggagctggtggccgagcgcttccagcgagatcctgctgataacgagtaatctaatctgcagagacaaggcaagggtcccgctggagtgcggcttgtaataatatttggttttgtaagatactttttgagaactattaataaacaactcttatctgtatgccatttgtcatttgtcctcgttgtgtgtggtgtcatcaacttcttcctggtatttggcccccctgagatgtagtctcgacgtgtcgaggctggataccagtatacctaagaaagaattggtgacctggcacctaggaggtaggctcgactaggacctggacctgtacacagctttggctaggaagttttagtagcgcacccataggacccaccaactggtatcttttatcgtttg

SEQ ID NO: 60856 - DNA, 716 bp, Zea Mays
cagacaaattcctagtgaggacttgctaagccgacttgatttgatgctaaggggcagggtttcaaatgttggtgcgcccttggcttattctgcctagaatctgcctccttagagtcctttttccgatttcgtttccaatcctcctgctcgagatgatagtccgggccatagagtgtgaccctccttagaagacatcgaggcttttattgctcctttccggaatcttcccgaggctgagaaataggcccactttgagatgctgagtagtactgatgatgctgagatgaatgttgttcttaacatgctggctagggaatcatctcactctactcgcaccgagccgatggcgtttgcgattaggcaggaccttggtgaagacgaggaaattcggaaactagaaggtgctcatcgcaagcgatcacaccgagtgaaccatctagctattcctgacgaggagaagaagaagaaaagacgactccggcggttatcatgcttggagcaagatgttggcccctccacactattcctcggcgatggcccggtgagcaccatcctcgaggacaatgtcagaggttgtgacaatgctcgggttgacggcagtgtggtcgatgaggatgaggaggaggaagaagaagaggttccgttaatccacaagaatagtcatcacaacaggggcagcgacattccgatgcaggccttatctgcactagtcagcc

SEQ ID NO: 60857 - DNA, 388 bp, Zea Mays
gaaggaagcgagacatgtggtcgatgctgcaaatggaccgcttcctctctacgagccgtagcccgttgctctcaaagcgatgagcagcaaggaggcgctacctagcaaggtagcacaagtggaggctgctgggctcaacgaggatgaaatggcgcttataatcaagcgcttcaaggccaccaaggaacgcaaggattatcccaacaagataaatcaaggggaaagcactcctgtttcaagtgcggtagtctggtcatttcatagcacaatgtcccgataatgacaatgaccaggcacaagaaaagaaagggaagaaggaaaggaagaagaactacaggaaggcaaagggtgaggcgcacattggaaaagaataggactccgactattc

SEQ ID NO: 60858 - DNA, 279 bp, Zea Mays
acgaaaagctaaaagaatggtaagtttgatctagctatgtcgatcagcaaatagtatgattgcttatgaatgttttttgtttatacaggaagctacgagtggccaaaagcctagtaacattgaggtctaccaggagggccacaaagaaccagacccgaacaaccctgaccagctctgcagccagacagccacggatcgactggtgagttttggtcgaaaagtacaaacgttcaaagtatagaaattcctgcatttgtaaggttgtgaataatgtatagg

SEQ ID NO: 60859 - DNA, 747 bp, Zea Mays
ggtttctccgaagattaattctagtggactttggactagcttctccttttcttcatcaactttgatgtaaaaccatttagtcttccagccagctggccacttggtacaatagctgataactggaaactttgtatttttgcgataagcaaaattgtagcagccgaagttttcatgcagcccatcttctctagcttttgtttgataatgaagctcatgtactcagtagaagccttcgacaaatggttctaccccctggcttcggagggccccaatgtagacactaagcctaacgatggcattaggagttagctgatgaagataaatcccaaacttcttcaaaacatcagcaatcatcccattcaaaggaaatcttaatcctgctttaaagaagcttttgaagactaccacctcatccttttccggcttcggataatttcctctccgccaaaacaaaccagctccttctttgcttcactgaaatagcctaactttgtcagcttagacatatcaccttcggtaatggtggatttcccaaactccaagtggctgggtttagatggcacggtgttgtaatcatcttcagattcaatttcctcagcatcaacctgctcagcttcaccggtaggtgcatcctctgatactaccagccctgaccgttgcatcactttagagattggagcggtttcggcaccttcggcttcctctccgtcgcgagtaaccctagctgttgagcgtaccctagccatc

SEQ ID NO: 60860 - DNA, 670 bp, Zea Mays
ctggaatacggcacacaatgcataagaaaatgaagcatatgaatggggagattaggaagtagcagagtatgcataaaaattacagagaactcgagcaccttgggaagcaggacaacggtcgccgagcgtgtagaagaacaatgtgacgcgtgcgcggaggattttcagcggcgggcggctccaagacactgacaacggcggtgccgattagggttgagggcgagtggcggcggaggacggcgaatcgccctggcaggagggcagcaaggggaatcgccctggcgtcgcctgaataatcgcggcgagtcggccaggaaggttgactgcacgggggttagggtatagaaatgtttgaccgagtgggaagtggggtagtgggccaattcctgaatttcgggaacgtgggttggctgaagtatttacgctaattctctattgtgtataaacggacgaatggaatagtgtaaacacgtgcagactaaggaagatatggctgatcacgtggaaagtgggcctaatccgctatttctggaacgagggcccacggctgtttactctgtttacgctaaaaagggtttccgtttacgctatatcagttcgcttgcataaaacgtgatcggacgtgggtttgcatatttgatggctggggctctccacagttatatagagc

SEQ ID NO: 60861 - DNA, 568 bp, Zea Mays
gttcaatactttttctataattttttagaatagttgactcactaaatgatgtatatcctttcctacaatgtttttttgaataactgactcattaaataactcctatctagttattctcatgaatgactgatcctaaaaagatagaatggcgggatattcatagaatgactgagtttgtttactttctttccggtaatgcctatttttttagaatgactgactcactaaataacttctatgtcaattatcctcgtaaatgactaaggctaaaaagatggaatagttgagtattcataaaatgactgagtttgttcacatcttttcgtgtaatgcatattttttagaataattgactcactaaatgaatgatatctcaacaattctaatgaatgactaaggttaaaagatggaatgactgagtattcgtagaatgactaatccgataactacaataattgaccctgagaaaatacaaaaaattgaatgtgagattaatatatcaagtgggatctagttttgaagctttcatcgcgacgaacaaaatggtgaaatcggttttcgattttga

SEQ ID NO: 60862 - DNA, 305 bp, Zea Mays
atctatgatggtgtaacaaaagtccatcaaagatcgtaatccatcagagatttttcatcgatcagatacatcgttatagtctgtcattctggcacaatggggatattttgccagtaacacctaaaccttataggtttctgccatcagggctttagaggataccgtaattccacatatggtggaatacacgagtgtacatacactcggtaaaattcatgacatgcacatgtgcttatcaagcaaacttcaagtcctttggttcctcatttcattcattctcgggtctatatgggtctttatccctt

SEQ ID NO: 60863 - DNA, 377 bp, Zea Mays
agcgcattgctgacctagagtatgtgttgtccactcaagtggaattgcatagaaccaaagtgcaagaacggttaagggtgcagaaaaatattgaggagcttagtcaaactaaagaggaatgctacaatgttgctaaggaatgtgataataatttgaaaaatagttttactaaggttggcgcattctcctcagatcagaactttatctgcggtgatcctgacggggttatccggtggattaacggtgaagccgaagcatttgaggagattctcagtgatagggggacttctgcgcttttgtcggcgcccatgggaccatgtcagtccttgaaaaggtcgactacgaacatgccaaggttgtggttcagctaggattct

SEQ ID NO: 60864 - DNA, 1059 bp, Zea Mays
atgaaaaccactgaatcatgttagcaaactgtcacaccctcggcaatagatgtcataatgaattattgaagaccttctcctttgtcggggctttgttttaagagaagaatttctcggatggtgacttggagggcttgatgcggtgggttctcaatgagacccgtgcttttagaagtgttctctcagtacgagaggactattgtgcttggatagacgcccgaagtactgcttcaattttgctaaaagccaggtgcaatcatgtgaaggtttgcactgaccctgacttaagagttcctgctgaccacgtctgaagatcgactgtcaaagcttcggagttgtctaaaaaattcttatctgaaatatggaagaagagcagaaaagaagtaagtatcgaagaatctataaagaacagggagaaggattgtactttgttaccttcatctttaccttcgtggggcatgttcatactaacttcgcaaaatctctacaggcacgacaggcagctgaaagagatgtagatatgagaaagaagttgcaaagtaagaaagccgaaggttttcaacttttcgcttctgttaaattttagtgtactcatgctttagcaattgttttactaacccttgctgaaaagtctccacttcataggtaataactgaagtgaaacatactgaagccgaagcaaaagatgctactatctaagtcgaagcaatctctatcagagctacgaaaaaactacagatgatgttgtcctcaagatttgtgagcaaatctatgacaaagtgatgcaaggcaacaaaaggaattgattagataatgtgagaaacaatgattgtttgttgtcatatttttgctggtacaaagtgtctgaatgcttcgatagtttttcaagtgatttgtaatatattcatacttcttagttttattgttgcttctttgctttcttttgtgatgtgtgaaattttattcaacatgtgttttagagccaaaggcgaaaaacaccttcccttcttttctcacattacaaaggaaatcatagttctgcattcccttagcaatggc

SEQ ID NO: 60865 - DNA, 624 bp, Zea Mays
gaaggcggtgctcgcgtggccatcgaatgcggggttgcggctggaggacctctcggtaaggaaccatccccctgcatactcgccctacctgtccttcgcggcgtagcacctagatccaactagggccggcgtactactcgacgtagcagggcacgacaccacccctctgttcgccatattctccgcatagtgtagatgcgctcggactcgtggttgtgcccctgggcgcggctgtctggatcgccagagatgttatccgccgtagcatagtgccgccgcgggggagtgcatgggagctgtcgggaacgatggccgctggccgttggatggccagggtatggccgtgatctgattcgcaaacaacccatcgtctgaagaaaatcctagccttagatttatgatcggacggatcatcgctgtatgaagtaagaggtgatcggcaccgtcggtttctggtctggtggctactattgtataccgattcgccagataatagatctaatccttaccgtccgtttttaatccaacgtctgaaagcatcccatacccgttccaccgtgcgcttatgcaaaagagccctcgggcttccagagaatcaacccgccatccgaatgcatagtgcgc

SEQ ID NO: 60866 - DNA, 340 bp, Zea Mays
actcgatggttgttgattcccatgtggacggctaagaatagatctcgtgggctgaagcctaagtcgttgattcgtagatggtcggttagatttgatcacgacgtgaatcactattgttcgttgatttttgatcgagtgggtgatatcatatcaggcttaagtaaatagaggtcgtagatcttgtatcctgcggtcataaattgataccggtttgggtcgtggtggatccaatagggaccctagatttcagatcaaacgaccatagtgtcaccttacctctttggccgcataactttgtgaaaaagccctcggattttaatggattcaacccgcagtcctg

SEQ ID NO: 60867 - DNA, 354 bp, Zea Mays
actgaactgaattgacttgcgcttatctttttttttatcctttatgtattttatgtatatgtgttgtttcatttggcaggaacatcagacatgaagaacgtagaccgacctccttccaatccaaaacggatcataatccagtctactcaggagtgcttcagcgttgacataccccgtgcttcggcggggactgttagacctgaaacaaggcaggctgctgatgaggatgatgactttatgccattatccaagaagcgtaacttgaacgacagtcctgggaaagttttgaaaaaggtagtcactaagcggaggaaagcagtgccccccgacaggttagagatttatgtctatggc

SEQ ID NO: 60868 - DNA, 378 bp, Zea Mays
tggttcccttcatgtttacacttccatgactttctcagatctattgccatggtttgttggataatgatgatgataatatctagatgttcgcgtcatgttgcccttcctgtttctacgtagctgacatttgggagatgcaacaatgtttttctttgtttcattccatgcatattgacatctaaaagaggcactgggctctacttatgtgcagagatatgtccttgcttgctggttgcgtaattcttatgcctgctttttttcagtgatctgggtgcctgttacctgggtgacttttaccgctacttggaggactcaccgcttcggctttccggtcgtcggtaagtgtatgcctatgcgtctgttttgtttctaatgtgc

SEQ ID NO: 60869 - DNA, 672 bp, Zea Mays
tgtgtaaattgcttatgtggcataaactatttcaagttttaaacagcgtgtagacctggttagcatgttttttttgtttatgtgcctccgcgcttgaataagacagctgcacatcagtgcctaagcccaaataagcattaactgttagtgtatctgtatatttctcttctttaatgggccttggtccatatactcagctatattaatatatatcacatatgtgaccttaattaaatgagatatttattcaaacacgatccaaacctatatattctcatatcgcgccaatgggagacaactaaggaccatgatagagtcagcacacgcactaggagttggcgagcatctggatcgagccaaaccaatatcgagctaggtgtgtggcggtgtcgtctttgtcggcacgacagatctgaaggtgcacctcaggtggatttgaacgcgtggcatcacgctcctagggttggatcacattgatccggttgcgcctcacggtgcatctaggattttgccctagagacatcgaacgacgatgtggcgaggagagaggtggagcgacgaatggtgagtatgtggtgtggggtaagatgagataaagtttttctctggcttttttcaacactcatgagatcaggtactgtgaaaaaggagatattagagtatatatatccc

SEQ ID NO: 60870 - DNA, 959 bp, Zea Mays
aacaactctctctgagctatggttgtctggatggaaatgtatgctaggattgcgacgaattactcctatcaaggaacctcgtatcggtaactggttaagataacgagttggcatgaactaggtcgaaccatatcatttggctggtgattcgtgagtcatgactcacgagtaagaatggcaacagacgcgatttatctgcgcatccgtaggtaaaaaccttgtgggcacagatgttgaggcggaggctgaacatgacctcaatcaaaggacgcaaaggctcgacgcctcgacccctcattttaactaaccatacttgcacaagtccacgtgcgaccggggccttcgctatatagcaacttcgatggggccttcaacttaacagttaacgagaccgattacggggaagacaagcatccggacgaaggcccaagcgcgggacaagcatcgagatagagaacttcgccatccacggcttaagtgccctcatcacaatcctaccgaggcaagcgaagggcaataggacgcgaaggctccacaagcgacaacgaggactatatgaagcgtgacccgagtcatcggtccaccaaggtgctccccaatggatccacctgtcagtgtaactagtggtgtaattttaagtgcgcgtcgtagaaggggcatcaatattgtaattactctggtatacaaaatgtttcgaggatgtagtcggtaacagggtatgaacatactttgggccaccaacctccagacaaccctataaataacttcgtcctgaacgatacacatataagacgttacagttcctatctaacgtttttattgtgcatcgtgccccccatcttgtctctaacagggtgtttggtttcacggatagcctcattcgacatgacttgatccggcagcaatacgtctggagatttcatacggaatgaattgatcccgcatattgtcttacaaac

SEQ ID NO: 60871 - DNA, 671 bp, Zea Mays
caaaatttccttgcccttcaatgattcgccaccttcgttagtactctttgtagttggcataatccgagtcaatgacagtcccaagggacttagaggggagaatggtaacggtcaagtcattacctcgagaatccgggtgcaaccgaatgatgaagtggtggtggtgttatccttttcttgctattggacagccatagttttattgaagccggagtcttctttgcaattgtacatttctgtacaggaattttgaccttcttgtttgctggcccgaatgtggctcttggtcattcttggactcatcataatcctctgtttcatcgtcaacagtcttctttgaccttttgtcagcacctttagaagccctatttcttttctctccatctctgatgttggttgaaggatctatgtaatctgggtatttaaaccctagggcattcataactctgttaagccaaagtttccctcagcttccgaagatagatttcatatctttgtgctctctaacaagataatttctgcacatctcgttatacttctcctcaatcaattttagccacctggccgaaggagctttatatgaagattgccctttaaagtcaaaagctagcgtaacaagttattcatccttcgacttcacctccttcgggagtttccgtccagaccgagtt

SEQ ID NO: 60872 - DNA, 450 bp, Zea Mays
cggtgctggacgcggagaggcagagggccaaggacgcggcggctgccattgcagagcaagaagaagaagtggcaacagtgcaagagaatgccactcgaaaagacggtggcaacgttgtggtcaccacgaagccggaagcgattccaatgcctagaacggcagtggctgcagcgacaccattgagccaaccgttcgtgttctgccgcgacaccctgctgtcccgaggggggttcgaccggccgattccggtgaagtgcgaggcgatgagctgctgatgtcgcgaggcgggtccaatggaaggtgaagcagcagcagcagaacctggagttggcgggactggagtggaggttcgaatttgcttgtagtagtagcaagcgctgtacagtttgggaataagagatgcatgagcacaaaataggaatgaacgcgagtgcaagaagcgtcagggag

SEQ ID NO: 60873 - DNA, 583 bp, Zea Mays
gggcatttgcgatggctcccatgcgaacacatcggcatttgcctggaggaaagtgacgagcgcgagttcctatttctcgtccagatcactcgaaatgcgagtggtctgggtggaatccgcagcgagccggatggctttgatggggacaccatccgcttcagacagtcataccgttggtgccttggtaccggaggttgagggattcctctctccgtcggctgggcgagcagtctctgctgccagggcgtgcagcttctctacggctgcaagtgtggcggtacggtcgccttgcacagtgaggaccctagttggggatggcatcttgaggaccaaatacccgtaatgggcaatgtccatgaaccggtatagggtcggcctgccaatgatggcgttgaaggggaggttgacttccgcaacgtcaaaaacgatgttctccgtgcgaaagttctcctcagctccgaatgtaaccgggagtgcgatgctcctaaggggatacaccggctatgggcccaccatggagaatgggcgtgagggtcccagacgggaccctgggatttgcagctgcttgaatgcagcatggctg

SEQ ID NO: 60874 - DNA, 415 bp, Zea Mays
ttatgtaccgaatttttgtacatggctgaatatacaaataaaatatatgaggtagttggtataggaggaaatggatagagtggattgttggagacatactagataggaggagaatcttttaggagtattaaaatatagtataaagtataattagggtgaagatggatagggagaattgttggagagagatttagagctcaaagtttaatccatgctatttgaggacataaaaacggctaaaaatattatatcacacgaagcgaaataatcttgggtgacactgaaaggatcacgatgcccaagaggggggtgaattgggcttttctaaaaatcaacactaattaaaagctaaacaagagctaagcaagagcccaacttcacccaacaactagcactaagataataatactagaaa

SEQ ID NO: 60875 - DNA, 794 bp, Zea Mays
gctcctcaccacacaaagcggcgacgtcgacctgctgatggatactgtcgcagctatgtgtgaaatgttggtagacctcctcacaccgcgcctccacccactggtcgatgctatcgtagtgcccaaaaatttgttgtgaggcaggtttccatcttatgcatttcatcgagcaccttgcggacggtggtgtccacttattccataatgccagatctggtgcgccacggtacctcactgagtggatctaggctgctagtctgataccagatgttatcaacctcgctgggagaggaaccagcgtagatttattctggcatggagaaggggaaaagggaagaaggagatgtcaggaggtaggcgacaacaataattgcatgttatctgatgtatgatggtttgtttcgttcgcgtacatgcataagaatatgtcacggactcagcctccacagactaagccagatctgacccaatgcttattacacgacccattctggcccattcagttgcacattctcgcgccacacatgcacacagcggtcttcagctgttgttatcttctcggccatctcttgagctccttatgcctcttgcgcacgtgggttgctgacactggatgtgaagcaaggttgtaggggcacatttgttggcgggtggggatgaggatagatggggaggaggctgagcggccttgcacgtaaggcagagcacggaatgtggggggagcaagagcaaacgggcgcatatggcagtgtggggagcgcggtatgcggggagcgggcgagcgcagatggtgg

SEQ ID NO: 60876 - DNA, 449 bp, Zea Mays
tgcaatttgggagagaggatctaggtgtcgatctttcggaaagatcacgacgagtcagacagtcaccaaagctgcagagcagaaaacagaaaagaaaggaggagagaagagtatccacagaccaaaaagaaacgaataccacgcactaccaggtgcgtgggcccccaccataaaaaggacaccaacgtgagtgacgcgtgggccccacagtggccgtaacgacatctcccaaaagcatcaacagcaccttttccttgctatggtggtctggagggaaaaaaaaagatgaatagaaaatggtggagatataaaataacagagcagccgcaccagcacacctgccgcccccctccagcttttcttttgcgcagccaccctctggcttgccgttaatttctttcccgtttcactcctcgcgtttttacacttggcccccaatccaatccccg

SEQ ID NO: 60877 - DNA, 403 bp, Zea Mays
aagccggtgaggatcgcctcaacaccctagctggtgtagtggccggtctcaacaccgacctggacagtgccaccctggatctctacagggtgcacttggagctggagaatgcccacgccaggattgcagccctggaagcccaactgcaaggactggaaccgctcgaagcccaggtccccgccatggcgttgtctcctccccgcaagaggctgcgctatggagagcccggatccgtcactaggctgctttaggagttttgagtcatgatgtaataagttatacttcgcgttagacgatgatactctcttttaagttatcatattaataaataacaaccatgtgatggtgattggttgacatgcttgagttggatctttgtttgagtgcaatggtcttatggaat

SEQ ID NO: 60878 - DNA, 617 bp, Zea Mays
aacaagaatctcgtcctcgagatttagaaagaactagtgaaaagatgaggaaaatctatgcaaagctcttcttctctctcccaagtagcttcatcttctccatggtgactccattgcactttgcacatctttataaccttatttctggtaactcgattcaaaatatcaagaatcttgatgggatactccgtgtaagtcaaatcaccctgaacactgagctcatccattggtaactgttcctcagggacacggaggcacttcttaagttgagaaacgtgaaagacatcatgtacatctgacaggtgatcgggtagttctagttgatatgcaacttctcccactcgctttaagatcaagaaaggtccaatgaagcgaggggacaactttcctttaactttgaatctcctcataccctggattggtgacaccttcagatacacgtgatcaccctccttgaactccagtagtcttctccgggtatcagcatagctcttctgccttgattgtgcaattctcaaattctcccttatcattcgcacttgttcttctacctcttgaataagttcaggcccaaagaactgtctttctccagtctgatcccaacatagaggagtcct

SEQ ID NO: 60879 - DNA, 434 bp, Zea Mays
aggcatgctgagaggaggtttgctaaccttctacgcggcaggtgacaccattttcacaggtttcaagacaacttttagaacattagccatcatatttcccttctgaggtgtgccatcagaagatgatttaggcttcggctgggcctctagtttcggctgcgcctctggctttggctttggctacaagctggttagatgcacctcaacaactccttcctcagtcttattctcctatatcagaaataaaaccattataaaaaaattctgataaaaatctatccaagtaaccaaaaagcaaagtagtcattaccttcgtcagtacgggagagcgaatcttcagcttagtaactggcgtagtctggataatagcttcctcaacagaagtcctaaccacaggcaacactgctgccctctcttcataataagacttcgtt

SEQ ID NO: 60880 - DNA, 1126 bp, Zea Mays
ctttggggctttgtaactttcaaagcatagggtttttgccctaggtcaccacataaaaactatagagcaaactaaggagaacaactttgcttaaggtggtaagcatggttgttaagagtatttgagagataactaagctcaaagtcgggctgtcagtccctccctgaactgaatttccaggagcagtgtgatgggatgaactttgagctcgatttcgaatggaatttagtgactatttgatagtaagctttgtggcaaagctaaagattaactttagccctataactttggtgcagagagatgaccaagtcgtaatgcaaaattttgagaacaatggccctaaaccgtggctgtcaggtgcatttgactgaattttccccatggtacagtacacggatcaggatgccagatcggacagctcaacgccggtgatcccgcgccgcgatccgcgtcgccgttgcgattcgtgcgtcgtgggttgcagatagctcataagggtaggaaataacgcgacgtgggtgaactccggtcactattctactccggccgccgtaccaagcttggatcacgaccacttcggataagctcgtcggagttagccacttcgtgaccgtgcgccacgtgcctcggtggtttaccacgtcgcagtagttccccttgtgcatatccggtgatcgccggtgaccccgccacggtgacagccacctattccttgcaacagtattcttttcactctccgaccgccaccgcgccatccgaaattcaccggccaccgcccttggagcctataaattgagggcggggatagttgcgccatgtaatcgtcaagctatagcacccactctcatctccaatcgttccccgtagctccccaatttgggattacccccaaatcgatcgaagaacgccgcgaaaccaagctcgccgtggtcagctcaattcgggtcagctcctcccctctgctcccttgtttaagcattcacatacatcggtaatactcgccaacccatccaattgaattaggagcccactcgtcgccaggaacgcgttcatccacccgcaacatccatggtcgtcgtggccagtgcaaaccatagggtcattagtgaaattaggttggggaaat

SEQ ID NO: 60881 - DNA, 536 bp, Zea Mays
ttaactagcctgcaaaaagatcaattttaactaacatgctatactttaactaaccaacaatgcatggctcttatatatgtctaaatccggtgggtctttgactaaacccttacttattatgttggctctgttttatttagtttttaccatagaggatgcaagttgagacgtttggtgattcagagctcatgttggtcatcaactagttcatacgatttcacaacaactggaagaaccgtcgactggatggaaaggagggttacattaactgcagagaatccaaccacttcatcgcaatcgagaccaccagcaacggtgaatctaaccctgaggtacatctctctacccatgaaatggcaaccgagattgatactttgcacaatggcaggtacagtgaggccgccgaaaataacttatttttggcgattttagacctatttttggcggtctttatttgccagacaaaattagccaaaaataagttattattttcggcggctgacacctggccgccgaaaataagctattttcggcga

SEQ ID NO: 60882 - DNA, 391 bp, Zea Mays
taggagtctgttgcatgctgatggagctgaggtctctccgagtcgtgctttcaacatcattcctgttgacgccccctcaacgagcagtgcaccaatgctttcggctttgggtcttcccttatttctttccaatattcaggtaaatcaacttttgcttcttactgttcatgttagcaaactagctttcttaccgatttttgtaactgcataatgtttttgattgtgtatcttcccaactgaaatcctgtggagcccctgtccccgaccaagtttcgtccctgatgcagtggaaccctctactgcttcagaagcagatagaagacctgaaggcctcaaaccttggttagtgattctgcagtttcctttttttgctatttattgccttccttat

SEQ ID NO: 60883 - DNA, 554 bp, Zea Mays
gaagtgatggaattttgggttaacactctagctaacacctggggtgtcacaacctaccccttaaaatggaatattgtcctcaagattggatagactgtgcatgttatgggtacgtaccaacactcttaggtagaaactcggggtagttcttgttcaaaaattcctcggtttcccacgtgtcttcctcttcggtatgaaggctccactaaaccttaaacattttaattgccttcctccaagtagttctttctttgcaatccaagatctttataggatgctcctcatatgtcaggtctggctctatcataatatcttgctcgaccatgacttctgtcagtactcggatgcacttctttagctgagacatggaagacatcatgtattgtagacattttgggtggaagcttgagcttataggccactagtccacaaagttctatgatctcgtatggtccaatgtaatgaggggctaattagcatttaccctaaatctttgtacacctttggttggggagacttcaaagtacacatgatctcccacttcaaattgtagg

SEQ ID NO: 60884 - DNA, 463 bp, Zea Mays
gtgcaagtgtgcaacatgttagaactgtctgacaaggagcaagtgattttgaacagtttacctggtgctataaaagacctgatccaacaatttccttcagttttcgaggtacctaaaggcatgcctcctaccagggactgtgatcatcaaattccattgttacctggggctcgacctgtgcaaatgaggccttacagatatgctcctgcgttgaaaacagaaattgaaaaccaggtagctgagatgctgcattcaggcattatacagccaagtaaaagtgctttttcatcttcggtgctactagtcaaaaagaaggatcaaacttacagattttgtgtagattacagacatcttaatgctctcacagtaaagactaagcttccagtgcctgtgattgatgagtttttggatgagttacatggggcttcttggttttctacattagatttgagggctggtttcc

SEQ ID NO: 60885 - DNA, 818 bp, Zea Mays
cttaagtcgttgccgacttaagccgattgctccgttagcagggcatagtggtcaccccgagttaagtaagcacgagcatgttgcaccgtcttaagtcgttgccgacttaagccgattgctccgttagcatggcatagtggtcaccccgaattaaataagaatgcaggtcgaccatgaacaatttgagtattcttgaggtctttttattgatgatatatttcccagtttaccgagtacatcatcgtcccgatagcttttgaaatatagctaggggtaaaacttcctgaggtgttctatgttccatgagttcccaatttccgtgccgtccatctgagtgagacgatatgatcccggccgagtgacctctgctactatgaatggtccttcccatagaggtgacaacttgtgccgtccttcccctgttagaattcggcggaggacgaggtctcccactacgaaggatcgacgtcgcatggtcttatcgtgatagcgcctcagagtttgttggtaccgtgctgattgaattaccgtgttcagccgttcttcttcaagtacatcaacatcctccagcctagtagcctcggcttctgctatgctttcaaagatcaaccttggcgccccaaacttgagatcagcaggtagtattgcctctgacccgtagaccatgaagaaaggagtatttccatgcagagctcgactaggttgagttcttaggctccaaacgatgtagggcaactcccttatccactttcctgtgaacttttcatttttatcgaagacttttttcctgagtgcctccaatatcatcccgttagctc

SEQ ID NO: 60886 - DNA, 681 bp, Zea Mays
caacaccagcttgttggcggcgcaagtctggagcttcgtcgcgggaggaaaacagagtacctagacattcctctcaaggacaacattaaggggtggtgccttgagtggttcattgtggagaatcactacaagtctctccccctcggttagggaggcagccaaatgtccacacatcgagttggatagaatctacgaccccttcggagataatagaggctaaagtgctgcttgccgaggtctgcttattgaaggatagaggtctgactgctgaagctgtagttgttgacttcattttcaagaacatttagcccttaaaggatagggcctaccctgcttatttgtacagcggtgtcaacgactctacccgggtcacgaacagaaaaattcccactgaagatctgatgagtcgactagacatgatcctgaggggtagagtttcaaatgctggtgctcctgtggcctattccgcgtggaacctgccaccacttaggccattctctgagtttgtgtccaaccctcctgctcgtgacagtagcctgggtcttagagtgcgaccctcttctgaggacattgaggctttaattgccccactttagagtcttccagaggatgagaagcagactcattttgagatgccagctagcactgatgacgcggagatagatgttgtgcttagcttgc

SEQ ID NO: 60887 - DNA, 452 bp, Zea Mays
tccactagaattgccttgaatattggatcacaagcctccaattgaaccttttgtcgctgaggatgcagcagtaaaccttgagattgatttgcttcctccagtcatggttcgtgcaccatatgacaagggcttggtgctcttagcatcttgttgctgctggcgttcagctttggtggcttgatgtaccaaatcaataagactttggtacggctgaaactcaacaatacactgaatgttgcggtgtaacccagtcatgaaacgtgcaatggtttgctcttcgtcttcatatacattggctctaatcatggccttcccatctccttataatactcttcaacagagaaacttccttgcctcaaattctgcaatttatcaaaaagatcatgccgataatgcttcggcacaaaacgaattctcatttctcgcttcatctcttgccaagtaataatagg

SEQ ID NO: 60888 - DNA, 406 bp, Zea Mays
gttttacataatgaagatctgtaggagcatgtttcaggattttgttataaagcttcaacttcggttcttcattcctcactgacatcagcctgaaaacaacattgtatcaatattaagcaataacaaacatgaagaaggtagtgggagataagtagacaaaaattttcatacttcatcaagcagcgcccgaacttcgtctctggcaacttcccgtccacctttcgtccaaatctgggtaacaaatccattacccacacttctggcttccctaggtatgttgcccaggtcagatggggaaatgctgaaggtcggcttgttaacagtcttcaagtggttgcacccagctttggcgaagatagcagcagtccctcgagcagctactagcgcacagaaatcgccacgtccc

SEQ ID NO: 60889 - DNA, 521 bp, Zea Mays
gatgtctttcgggctgaccaatgccctagcttacttcatgtatttgatgaactcagtatttatgctagaactggacaagtttgtggtggtctttattgatgacattctggtttattccaaaaatgaagctgagcatgccgagcatctacacatcgtacttcagcgactgcgtgatcatcgtctatatgctaagatgtccaaatgtgattgctggttgaaggagataaaatttttgggtcacaccatctctcgggatggggtatcagttgatcctgagaaggtataagaagtgatggattgaaaacctcctaccacagtacggcagatccgtagttttctaggattggcagggtattatggacgatttatttcggatttctctaggattgccaagccaatgactgaattgttgaagaaaggagtcaagtatgaatggagccagaagtgtgaggatgccttttatacactaaggcagcatttgacaacaaccccgtgctagctcagcctgacaacaccaaaac

SEQ ID NO: 60890 - DNA, 476 bp, Zea Mays
cacgcagaaggaggtttcgcacccacccacacgtatccattcacaggcaggagtcgcatatctatccgttgcaacgaaaccccatcgtgtgccgccgccgaaccatgtccatgcagcgcgcgcgcgtgcatttgtatttttctgtctctggtcgtacgctaccgatcgatgggtgcgcgccagccctatacatactccttcggtccatccatacatattccgtgccatgcgatgcctacatgtacatcatagcacacgcacgtcgcctatcaggagcagtagggtggtgccgcgcctgcctgcctccctcccgctatactactactagctactagtactacttttttcgagctttagatatggttgtaccggcttcggttaatttgattgcactttttaacggcgcttgcaaatcacacagttaaaactgtactcatgatgggctagctcctctgttcgacacgtagcaatccggg

SEQ ID NO: 60891 - DNA, 522 bp, Zea Mays
gagaaataaatcagaaaattgcactaactcctagtgtcattctctcgattagagtgagagttccgctacttacaagagtttgggagccttcaatggagtgaggaagcgttatctgaaggttggtgagagtgaaatgctcgagattgtcattggggagaagagaagtgggtataaatactcagctttcaattgatcgtcaaatcacaacagtaccgtggaacatgcggcagtgccgcgcaagccagcaacacaaaggtggattgtttctttggatggcttggcttgaggaaatgtgtttttcggaatttagttgagcacttggttacatatgtatcgctacgggtgcacttggttacatagcttgatatagcttcaagcctcgccatgggtgcatatgtctcatcgaggtctggactcttaacttgtgtgaagccttgaacaactaatcttgccttgtttcttgttatcacaccatttccatcttgtttaatgcggaagacccatttggttccaatgatattg

SEQ ID NO: 60892 - DNA, 509 bp, Zea Mays
gctttactggcaagaaagtcaaaacggctatttctaacactggtattcgggctgatcatcgacacacacaatattaaggtatactgttgcatttgtttccaacatgcccttaacacacctgcataataagaagtttaaaaggcaatgaaacaaaccttgaaagtaagcggacgctgctggtccagttgactcttgaggccctgtttggcgatccttctgcctgatctggaaaaatcaagattctcttccgcactcccgtcccgcttgatgcctagcgagatttgctttccgaagccctcagaaatttacagataggagcaagtgggagcaggagcgagatcctagaggatctgcttgagaacgcacggtaccaaagcttaaatttatgggtgtccgtgtggatttgttgaacagcaagtaggcctaaatcgttaatgattaagggccgtcgcatggtatcgtcgtctgagcatgctcaaaacaatagtgataaaaagaacaactaccgg

SEQ ID NO: 60893 - DNA, 293 bp, Zea Mays
atgtggtcggtgatgtggtcggatacgggttaggatattacctcccacccgtagattatccgaaatcaactcatagtttttttgacctagtccatattgcacagcaaagaacaactcctaacttcatgaacctcatgtctaacgctctcaattccccaccgttggtcaccccttatagccttgctagcttcctacgctatgccccgtgtcctcttccaagtctcataggccgcaacacagctggcggcaggttggcggttgtcacttctaagctctagtgcccctagccatag

SEQ ID NO: 60894 - DNA, 576 bp, Zea Mays
gacccaaaaaagatggtatagaaaatttaatcttagcataagggtcgtcaggagcacgattgttattaccttgctagcggtgtgacataccttctatgttttgatgaagacggcgacgtaggcgcaaatctctggtggccgcttcatcataattaccttcttcatcaaacactgcatcatcgggaaggcgtggacgaggaggtggtggtggtggtgcttttgttgcgtctccaacacagcaagtctgtcgatgatctgggacaatcatcgatccagcctctcgtaagtcttgccaaggttcatgtcaatgaaggcatcatgcactgacttgtggaccgtctcctccatttgctccttcaggagcttgttgtttgcctcaagatcttggtggctaacacattcatcgaagtctatagggatccttgcttcttcttcgtcgcctgccatcgaaacacaaaaacaggaaacaaacggtgacggttatccctaataatttcactacacactcctctcaggtggaacacagaaacacgctctattgtatcttaccaagctcttacaagtgtctgacgaaat

SEQ ID NO: 60895 - DNA, 712 bp, Zea Mays
tctcgtagccgctgcccttctttttctttctgccgtcccgggggatggcacccgaacctcccgtctaggtggtcccggtttgtggggccgagtgccatgctcggccttcagcagctctggcacacttgtccgccagggcgaagagcgtggggacagtctccacatcatgtgtggccagtttctccaacattttcttatcacgtaccccctgtcggaaggccgtgatgatggaggaatcggaaatacgaggtatcgtacctcgcaccttggtgaagcgggagatgaacttccggagggtctcccctggatcctgcctcacagcatggaggtgggcctctacaccgtgctgttgataagcactagcaaagttcgccacgaaccgcacacagagctcttcccaggagtagattgatcttggggcgaggttcatgagccaagtccgggctggtccagacagggcgacatgaaaatatgtcgccattacggcggtgtttccacccgccaccgtgatggcggtgacatatacttgcaggaactccgatgggttcgttgtcccatcttatttttccggcaggtgtggcaggaacttgggcggccatgatgtcgtgcgaagatggtcagcgagggcggcgcagcccacgccggtcaaggagacacccgtttgggaccaggcgcccactggtgtttgcggtgcctccgcagcgaaatcttg

SEQ ID NO: 60896 - DNA, 806 bp, Zea Mays
gaaccgaccattgagggtcgatctgatagatcttcacgtgagttccccagtggagttgccaaaaagtgtgttggcgtcgatttaggtgccaatcacttcgaggtgtaccggtggcgatgctctctgcgacagcgtggatggttcgtgactcagggtcggacgatccgcgacaaagccagacagtccacatctggtggtcggatggtccgcgcgtgcatagggccattacttatgtctcgtgccattactattcatctaatttgaacgatttcactaaaactttttagaaagtagtctggtgccattacttatgtctcgcggttccctttagacatacaatgcttgttgtatagaccaaactacccttgcttgctgcttttacttttctcctccaaatcccacctagcccgaccaaactctacactacccaacccaaccctgatagtaggcagtgagggtggcgatttaagctgggtgattttgcgcggtggcgcttctctctgatctctcctcttgtggagccatcatccatgttcttttgtcgtgcactcccatccattgtatccatgttgtaaagacggggtcagatgagagttccatcatgcttgagcggagtttgtagtagcaatgatgagatggaagttcctctgatcaattgcccaaaatgtactagtgtagtatgaaagataccgactagagggggtgaatagacggttttaactaaatcaaagacacttgggaaatttaattatagcaataagggatttaaacgttttagcctggaggttgagctaagtgggtttgca

SEQ ID NO: 60897 - DNA, 467 bp, Zea Mays
gtggccaagcggggttgtaatcttccaaggaagccgatcgcgcctgcgattggggtcaggcgttggtgcggtgggcgaattgctcgtcgccgtgaccactgcaggcagggaccgcccttctccgtggacgagcgtcgtctgatctcggccggccattggtaagtccccaccgtattcgtcctcccttcctctaggctatgcactagcgaatcgtaggatggtgcagctgaacccctgagtccactgtccggccatggtgttgccgcggcgcgccgtgggcggtactctgggcttgttgtgagcaggaattggtgggggaaacgggctcgtaatgtcactaattaggcaaggagcgaacgaattagaagatggctggctgggtgattggagtctcagctccggcggtcttgccgctgcacggtgggttgcgccgccgtgcgtcaacgttgggggaagaagagggatcg

SEQ ID NO: 60898 - DNA, 592 bp, Zea Mays
ctcttcttctcttttgtcttatctatgtcaagttggaagtatgtctttatgtctagagaaatataggggcatttcttgacattcttccctctatgtgcaagatgttccttcaatcgggtaccacccccaccgctctttgtttctttacaatacttgcacttaaaacatgtgtcaaccttctctttgtgctgtcacaataggtctgtcatgtctcttacagaacataaacatataattgattgagcatacacatttaacaataactaatccataaactattgggcattcacatttaacaataaataaatcataacacatttaacaataactaatccataaaccataagtcatcacatatgtaacaatactaacatataacatatataaatctgaaaccctaaatccgaaaacatattatcgagacgaaatctaaaaccctaaacgccacaaaactaaatctgagcaataaatacgtagtatagaactaaatatgggtattgaatccggtttaccggaactaaaacatggtttaccttctccaatcgtggtaaaccaccagcttctggcgataaatcgacggggctcgtgggag

SEQ ID NO: 60899 - DNA, 551 bp, Zea Mays
gggttgtccagatctatctaggttactgtaacgccccgaatttgagagttgaaattttctttctccagcactcgctaaattcgggcgttacctctcttttcccatttctttttgctaaaccttacccatttccaaaactctatgtcgtgtaataatgataaatcctagaagtgggtttctttggttgttgcatcatgccgagccacgcatcttttccttcgtgtttattcgcttagtcttcgttgggtgtttatttattaatttagagaatttggagataagaggaaaaaagggaaatagaaaaaacccctgataggaacgggggtgctcgatcttccgtcaggtgaagataactatcgatttggtggagatgtcacacaaacgatccggcttccaatcaacacgactagaaccccgcaatcgcagcaccacttctcctctggttatcaaccgtgtgctgcgcgattgacctcgccacgaaggctaatccttgcctgcgaatcgaagacacaagcaagaacaagaaagaacacaatctagaatattgcgga

SEQ ID NO: 60900 - DNA, 296 bp, Zea Mays
catactgtgcatcaagggtgagcaggtatgcagtgaggtacacgactgtggggtcatcctcaagcagctgctgtccttccaatgcacgcatcctggccatccaagcgggacgatctctctgaaagggcggaaagaatctgagcggagtgtcggccacttcttcttcgtagatctgacacagggccctcaatgccttgcgagcgacaacttggcaggtgtctttgaatctgtgtccagcagtagtgacactccattccacatggtgcggactggatccaatgtatacagtcacgaca

SEQ ID NO: 60901 - DNA, 358 bp, Zea Mays
caactcctcctgctggctggcagttgccgccgccgaggcgtgctagacaatgagtgtgttctaggttatacggtgggctgtgacaaaatgggcctcgtttatgcaatcctgccaataaactaacgaaaaatgtttattagaaaatatatcgaaaatagagcatacaatcctcactagtgcaatggagatgtgctcctttttccaaagggtcacgagtttgattcctcgtaagctcacgttaacaatcgttttttcaccaagtcagggcatccatttgccgacaaatgatccgatgcaaattttttccgacagacgctgcgccacgcataatcatttatgccgacaaatagactaccat

SEQ ID NO: 60902 - DNA, 319 bp, Zea Mays
cacccttgctgatgtcacgagttatctcatgagaccaggcttattggagctggagttcttcatttgccctcgcccttcctctccacgcagtcatggagctcgcttctctatccttgccgacgagcagggaggctgtgtggctcgttactcggctactaggaggagaagtggcgtgctccacacatggatttggcgtcgacctcgccagcctttgtcctggagcatccctcaccgccagttgtccaggatccggtgctaaccccgcttcccttcttggtgtgttcgttgtcgtcggttgtcaaggagctagcgtcactct

SEQ ID NO: 60903 - DNA, 880 bp, Zea Mays
aaaaatatcgttctcagattcatatatgaacccggccggggagcgagaggaaagcagaaccaaccatttttttcccggcttccccgtcgttgctctaatccatctgaacagtcttttaatgagagcctattacacctgaccatcctgggtcctcctcctgttgcacttgacaacccattcctagctgggcacaacacggcgctcactctagaatctagatataccaaatcttttgcaggattactgttgtgtaatactgttcagagggcccaagactcgatcacccacaatgattggccaccacttaggccaaggagaaggagccatggactgattgtgtggctggaaaccatgagctctcttgcagctaacagggcaagggtgactgaggacctacttcatttgtttattcgggatggaattcagagaccaagagatccaatcatcgtctaagcgaaaacaaaatcccacctttttcttttctttctcaagggcacccgacacaattaactaagacctacatctcgatcgatgataaatagtatattggcatctagtggtttggaaaacaaaagaagacacaaacttttgctggccttaggatggcatggcaaaattttggtggcatctaagcactgttcatatctaatataatactctacccatttttaaattataagatgttttatcttttctagatatactactttttactatatattaaggcatagcgattatctaaatataaaattaaacatatgtatgtagaatatatagtcaaaacgtcttataatttagaattggggaagtaccattttatacgctcccacaggttgcatcaataatagtatagctaatattattatatatttgtcatgca

SEQ ID NO: 60904 - DNA, 726 bp, Zea Mays
ctgcgccgccgttgactcgcttgtccgccgtcgatttggggtaaacgcggggtcttggcaactcgcccgggcgtgtggagcgtgaccgcggcgaattggggacacggatgcctcaagtgttggggaaatttctcgccgaccggccagcacttccgccattcgcaactcaccgcgcgctggaagcttcgctccgtgcctactggtaataccccttcccacgtattgcttttcgcctagcatcgagtaggagggtgttaatcgagttttgggggcagcgaggatgggattttgggtgcactccggcgatgcgccgccgtgtccgtcgcgggcgccgccgtccggtcacctgggttgtgggagcgtttctgaccgcgggatctaaaagctgcggtcgggattaggggatggcccggtagttaatcagaggtagagtttggaacttggcgcaagcaaccaggtgccgttgatctgagatttaacgcatagggttaaatcgcggatactgaaaatcgggaccgtagaattttgatccgagggctggggcgaacacgcgtcatggtgaactcctggtcttggatccctgatcgcacggtcaaaatagtgtaccgtttcgtgtatgggaaatctaatcttgaccaccgattactgatcgtgtggtcgtgatcccgcgatccctctgcgcccagacctttttgcatatgagtctctagattatttcagaatgaa

SEQ ID NO: 60905 - DNA, 604 bp, Zea Mays
accgtactcacgagtttccctgttacattttgcacaccgcggattgataatctcgatcgctgagacgctcggcaaccggccggtgatggcgccgccgtggggaaaccacgacgtcgccgttgttggtttggagttggggcgagcgttttcggccattgatttattcgtgtacggtcccgattaggtgcgcgcgtacccgttcatgctagtagacctggatcgcaggatagagatcgtgcgggcgaggggtaatcagggccattttgaatctgggacgcaggtagtcgatccagcggtcgtgatcgcgtaccgattcgcgatgtcacggatctaatctaggcgcctcatttcagatcggacgactgtgagatcacggtacctctttggccgatcagtcttacataaaagaccctggggttttagaaaaccaacccaccgtccatgcgctagtagctagagtcatgggaaaactttggtttagccccctgcacttctcagtatttgatgcccaatccagagagtaatgaaaataggaaattaataacagaaattgatttttaatgtataaataaatgctagaacttgtttaatttgtagaaaattc

SEQ ID NO: 60906 - DNA, 597 bp, Zea Mays
ctgtggactcacccattaattcgagatatagtaggttgatgcgtatctttgctagtacctacaattcttgtgtgataacgcgctctctttcaccctattaataaatgacggagcatgcagttaaaggagcacgacactacactgcaacatgcgagagatgatagttgcattttggcaaaaggagagaggaggtgttcgccaaggcaagcaatttgctccatatgcgggcatacggtaggcttcgaaggcatcgggagggatctttctgcatctgaccattcgtcgttactcattgtagatgtaggcttccagtgtaattggatcctgttagcatgaatgattcctaaccatatcttttttttagataatgaaatcaaacgttatttatggtttcacccacaacaaagcatcataagaaatgagcaacacattgagcttctcatacatttaaattatcttaaatcatatattatagcttcgtgttttcaaaagactctaactatagtcttatgttacaacccttgttacaacatcatgcttcaagccttggcagctgcttcttcatcatcatcaccatcatcatcatcatcatcatca

SEQ ID NO: 60907 - DNA, 928 bp, Zea Mays
gtccatgcagatctttgtggtcagattgctcccaagagcatagggggtgcatcttattttctgctagtggtagatgatcacagtagatacatgtgggtagagatgctaaaatccaaagatcaagcgttagaatgtttcaagagaattaaacaaagggctgaggttgagtctggaaataaactgaaagctttaagaacagataggggtggtgagtttacctcaaatctgttctccattttctgtagtgaaggtgggatcaaacactatattacaactccatattccccacaacagaatggagtagtagagagaagaaataagacagtggttgaaatggctagatgtttgctcaaaacaatgcaagtctcatctgtcttctagggagaagttgtcaggacagcagtttatttactgaacaggtcaatcacaaaagctctaatatctaagactcctttcgaagcctggcatggaaagaaacctagtgtcagtcatttgagaatttttggttgtgttgcccatgtgaagttggttggtccaggtttaaataaactggctgacctagcaattctgacctgacctagcatattatgtaggaatgatgaccaggtttatggagacaccaaattctgaacactggactgccattaaaagaattgtaagatatgtggctggtacaacacaatacgactgtaggtatgtaaaaggggacagctcagaattgttgttatattcagacagcgaccatgcaggtgatcttgaaaaaaggaaaaagcactattggtgtcatgttttttctaggaggaaatataatcacttgggcttctaaaaaacaaaaggtagtttctttatcctcatgtgaagctgagtatattgttgctgctacagctgcttgtcagggtgtgtggttgagcaggttgctcagtgatct

SEQ ID NO: 60908 - DNA, 755 bp, Zea Mays
cacaacaacctacaccaaggcctgcgcctgtgttcctattagacggggcaagaggatgccaggagcctacacaacgaccaagaggagatacgcacccagaagatgtagcaccgccagctctacttgatgcctcatgcttcgtattatagtaactcctaggcccacctgtcggggcccagctcccttgtagtgtgcccccttggagtataaaagggagggcacttgcgatacagagggtatcagtgcttaggtcctgactgcgcactacggggtaacccacgtagtgcttttgggagggcggcatcgctgatcgtgactcgatggtacctacatgagcacgtcggtacacaaaggaattatacaggttcgggccgtctgaatgcgtaataccctacatcatgtttgatgctgagtattgagtttgctggtagtgcacggattacatacgatttgtgggtgatgatggatgagacctatcagtctaatggtggcatggttgcgacgagaggaatgtcgagagagttttgtaggggtaccctctgagccttatataaccagctgaggagacgtccctttacagatcgtgagatcttatctggatctatctacttttgctactattgcgtgacgactcttccagtggttattcccttcgagttttggcatcatgtgatctgctatccgtttgcatgcagggcgtgttacacggaattccgttggctcctctgtgatatatgtgcatagataacatcttt

SEQ ID NO: 60909 - DNA, 677 bp, Zea Mays
gtagtcgactccacctctgggtgtggggtgttgagctttctagacgcatactctggtaaccaccagatcgcgatggagtccaaccagcccatgacttccttcataaccccgttcagttcatactactttgtcattatgccctttggtctaaaaacgacagggccacatcccaacaatgtatggtcaagtgcttcagcgacctcatcgacgaggtcatggaggcatacattgacaacatcgtggttaagaccaaaccagatgtaggtttggtggctggccttaagaaggcctttgacaggctaaaggcaaacgacatcaagcttaaccccaaaaagtgtgtctttggggtcatagggggcttgttgctaggtttttcttgtctccgaacatggtatcaaggccaaccccgataaaattaccaccataaaagcatggaatcgattcataaccttaaggggtctagtgaatgacaaggagtctggccgccctcagctatttcatctcatataagtaacggtgaaaaggcttcaaagtcgttcctaagggaatgcagagctcgattctgtcacctaagtaacggggaaaaagctccaaagttgttcctaagggaatgtagagctcgattatgtcacctaagtaacggtgaaaaagctccaaagtcgttcctagggaaatgc

SEQ ID NO: 60910 - DNA, 544 bp, Zea Mays
cggacgtgttgaaggtggccgcaaccgaatttcagaagacaagccaccggcggcaccggaatttgtcgccgtcgactcaacaccaccgcagactcgcaatccgtcgtggtcagctcggtgtccaccaccatcctcggtgagttctccttcccatgtttcgcttgaatctctagcacgtttagagtagctcggaattggcctaggtgcgttagttcgcgtggccactgccgatggcatgggcgccgccgcggcacgccgggggccgggtcctacactcgacctcagccaaaattagttgtagcattgagttctgggagtcgtcaattgtacgttggatgagtgaatcgggttatggcgttcgtactggccggattcgggatctccggagggcggaccgccgtgaacgggcgcgcgccgccgtgctcctccatcggaggtaggagatggcctttggtccgttggatcgtgaacagagggctacgattagatcgggtgtaccgcttcggtgcgtgaaatcgggaccgttagatcgcgatcgggtggt

SEQ ID NO: 60911 - DNA, 636 bp, Zea Mays
cgacacccatgccttctcctacctctgtcaccacgcatgccaatcctggcatgcccgtcagcaaacacgacggccatcgcagctgcggcgccgcaacggtactaccggccgaattcccccgcacacggatacaaaaactcgacgccacggacgctacaagtctagcagactacaacgaactccaaggggacgtcttaccgggtttggtgaaggcagggatgcggctggagcagatgagagaccacggccccatacggatgtgaagaaaagacatgaagcgcccgtgactgccgtgttgtggaggcacatgcccagcgctcgtcatcttctccctgtggtcgcccagaccatcacaccctagacggcagcgtggctctccccgcgatggcgttagtgcatttcctgcaaagcactctggtgcatctgcacacccatggcgaaggagaggacgcagggtccgtttatatacacatgggtagagccatgagggcggcggtcgtagcccgacgtctgttacggctcgaggagatccgctcgggagttccggtgtttagttggggaagaagctcccgtagaggtggccccacatggtaacgctggattctgaggagcgggcccggcagggtagcatctacg

SEQ ID NO: 60912 - DNA, 580 bp, Zea Mays
aacaatttctggaactgatccactccttacagagcttgagtgcgttcgttctctatgggatttactctgttccaaggacattgaccaaagcaggtacatgttacacaaattacgaataccgtatttataagtttggttcatttatgcaatatgaatatataactatgttcatcatacagggttgtcatagattacggtgaatacagtgcaaactgtatcgatatttatgaatctttcgcagagggcaaatgtcctgagaatgtcttcatgcagtgtttcattgagtgtgttcgtgatgattccaaaaatcatcgtcgaactatgatatctaacagattagtacttgatgtcaatgttggggtaggttcttcttcacagttattgtaactatacacagaatatacttacatactctatttttgtttttttaggctctgttaaattttgaagagcaggaacgtcatagaaagaatcctcagccgtttgatcaaaatgtgttacagaattgcttgcacaacacattgcctcctttggtaaatctggataaatgcaagtcggtaagcctcagtaacattttgtt

SEQ ID NO: 60913 - DNA, 387 bp, Zea Mays
tctttggacctgaacttattcaagaggcagaagaacaagtccgtataattcgggagaatttgagggtagctcaaaccaggcaaaagagctatgctgataatagaagaagaccactggaatttgaggaaggagatcatgtgtacctcaaggtgtcgccacttcatggaatgaggaggtttaaagtcaaaggcaaattggctcctcgctttattgaaccatacatgatctttagtcgagttggggagatggcataccaactcgaattacctgataatctatctgatgtgcataatgtattccatgtgtctcaacttaagaagtgtctccgtgtacctgaggaacagttaccaatggaagagcttagtgttcagggagatttgacttata

SEQ ID NO: 60914 - DNA, 444 bp, Zea Mays
aagacaaaagcaagagtaacaagcgagcatcaagtaataggctttatgtcacccaaacttatagcttgacgtccaagtccttccgggcttcatcatcacaaacccatatgtcataatataagtccctacattaaagagatgtaatcaattgtagagttcaaatggccgcacagatcattgaacctagagcaagtagcacgtgttcaatgatgcagcctctataacatgtgacatgaaaacgtaataatgcagtagctgccagcagcaggagcctgttcgacacagatgcctgttattgttgtgcatgagtatattcggttgttccatatctagtagcagtcagcaggagtgcaccacacagcgcatgccgcatgtagctacttcctgctgctctaaccaccagcctggaattagatcatcacaacttacctcgacaccttcttg

SEQ ID NO: 60915 - DNA, 416 bp, Zea Mays
gttttctgtaatagcatgttggttgtgtcatctgtagtattgttagtcttcatcagtactaaaagaaacagactcgttagtctcacatcaatgtttctgtacagactcgttagttttcaggcgggccacacaatcaatattttaatagtagagaaatgctcttttttctttgcttttcaccacacacaactaaaatcttcaaatattgtttagcatttctcctgtatggtgtatgatctaggcaatatgataagctattgagtggaatatctcattctatattggtagatatttatttacttattcacgctagcttctgcttctacagattcacaattaaacatataatggtctgtagtaagagtgcattatcctaggctacacaagggttgttcagaaatcttctctgccttttc

SEQ ID NO: 60916 - DNA, 437 bp, Zea Mays
aagccatagaatgtttttacttggttataattcaaacacaaaggcattaaaagtcttccacaaatcctctaaatgtgttgagatgtcttgtgacgtcgtgtttgatgacactaaggtatctcgaaaagagcaagttgatcttgatgaaatagatgaggaggtggctccaagcacgacgttgaaaaacatgtacataggagatgtatgtccacaagagcctccacaactgcaagatcaaccatcctccacacaagcacaacccccaactcaagataaggatcaagaagctcaagatgacgccaatgatcaagggggagttgaggaagaacaagaaaaggaggatgaagatgaagaaccaccactcaaaagcaaagtgctacacccaatagtccaccacactattcaaagagaccatctggtggacaagatcctaggag

SEQ ID NO: 60917 - DNA, 781 bp, Zea Mays
ttcagaaactcgacgtgcaagttgtgactctgtttgcactgtaggtgtcgctcatatttccacatctatgtgttattaattttcaatatctgacacatgcacgtgtgacttgtagaatgcaacatgaccaacaagagatcctgtacggtaccaagcccgatgctaatgccagtaaaaggattgggtatctgaacccaataccgatatgtgaggaaagccacactttcagaatcggcaaagacaatgaagagttaaagggaaagacggacgaagaagttgagcatcgcataaatactatgaagaatgattttgaagcaagatacgccacctacatagcaaatgcaatgcttaaatttcaagacaaggaagctataatggccacgtacaactttaagtaagtgtggttttgcataaaaaaataataatttcaatacagattcataacaaattaatttgattcgtacaggtaccactggatatgcttcctcatttatcctaacgttggaaaggtgctggtgctcgactccttgaactatgacccttcaacctatgcaaaattccttagtatcttagagcagtaagtcttttctttgcatgcatgcatacttatatcgttgagaattttgaaataacatggagattctatttgagatcacagagcatttaggttctataagtttaaaggtggaaagtacgacaagaccaaaaaatgtgttctactagacatccatcatcactggctggtaactatgtgaaattatgaatacatatcatacacaat

SEQ ID NO: 60918 - DNA, 1023 bp, Zea Mays
taaactgttcgggtttgatttttccgttgaatatcgacccagacgttttaacacagtggcggatgctctctcccgcagggacgctgaagcaatggagtccctagccatatctgtaccatcgttccagctatatgatgaaatacgcagtgatggcagcagcagaccggaatggaaacaactacatgaacaaatcctcaatggcacccaatcggcgccatgacacatccaagagggcctaatactacatgggtccagggtatttgtaccacctacatcacccacaataattcatattctacagctagcacatggcgcgagacatgggggttccaaaagacattacacaggcttcgcgcagacttctacattccaaatgacagaactctggttcgtgactttgtcaaatcatgtacagtctgcgagaaaaacaaaactgaggccttatacccatcagggttgctgcaacccttagaagttccctcacaagtttgggcagacatagcgatggacttcgtggaaggcctcccaaaggtgcacggcaaatcagtcatactaactgtggtggatcggttctccaaatatgcccatttcattgccctgggacatccttatactgcagcctcagtggcacgagccttctttgacaacatagtccgtcttcatggatttccactttccattgccagcgatcgtgatccagtctttacaggcagcttctggcgcgatcttttcaaggtggctggggtcaaactccacatgagcacgactttccacccccagacagatggacagtccgaggttgtcaataaaactatagccatgtacctgcgatgcctaataggagataggccgcgggtgtgggtcgattggttgccatgggcggaatattgccacaacactgcctttcactcagctctccgcactacaccattccaagtggtctatggaaggccaccaccatccttactgtcgtatacgcaaggaacaacagccacagatgcagtagatgatctattaaaagac

SEQ ID NO: 60919 - DNA, 484 bp, Zea Mays
ggagtagtcgtcgtaggcgaggcaacttcgggttctagggggtccggggtcgtttgggtaggccataggcatcgggggtgacccaagggaccttatggtggcgctccgatcatgagagagagaccgaaggtgggggagcggtggtgaggtgatttgggtgggacgggaggtgctccgtcaagaaatcccgaccgcggtgagggccgatcctgtgaactaaggcctacatgagcttcaatgtggggtcaggtgcgccggtggctaagaaatggacaaggagcagggctgcattggctgggcgacgtggaggtgcgatggtccagcgtgcaacgacttcgatgagcccgaattcactacagtgacgcacaattaagaaaaaggggctgggtagagttccttacccagggtggtgctcaaggagacctagcgcgatgctggggggctctattagtcagctggacgatgaggaggcgcggttgcactg

SEQ ID NO: 60920 - DNA, 386 bp, Zea Mays
gtcgcacctattaaatctgaaatcaagttgcactctcctgttttacttgctacacgtgctgattttgatgatctccatgaagctcatatgccctgttatgcacttgtatgctcgtgcatgcttgttccgtttgatgatgccccgtctttggatataccccctgctattgttaaccttttgcaggagtatgctgatgtttttcctacggacttaccacctggtcttcctccgctccgtggcattgagcatcagatcgatctcatccccgacgcttctcttccgaaccgcgccccatatcgtacaaatccaaatgagacaaaggagatccagcgctaggtgcagacgctgcttgataaagggtacattcgtgagcctcttagcccttg

SEQ ID NO: 60921 - DNA, 382 bp, Zea Mays
ggagaccccaaagaatattgcacgagtgtaacatccatgcatgtataatacggaaggatcaccagagttctgaagattcgtcccacaagcgaccagacgacgaattactcagaagataactcggagaaggcaaccgaacactagaagattaggcacacttgtagggaaaggaagtaggcttgagtaagactcaaagatctgtaaaggatatctctctagtcggctatataaggctgcagaggtacccctacaaaaaaactctccctagatggctcaccattagattaattggagacctcatcttccacctcccacaaaccatatgttatctgtgaactcaaggcaattcaatactcagcaccacacatgacgtaggccggat

SEQ ID NO: 60922 - DNA, 386 bp, Zea Mays
ccggatttcaggtacacaaacacaaagcaacaagcatttcagctacatggcttgtttatgtatgatcttgccatggtcctgggcgcagtttgctccggggaaccctgccgaagtgctggtcacatctgccgactcgcagatccgtgtcttcgacggcgtcaccatggtccaaaagttcagaggtacggcagacacagattaaaagatcttggtgcgtgcaagtgtgactgcacgaccatctcatcgattctgctgtcttcccctctctgttttccaaaggtttcaagaacacgagcagccagatcacggcggcctacacctcggacgggcggtacgccgtgtgcgcgagcgaggactcgcacgtctacctgtggcggaccacccgg

SEQ ID NO: 60923 - DNA, 370 bp, Zea Mays
gagccgatagtgtatgctggaatgtagagtggaaataagggggatagagttttccgctaacctcataatgatggtactcagggaatagatgttatcctagggataaattggctagataagtaccaagcagttatcagctgtgataagaggacggtgaagttggtgtccccactaggagaggaagtggtgactgagctagtctcccgagccaaagaaaggaggttgtcactagatgactattaatagcaaagagactgaaccactcgaggctatcgaggctatgtcagaatttccggatgtgctccctaaagatctaccaggtatgccacctgtgcggaaagttgagtttgccatagagcttattcctaac

SEQ ID NO: 60924 - DNA, 380 bp, Zea Mays
gttcgggtctctgttaggtcctagcagatcaaaacaaacctggcattaggtcttttctttcttcctcggtccatgtagctatggtccacatgtcacttgcactgcgacatgaaccactttggcacaactgaggaggtgggccccacatgttcctgcttcttgcagtttacacatcccattcaacatttcatcgaacaccttgcatgtgtccttcatccgcccaaccttgcacatctcattgaccactgaattgaaggtcactaggttgggcttcaagctgccctccctcatcataccaaccagcttctccgtcccatccatgtctctagtgctacagaacatttgggccacagtttgcgtcgctcatgtctactcatgtc

SEQ ID NO: 60925 - DNA, 1334 bp, Zea Mays
ttctctgcagcagccacctctaaggctgaaggtccctcagtcacttccatgggagcagggcaatccaaaccagcttcctgaccctcaagaccgcgctccaaggtcgatgaggcgcgggacgctgcccgggacgacctcaacccggcatcgagcacaccagcacaaacatccatcgcgccaccatctgccggttctgataacagatcttctagaaccatgtcttcaagagtttgatcaaagttcaccagagataattcttgcagaccagtgagggcagacaaggcaggagaaggaacaccactactttccccactagctatgtaacaccggttgttcttccgaatcagagggatttcgtcctcttcttcatcatcctcatcaacaacacggacatcacacccattgggatcagcgtcagatgggtcacacccattgggatcagcttcagtaaattcaggcactggcacttcctcagcaacaggagcagaaggaccggcaccctgatccaagctagacacccgacgaagacgtctcttcttctttttctccccctcagcaggaaaagaggcttgatcggctcagcgagaacgtttcggacgaacattgacagacttctgagcgtccaaagctttgtcagcctcaaggatgggcgccaccaccaatgtttcagcaggagcggcatcagaggaatccttggctaacatatcaagaatgacacttatctctgcatcacttggattcaaaggcacctcaaaatgaacctgctctcgtcgtcaggaatttctccgagcgaggcaaccaaagccctaacttcttcaggagagggtcgcactctaagacccaaacagctatcaccagcaggaggatttgacacgaaagtattaaaagcctgggaaggaggcaaattccaggccgagtatgcaacaggggcgccgatgttcgataccttgcctctgagtatcatctcaagccggctcactaagtccacagcaggaattcttctgttagttacccgagttgagtcagccaagcctcggtacaaataagccggatatgctctgtctttcagcggctgaatgttcttgaaaacaaagtcagcgaccacagcttctgcagtcagacccctttctttcagcaatccaacttctgctacaaaaccctcgcttcagccacttcctggtccgtgggggactcggtccagctcagagtgcaaacatcgggctgtctccctgaccgtggggggagggaattcccatgattctccactatgaacctttccaggcgccatcccttgatgctgtccttgagggggatgttgagataatcagtcttcc

SEQ ID NO: 60926 - DNA, 305 bp, Zea Mays
gtcaccctcaacagtgccctcaggggctgagtcaccctcaacagcgccttcgggggctgaattatcctcaataccctcaggagttggataacccgtgcatgtaatatcaggaaccgaggtgtcccaatggatcaggccgccctcaaaggttaaagaagcatgggaaactgtccgagttatttcttgcccgataaattgctagctgagggaatgtcatccgggacctctgcacggatgccagcaccaccagtttcaggaagttccaataaaagatcttcgaggataatatcctacagagcatgatc

SEQ ID NO: 60927 - DNA, 490 bp, Zea Mays
gtcaactttcaagtcttttgcctctgcgtgtgtacattgtcgcggtttcgatttgtgtgttctgtgtctgtgtgtgtggtgtgggtcagaattctctgttgtatgtatcaccagtttggatgagaaaagagtacgcactttttgcaggatcgagggtggccgtgccccgtgcgtgcactccacgaatcacgctgatgacagatgtggtccggtccaatcaagtaaattcagatttttaaatacgtgaaaacttgcgctcctaacgcgcgccagcaggcagtgtacatgaccgtgcaaaatagattggaatttagcttgaaatactgttgtagatgggtgacaatatttacatgcatatgtgaaatgttgctactcgtaacaaagtaaggcatcatagcatcatactgatcatagcacaagtatgtcgaccatagcataagcgccatactgatcatatatagcagaaaacaaaaaccatacctatggatca

SEQ ID NO: 60928 - DNA, 530 bp, Zea Mays
gccttcgtctaaaagtgtagttcatgaatctgactgaaggcttcacaaaaagcttcagcatcaagttccatcccttgactccaaatagcccaaatgaaaatttctagactcattatagcgtttggggtgagctgatgaagataaatgttaaacctttttaaaaccgcgactatcatcttatgtagaggtgaaccttaggtcagccttcaaaaagctctgaaacatgacaactccgtcttcttttggattcggtactaactcatcacctcctaactgcacccactcaacattgtcaatatagccaaaatggttaagtacctcaaagtgtcctccttcgatcttggatttgccgaagtccacatggcttggcttcatgggacatatgatcatgttgtgcttcataatgttaattttgtcgttgtcttctgacggattcatagagctggccgtgacctaggaggtggtagctcccgctgctaaagcaaactctttagcccttgtctctagcacatctgacgaaggtgtcagcg

SEQ ID NO: 60929 - DNA, 337 bp, Zea Mays
tctcaaaccatagagactacctcctagggaccgggcaaccaattttctctttggtatactggtatccagccttgacacgtcgagtctacctcctaggggggccaagtaccagggggaagttgatgacgctacacacagcaaggacaaataacatacagataagtttaagttccaatgctacctcattagcggttcttagaatgtcttacaaaatcaaaatttattacagtcgcttcccagcggaaccctcgccttgtctatgcagattcggctactcgtcgtcagcaggatcatgctggaagcgctcggccaccagctccacggtgtcttgtacgct

SEQ ID NO: 60930 - DNA, 645 bp, Zea Mays
ctatcatattgtagcctgcctgctccaaatgctgcttcaccatggttatgtttttcctttggtgcacaatctctttccattgagtaacttcattctaaagtacactgtcaaaaaaaattctaggctctagtgggcacccgatataactggtttacgtgtagtacttgtgatttgacactgtaactttggtgtacccctaaatcacgagcaaaagcttgatgtaccactcctcattagtaactgtcgtggttctgtaattggctatatcttaagcaatattgcatgtagttgggtcttatagagatgttaacactaaacacttgctgtctaacaaaacatgatatttgcttctgtggtgaggtttatagaactgaagccctttgactattggaattgcgttatgttgaatttaccgttcttgggatgttgtattgcacaactgtcagatgcttcagcaccatatattgcagatcttatcatcatgatatcatgatgcacggatggtcattttgtgtaaatcggggaagggaaattacaaattggagaaatgccctttgacaacatatagggtcatatgagtgtcccctttgtttcaaaaattcaaagtacaccatgttttttcaagtacacatgatgctgtacctc

SEQ ID NO: 60931 - DNA, 464 bp, Zea Mays
ctccggtgatcgctggacatgcatccagtgagtcaccgtgatgaagtccagcgcttaggcacgtggcgcgcaacggcgacagcttgacggcggcaaggtaatccgaccgaccgatgagctggggaggaagtacggcggtcttagccgcagctcaatccgggcgccagatttttacctagtcgagcttatctgctgcccacggtgcacgaatcgcaacgagcaatcgaccaccggcgacagatcaccggcgacgagcaggggggttgaatctggatcttcttcagtttagaactcactgtaccatggggttcagtcagtctgacagaccttttttgagcttgattttctctcaaacttatatggcaacatgatcaacactctgtagcaaaattgtagagcaatataccatctacaacattgctatattgtgctgccacaaaaattcaatggatctttcttgaaat

SEQ ID NO: 60932 - DNA, 518 bp, Zea Mays
ttaactcaacgagctcgtcgttgatggttctagggtatcgaccgttgtcgtcgtcgtcatccatagcccaatcctttctctgcaccgtacctcaacggccctggcggcactagcatgaccacgacatagtcgaccggcgacctaccaaaacccacaagcaagcagcgaagaggagatttgggttagggattgccgattggggactggtgaggaagagccggagagtgacatacctgccaagccaaagacgagggtcaagtgcacgacgacggacgacgcgggagggagagtcgaagaagaggagattagggttatggttagggattgggattgccgactggagagggagagccggagagggacgtatctgccaagccgcagcccggagccggagacgatgacgtgggagggagagccggagtctggagaagaggagattagggttagggatttctcgattggggagggaccgagccaccaagggagagccagagtctggagaggggcgccgcacggaa

SEQ ID NO: 60933 - DNA, 393 bp, Zea Mays
gcgcccatgcaagaccttgcagcttggccctgatttcttcattcctcatgatgctgatgacgacacaactcactcaacccttgttgatgttgatgagcccatgggatcatcggactcggagaatttgagtgtgccgtgcacaaattttgttcggaaaaaacggagtggaccatatatttgtgcacggtctgcaaacagagtgtctgaagaagacatggccacaaatatgagcagaaggaaaggggttcctcagagatcgcctttgtgctaataaattcaatagttaattattttcccttttctttacttctttcatgttctttatctcttggactaaactggtgcaacaatgatagaattttgtctcagtactaccatgtgattaaaatacat

SEQ ID NO: 60934 - DNA, 876 bp, Zea Mays
gaggcgcagcccagacctttctatctgtatgtaccgtagggcttggaagaggggttgcagatactgttcagcgttcactcacatccataagatgcagttttgtgcccattagtaagtgtgagattatttatttaaactaaatttagttactgattgtattgttcgaaattactcctgctgtcctgcatgaatttcttttcaccgaatctgttgtgttacctgtttgtcaacagctactacattttcagacattggatctatacacacacaacaagttcgaccctatcttgtggtttctaggcggcctaaacagctccctgccattttttcgtttcgttcctagatcagttcttttttaaagtatagctagcagaatgagtagatggatattcaattggatcactaactatctatgaatgaacgaactgacgaaaaaggataccccaataattggtcttgggtttggggtttctaccggcagctgcgtgatgtgctccatttggtgagtttcagtaccgttcatattgggcgtactgagtacaaaacaaatagattgttgctagatttataatgcgtgttgtctggacattaaatatatgtgtattgtttatggtcacaagtaaactggttctgacagtgtgtacttttttccttcgtcatcaactgatatgttaattggtttgtaattcggtttcacttctttaccttagtgaggttcggacacccttttttagacaatttctacgttcaggtgccagatggtgatgccttccattgtatacatatatagtgttcactatgtgttgtaggatataaagttttttggctgaacctgtaacaagtttttggctttcattttttaaaatcggataacat

SEQ ID NO: 60935 - DNA, 305 bp, Zea Mays
gaagtgtgttcgattgccgactgagatcatagcagagccggaattggagatagagcctgatctatcgtaccaagagtacccctccaagattctggattgcaaagaaagatcaactcgggctaaatcgatcaagatgttcaaggtccagtggagtaatcactcagaggaggaagctacttgggaaaccgaggaattcctgagatccaactttcccgattacctacctaaggaagctggtacgtaatcaccccaacccctcctcctgcctttcgaatctaatttccaaaaatatgatcttaattcag

SEQ ID NO: 60936 - DNA, 392 bp, Zea Mays
ggcattactaagaattaagccctgcaaagaggaggaaagaattgagcatgacaaataaaatacttcattctcaaattcaaagttaacttctatacctttatactattgtatgctaggctgtcagcatgttcatccttcgacaaaatcgaaaggccatcttccagcttcgggaatcctatgcttttacctatctcccggtaaacggatatttctttgttgtccgggagacagtataagaagtcgccatcgtcagtgccgttaaacactaaggctcctttcggatatttcagtttttgagcataatgccttgcttccgcgacttcatcttcggacaatttcttccccgaagcatgtcgataaatataatcagcagcttcgaccggcgcttcggg

SEQ ID NO: 60937 - DNA, 700 bp, Zea Mays
ggatgggtccttctaggtccaaatatccgctacacaaaacttctctcctatactatgccactaccaaaggtataacccacaatatgactctaagaacatgataagaatggggttgttgagcttagcaattgaaatccgagtttaatgtagcctctcccctttaatgcactataaaagggagaaaagtaacagctaggggcattggaggatatcattccatgatatgatatgatcccaggttgaacacacccaagctaaccacaacatactcttgtgcataaggttgtgtagtaggaccattagactataacttccaccataaggttatgcacaacgaaccatgcatacagtcatgcaaaacattggtttgtactgtatattgtactatttatagagtaaagttcaaaatgagagatgggatggagatagccaaaccaaaaggcgagggagagttggaaggtcttgatgctcacatgtgtttgagcatataatattctctacctctgtgtccatcaattacgagggtggtggtggtggtggttgtgacgagcaccaagtcgtcgaggcattgtgtcatgagctccttcgaggtacctagtcacgagttttgggagggctgacacgctaggagatgcgacacgtgcaatagtgacaattagcttggaaactcaaattcccttgggggttggagggaaatgag

SEQ ID NO: 60938 - DNA, 653 bp, Zea Mays
aagggtaagagtatagtcaccggtaatcctgccaaatctacctcgatgagtggttacttagaaggccccgggcaagagagacattgtaaggaccactaataagactagaggcatcaccgacgaattctcgtacaccaaataatttagtagttatcactaaaaaatctggtgctttagaaggtctgatgtgtagaattgcatagtccgataatgtcaagaccagatcaacgatccatgtttcggaggtgaacgggactaagaagtaggatcggactaaggctttgtataagtttactaaatttagtcctacgttcgatcaacttctctctaaataaataaataagaaggtcgttcccacacaactggctagcaaaacaatcaaagttgtctgcaaaaaagaagcaatctatgcaggggcaaaggacgactaaaccagctcgagaagtggtgcaacaaatgtcgtctactcatctatcttcaaggatgtcgtggtattttcctcctatctactcatcggcgatgttttgtcctgctcacgtgcgggataatacaacgatgaattcgtattacatgcatactccgtttgattattcgggctaggaggcaccacatttttgttccttttgacatattgatcagatagtcatggccaa

SEQ ID NO: 60939 - DNA, 570 bp, Zea Mays
cagcgctcggtatcaccggccagtgggggtcgccggcgagacttgaccgccagagcggcgccaccgtcggtagcgattgggttggggaagatggtctcgcgccgtcagatggaaattggacggtggcgattagagcagaccttacctattcgcgggagtcatccggtccgtccatctggtctcgggcggatgctaatcggtgtgcgcgtgtattagatctggccctgaattttagatccgacggtgacatgtgtggtcgtgggtgttgtccgatccgatccaatcagcgtcgtccgtttctaatcggatggccgtgcttggccgataccccttcgacctcgtgacatttacaaaataaaccccctagtttccagtattcaacccgccgtccatgcggatgttgttctgtgtctcggtaacacttgcaccgagacccctgcacttttcatattttagcgcccagtccagaggagtttaaaaacagagaaataatatcagaaattcatttttaatacaaaaacaaatctagaaacttgtataaaccatagaaaatccatttttactccaaat

SEQ ID NO: 60940 - DNA, 460 bp, Zea Mays
cggctttatcccttaaattcgggtgtgacaagagtgttattgtacgcttgcagatcctccagggctacgcttagcaccaccatccgggctcatgcattcgcctcgcaatcccaggctatagagcatgaatttatagcccagtctatagccctgtctcgttccactatctcccgctgcaagcgatcaacctccatcgacagttcagcaatgtggcggctatctcacgcacgctccctatttccatggtgtagttctgacgtgagtcgtttaactctgacctctagatcccctatgggatcattacttctgctactgatcccctcatgtcgaggagccaactggtgccggggcacacctcggggttcggtcgccttccgttgggtagtcttggtacgtgtcattcctccataagaggggaatatttatttattatagtttaaacatgatgcatgcatgacct

SEQ ID NO: 60941 - DNA, 822 bp, Zea Mays
ccttccccttctcttgtggttttgtagagaaactttgagtccttttgatatgagttctatttggtgttgatttgtggagaagtaggctctttggatcactatgtacgctgatacgatgcaattcttggtcatgatccgagcaaatttctctttgagttcattttgagaaaaccccatcactctcgggatttctgatctatgatttgatttcttgtttgttcgggatcatacttcaccagagaacttgttttacctcgcgcaaactgtctatcaaatttgaaatcattctactggaagatccgcatgtcaacatatcttcagagcatagggtacaaagtttgggagatttagcttgatgctgcattcagtgctaaaagtgagcgaatcacttcatgattcgaacaacaaagctcacaattctttgttgtcgtgcctctcgctgggtgagtttgaccaagttggacatttggctatgactcatgagatctgctccaccctcaagaaattccatgagggcaatgaccatgtgaaaactagactctttgagacgtaccagcgagagtactagaattttgtttagttggctggagagacaattgatatcatgttctctcgattgcagtccgtcgtgaacaagatgcgtgccaacaaggcataacttccctatgaagatcattgatgtttgctttcactttcttcatgatcattctgagaaaagcgacatcgatttactccacgtcgatacccatcgtcagctgactgacattttcaccaaaccccttgatcagtcgacttttgcacatttgagaggggaattgggtg

SEQ ID NO: 60942 - DNA, 1071 bp, Zea Mays
gttccgaccgctgagccacaaggagaggaaggccaacggcgacaacgtctgcttcaagaggctggactcggagtcttttgttctcaaggtctggaccgtggactggaccctctccagtctactgcttcctttaggctttgctgttcctgttcttagataaatgcatacggcggatgttctgttcacgcgctgtttctggcgggattcattcttccgcagctggtgggattcactgctctgttcctgtattatacaccgcaactttctagatcgattatactgaattggttgacggttatacagttaccgccgttctgaacattaacctgcttaagcatcgccctgcacaatcatgatgtagggagtagggaatagggactgtgagcacgagcggagtcaggaactagtgaatggaggatcaaaaacacacgctctctgtttgttctgcgttagctgcattcatcatccttttccctgtggccttgttggtgtcccatttcaattcttctgcttctaatgtgttgttaaactcttggattaggatgagagggaagaggatgtcgtattcagtttcgacaaggtgttctatgaagatgcccaacagtctgacgtctacaacttccttgcagtccccattgtttcaggttacatttttcccccctatttccttctagatctgttcttcgagatagtcaaagctgtttcttatcactacactcttatcacgactaaattacctaatagccgtttttcatatcatggaaacagatgccatcaatggaataaatgggactataattacttacggtcaggtatctattgcttcatacacatacactctggaccctgattgaccagttgagacagttgtacacttgttttactgcacaggatgtatatgtgtatacactttgtttctctctctcaaagcaatggccatcgcattgcaagtttccagtttactgtagacagtcatagtttgcagtgcagctatgatcaatgtcttagcgatcaacttttaaccatactgatatttatttcgaatttgcttgtgtctagaccggggcagga

SEQ ID NO: 60943 - DNA, 625 bp, Zea Mays
attgtacatatgcgcatccacgacgacgacgaccatggattgctaaagcgagctacccatgcatagagcacatcatatatccattccaagacggccatgagcttgccccctgacgatttccggccgatttgcggatgaacacgatgccgcattggggcaattaaagggtcgctcggtctgtcgttgcatgcatattatcgatcattttctggatgtgttagtgggtgatgcatggcaacaagaagtagtagtagagcgccatcatcttattcttaggtattgcttgaatattgcatactggagcatacttttggcacgttgcaagtttctataacgggtcttgtgtgcctagcttgacatccatttgtgtgtgatatgatggccggtgatgatcacatgcatgaccgccatatatatacaggactagcttggaagaaacaacatacatgaagctacttagctaactccattttctcttggagaagttacaattagctagctaggacaaaacatgatcactgattagcgtagaagctataataataacgagtgcttgagcatttcgtgtaaacgctatgagtgatccgtagttttttttttgcggaaatggtatcgagtactccat

SEQ ID NO: 60944 - DNA, 600 bp, Zea Mays
cgcgtggtcacctgttctctatgtgtctggcgatttccccttcctttcctcgctgctggcgatcaccgttgaggacctctggccgtggtccagtgtagtgctcctccctcatccttcacctggtgagcagtcctcatctcttttcccctctctcttctattctcagtaacctagaggagctcctccaccctttgtgacaatcctcaaaatcctatgaatccaagtgattgtgtgtgtgtctagtgcttcattatgttcctctgcaggtcttgagctccctagggagggtttcgtgcactcaaatagccatttcactctcgttccaaatcctcgcgcaccaagtgctcggtgaaatatccaaaccactcaaatttgctcaaatcgaccccagatttttccagcacccccatggcacctccagtagcactcatgccaacattcatgccaatccaatatcctagacaccgatttaccaccgtttcccatttatagcgattatttctgagccgagtgccacaaattcattttcttcgccaaatttcaaaccaagcacacacttcactcatatatacctactcgtgaagtatcagctcaattcca

SEQ ID NO: 60945 - DNA, 632 bp, Zea Mays
gtaagtttgtggttgataattgataaatgttgatggaaaaatgtttcctttacacaagctattgaatctttagcaacaaaaacttttgtgcctgtattaccttttgaattagtgaagttgtgatctacgatgccctaatctcttaatatggtagtttaatttgttgagtgatggtacgagattgcatatttcgaccaaagttttcggttaacgcccgtttccgttgcatccgttcgttttaatccgttttcgttgcatatccgatcgttttaatttgtgtaaccatgtatccctcaaatgttcccatttccagctatcccacttctgttttcggtaagaaaatatggcgacgaaaataatatgggtgtttttccgaccgtttccgtccgtttttcatccctacttattgtgttgttctctattgcacttaggactatatgagagttgttgagtttatttttgtgactttaagagttcggggatctaagtgacataacatagaactactgatgcattttactctttttttttgacacatgctatatcattcatcacccgaaaagctaataaatacttgatgaattagaggcatcatatatctgcgacccatgccgtgtgggcagtgagggcac

SEQ ID NO: 60946 - DNA, 614 bp, Zea Mays
cgactgaccatcagtctgagggtgaaaagcgtcactaagtgagagcttggtacccaatgcactgtgaagcctctcccagaatttggatacaaagttggagcctcgatcagaaacaatggacttaggcaccccatgaagcctgattactttcttcatatacaagggaaccaactctgaagttgaatttgtggtcttcatgggaataaagtgcgcagacttagtcatgcgatccactaccacccatatagcatccctgcctcgaggagaacgaggtaagcccaccacaaaatccatggtgatatgctcccatttccactctggaatttacaatggcttcaataaacttgtaggcctcttatgctcggccttcacgcgctgacatacctcacaggcggccacatacttagaaacgtcaaccttcatactcttccaccagaagttttgcttcaaatctcgatacattttggtttcgccagggtgaacggtgtaaggcgttttatgagcttctctcaagatatccatcttcacctctgatttctgaggcacacaaagacggcccctgaaacaaaccaaatcattctcatcaatggtgaactcacggggtttaccatcgc

SEQ ID NO: 60947 - DNA, 443 bp, Zea Mays
gctggtggcactatcctatttgcaatggtacatcatcctagggggctttcttggtggctcggcgtcgtgtgtgggggagtgggggaagagtggtgagacgcggggaggagcggagcgtgcggtggcagctctccacggcttcgccgttcgtggccccggagaaggctgccacggccgtgtgccaggagagatgacagggggcgctcctggcagcacggcgttgtgtgggggagtggaggaaggccgtgaggcacagggaggagcggagtgcgccgtggtggctctgcacattgtcgccgcccaaaaggcagggaggggcgtattagggggtacgggtgtgaggcggtggttttttctagaagcgtcacggaggccggttacgcttgtagcagctagacgccgatggattaagatcggagagtcacaaacaaataaaatgacgt

SEQ ID NO: 60948 - DNA, 348 bp, Zea Mays
accttttctttaaggatcccttgtcctgcgtagcgtagtgaatccaccgaagcatctttcggctgctgcaaaggcgaatatagttgcctgcctccagaaccttttctggaaaccactggagcccggctgttgcgccgtgggccgtggcggcgtgcgacgacggagtgacggacagtgtcaccgtgatgatgagatagatcatggcctattcgatttaaagttgcaggacagcgtggtgtcgcccttggccggacccaggtctacatgtccgtgaagcccttgagttgagccgaggggcacgggaaccctctctcgctctctttcaccaaccagttcaccacccccatg

SEQ ID NO: 60949 - DNA, 690 bp, Zea Mays
ctctagttcaatacaagaaatagaagaaaggaaaactccagcaagataaatactggcgtattttagtcaattattgtatttttcctctaagttgatttattagtgtttgtgcagactaactttaaaatgtgaattttggctaacacaacaaggtctacttccactattgttcctctatattggtcatgtccaagatttccactgtagtagtagtagtaacacaaattttgagcagaaaacaaatagcactctttgggagcagatatgaggaactcaaaagtcaaaacttactgccacatcatcaaactcgtcgaaagtggacgcaacagtttcccactggtaggacacgactgaaatagctgaagatcctccttttcccctagacctctttcctggctccttcttgacctgctctactcgtctaatttcacgatacaatctatgcccgagaatctcatcatcttcatacctgttttgcatggccttgcatgaaaataaaataatggaaattctttacattcaagataaataaactagtaccagtatgagattccaagggaatcccctccaatccgatctttacgaaaggtagaaaagttctgtccatgcttaagagaactgtcaatgaagttccgaatatcctcttgctgcaaaataaattcataataagttatgttgccaaaattaact

SEQ ID NO: 60950 - DNA, 1144 bp, Zea Mays
gtttcccctgcgcggcccaagacgccagccttccatcgcgccgactactgggacccggttgtcagcctcttttctcctcttcccctttctccttctgagcgacttgcgtgtgggcccgtgatgtcagctctcacccaaactccgtgtggcccacttaccagtccatccgtgcggcgcgctcgctaccagccatatccgacatttggaacccgcgtactagtcacattgtgtgagcacgggctctgccggtggcgcgcttgtgtcaacccaatcttcctaggcgttgttgcaatgccatggatgtcggatctgccgtggactgagcttcaatagagtcacgcaattctaggatcctctgcatgccaggcgatgattccgcgcccattgccccttcccccatgtacacgaccgatcaccccctggttggcccacgtacgggtcatgcccacggcaaccatggatgcgaaatccgcgggaatccttgccaacgtgcgctacctggccggattataggtgtataagtaagcgagctctacggccacctcccccacccgttcatgtcgtcgaagaccctctagacaccctcaattgacacggcgacgtgccagtattaccgccatccgcccctccctgtggccaagccttccccgcagcttcaatcggcggtggtctccatgtttgaattactattccgatagcaaatcacgagttggttagggtcgggatgcaccagcacgccgatctggcatgctccggtgatcctccgccgggggagccctaacgtcgcctccacttgtgccggtatttagaagatgagtccctagccgttggatcgggtgggtgcaggtaggattagatcctgataccgattcggccacgttaacccgtgaccgtcgataggagatccaaggttccggatggggtgtgtggtcaggtggccgatcgcccgttgatcctgccacgggtggctgggatggcgtgggaatactctagtttggcaaatctaatctggcgcgtccaattctgatcggacggccagaactctccaatactctttcgttacttttgcccaggacccctagagtttcgtgtaataaacccgcagtccactcggatgtctccctgagtcttagttacttttgtg

SEQ ID NO: 60951 - DNA, 381 bp, Zea Mays
tggcagaatccccagatactcatcatctgaagaagtgtcagcagcggcaccctgatcctcaaactatcaaatagcctcgtcctcatccctaaggcccgacaccagtggatctactgaagctagagcggtgtcctcagaagctgggcggtaaaatccaaactgaagtatggaggcatcaagggtagcctggaactgaggaggatggatcagctatgcgaagacatgacaaaggtagtgagcatatggctgtagacgtcgagcccgaagaccatccaacactgtgtcctttatctcacatattaggaaatcgaccacatcgaacacaaagtgagataccagagcaccaaggagccggagctgaatatgtgtggtggccactct

SEQ ID NO: 60952 - DNA, 439 bp, Zea Mays
ctattttcataaaacacagaggccttgttacaccgaagcttaacttcgtagggctcatcactatattcttaaatttctccctgcccttgttgtcatctttcatgtaaaaccacttgttggtctagccagtcggccattttgtacgatacccttgcacaggggccttcgtatccttcctgtatgcaaaattgtagcacccgaagttcttatggagaccatctgctctggccttcgtctgatagtgcaactcattaactctgcagaaaccttcggaatttgcgctcatgccctggcttcgaagggcccaaatgtagacattaagactaactattgcattcagtgtcaagtggtgaagatatatctcaaaattttcagcacttcagcaatcatttcatgcatcgggaaccaaagcccttcacggaagaaactcttgaatacc

SEQ ID NO: 60953 - DNA, 397 bp, Zea Mays
gactaacctagcggagacgtttcgggcgagtacccttaggctttcgggtgtccacggtttcttcaagctctgggatagttgcaacagccattgtttcagcagggaccgagtcagaagaatccccagccaacatgtccaacatagcactcatctctacatcacctggactcgtaggcatctcaaagtgaacttgcctctcatcattgggaagatcaccaaatgaagcaaccaggacctcaatatcttcaagatagggtcgcactctaagacccaaaccactatcaccgacatgagaattggatacaaaatcgaaaaaggacttagaaggtggcagattccaagcagaatatgcaacaggagcaccaatatttgatactttgcccctcaagatcatctc

SEQ ID NO: 60954 - DNA, 541 bp, Zea Mays
ggccggtgggcgcgaacgcgtcactgcgtcagatgagatgagtacggggcgggctggagcgaatcgtgttggcgctagcgttttaccctacttgcgctttattaccggcgtcgtggaggccggtaagcttgcctggtggttgcgcgctttattggcgccgcatgtgtctttgtcccttcatgcatgtggtgtgcccggcctgggatcgatgagctccgctcccggttccgctcttcatcgaagttccggcgatatccgtaggtaccacggtgagctagcaatctagtttgttgatgtcctcgtcgtcgtcccggccccgttcatgtctgtacgaacgccagattgtgatttcctagcacgacaggtccacgacagcgccacgttcatgcaatgtgtgtgttgttatcgcacagatcgaagatgtagtaaatcacgcacgcatcaccgggatctgaacattctgatgaagattgaaacacactggcacggtgcgggtgacgatggggatagcggaaacatgcaaggtattactccctctctt

SEQ ID NO: 60955 - DNA, 406 bp, Zea Mays
aaagaaacttgatgaagtaactggaaatttcaatgtggaacaaacaaagcgtgagatatctgacaaggaacggttaagggtgcataaaaatattgaggagttcgtcaagctaaagaggaatgctacaatgttgctaaggaatgtgccaataatttgaaaaataattttactaaggttggcacattctcctcaaagcataactttatccgcggtgatcctgacggggttatctcgtggattaacggcaaagccggagcttttgaggagattctcagtgataggggggacttctgcgcttttgctggcacccgtggggccgcgtcggtccttgaaaaagttggctgcaaacatgccaaggctgtggttcagccaggattctcgctctcagccaacgatattagagacc

SEQ ID NO: 60956 - DNA, 495 bp, Zea Mays
agcaacaggagacttgagggaggctagaacatcacacagaagggtatgaactaacccgtagaaggctggccacgacgagatgtctcacggcggcgttccaaccgatttgggggaaaacagaattactcgggctatggtggattactggccgaggttagagttgcactgggctcatgatgaggagacgaaagcaagggaggcgctcaatttatagagatcggccatggttattccgaatttgggaagagagtggagcacggctgcgacaagacattgtactggcagccccgttgtggcgccagccggtggaacgacttcgaaatggcaagtccgggtgtgccacagttactactacgtgctaaagggctacgacatggcgtaattgaggtcgtcggagtacaatgacgacaccggcggtccggccacgtcgcacgactacatgcgcagttgataagtttcacctcgtgaccaaatccactccccgcgagatctttt

SEQ ID NO: 60957 - DNA, 438 bp, Zea Mays
cccctctctccggccgccagcacacttccttcaaattggacgccaccgccgtaggactctataaattgctgcccccatgagctccgctaggtaattatgcatccaaagcaccagctcttgcctccgatcgtccaccagagtctcccaatttcccatttcccccaaatcggtcagaacgccgccgcgagacatctcgccgtggccagatgtctacgggttagttcatgcccttccgtgtgatgttctagcttccctcatgtcccctgttgctcatagacccgttcgattggactagaccgccttgaatcgtctagaacacgttggtttgactccggttttcatcgccgttgtggccagaaagattccgacccagattagtgtaattagttgaggggattagggtcgccaggggtagaatttggtgtcgaccgagtaaga

SEQ ID NO: 60958 - DNA, 509 bp, Zea Mays
ggccgagtctaacgttttactccctatggtctcaagtaaatcaacttgtagtcttaagaattatacaccttgtgtttgatatgatcttgtgaaatcttatttgatgaaacattatatcaaaataaaattggttttgtaaagtgattaatatgatatggaatgttgtgcatatgtgctaatatatggttttgatattaatgtaacatactcataagattgatgttgtatggattgatcttgattcaagctgtggacttgcgttcatattcattgcatggttttgcgaaagtgtaggtggtgcttgaatcaaaacatggtcgatgtcgactgaaactaggttttcggactaagtttatgatggaactaatattttataggttgaagatgccgtgtggaacatttttcattaaacaccgacatatatgaagattagttgtgttgaagtcttgcatgaaatagtttaaagaaaaaaaggggaaaacaaaaaatcgataaaaggggggaaaaag

SEQ ID NO: 60959 - DNA, 491 bp, Zea Mays
ctggtctgcacgcgacatttcactctggacggcgaggtcaccgatggctttacagcaacaggcagtggcggatccagcatttaaatctatctatggcaaagcttccaaaatttaaaattacaaatataacgattaaacatatccatacaaacattgctaagctaaaaaaacaattatttctgatgatgtactttataaacaattcagtgcataatctaataaatcatgtgacaaacaactaaagtagcagaaaggaattattggatgcaattacaattttccttcttccccgtcatggctcgggagatgaacaggagattgatctaatcgctgaactatcgaagcggcggcaagattgatttttttatacctcttgcatgtttttgttcaccgccgattggggacagagatgttatcgccgtgtctcagctatgacgagcaccatacctcgccactgcatggaacatggatccgacgaggctcaccgacag

SEQ ID NO: 60960 - DNA, 626 bp, Zea Mays
caaaattgtagtgctatgtaaggagaataaatttgctatagagatcgtgtcttggtaccatgaagtattttgagataaatgtgcccaaagttgggctgtcaatctgtctaaaacctgaattatggtattcagtggcataggatgaactttgggggccattttgaagatgatccgtggatgtttgagcatggttaccacagtcgatttatagctggatcatagggctacaggtttgctacaaacggattagtaagttcttatgcgaaaattcaagattttggcgtcacaaatctatctgtaagactgcctgaaggagatcgtgatggtataataacaaaaaacaatccgtagattcagtgagctggccgctggtgacccttcgtcgggattagtgctgctcgccgcgattcgtgcgtctgggctgtggattaagttcgccgagaaaagatctcatcgcggatgggttaaagctactattgccacgctgtccctcggttccccgcgccggcgacgtggccttacggccatcaccggaatccgcgatattcaccgcggttgcgccacacctccagcctttaaccgcaccaccgtgattcacgttagccatccgatcatcgccggtgagt

SEQ ID NO: 60961 - DNA, 735 bp, Zea Mays
atacttcgaatggagccaccaaaataaaggaaatgggctcagaggttagcaaggagattggcttccttaaacaaattcatttcaagatctgttgaacaaagcttgccattcttcgaagtcctaaaatcagcagaggtttttcagtggggtcctccttagcaacaagctttcgaagaattgaaggattatctaataaagctaacaacactatctccaccttcgctaggggctcatgtgttactctacgtgtcagctttgcagacaactataagtgcttcctcttctagtttcgtgctgaacttgctgatggatagtctcaaggttatggatttcttgatctagctcatcattttgtggtggagtatcagtgggcttcctcttctggtttcgtgcttctcgatgaagcgcattttcaccttggtttggaaccagtggggtgagaacaggaccagccgttgtggtcttctttagaggcatgatgaagctccttgtcgaagcttgtgtgttcaccggaggtgggcgcatgtgttcgttacttattttggttccttcgtgagaccaaaaccaagacaacacagttaaaccaaacttctccttcatccttcactttatctatctaaaaagaaagataaagtaaaggatgaagatattcataattagcagaaaacacatgggaaacattaagaatggatgtgatgtaatataaagataaagcacatgattcaacattgttga

SEQ ID NO: 60962 - DNA, 315 bp, Zea Mays
gataaattatacaatccatcatgactctattggttgggttagatctcatgcacgtggttgagttggtctaaggcactagattaggtttaagtgcatgaggggagaacaaggtttataagagtagaatccagtttatttcactagtgttaacttgttaagtaactcacactagattgggtaagatctagattagtataagttgagtgtgttatgtcaaattctagttgggtggctttgtgttaggtcggacttgataaaatgatgtatatcattggaaacatgtaggtcaggctggtagattagaatctctctctt

SEQ ID NO: 60963 - DNA, 657 bp, Zea Mays
cacatgtgccactatacacgcacgccgtctgccagcccctaacgggacatgtaatacgataggggcacggaccagcccttgggcgcaaactccatcccgctcgacgcagagctcaccctcgggacaaactctgcctcgcccgagcccgacctcggctacctgctaccccgcgaatcctacgaaaggccactccttcaaattgtggcacacgtcatcgaatctgaggatgagctcgatcatgacctcgggtagactttcgcctcgcccgagtttggttcttccctcgacatctatgacagaggacgccccaacatcatcagacacagtggaactgacgcatcccttaagaagatttttcccatactaagcactatgtcaaccactacggtatgggcaacccctcgccaaggggctcgggtacgtggctgagccctcggcctcggctcttagcaggcacaagtcaacgaaaaagtacaaaaccataccatctacaggatataaaatacattccctcacaatatgcagtcgactcccatcctccaggaagcaccccttgagcctataaatagggtactctatgacttctcaagggggaagcgaacacttcacgagtcttctcctccacatggtattggcacctgcctcaatcaacctagg

SEQ ID NO: 60964 - DNA, 318 bp, Zea Mays
gagatggacctcgtccgttggatactagccaacggtcgcgattagatagtaggtataccgcttcgggcgggggaaatcgtagccattgatctctgcatcaacggattagattagatcttcaaataactcttcgacccttttaaatccgcttcgttgatctgtgatcctgcggtcctggtgccataccggttcatcacctgcggaattaaatctgtgccatccgtgtgtaatcaaacggacaagattagtcaataccccttcgtcgtgtacattccttaaagagccccttaggtcttagggatttaaactgcagtctag

SEQ ID NO: 60965 - DNA, 921 bp, Zea Mays
ctttggcaataaatggatgatgtggatgcatatggttgtcgagggtggcactgttagtgtgaaaataaataatcagattggtaaatatattaagagttacaaaggagtgcgtcagggtgatcctctctcgcctatcctctttaattttgtggcggatagcctcgctagaatgatggacaaagcttgtgctaatggggtcttgaatggtttgggtaggcatttgatccccaatggtgtgattttgttacaatatgccgatgatactatcatttgtatggaaaatgatttgtccaaagctagaaatttgaaaatgctcttgtacatttatgaaatgatggcaggattaaaaatcaattttatgaaaagtgaaatttttgtgatcaatggggatgatgatactaagatgcattatgtgaatctctttgattgccaattgggctctttccccatgatgtatcttggggtccctgttagtccttcccgtctgcgaattgcagattggataaggttggaaaaaaagtttgacaaaaagttggatagctggaagggaagctctctttccattgctgggaggattactttgattaatgcttgtttatccaattcccccatctatcatatgttgatgtatctccttcctagcaccactatcaaaaaactggatattaaacggaaaaaatttctgtggcaaggtggaggagatagaaagaaataccaccttgttaaatgggatagagtttgtgctaacaggaaaaatggtggacttggcattaaagatttgagagtcatgaatatttgcctaatgtgcaagtggtggtggaaacttgaatatgaaaatggaatctggcaagaaattgtgaaaaagaagtatattcacggtgacagtatcatgaatgttagtcacaaatcgtttgattctca

SEQ ID NO: 60966 - DNA, 281 bp, Zea Mays
agggaactgtaaatagcattactcaccaagcacatcctacaaaatcagttcaagccatacagtaagacactaatttatcatgctcaactgttacctgattttcgttttcatatgactacatgaatggttagatattcttcaatatctttatagttgaggtggatgttctccaacattcaggcaaaagagatctaaaaggaactatgttggaattgtcgatttgaataggatatagttaagattagcaatttaattagagggaaatataattgactatcttg

SEQ ID NO: 60967 - DNA, 681 bp, Zea Mays
gccctactaactgcacccataaataaataaagctagcttgtcgattacacagtaacacggcgtactgggagctggatgcatcgcggtgagctcatcagttagcaggtagctggttctagtcatgcatgtgctcacatcaaagccgccagccctttatacgtttgtttatttaaaatcgagctgttgctgctgactgaaagagccaaattaaactaagcttgtgacctaaccgctctgattggacggcgcaacgaatttacggtacgtatgaacgggtcggagatatatagataccgatcgaatgcgtaggtagaactacgagctgtacaggatggatgtacggtatcgagtctgtgacgctcagcttaatttcatggcagttgggaacacatacatgagtagggcgtggcacagcagtatttccttctttttcatgaattctcgagatcccccactcggtttaaatttgtaccacttcaagttccaattattttgaagagtcgtcgttcgtgcatcgcttcatatattatatatgtgacgattggtgtgtgtgagaggcgaaatggcattgccgtgttgctccaagtaatggagagttcaagatgctttttttaaaggtacaataccattttccattcgccacagacatgtatatgccgcatatatatacttacgtcaact

SEQ ID NO: 60968 - DNA, 664 bp, Zea Mays
gttgcactgtctgtctgaaaattcagacctagtaacctgacagtccaactttaagctcaattatctctaaattcttcttaacaactatgcttacactcttaagcaaagttgttctcctagttaggtctataattttgatgtggtgacctagggcaaaaaccctagtatttgaaagttacaaggctccaaatttgagcccaaaactctgaaattcagacttaggctatataggacttaagaggtgatttttgcaaatagacccaaaacttaaggtttaacttgcaaattcacatatttgtgaaccaaaggacttaatatgccttaacgttgtagtttttacactttagtccaaatgtgcactgtttttgcacataggcccctagggtttggacttagggttttccagggttcaaatgggggtttttggtatctcaggggtataaatgtgattcaagttcatttttgggaacattttatgactattcccctaaagcttttaggttttctcaatttgggttaggttttaccccccttaaatccatatttagggttaagttccctatccagggttctatttgcaaaatgctataacaatacaacttgtttgaaatttttacctagtaaatgcactctaggtgtgttgcaatgccaatgtttatgatgc

SEQ ID NO: 60969 - DNA, 448 bp, Zea Mays
agcaagagttttaataagcagcagtacaatgctgcatgtcctagtgttgcttctgctattagtccagtgttgccgcgccatccgtcctcttcctcctctgcatggcaatggccatggacatcctgcggcatgcacccaagaacgctctcgttccgccagcagccagagcaaggggagactactgggcatggccgtcaccaccatgacagtcacagtgatgacaagtacaacggcgtcagggtggcgaagcagcaggaggagggggagaaggctgcttatcacaagacctggaactcggtctcctccggcgacttcagcttcacgtccacagcgtcgtctgacgcggaggctgtcatcatccaggctctgcgctcggaccgcctcttgtacgagcctgcagatcatatggacgaccacgacgacgcctcctgctgcaggcttatcaagc

SEQ ID NO: 60970 - DNA, 625 bp, Zea Mays
tattcttgaagcctttttattgatgatatatttcccagtttacagagtacattgtcgtcccgatagcttttgaaatacagctaggggtaaaatttcctgaggtgttctatattccatgagttcccaatttccgtgccgtccatctgagtgagacaatatgatcccggccgagtgacttctgctactatgaatggtccttcccataggggtgacaacttgtgtcgtccctcccccgttagaattcggcagaggacgagatctcccactgcaaaggatcgacgtcgcatggccttatcgtgatagcgtctcagagtttgttggtatcgtgttgattgaattaccgtgttcaaccgttcttcttcgagtatatcaacatcctccagcctagtagcctcggcttctgctatgctttcaaagaccaaccttggcgccccaaacttgaggtcagcaggtagtactgcctctgacccgtagaccatgaagaaaggagtatttccatgcagagctcgactaggttgagttcttaggctccaaacgacgtagggcaactcccttatccactttcctgcgaacttctcatttttatcgaagacttttttctgagtgcctccaatatcatcccgtt

SEQ ID NO: 60971 - DNA, 623 bp, Zea Mays
atacccgggccttaatcaggacccaggcgggggtctagtgctgacatgtgtccagacttgatctggtgagatccagaccttatcatatacactcctgctccccgcccaggcggagacccgatgttgccacgtggcctactacgcgcagcgtaagacaacgggcggaacctggcctgaagtctctgggctacacatgcctttgcattcattacggataagacacgcgcctatccgttccagtgacaggcggcgtgcccagtccacgctgcgtgggccgtgatattactcacacgttaccatagcaaggacaatgactcaccattactcatgcgtttaaaagaaaagggtcactgcctatcaatgctgcatggactacagtcatcatgacccccgctgattactcatgcgttactaaggcagagggaatctgaacggctccgcctatacgcctctactcatgtgtgctatcagcattaattattcacataatgtattccttccattatgctcctgggcctccatgttggggctcagcatccttgtatgtacctcccttaaacaataaaagggaggggacacaacgttacaaggacacgctcaatacaacatacagacagtggagg

SEQ ID NO: 60972 - DNA, 685 bp, Zea Mays
agcggtgggactgtgttgtaaccaatttaacatgactgttgtactatcactattgttgtattatgacagttgtaaccaattttgtcacgtttaatttcccaccgttgtactatcattgttgttgtgttgtacccctatacaatacaactcaagaacatgtgctggtctgttcagaggagttgagtagagttgtagatactcaatgtgtctgtgctgcagtgttggtcggtttagaagctatgcagtaatagataagacaacttgcttattgtaaacaactaacacagataacacattttgcttattttcttcactaagtcttaaaaaatattttggttaccatccattttcgtttattttttgttcgtatttatttctattcgtatatccgtatatcccgctcccattccctgtggaagatataaggtaacagaaacgattgagggtgtttcccacccgttcctgcctattttcatccctatccgtcgggcagtggagatgtgaggacgatgtagaagacttattcccttcccttctcgtggcctcaggagcacaagaaacatgagacaaaagatgaggagtctgtttccttgttattaactatgaggatgatacatttggtagagcctctcacaagtacatttggtattagactattaggctatctccactagcttacccatcc

SEQ ID NO: 60973 - DNA, 409 bp, Zea Mays
gtctatacttctctcaatctattagatctgatcttactcttgtgcttgcgacatccttgtagatgcccttgaccataaccttcttgccttttgggatttattcctcgtccatcattaaatttctaccatttggcaatccttgttcctccgttattgacatacttgtatccctgaattctttaacactcttgtttcaaatactaatgcctacttaaacatttccgtttatatgcccatgaccttctggtctttggaaatcctttcctcttctgttgttaagtcgctatctttcggcaattccttgtctcttggtattggtatgctcatcttcttgaaatctttcatactctcatctttttatgcttacctttataccccaaggtctgtttaagatatttcatttttacat

SEQ ID NO: 60974 - DNA, 328 bp, Zea Mays
gactgggcgcgccgcctattactggaatggacagacgcacgtcttatccgtaataaatgccaagacgcgcatagcccagaggctttatgtcaggctccgcccgttggcttacgccgcgcgcagtaggccacatggcagcatcgggtctttgcctgggcgtggagcaggagtgtatgtgacaaggtccggatcccaccagatcaggtctagatacgtgtcggctccggacccccgcctgggttctgattaaggcccgggtatgttctgtcctggaaccctaggaccccactgtgggcggctcggaccccatacggggggtccagatccc

SEQ ID NO: 60975 - DNA, 365 bp, Zea Mays
acttgggctgcggacacaatttaccagaagcaaagggggttctgcgcaaatactaggaccacactgtaatggttttaacactgacttggacggcgggttagtttaggaaaagacgagggtctctttagaaagtattccaagcgaaggggtaagcttcgatcacagccgcccgatctgatccaaccatctagattagatcgcggccgcccgagcactcagaccacccgatccgaatccgagggtcagcatccgatcaacgaaacaatacacgttggattcgatccaaaccgctggcgcacggatcgacgacccagatttcgtcacgaaggggtacgctcaggatttgatcacagccgcacactcta

SEQ ID NO: 60976 - DNA, 569 bp, Zea Mays
ctcttttagcccattcctaaaattatacataagaagaaattgtttcactaactagtatctccgttctcacatatttgttgtctactagtttatttttgaactaaatacgcaataaataaaaaagaattgcttgacatacacgcgatgccattttcaccggtaacggcattagcatcgcattggactatatatgatctagtgcaaaggatccaggcatccagcgcacaattaactagcaaatgcaatgcaaacccgctaggacaagcaacggaacaatcgagcttgtagaagtggtaacgacgcgcgcttgcatcgcaatcgcatgcatgcaacgatgaggcacatcatgacgtgcccagacaccattaacagctacgtgggcaacctcacagaatcctacaccgacaagagcaatgagcccaacatggtggcagcctccgtcatgatgttcgccctcgccgggctcttcttcaacctcaacctcttcagcggcatctccgacatcagcgccatcctcgaccctaaagtccggctcttcctctcgtcggcgctctccctcttgctccccg

SEQ ID NO: 60977 - DNA, 918 bp, Zea Mays
atttctcctccagatcacccgcgatgcgagtggtctgggaggaatctgcactgagccagatggtcttgacggggacgccgtctgccccagatggtttcaccttaggcaccttggcaggcgtcttggtacaggaagtcaaggggtccctccctccgtcattcgggcgagcaggttctgccgccagggcgtgcaacttcttaacagctgcaagtgcggcagggcagtcgccctgcacggtgaggaccccaacaggggacggcatcttgaggaccaagtacccgtaatgggcaatggccatgaactagtatagggccggcctgccaatgatggcattgaaagggaggttaacctccgcaacgtcgaactagacgttctgagtgcgaaaggtttcctcggtcccgaatgtaaccgggagtgtgatgctcccaaggggatacactggctgagggcccactccggagaatgggcgtgagggccccagtcgggacactgggatctgcatctgcttgaacgtagcgtggctgatgacattgagcccagccccaccatctatcagcacatgatgcatcttcatgttggcgatgacaggggcggtgatgagtggtagtataccagcccctgccatgttttcggggtagtcggatgccccgaaggagatagtggtgctccgccaccgctgatgtggggctgccttcgggacccctggagtcgccgaaaggacctcgcggcatagggacttcactttcctatgggaggtgagctcccagcttccgccatacattacgtacagcttcttgtggcggtcgtcgtcatcactagagtcggagtctccagtgacgatgtccttgaggacttgctcgggggtctgatacccaaggtcccgttctctcgtggccaggtcaccttcgtcgaccttct

SEQ ID NO: 60978 - DNA, 452 bp, Zea Mays
ttcagctattatgggatgatcagtggcagatcaaattatcgaaatgtgccttcgctcgtcaagagattgcttacctcggtcatgtcatttcaacacaaggagttgcgaccgacccagcaaaggtggctgtggtagcctcttggcctgttccaacgaacagcaaggaacttcgtggtttcttaggcctcgcaggctactaccgcaaatttgtcagacattttgcagtcattgccaagcccctaactcaactgttgaagaagcataccttatatgtgtggacacatgaccatgaccaggccttcaccactctcaagctcgttttgtcgaccactccagtattacagttaccaaaattcagtattccttttgccattgaaacagatgcatcaagtcagggcatcgttgttgtgttaagccagcaaggtcaccctcttgcattcgtcagtaaggcc

SEQ ID NO: 60979 - DNA, 457 bp, Zea Mays
tgtttggattcaacgagtcatcgacttgtcttcacagcttgtgctatggcacctctgatcctcctcgtcgccctcacgacggagttgctcctggtacagctcacatcacggctttattctgaccgcccttctcagatgggtcgcgatattctccagcagatttcaccacagcggccaagtttctatatcagctcatgagacggacgcttctgccacggatgggttacagggaggctgccactcatattcagctttggctacttggtgccttggtctctcactccgagtttgatgttgtggatttcctcatttgtgagatcgaggacaccgtactagatggtctacgtgctcatcgacagctaccgtatgctcactatctttgccacatctttgctcagctgattcgaccaccacagtttcagggtactcttgaggcctctcgcctcctctttgggtc

SEQ ID NO: 60980 - DNA, 690 bp, Zea Mays
cgcgcatcctcgcccgtgaggccaccctccagttgcagcaagaggagctcgatgttctcatccgtaatctcgatcgggtttacaacgacatcgagcagaagtgcattgaggacaaaaggccccgggcgaggaaggtctatgatgtactagtgtttggatatatctatatctaactctatgatgtacttgtgttggactctatgttgtactaatgcatatatactggtcttaggacctcatattgtacaagtgctatttcagaacggacatccatttggtgtggtgatgttgagcgatagcgccaggactacaacattctagtggccaccatcatggacctaaggcacgtcatggtggaggtgctctcccgatcgtaggtcttgacaatggggcttaagactctcacacacgtgctcatcgacaaacacaaaaacatgaagatcaagaccacaccctcatacatgatagattagccagacctctatcgccccctgctggtctggtacactgccatcgacgtatacatgtcctacgaggttggtcgactactactcaacagggagcacgcgcaagatgcaaccaccactgtagcaacgatctcatcatgtgtgtcctcgtagttgccgttagagtatctccaattggagtcctgaacgtaattgcattttgagataatataggacattaaca

SEQ ID NO: 60981 - DNA, 481 bp, Zea Mays
gagcaatcggctcaagtcggcgacgacttaagacggtgcaatatgctcacgctaactcggcttagggtgaccactataccctactaacagagcaatcggctcaagtcggcgatgacttaagatggtgcaacatgctcacgctaacttggcttagggtgaccactataccctactaacggagtaatcagcttaagtcggcgacgaattaagacggtgcaacatgctcacgttaactcggcttagggtgaccactataccctactaacggagcaatcgactcaagtcggcaatgacttaagtcggtgcgatatgatcacgtctacttatcttagggcaaccacaatgccctaccagccaggcgatcgacttaattcagaaaacgccttaaaaccagaatggcacacttactttcacaattgttcagggtgaccgttataacttaacagcaaaacaattagcactccaggaaaaaagaacgttt

SEQ ID NO: 60982 - DNA, 1107 bp, Zea Mays
aacagaaggtactgctgcagcccagctagcgagagaggagctttgatatccctaacccactgccaattctcaaggtttgcgccacagttcttgaatataaggatctttttcccaccttggcttaacacctcaggggcaagtttcctgattgcagccccatttagccatctatcggtccagaacagagtgctggtgccgttcccaactatagagatcagagaatctgaaaacagattcttgacatgctgttgtataggaagcttcagtccctgccaaggcctgtttgggtccattttttccagccataaccattttgattgcaaagcccagctcatgaactgcagattagggattcccaaacctccaagattaataggccttgtaacaatatccgaggaaaccagacagctacctccattagcctctttcctcctcttccaaataaaccctcttctaattttgtcgatagatttaaccatccaattgggaatattattgcaatcagaagatcaaccgggatagccgaaagcacaaatcgcacaagagctgtgcgaccagcaaggttaaaaatgtgtgctttccaatttggtagacgatcagcaatcttgtcagcccatatcattagatcactcctcctaggctttttatctaatactggaagtcccaaataagtgcaagggaaggcagccggtgcacaccgaagagtcctgcaaccttcctgcatagctgacccatcacagccaataggaatggcacaacttttatgcatattggactccaggcctgatgctgcaccaaaacagtccagaatgaggcgaacacatttcagatcttcctcaagtggccttacgaacagcaccacatcgtcagcatatatggagagtctgcatctgacattagcatcatctaagtcatgtaacaaacccctattctcggccaatttgaagaggctgctaaggacatccatcaccaagacaaacaacataggggaaagagggtctccttgacggagtcctctacgatgcataataatatttccagggacaccattaagcataacttgagtggaagaagtgtagaaatgtaaagtgattgtattgcatatag

SEQ ID NO: 60983 - DNA, 875 bp, Zea Mays
cagatatctgtaatttcttttattcacagcgtactgacatatagtgtatattttcacaaattgttagagacataactgatgtctatgctatccttagtattgtatgaatgacgaagcaatgatgaccaaagattaaaatatgaagaaattcatggcagcggcaaacctacggctgattggccatctcatgctagacgtcataggaaaagagatcctggtatattttactaagagtgttttttattcaaatgttgcaatcttctacttttggatatttctacccattcatatgttattggtatatatgtagataacgatggagtcttcaaaaaggaggggcgtggtacccttaagggtatagcagcagctaccaagcgaatcaagaacggcgatcacaaatttaagattgaattttcatctaagcttggaggtcccgtaggaccaaacactcgcacttttgtggatgaaatcgtattgtttacaaagaaaaaggcaccactcattggagtgaaaaagtggaaagatatagagctcaatgttagatcttctatagcatctgacgtactggtatgtgcaatttctttagtaactattatttgcctagcatgctatggcatcgctacttcacccgagattaagccatctcagtttatgtttggtatgatctactgagatatggtcaactgttcacaatttactagacaattaaccatctctttgtatcaaaactgaaacaacgaaggtgggagtttccaagaaatgaggacgcgcatgaaaagatatggtctattgccaaggagaggtacaaaggatggcgatcagcattaagctcaacatacaaggcatacaataattatgctgaaaggatgaaaaac

SEQ ID NO: 60984 - DNA, 758 bp, Zea Mays
gtggagtcgggtgcttctcaccctttataagtctcaggcagtcattcgcttgctggtcaccctcgacctccctttctctttggtctcttccttgagcacaccttcggccgggtcggttgatggatcttgggtcgctgggatgtcgtgctccgtgagccatgagctgaggtaggttcctcctctgagttccattgacccccttcttaggcttgatattttcctcccttctcctttcattgcaggtggtcatcgccgatctgaaggttgtgtcgccacccgtcgggccaccacgaccgagctccttatctcctctccctctccctcaggcgtctctagggagtttcgatgcctcccacgtggcgcaagaggccacgaagtccgaaaccgagttacttcgcacacatctttccaaagccgattgttgtgtcattagtaatgcaaatgcccttcgaccttttcctggcttccttgcctcttttcttaccttctttatctctcttggcagccttggggctgagatagagaacttcaccatcctctgggccagcttctagactacatcggggctcaagacaccttcttaatcgagtgcctagacaacgccatgtgtcgtatccaggacatcgccgacttcggcgttcatcgggagtcgcggtggtgctactcatgggggagatctactccggctgccaccttcggttcatcattagtcctcatttgtccctttcaaatgaagggctagaagacatgctagaagg

SEQ ID NO: 60985 - DNA, 429 bp, Zea Mays
gcctgctgcttaattacatgtattgaaaacttctgctgccatgccgagagatagagatgaactaaccagcagcagcagcaggtttagatctccgatccaagacgtaccatatatatgatgaatccgcaccagattctgcatcaacgtcttattaccgacgtggcctcctgcccttctttcgttggatcgcctttccgtttgtggaacagattcttcccacacctccatttactgtgcatgttgtggactagtcacctatagctagcaatagtcctcatcaccaccagtcataaaaaaaagtactgttgcgttcactgtacgtgctaaatattagcaccaccgtacacacgtacatgtacaggccacttgagatgtagcatatggtgcaatatgtattgtcattagagtcgcaagaacatcacacacacc

SEQ ID NO: 60986 - DNA, 320 bp, Zea Mays
cacacacacacccttcctccgctgcctcagctatggcagcgccgagctggatccggctccggcaggcgcgtgcaaccctcctcatcctgctgctcctcgccctcaacatctccctttcctccgccgccaacttcgagggcttcgactccgacgaccttccctccgcggccggtggcctcgatgctgacgatgacgaggaaggtctcgacggcgtcgacctcccgccccctccgcccatctccctctccacctctgcgccatcacctcccgtcacgacgacatccgcgccgaaccctaaccccgctacgcgtacgcctcgg

SEQ ID NO: 60987 - DNA, 615 bp, Zea Mays
gtgaggtgagcaagcttattcacatcaaacttagaaaatgactctcttggatcaaggcaagcaaagcaagtaagcaattatgtggatacctcattgaagcgatgatcaaattctgttgtaatagagtccatagttgcatagaagatatcaacacggaagtaatgatcttgagtgatattgtttttccctccctttcttgatctaccaaatcttggtacactatcttccatatttgggattagaatatcatttttctggcaaaatgctttggcttcttcaagtaatggctcataaccttcacttcttaaatttgacaaacgtgttttcacatcaacaaccaaagacatggcttcaacaatattttgatccttcttttgcaatagaaaagataattcatttgttatgcgaaggatctgcaacatcatcttcatgataaaaacaaagctaaaggactccatggtatgcactaaacctcctgcccttgatggattacgttgatcatcatgtatgactgatagaacttctattattgggtcccacaatgtttcaatacgaagcaaagtcttatagtgagaacaccatcttgtatctcgaggcctagccaatgatgtttct

SEQ ID NO: 60988 - DNA, 417 bp, Zea Mays
gcttccttgggcacctcctcgactagttgggtgatgcatcaaatgacatataggcatgtatagcatgacatagcccctggtgccctctcaccctcggttactcatggttcggttttggtgggcccttatggtttccatgggtcaattcccccatgctatagctttaggctagcgtcccatgttatagccctagatctacttgagattcattggttttgggccctaggaccaacattctatcgctggtgcctttagcaccatgacactcacccctccaacacaccacaggcgactagttcatggacttcggggccaccgctcacatggcttcctactctagtatatttttccattcccacccactttcttctcttacttattcatctatcatttttgaacatgacctcattacctttt

SEQ ID NO: 60989 - DNA, 728 bp, Zea Mays
tatttttattacaccaattttagggctttacattagcccgaggcgtcgatattttgttccaaccaagctatgccagtaatgaacgaacagccacttcggtgagcttcactaacacccagggacactcaaacattaaatcaaaggcgttgaaccataccggtttcgcctggccacggggacgcgaaggtgagcatgcactacggggtccgacgggagcgatggacgtcctggtgaactccagcgtaaataggcagtcacgctggagctatacagccgtaagggaccacaagttcactgtgcactaccaatttggggcgaggaagtgaggacaccgcaaaatttggcttctactgaccacaccagaagacagtgaatgccccaaggtggttcacggctcaatttaaagggatggtgacatggctggctacccgtggtcactaaggtacgacgctagtgcatggagacgatgtaacaaggaagcacggtgtggtagaatttgggcacgggcgacaccacgacacgagcacacaagccacggtgcaggttggtgagatgttcttgccccttccccggcctaatcctcaagatagtgaatcggctcaaagctatcccgccctggccatctctatctcctcttcgtttggacgcatctagattccacagcgacgtggatcttttcttcagatatttcccagctcctctaatcttcctcgtttaactgaaccggc

SEQ ID NO: 60990 - DNA, 687 bp, Zea Mays
acaagggcgatggtgatggcgatggtgacggcgagggcgatagcgatggcagcaagggcgatgacgacgacaacaagggcgacgacgcggtgacaaggccagtggcataatgccgctggtttaagtattagtatagatagcagtagtagtaagtagtagtggattagtgtagtattagtatagcgttgcgtaagtagtagagcaatgtaatgtaatgtagtgtagtgaccaggggtgaaagaggccgactcatattgagtcggcttcaagtttgtgatgaattcccactttatgaataaagaacacagttatttcactttaccactgttgcatgctttttgttcgtgtgcttgaaggcttgccaacattttagaggtaatgcccgagtgatgattgtgattcttgcttttccgagttatgatctggcattttaggggtaatgcccgacttatggagccaacttatacttatgccgacatgtcttcttgagttctgaaccctaaatctcacttttctcctccgccgcttctctgttttcttaattctcgagcctgcccactccgtccgagagattgagatggcccccaagaggaagagacagagtgctgctgctccaatcattccacccattgatcccaatagccagcttccatttgccggtaaccacatgtctgtcatttctgagtc

SEQ ID NO: 60991 - DNA, 337 bp, Zea Mays
acagagtgtggcctctcttaagcggctgggagatgccgaacgaagctgcttctgggtctagccaggatggtttagtttacctgaagtacacctttaggtacagaaatcaatttgatgagccgaatgatgactggctagattgcattgaggcaactagcgacgagttgcttggtgcctacacgagggtcgaggatgatgccatgacagtggccttcggagggcgaggtaagaagatattaaacaaggtttttgatgtagttggttttgtgtacccagactattgttatccctcgtggtagggaaagaaaagaaaggctgctgcttcggctatctcttc

SEQ ID NO: 60992 - DNA, 1563 bp, Zea Mays
gatgcgatggattgctattagctatatgtgtttaggagatgttggctaggatgcatgtatttgagtgttgcaatttcaatatattttcatgtgaatgtaagagctaactggcagtacaatttgtgcgatgatagtctcctgatgctttcaactatgtagtttggttggtgttggggctcaatattagtaaactacatatactgtagaagttggacagtgttcttttgctgctctagtaaatacaactacaaacccatgttgtgtaagataacgctattattgctagttactctgagtgctgattatttaacctggcgcatgtttattggttaggcagaaaacagttggcacttggcaggatgtaccttaatggataggtaggccacataattgatttctggagaacacaaggcattttaaccattattttactaatcccactccttgattcctgagcaagaggaactcattaattatttgatttatttcattgtgattgtcctgctacatccatatgcttgtacattgctttatgttgctatgtcaaaaattcaaaattacgtttcccccaacattcagccgccaaagtagcttcgaacaaattatggttatgaagggtaccgatattgagtaatctgtgttgctggtgagaaagggtgttgtctctggtatacatgtgaccttgtgattatgtgttgtttcaatcttagatgtgcagtattcaacaatgtctgacgagtaattgccaaagtgctactatgtttatgttcgttttcccatacattccaattgttttggggcagaaatttctctactatcttgactctgtttttagagattcggtgtggtagacctcttctcgtagaaggcggattctcatgctggaagaaaaggagggtactcccaatcagatggagctcattaccttagcaacaagcctgtgaatggtctgtctcttttccctctcccatttattattttttcataacaacattttgcactgtcagactactggttggcaaagggctactctcggatcatgtcttattttcttttcgctccaattgttttgggggtcagatattgctctgctaccttgacttcgtttttctgatgttcagtttggtagactggtattggagtggcaacaacatatgagacagagagaacctttctgttctctacttgtttgatttggaaacatagatgatatttagtggattcgttgggcgttgtagatttccttgatctgaccaacttgtttgttgcctgggactggcatcgaaatccacactgcttagtcttgcattatatacaatccaacccctgagtaattgaattgaggtccatgtttcttttggacttaaaaaggttgtcaaagaacataatccccgtaccgtggttgaacaatcagtgtcttgtctggtagagttgcttgtcttcttgaatgggattgagttctgatatggctactgctatcaacaacaagggggtacaataacaatacttggttatttgctaatacaatggctatgggcatttaaccttgacttgagagtccct

SEQ ID NO: 60993 - DNA, 321 bp, Zea Mays
ccaaatggggtataaggggatttgagtttccaaactatccttaaaccaaaaggaaatgtcattttgtgtttgagtgcagcaaaatttgttcaaaagtagagtgaatggaagcacaaaggatatgggaattggactaaattagagtaaaaaataactaccaatatatatgggctagagtggattagggtgcagtgaaactaggccgtagtgtggcctccttttcaagcttttcttggatagtctccaacgcactggaactcaagtaggagaaagtgaaagggaaatgtcattaactattttccataattgattttggtgttt

SEQ ID NO: 60994 - DNA, 631 bp, Zea Mays
atcaattgtcgccgccctctgcctaacaatgctagagataatagtaatgtccactgcacgctcgcttaattttgcagttgcagccggcaataactgcacatgcatgagatgaacccagattaccttgctgatttaatttgctttcagtatgcagcgtccactccgactccgcctcgtcgatcggtcaactaaccacccatcgatctgtttcatttcctgatttgttttccaggacgaagacgacgacctttctccctgtcacgcaaccgatcgaccggacccaagccaactcgtggttttaattaattaattaatgtatgtgtgtcttgtttggatgcatggtttagtttttttacgacgacgaactgactaacttgtggtctgattaattaaatttgtttatggcgcacgcaacaaccatgaacgatcgatctacttgttgcaggaagcagagctgctggtaacagcctatagcaggtagcgtttacgtccgatctgttgtctgtttgcattgttgtgagaatgatcggagcggggccgatgagcagaacacgcgcatgcttaattcattctgaattaataatagtaaagaatggcgcgtcctagctggatagcccatccgtttgtatcc

SEQ ID NO: 60995 - DNA, 1001 bp, Zea Mays
ctggccacgtcgcagcgactatacccacgacgataaactccaattcgcgatcctatcccttccccgccgtgagatcttttctctgccgtagttatccaaccgccagtgaacacgaatcatggcggcggcgtgaatcttcgcgcagggaggtcgctgtcgacgagcaagccgtgctggcaaccatattcgttcagttactgtaccatggcgaatggcattcagttggactgaccgagcaagtttggcgcaaattttcttcctattttcaatggcaaccagtggatcagctaataacaaagtgttgtctgatgatccaacaacaatcttgctatagcatccatagccaaattcttattagagcaaggttgatttccagttcaaagttgactcagtaccactgttagtctgaatttcatacttcagacagtctgaaagttcaactttgagtgcacttttctccaaattcttcacaacaaccatgctcactctcttaagcaaagttattcacctaagatagatctacatagttgatgtggtgacctagggcaaattctcaataatttggaagatgtagagctccaaagttgagccaatatcactgaaaatcagacttaatccatgagaaaaagtgtggccttttgcatataagcccaaaacttagggttgaacttgcaaatccacatatttgtgacccaaatgacttaagatacttatttaacttggtttttgcactttagtccaaaagtggactaattttgcacataggtccctagggtttggaattagggttttccagggttcaaatggggtttctggtatccaggggtataaaagtgattcaagttcatttttggaaacattttatgactattcccctaaagcttttaggttttctcaacttgggttaagttttacccctttaatccctatttagggttaagttccctatccagggttctatttgcaaagtgctataacaacacaacttgtttgaaattttt

SEQ ID NO: 60996 - DNA, 483 bp, Zea Mays
ttgaacttgacttgaatttgaatttgaaaatgcaaaaaaatatatatataataaaaaaagacgaaaccacctgggcctgaattccaagctcccagcccagtactgcactcgcgctcggcctaggggaaaccgcacctggcggcacatctctacttgattccatccattggctgtgacaatgacatgtgggcccgacttccctgggtcatcctctacctcgcgctggagtccaaaccgaaccaggaaatcgctcagggttgttgcgccgcctcagggccccttcccagccgctgcgacctcgggcctgatggaagcttcttccccgttttcccgtaacaagagctgggagtccacattggcatccactcgcgtctttgttccactgcccgtgggccccgtctgaatgggtcgtcttccccaaccgaatgcgcctagctcggacttctaacgctgacctgccgtccgcaaatcctggctcggctc

SEQ ID NO: 60997 - DNA, 531 bp, Zea Mays
gaactaatgtggccaattcgaaatcgtgtgttgggtaatgttcctcatgccgacgtagctgtcttgaggcataatctattattcgtccttcttgcatcagaacacatcgaagcccaatgcctgatgcgtcacaatatacatcaaacggcttctcaatatccggttgagccaaaaccggtgcagtggtcagtaatgttttcaattgttcaatggcctcattgcacttgggagactagttaaacttaacattattattcaatagctccgtgataggtttaacaatcttggagaaattcgtgataaacctacggtaataactagccagtccatgaaagcttctaacctgatgtactgtggtaggggatttccattctataatatccttaaccctgctaggaacaaccgcaatccattttttagataaaacatgccctaaaaattggatttcctctaaccaaaacgcacacttgctgaatttagcataaagttgatgttctcttaagcacattaaaacaatccacaaatgttctg

SEQ ID NO: 60998 - DNA, 809 bp, Zea Mays
gctcaatccggaaaatgcacgtttggcgcaccttcacataaagtgactacttatcttaaatagctggccattaaaattaaggaattcctcttacacactattgtcatctatagtatacaatgatggaattctccactgttttactccaacagatcaatacaagttttttgcttctaaattgaagcctgatcaatttatatattctccgctttctttgttcgtacagttttgaaaaggttgtgcaaattccacagctagatatcatgaaaattttggaaccgaatgcagcttataaatttgtagtgtttcatttcatcatgtcctgtatttttttgtagacactaaggttcacacattgcacttgggattattaccatcatatgaaactactttcaagctgttgatatgattgaagaagttacaaacaatcaaccagattatgttaaaattgagacactacatttaaaatttggccgaaatttacactgtcttctccaatgcttctacggacacatcatcatgacccatttcactattatcggaagatgctatgaaatagatggaagcatgtttaagcgtgtcgcagccatgccgatcggctagaaccaatgtgctagccgcgttgtccacatggagtgtccttgcaaggatgtgctcgcacatcgccttgagcctgtcaatggcatatcgatccgcggccgctagcaaatgctggaccaactctctcgtctcgtccatgcccatatggctcatggccggcaaggagtcggtgtagatgaaatggagcaacgccctgaaagtgtcaggcc

SEQ ID NO: 60999 - DNA, 394 bp, Zea Mays
tcgaaatgatcctcaggggtaaagtttcaaacgttggtgctccagtggcatactcggcttggaacctgccttctcccaaagctttcaccctttttgtgtccaatccgcccgtgacagatagcaatttgggtcttagagtgcgaccttctgctgaagaagtccgttccttagttgcttcgctcggggagatacctgatgatgaacggcagatttattttgaggtgcccctgaaccctagtgatgcagacataaatgacatgctcgatctgctagctgaggattcatctgatgctgctcctgagggtacattggcagcggtgccccttccagaggttgatgcgaccttggatgtcccaaaacctgtcagtactcgcccgaggcgccctagccgaac

SEQ ID NO: 61000 - DNA, 451 bp, Zea Mays
aagtcaacaatttcatcaaaaattgtgaggaattcatcatcaaatggcaagggtatgttcctactgctagggttacacatgatggagaagaagctgaaactgttgagaccgctccgatttctgaagtgatgaaacagtcagggctagtagtgtcggaagatgtttctgatgaaggtgcacctgccgctgaggctgagcaggttggtgctgaggaagatgaatctgaagatgattatagtgtcgtgccatctaaacccagccacctagagtttgggaggtccaccgttaccgaagatgatatgcctaagttgataaagttaggctatttcagtgaggccaaaaaggagctaatttgctttggcagagaggaaattactccgaagccggaaaaggatgaggtggtagtctttaaaagcttcttcaaagcaagattaagatttcctttgaatga

SEQ ID NO: 61001 - DNA, 472 bp, Zea Mays
ccggacgactcgatcagactttctagtcgtccagatcgtccgattaggcgtccagatcgtcgattaggcgtccgattagagggtttctggtcgtccattggcggctagggtttactattgggctttattgtttttacggcccatctacagtcacataaacagcttgcctcccctcaccaaaccctgtctgcgcccctctccaacccgtggcggctagggtttagtggcggctagggtctagtgcagtcaccggcggttgtccagtgcagtagccgacgtctgctgcagttcacccgcaccggctctgcacccacttccggcgtctctaggtcaccggcgttggctccagaccagcaccagtgacaacttacgacggacaagatgagctcccctcctcccccctttctatcttattatcagtatgtccgcagtctctagttcttgccttcatggttcttaccatcacattcat

SEQ ID NO: 61002 - DNA, 479 bp, Zea Mays
ccaccccgagcgcgaatcctggcgccagtgacacgaatcacggcgaggcttcatcggcggtgagatgactgagctggcgttctgatccccccgatagcactgtaccatggaggagttcagttaaatgaacctgacagccaaatttgaagccaagttttctctcgatttctgatgataactcataccaagctctgcagcaaagttgtagagcaatatgccatctacaatattgccatatgatgttgccccaaaaagccactgcatctagtttgaaattgggcttgaagttcagggcatccacctgtcagtctgatttttagacctaatcagcctgacaacctgactttaggcttaattatctctggattttgcttaacaactgagctcacagccttaagcaaagttgttctcctatgattgagctacaaacttgatgtggtgacctagggcaaaaaccctagagtttgaaagttacaagg

SEQ ID NO: 61003 - DNA, 351 bp, Zea Mays
aggcaataaaggaagtcatcctcgtcatccccaccatacaccaatgaccctcgagtatactacagatccctggcataatgttgcgcttcgtcaatttgctctttcgataattctttccctgaagcatgtcgcactataaattctaatttctcggtaggggcttcgggggcagggaactcagattcttcggtagcactatcttttcttagcgatgatggtccctcagcagcctccgaaggccttgcttcagcaccctcctaagcggcccctgagggtcttgcttcggcgagcatcgagggcttagcctcagtcgcaccttgcactgtcccaacatcggcagatccttttgca

SEQ ID NO: 61004 - DNA, 567 bp, Zea Mays
gtgccctatatagttgtggtaccaacgcctagaggatgtggtggttgaaggctagaggtcccggtggagggggctcaaacttcattcctcattgtgattaaatagtcctctgtggcgtcgattgtatcaatagacgatgtctagaccctctcgtacttttacctaatgcccggggacgggcacgctccgcacgcttcttcctatcctcgggtgccgacgggacgggacccatgtcgtgccttcctccttatactgggcacccgtcctgatgaagctccatttttcgacagtgcggacacggtatgctggctgaccctagactcacggcgtcgcgacatggaactctcggcttgctattgcgcaacaaggtcgagaagaccctagagcttgtggtgggccctctattcgcctagagtctcagcctcacgaagcttgtcaagaagcactgtggctaccgcaacgttctagctctcctaggggaatcatggtggtccacttccgtcatggattatatggcagagacattcgtcattgcagcatacacttgtccaacatatttttgtgacc

SEQ ID NO: 61005 - DNA, 466 bp, Zea Mays
acacatacttagcgatttccctcttcattctggtccaccagtacaaggatttgagatcatgatacatcttgttactgctggggtgcatagagaatttggaaaggtgagcttcgtccaatattttctttctgagttcgggattcttaggaacaaccaattggtcttcaaaccatagaactcccttgctgtcctgacgaaaggatttgtacttatctaccttctgttcgagcatttccttaatgacttgaacacccttgtcacccatctatgccataactatttgctcgtgtagagtgggctctaccgaaatataacccaaggtacttgaggaaacaacttccatgctcagcttgcataactcgtcatatagagtggcgatcatagagtccatagttacacagttgcactgggctttttgacttaaggcatctgctaccacgttggccttgcccggatggtaatgcac

SEQ ID NO: 61006 - DNA, 377 bp, Zea Mays
cggctaatgaaggacctgatggggagctggacctttttaggccccctccttccatgaaccttgctcacgaacagtctcctaaagcaagcagtggagcaactaaggatgaaacaattagaatagtatagtttagtttaaaataatgtacttatgtaaaataagtaatgaagtcgagttgtataatggagcttgtataattattacagttcagcaatgtaataagatggtgtatgttggcatgtaatattttccgaatgttcttttgcctcagatgccatcccggactcgtgcacatgatggtgcggggacgtcccgcggtcgggaggacactcccaatctgccacccgtacctcctaccttgaccgaggctatcgctg

SEQ ID NO: 61007 - DNA, 418 bp, Zea Mays
cgcagatccacgagtgggggtgttctggtcattcctctgattgttgctcttctgaggtgtctgctggttgtgcctagggcagttgttagcataatggccaagctcaccgcacttgaaacagccattgggttggactgatgcgttgttgcttctggcctgcgtgttcacgacgccaccttgacgagtctgcgaactactaccagacctttggttgttttgagagatgttcctctgctagttctaactttgattgttcctctggccttgttgtccagagcgttgcatctgataattatttccaccctgatttccagagcagaactgagaaccttgcgcgttgttcggacgtgtgttcctgctagactgaccttggaacttccttttgtggtcaaacaattccccttttttgctttcaagg

SEQ ID NO: 61008 - DNA, 397 bp, Zea Mays
gtgtactcgaagaacgaagaagaacatgccgggcatttgcatgtagtgcttcaacgtatgcgagagcaccacctttatgccaaattgtcaaaatgtgatttttggctaaaggaaatcaagttcttgggtcacactatctcttaggcaggcatagttgttgatcctgataaggtgcaagaggtgatgaattggaagccaccaacgactgtccgtcagattcgaagttttctgggattggccagttattatcgaagatttattctggatttctctcgaattgcgaagcccataactgagctgttgaagaaagaagccaagtttgtttggggttagaagtgcgaagatgccttccatgcattgaggcaacatctgaccacaacaccagtgttagcgcaac

SEQ ID NO: 61009 - DNA, 322 bp, Zea Mays
gatcagaaatctcagtcatacattgctcaaccagatgttagcacattgctctctttgtcgctggatgacatgaagcaaactatgagataaaaggacatttaaccgctaacaatacgaagttgcgagtataccgagtggttattgtgagaattttttcactatgttggtgtgaaaaccatagtgagttcccgttgaaccactttacttgttccatctaggacctctatgcttgtgtcgcatacatctctcggaattgtaaatacttatagtcactgaattgactcgggatagtcctttgacaagtttggtatacattgtaagc

SEQ ID NO: 61010 - DNA, 532 bp, Zea Mays
cgaagaaagaaaagactaagccgagtttttgatgcaatcgggttcgtgtaccctgactaccattatccagtgcgggggcagaaaaggaaaggtacagtttctgcgaaagagactgctccagctgctcctatcgagccagcgccaaagagaaaaagggtgaaagttctcacacaccggccacgttacattgaactagccacagtgcctgaattcggcatcggagcatcttcagcccccgaagctaaggaatcaacttcgttgcccggagccagagagctggccgaagtgccaattacaaaagaattggaagaaccaaagactctgttaccagaaatcaaagaggtggccgaagctccatcgacagaaaagatggaagaaggaaaagcatcaactgagggaacgaaaatatcagaaattttgagtccctcagaagaaattaaagcaacaaaaattaaaaaggggccaacagcgaccccaaaaagaaaaagaatggttaatgtgttagatgttttggaaacaattaaacttccaa

SEQ ID NO: 61011 - DNA, 1241 bp, Zea Mays
gttgggaatatagtcggcatcaagctcatctgatgttttttcttccttggaggtataggaggacaaggattgtcgtcactagaactatccttcccgctcccttcaccggagctgctcgttgtttgccattcaagtttggtcgcgtcttcatcaactttgttagacgcaccggtgcagactacatccatcctagtaggtacctagtgcacagctggttccatcaataaagggatatactgttagtctgatatactagttccatcaataagggaacttggagaaaaggtgattcaaaataaatcgagcccaaacccgccttcgtgtccctcctttcctccccaaatagaaagcccaaacccgcctctggagcaggatcgggccggggaagcacggagcagatagaagtgcactttccaatgtagttagacagagaaggcatggctgtgatgttataatgctgaaggaccccaagaagagattatggcctgtcgtccaccaccactgcccgttatttgtgggcttcactgagggatggaaacatttggtgacaacaaacgaccttcggactggggacgtctgcgagcttgttaaggggccagacgatggtgagccggtgtactctgtccggatgtgtggtcacaaaatttaaagccgccccggcttcatctgtgcacttctcttctcttatgtgggatactaagagatcttaatatccgacataagagaagagaagcacacacatgaagccgaggcggctttaaattttgtgaccatacatccggacatagtacaccggctcaccatcgtctggccccttaacaagctcgtagacgtccccagcccgaaggtcgtttgctgtcaccaaatgtttccagccctcggtgaagcccacaaataaccggcagtggtggtggatgacaggccataatttcttcttggggtccttcagcattataacatcacagccatgccttctctgtccaacagcattggaaagtgcacttctatctgctccgtgcttcccgacccgattcaggcattcagccgatgccattctccgtataagtcccaaacagagaatagggatgaggtagtcaagattgtaggcgctagtgctcaactactagcatctatagatatggacacaagtccaaatttggtgctactcggcaccatcgatatcactagggaaaataaaaacatcaaagagatccacttccaatagtactcgaagatagttc

SEQ ID NO: 61012 - DNA, 407 bp, Zea Mays
atcggaggcaagggctagtgcactgggcgtgtaacaatttgacggagctcactggggcatcaatttatagagtccatgaatggtggctctgaatttaagaagagaagcagacagccgaggagaggggatgagtcaccgcggcgatctaccgtggcattcactgaggcactgtcactggcgatggataggctacctactatggactattgcgacgtggtaacaccacagattacatggcgcacgagcggcaagcggccaacaccagcgaggatcattttggtcgaccgtagagcaagtgggtacggcggccagcacccgacctcatccgcggtaagatctttttcaccctgagtcgttatctgcgcgcccataggcacgaatcgcatcgccgacacgaatccaggcgc

SEQ ID NO: 61013 - DNA, 461 bp, Zea Mays
cgcaatcgaagaggggagctcaccggagctcacgaaattccttgccggtgttggagaatccgcaggttcccgtggccagggctgtccgcgctaccaaccgtggtgagaaccccctttccgtaatcgccatcaccccctctaggtttggcaccgaccaattttgagtttggagcgtccagccgtggcattgcgcgtccgccgatgatgctccaccgtgggcggactgtgcgtctccgtcgtgtagaatagggggagaagaagaattgtgggccgtaggatctcgggttgacggttctgattagatcagtgatactcccttcgttcaggccgtcgatctcgaatcggacgataggcgcttacctctgtattcattaaatggtgaccgttgatcttagatcgtgtggatcccatggcgtaccggttcgcgcgtctgttgatttaatctggacgcgtgatttcta

SEQ ID NO: 61014 - DNA, 827 bp, Zea Mays
tgaccaacagggggtgagggttgactgggtgtctgtatctcatatagctgagtctgacttgattcttctgtttgagtatccatgtgtttcggggcttttgcttgtggttgaggtgaactaatcatgtatccaaacatttttctattccttttgttgttcttcattccattcatcaaatatctctgggactcatttttctcgttcatagttgttaaggtaggaatattgtcgttggcatcatttacttcatttccattgggattcatcatctagttagagggtaaaagagttagtgagacagactgcataagaggcttgtatgacattagataaagaccaacattttgatttccaaaataagattcgtcaaggaacaaggatggtttcagatttctcctagcttcatcatactacaagagtgtacaagtgttataatccttaacagagatcttttgaactttaaagatttcagagcatgatatacgaatcatctttccgatccaagagtatttctttgagcacaaattgagagaaagacttgagcgggactttagggcaacaagaatagagcatcacattgtttgcatatagcagatgacaccatactttattctctttataaagaggcaaaacacaataggtgcaaaagattctccaaatttattcatatatcacttatcacaattacaaatcttgaaaggggcaacaccttgacatttttttcgtgagacatactccttcttctagctaaatgatatattattcttccttgtcagatgtaccaatcttcagggctggaggtcgattgtcttcaactactattcttt

SEQ ID NO: 61015 - DNA, 759 bp, Zea Mays
caaaattgaatagacgtaaataaaaacacaaaaaagtcaccatgagattccgtgatatcatttagacatatctttcattccatatagaatcgttatatttaacaaagattgttaacacatggacaatgccccctaaatagaaaggatggctaatgttgacacccaaaagatgataaaaattaactgctaatgcttacaggtgactcgtggatcacaatagtaacgactaacacaaagaatctgctaccaacacgacaaaaaactatgggtaagaactaaaagtggaaacgatgatccttccaattcaaggatcactaagatgcatcaaggtatcaacatatataacagtatgaaatgcaagttccactcacctgcggataaactctgctacaagcaacaaggggtgcagtacacacaactacacaaggcttccatgactcccgcatattcagaactacatccacgtcaaggcatcaaagcaacatgtgtttaccacctgctgcatcttttgctatcgtaaactatcaaccaacgtctctccctgcgctaagtacacgctgcacctaagaattccgagtgtacagtagcatccatgtccatcatcgccaaggaacaaactatttcttgtcctaccagaagcaaatatattaccagacattacatctagcacaccagctagggagaatcgagagtgcaatatcacacctcacatgcatgactaacgaaatcgactgtggctcaccgcgaaataggagaaac

SEQ ID NO: 61016 - DNA, 574 bp, Zea Mays
ttttcgttccatttctggatttttacgtatattctgtgaaaaacgatatgggtccagacgtgattttatctgtccgtttttatccctgccatatcctaacaggtcgcacgtgcaaaaaaacaatatagagtacgctaaaatccttttaaggatttggtccaatgtgattttttcaaatggggctggcaatatcggcaaaaccaagtcaaccaagcaatttaatgttcatatcattaactccaatccacattgaatgtctgcctacaattctgttacagacttacagtgagctacaggcacctaggcgactggcctgtgccgtggaggaggaagcctgcagagctgtgcagacaagagttgacagttccacgggttgcctctgaagctctcctctctctccgtccgctgaccgagaccacctgacatccgaggcttccatcccagcagtagtgacgcgtgacgagcagtgaacccgcaccaacatcacgtcacgttgaaagcagcagtcagtttgggggactagtcggacgccagtgcagcaagcaaaccacagggaagtgttcctacttccaac

SEQ ID NO: 61017 - DNA, 1361 bp, Zea Mays
tccagccgccgccaccctcttgttctcctctctctcaccttcacactcctcgtcaaaaactttctcgagccctcactcttttggaagagtggttggagatccgttcttcccggcgtgtttccaccatcttcctccatctcattgggagatcttgaccaaatcttcggatcgaggtattgctctatattatttccttgtactcgatcctacgcgttcttgattatcatatgtatcattcattgggtacattttagtttaagtgattgcaacacttagattatcttcattttgtcacaaacattgttagggattagcgatttgatattgttcgttgtagttgaaccgctcatatgaacggttgaagtgcatgctcaatatcttatgcgtttcttctcaaacgtgtttgatccttgctcatcataggttctatttcttatttcttatttcttagaatggtgcgtcgaatgaacccgtcggtggtcgaatccgactcctcggatgaccaggaaatccacggagataccccacctcgctctcgatccaagcgagggcgcggaagcggcaatgtcatgccgggtgctgaggcctccgggtctcaaagtgctcgcggtcgaacatcccggaatccttccggacggtctcgacctgcgacgaatctgcaggcgtgggagcctacaagtgatgatgatggcgggaaggacgatgaagtcgatcttcccccggcccacgctcctgtgattcgcggcttggtcctccaccgggcagaggctcggcgtgctggcaatgagccagtcactgactttactgccagtggaggctctgctcttctccaggatcttcgtttccaaaatcctgtattgcgtattcgcgatgccaggatcgatggaaatcgcttttggactcttcaccacgtggatttctataattccgtcattctacccaagaagcatcaacccatcctgcatcaacgatatattaactgggaaggttgtgaagcgattggggacccagaaatgtcacaggcactgagggcctgtgaaaggaaacaaatgaagaatatcatgacattccaatatgattggaatgatgaagtgattgctcaattctactccactctctggataaagcttgctgacgaggagagtcattacaactacccctatctgaacttcttcattgaaggtagttggtacaaggtgagctatcgtcgatttgctcacattcttggcttttctgacgatgatatatctggagacaagatcaagattcatgatttccggcagcccacaagagatgaagccaaggatcttcatctgtctgagtctggaaagtattgggagtcgaccaacattcataagtat

SEQ ID NO: 61018 - DNA, 344 bp, Zea Mays
ctccaaaataaacgccagtgctaagtctattgtgaaaaacatactctagcaaccctttcgcaccatgccaccacccatgaccacaaaaccatctccaccacctcagacatcttgacaccatcgcctcgaggatctccaacatcttgacaccatcgccacgaggatctccatgaactgtgtctgtcgtcgtgaatgtctggtcttccatcgacagctccgacctttcaagatgccatggaagattgttgatacggatttctgctgccggctcgattaaaaatacaaagcagattgtcacggcccaagagggccccacacccctcaggtaggttagataaagataa

SEQ ID NO: 61019 - DNA, 1023 bp, Zea Mays
aaaaactacttaggcgtgtagggtggaaatgaaggaagaggcatttcttgattactctccttgttgccaccaccagaagccccacctgctcccgggttgatctgacgggtagtcaccatcttcatattttattatgggtagctggtgagacatgccgtaacttttttgaaagaaggaaactatggcatataagatctcatagaagaagacttcatgtgataatcataaaggcaagaatcacattctaagcacacacaacatttccaccacatacttcataagataaaatgtgcatacaagccaattgttttgctagcatacacatgctagaccaaaagaatgttctccacacacacgttagaagccatcacatcacaggccttacaccatatgtcttgttcctactcctaggaacgctaaacaaaagaaattagtctagcacctaacgatgggctaatagactaattatgaccactgccgacctcagagacggtcccaccatcatcatctactattgttgttgcatctgcttcatcatgttctagcgggttgactaggtttagctgggcatgcaactgatgaacctcttcatgtaggttagcattccatgcctctgcattgttcaactgttgcatcaggttaacctaggttgccctaagctgatttatctcggaggttgcattcctttccctaatgatatctactacaattgcctggtagtcctggcatttgctgatccacatcacattatcgagtacaaccatgtccctgacctgaactgcctcatctttctccaaggtcatctgagctagctctgcctagactcgagcaaattctgcagcatgcacctctcgagtctggtgtaactcattctgagccacaacaagagagttgcggaccatccccaagttgcgctcagagttgttatatagttgcataactacaaacatagcactagatgttgtagtgtcattgtgttgttgctcattatcacctcctgccatagcactaccctcaggctgg

SEQ ID NO: 61020 - DNA, 552 bp, Zea Mays
ggtctccattataacatcaaacacaacccaaatgtttttggcaaaacattatatgcagattcagagtcccctctgaaataaccgtggacaacagcaaatagttcgatagctagcaattctgggatttttgtgcatcagttggtaccaaaatcaacttcaccttcgtatatcacccctaatccaatgatgcagtagaaagggcaaacacaaaaaatttcacgacgatcaagaaaaggttgcatgatgacgcaaagggtaactggctcgacaaacttcccaaagtcttgtgggggttaaacacagcttagaccatatgcacagatttcacacccttcaagccgatgtacggtgtagacgcaatgatgccacaggagctcaaatttaaatccccaagaatggaaaatagcttaacacaagagactgatgaatccgtgaactaagactaacacagggtcgaggccctcagcacaattgctagatatcaagaaggtatcaagacctggagagacaagtccatcagagccaaagagtttgacgaaggcaatttagtcg

SEQ ID NO: 61021 - DNA, 554 bp, Zea Mays
cttttagtgatttgcattaaacatttttttagcattttaagagctcacagtcaccgtccaaccaaacaaattctaaaactgaacataagaagacaaataagagaacgctagtggttgtctatttctgttctccaacactagcctgcataatggatgctagttttatttatagtttcaaatatatgaatcaccgtgtattgctatagttttctatatgtactgtaccctcaccctctcagtcactgcatgtcatctccgtctctccatcggccgttgaaaacccggcgctttgcagaagtttcttgcattctttttgtttcgtctcggtcccctgcgaagctttcccatgcatttattttaaacccgtgctctgtcgacgccgtcgcgcggatccatggatatattcccccggcagccagctaaacaaacttctgcaggcaaagattcgtttttccggtggcacgtttaccgtcgctttttgtaccttgttgtctagtctaggagtggtagctgcagcttgcatgtgcgatctatagtactgcagatgcttctgg

SEQ ID NO: 61022 - DNA, 802 bp, Zea Mays
accacctgtaaatcagatcccatctcagcccgtagagtgtcaaacagagcaaatgtgggggtggaaatactgtgtaggttcaacatgacttcatctctgcgagacaacgcatcagcagctccattgagtttgcccgacttgtactcaactatcatgtcatacccaaataatttgctgacccatgtatgttgagggatggtggataactgttggtctaggatgaatttcaagctgtagtgatcagtctgaactgtgaacggtcgcccctagagatatggacgccaatacctgacagctttaaccaagccaatcaattcccgttcatatgctggcagcttttgatgatgaggggctattggcctactgaagaaagctatggcgccctcaccttgatgtaagacagccccaaacccaactctagaagcatcacaatcaacaataaagcgacgagtgaagtctggcatctgcagaaatggtgatgtgatgagggcttgtttgagcaatgtaaaagcctcggctgcttccggtgtccaacggaaagactcccttttcaataaggcggtgagaggtgctgctattgttccatatccagcaataaacttccgataatatccggttagtcccaaaaatcctctgatagctcgcaaactattaggaagtggccaggtttccacagcagaaactttgtcgggatccatggcgacccctgttgcagatatgatatgtccgagataggctactgtagcagcctcgaacaagcatttggagcgtttcaggactagttgatggtcacagagggtct

SEQ ID NO: 61023 - DNA, 1072 bp, Zea Mays
tggatccgtatagctacaatgcatttctcaggacctgcagcccgttggcttcaatctgtagaaccacaattgccacatatttcctgggttgattttgggggtctgattagggagcgtttcggtcgagatcagcatgaaattctcattcgccaactctttcatatcaaacaaacaaccactgtcgctgtttatgtcgagcagttttcccaattagttgaccaactcaaagcttacagcaccatttccgacccactatactatacaatgagattcatcgatggtctccgtgatgacattaaaagtgttgtattagttcaacgtcctcgcacattggattctgcctttgttttggcccaattgcaggaagaggtgggcgccacgcgcagagatactcggaagttcgatgcaccagtcaatttgaggtccttcgcgcgtacagctttgccactacctccaccccctcctcggcaaacaagcaatttcaagtcagacgtggaaccagtgcccaacacgtccaagtctcaatcaactgacgacaagttctccaccttatatgcttatcgcagagctaaaggactgtgctacaagtgtgggcttcagtattctcgcggtcaccgttgtgcagatactgtatccctgcaagttgtggaggaactgtggcaactcatcaatccaccagcgtcagacattgaatgtcagtcggagaatgagggcgaacttcagtccatgctgctctcccaagctgctcttcagggcacagtggctcctcggacgatgaaatttcatggcactatccaaggcattgatttattggtgttactcgattctggtagttcacactcatttattagctcccaggtggctgaacatattcaaggggtgtgtccattgccaaaccaactgtctgtacaagtagccaacggtgagagactacactgtatgcagcatgtgccacaggccgtgtggacattgggaggttgcgaatttcagtctactctccgcattctaccactgcaaacatacgatctaattgttggtatggattggctcgagcttttcagtccaatgatgg

SEQ ID NO: 61024 - DNA, 438 bp, Zea Mays
tggatgggcgcacggacagatagagacaagatatcgcttgtgttcgtgtaggcaccccgcacaacgctgacggcgacgcacgctactccaaacttcccctacgtactctagacttgtattagagagacaaccagcattagatccaatgccctttctttctacttacatagagagcacaccatcactcaacctcaactcgtgttgggaattagccggatggataagctgatacggagctgctgaaaccaaaggcatggaagacactcgacaacctaccggaaaatgtccgaacagagagcgaccggcacacagattcgaccgacgcgcaaacacgccctgccctgcacacatacagatttaaccgtatccgcctcaacgacagcagacagcacccacatgccggtgggccacgcgggcctgcacgttgcgactcatgcg

SEQ ID NO: 61025 - DNA, 636 bp, Zea Mays
tgtacctgacgttgaagtcctaatgggtgtatctaatgctaaagtcctaatgggtgtcgcgcttagcctgtgtgatccgggtccttcaacgcttgtccctgctcagacttcgacttctgctaatatcattgcctctaggagcacctcagcagttccaggtttgggatttcccttgttcttatcgaatttacaggtattgtatgtcccgtgctacattgcctttaccaatgggtgttctgcttgctgacttctgcattcacagagtgtcctggacctgatggcttctcaactggaggcgcatggagttttggtgcctgagcaaatatcttccttgtcgcggtggaatcctctttctcttcagaagcaagtggtcgatctgaagtctgctaacgctggtgagctttcttgctgttgtttctcgccgactttcttgtttttgtttgcattattgatggtcgctaaatgcttcttcaacttttactcaatggttcttagatactaaggagaagtgtgcccgaaatcaagcggagcttgatcaggtaaccaggttgcttgatggtgcctgtgccatgaactccttgctacagtcaaactttgacttggagaagaaaacccacaaggtaactcgccaggagc

SEQ ID NO: 61026 - DNA, 698 bp, Zea Mays
ctgggcccgatccagccgacccaaccactttggaagtcagtggttccgatgctggaatcctgatgggtgttgaacttagtctggaagatttagagcttttagtgcttgttcctgctcctcctatggcttctatgggtgttgctgcttccagggacgtctcggttgttctagcatgtacttgtttatgtagctcacattactttgtttttcctgatgagcgttctgtttgctaacttttgtcttcgcagggtgtcttggatcaagtgcccattcagctgaaagcacatggagctctagtacatgagaatataccttctttgtcataatggagtcatgttgctcttaagaggcgaatagatgatctgagggctgccaatgctggtaagttttgatgtcattccttcttatttttctcgttctcgttcatgtttttgatgaatgtcagttgtttctttggctttgactcagcagtgctccgatgatgaggagagatgcacccataatcaagcagggtttgatcaagtcactaggttccttaatggtacccgcgccatgaagtccttcctgcaatcaaagttatacttggagaaaaaaacccacgaggtaattttccaggagctgcaggttgcttattctatgctatcaacctattatcaagtattctcccacccacaggaggaatgcagaggcttaaggct

SEQ ID NO: 61027 - DNA, 529 bp, Zea Mays
cacataaattgtgatatttaattattaacatattcatccatctatctacgttttcattacagagactcaacatcagatgcaacccaggagatgttctcgcgtccattcagatattgaatgaaaggcaacgtcaagctatagtcagaaaaggcttctccagtattcttgacatgacaattgatgcaattggatgtcgaacacttctttgttggctcatgaagaagctagaccccagagacatgactcttcatattggtccagacaaagaactcaaaatcaccaagcagattgtccatctgatattgggtcttccaaattcgggtggtggaaagccacttaatattgttgaagcgaacgaagcggcaacacttcggtcctccttgaatattagcaaggatgaatttgttatttcaaagctacaggacagattgaggctaggccaggatgatgagctttctatcagatgtttttttattctcttcaaccggctgctatttccaacaactagttggtcgatatctttcaatga

SEQ ID NO: 61028 - DNA, 329 bp, Zea Mays
atccaatgggaatggaatgcaatatttgacaaagcgaaacatcgatccgccataaaacaaaaatcatgacgacacaaatatatgctatcaactaaccgtttaaaaatactaaacttacttctcgcttcgccactacaccaccctttagtcacatgaccatcatgcgcatccttcacacgattatacaatagcaacctaaacgtcgtgttacacaatacatacatatttcctcgtcgcgagtataaccatattacggcatatacccgcacacctcaatcaaatatcttacgccaccactaccataatacaccacagcatacacacatacg

SEQ ID NO: 61029 - DNA, 392 bp, Zea Mays
ggaaaacttcgaagaagactacaaatgctgatacatagaatgatgagtcagagagcgacgaagaggaatctctgggcctcgaaaagaagaaagccaagacttcttcgatgaaatttgtcgctgcacaagggcaacggcaagggaaagggagtgctacaaccacctcttctatgggctgcacacggattcttgaggtaatgacacagccattaccattctcccctctaagtcccttaggaccgatacttactcgttttatggcaaccacgaaggggatcgatgaaggagggcaatcttcaaagggaaaataaatttcatctgaagaagtagaaatcccacgaattttgggtcttggggtgctacctttggaggttcgtcatcctattaagaag

SEQ ID NO: 61030 - DNA, 426 bp, Zea Mays
atcgacttaccccgagtacgagttggaccggcggcggcacgaatcgtggcgaggagatcgtcggcggcgaggacagccgcgctggcggtctgatcccaagttgttactgtaccatggcgattcccccatcagtcgacctgacagagcaacttgaagccagattttctcttaatttcaaatggcaactcatccagtgacctgcagcaatattgtggagctacaaaccagctataagtttgttatagctgccatgggcagattctcattgtatcatggttgaattggctcttaaacttgggtccaagtcactgtctatctgaaattcagactgaatcagcctgacagccaaactttaggcttaattatcttcaatttactcttaacaactaagcttacatccttaagcaaagttgttctccttttatt

SEQ ID NO: 61031 - DNA, 429 bp, Zea Mays
cccatatcaaaaatagccattagaacaaagcagacttttatgcatagcacaacatgttcgtggaacaccagaaatgtttgttgagtttcatgttagctagccattgagaactagccgttaccaaccattgaagcttaggtatccggtgcagtgatcagtgttacaacatacatgcgaggtgagtgttactggcttggttgctttgcaacctctttgagtatcattttcgtgcagggtcaagtgtttcactgaacacgtttggtgctttgtaatctcttgcgcatcatcacatgcattagagagcttactacgctctccgtttggtgtggcatccagtgcacatgtttggtgcacacatatgtttcggttgtactcagtcttcaacgcaatctttagtatagacacaacacttgtctggtgcaacatccg

SEQ ID NO: 61032 - DNA, 758 bp, Zea Mays
cggctgaaaaacaaaataattaagcatgttttctatcttaatcagttatttttctatcgcaaataattagtagaaaaatacatgcttgaatatggtaaaatgataattacacctgatgtgttatgctcatacattaattttggtgttcatttttattgcattaataattattccccgtagtaaataattagcagaaaattattaaaatggttgtgcagactatactgcgcagactaaaatcgctctaaatatttatgatgtgttgagcttttggactcacgtcgagcgattaaattatatagtgggtactcagacacgtcgatcagactacgttattaatcgaccgagttatggcattggctgcatcttggcaacacgacacagtatttgtgtcgtacgaacttggttgtgtcatgtgattactatgtcgcactctcatttaatcggactgctcccgttgagtcgaaccgcaatcgtcgagtcacacatttttcgcagccctgtaggcactatccgtctgtcgtgatcatcgagccacaattgcgcctgttgcgcacgttgtgtggatttatcgtgtaccccgactaccgagccacaattgcgcttgttataaaggcttgttgtgttgttgtagccctaatggccgcacatatgttgacgccagatacgctagagcttgtactcgcgtggaatgtggtgggttattcaagcccctaaagtcacattattgcacaaccttcgtaaacaattttgtttgg

SEQ ID NO: 61033 - DNA, 293 bp, Zea Mays
tcatcctttccaatgttcattgcttggtgcacgtgaccagctctaccaccatgtgcatcattagaggcaataacatctcccccttgagagctagcttgcccccaagctagagcaaacggaaaacaacatcgaatgtccactttgtcttcctaggtagccagtgaatgatgacaaccgccccatttaatcaagacatgggtctttaccttgcctactcgcgaaatcaaccgagtgtccaatacttcttccagaaccttgaggtcctacaatagctcatgcacaatgggacttaa

SEQ ID NO: 61034 - DNA, 2737 bp, Zea Mays
caaaccttgccaatacctcatcatatttgggctcttatctcaatggattttgtggttggtcccccataatctaaagggaatatggctttgttggtggtggtggatcgattatcaaaatatggtcattttattgcctttcaagcggtctgctatgacctctatggttgctgatattttttttgactggattgtgagactagatgggatctcggagtcaatcgtctccaatcgggatccagcgttcactagttctttttggcaggatctttttaagcgttgtgacacacaactcctcacttcttcctcttatcacccttagacggatggcgagatagaggtggttaatcgtactattgagatgtatcttcgctatctagttgtggaggggccctccacttgggtccactagttaccctgggctgaattttgttaccactcctcatataattctgctctccagctgactccctttgaattggtgtatggccgcaaaccccctctagttgttccttatagccaaggctctacccttgtggatgcggttgatagtcagctgatggatcgtgatgtcttattggatagaactcgtcatcacctattgattgcctagaacatgatgaaacaacattctaatcttcctcagcgtgaggtctcttatggtatgggtgattaggtgtggttaaagcttcgaggtcatcgtccactctcggttcgcccggataactatcacaagttggcgcccaaaatttttggaccttatcaggtggtcagtcaagtgggcaacattgcatatcgtctcgccttaccaataacagctaaaatatatgatgtatttcacgtctccatgttgaaacctttcaaagggtctcctccatccactagaccttcctaaagatgtgtcctacccctctccagaatctgcacaacctactcctcagtcacaagatactggctcaacgctttgttcaagggcaccaacagttcttgattcagtggaccagacaagatattgaagaagctacttgggaggatgctctagacttccatcaggtgcacctagatttcaagcttgaggataagcttgctatggagggggagtattgatatggcccaccacatagagtttattttaggaaacattgagccgattggatgtgtttatttggtagcaaatagtctcttttcgtaatggtagaattagttaccttattgagcattataatgctccatagtttctatgtttaggagaaagaatttggggaaataaaaggagaaaagggcataagagaaaagggaccattctgttccacaaattctagtttcaggcgtcgccaacgataaatgactgctagtgagctattctggtccaaataaaattgagcaagtagagagcgtaccaggtcctggatagtttttggctttttgcaaccttcttatattgaatagattggatagcacgaaaaaaatccaagatctaagatgttaaaatctggtgaattcggtgattgacaaatgagtcttatgtcaaatccgtcttgtctagcaacttcactgaatagtggatcagcaagttctatatgtgaggatgcattatcttgctgaatatagataggtttgttcatatcttcacgtggccatttagctcgaatagccggaagaatcttctcaatcataaattccctaatgacatatcttataatggatacgattggtttcacctctatggtcccagctggccagttaatactgctcctcctttttttagataatggaaaaagagttccggccttctcctccgtagagggtccgagccaacatctacataaacagcatccacgcgaacagccacagagtcaaacacacatgaaactgtaacaaggggaaaccacgcagggcttcaaagacataaaaaactacagagtaatgcgattggagaaacgccatccattgtgcgcaaacaccatcatcaccactttctccagatgtctgcaagccaggactaacttctcctttgcaacttcatgcctttgaagcagcgcccaggaacgacaccagtaggttcccctgtagattacctgcatgtaagttttcgagttatcacgatcaaaaaccacctcattcctgctaagccatagagcccaaaccattgccgccacccccatcataattagggttttgtcatgtttactgaaacccatcaaccaattcccagcaacgtgctccatatcccgagggatcggcagaccaaaagtggctaacaacgccctccaaatgaaacgagcgtaatgacactcaaagaacaagtgtctaatcgtttcactattagagcaaaacacacaaagcttattccctttccagttcctacgcgtcaagttatctttagtcaggatgacccccctaccaagataccacagaaaaaccttaattttaagcggtatcttcaatcttcagagaggattattttgtcttataataccatttgacataagcaccagatacatggaattaaccgagaacttcttattttggtgtaaatcccactcacccacatctttcgcactattaacctgaacagccaccaccagcgacaccaatctaaaccaagcctcaaggttcacctccgtcaaacctcgcctaaaagaaacattcagcggtactgacctgaaaacatcagccaccgaactcccttttttcctagttagattatagagagaagggaaacgatctttaagcttga

SEQ ID NO: 61035 - DNA, 336 bp, Zea Mays
aatgattaaacttcttgagatactgcatcacagtatacccgccttgttttagtcgaataaattcctcttgttcaatgtgaagcactccttctggaatatagtgttaacggaatgcgagcttaaattcatcccaagtgacccaatgtccggctagttgaattgccacaaaatttccccaccaggtactggcagggcctcttagttgctgggcagcgaacaacggcttctgtgttttggtgcaacggattaatccgaacttctgctccattaccctgatccactcatcagcttcaagagggtcttcagctttaacaaagagtgggggacgcgtttcag

SEQ ID NO: 61036 - DNA, 752 bp, Zea Mays
tccaaaacgcttgccatcctccatttccttggagtgcctgtggtgattggcagcttcgaaaatattgtcgtcttcggctgctctggtactttttccgttactggctctggctcactggccaggtctgcagtaacttcagtaggcacaacaggaatagcctctgtggctgggaggttgtttccaccttttcactcagcttcggcacatcggccgtctcaatgcgcctgggtcggcgcgtcaaaactttaaccttcttcaacctcgagacactagaagaagcggaggtagaggctttcctttttctcccttgctttcacgtggtataacagtagtctggatacacaaacccgataacatcgaacaccctgttcaatctcttcttgtcgcgagcactgaagccagttgtcatagcttcatctttggcctttgaatacactccaagcagctccgctagttgcctctatagcatctagccagtcatcgttcggttcatcaaattggcttctgtatcgaaaggtatacttcagatagaccaagccattttgactggagacagcggcagcctcctttggcatttcccatccattcgcaaggggtcacactctgtaagcaatatgctcttggaccaaatctcttgcgccgatataagtgcacacactgtgttgaaagatgcctagcatgcttgcacgtcattcccaagtgcaaccacctcctgatgccgaagtgtgaccatatagggtgctgaataatcc

SEQ ID NO: 61037 - DNA, 467 bp, Zea Mays
tggtggcgcctctcccggaagctggtactaccttggatattcagaggcctgtcagtgttcgcccaaaacgcccttgccgagccaatcaacttgattctcctgctgatgagcagaaaaagaaaaagaggcctcttcgacgagtatgtagcttggatcgggatgttggtccttcggttcctgctgctgaggaagtgcctgtgcctgaagttgccgacgctgaccccaatagatgtgatccatctgtcgctgatcccaatgggtgtgatccatctgtcgctgatcccaatgggtgtgatccatctgtcgctgatcccaatgggtgtgctgtctgtgttgctgatgaaaacaaaggggaggaagaagatgaggtccctttgactcggaagaacagtcggcaatatgtagccagtggggaaagtagtggagttccttctcctgctctgtctgctctcattggtctaaaagaa

SEQ ID NO: 61038 - DNA, 422 bp, Zea Mays
ggtatttgtgcttctccagccattcttcctccgctagaaggagacggcctgtcttatcgacgaggtgttcgatcttgtcgtcgaatcgatcctccgccgcacgcaggcgccccaccaactcatccacagagagttgtttttaatcacaaaacatctcaattgttaccactacctgggtgaaccgtgcagggaccacgcagagaaatttcttgacgacgcgaacatcttccacgatttcgccgagtgctcggaggttgccgacgaggttggtgattctcatcccgaaatcctcgacagattcaccgtctttaaatttgatattctcaaattcttggagaaatttctgggcgttcacctccttcacccgatcaatgtcgagccgcaccagtttcactgcctcccacgcctccttcacggtcgac

SEQ ID NO: 61039 - DNA, 1215 bp, Zea Mays
acagttgtagcctatacatgattctgcagctactattactataaatgttgcttgtgccctagagccaaatacatgcttaagctttacgaaatattcagttagtggaaattaagggcatgaatgctggttcttttttttctcaaatacgcaggtgagctgtgcagtgtgcactaatatattaaaaagagagaaaaaaaaccaaagggaaaaagatccccggtacagcagagctcacacaccccacctaggattacataaaataaaacaacgacctagagctctgttacacaaacagttctccaacctggtgggaggacagagcttttgctcctgccaaggaccaatacaaagcctcctcccttgccacccgtagggcgacagctaaactaggactgcacccataaaaaacacacttattcctatgcttctatacaacccaggcacctaagatcaccaatgagttaaaacatttttccatctgatcaggcattctagagctgctgctcctccaccaagattcaaaagagagatcatccttcagcggacagaactcctgcaaaccaccatctttgagaaactcaaaccagaattgcttggtgaaaacacaagcaaccaatagatgattaatattttcaggtttctgatcacacagcgggcagcgttccggatgtgatagcccacgctttgcaagcctatcagctgtccaacatctgtcatgctccacaagccaaataaaaaacttgcattttcctggtgcccaggttttccagaccctttttgttggctcaaagcctactgatccttggaagagggctttataagccgagctagccgtatattcacccgaagtgctgaatttcgaaatatgctgatcctgaataccatgctgcaaaaactgctcctcaagaacctaataaaaatcaaggatttcagcaattaaatgccttggactaggaagccatcaattatctaccatcttcctttcaatccttccctacttttgcttcctatctttaacttccaaccaagtccataatgtaactgatccagcaaacatacaattttattttcttgggactgcttgtgctctttctgccttttcttactagaaaactagataagcataaaattatatctttcttttgttcttgagtgcccataaaaaaatgcatgtggaatttatctgctatgctgattcttcttgtactgctgatg

SEQ ID NO: 61040 - DNA, 613 bp, Zea Mays
gaatttagggtgaaagcccattagcaagggtcaatatatacgaaggggttgtcatgcttgtctctctccctaaggttgcgggtgctcaagacactcgtttctcccgctgcacgcgcagtgctaccacaccggtgccgtggtgtttcattcccacatgtgtaaataccgcgaagacgttgttgttgctactgcagcgttgattagcaacggacttgaagaggacgggtgaatgtgtggttggtggtacgcaagaacgttcgactacttccactacatcgatatattcttcttccattacgttgcacgtctagtgtaaaaataaacaatctacgatcctctactcgcatgctatcttggttcgccatggtagatgtgcatgtgctagtctgtagtgtatacgttttatagtatttttacatttgttcccccctttttggcctcttttaaccccatggtatctcataggtgtagcggtgcattttggtgctatcaaatgctactccataactagatatagatataaaaacatttttcggaagtaccataaaacataggatgggacatgagcagatcaagatacaatttgtccctcctacatagcatgagatatatc

SEQ ID NO: 61041 - DNA, 639 bp, Zea Mays
taaggtcatattgcttactaataaaatcccaatttgtgatgtcttatgccaaaaaggctttcatgcattatattatatatcttcgggttactttgggtaaaactttatgcatgaggagagagcagagaaatatttatttgtgtttcataggtatttcattaacttcccagatcttacaagcaccatagagcttgtcaaagttgttatgaccacttggcgatatatataaatatattaagccacacaacacatgtcaaacaaaatatagagccaaacgaaattatttacgaaggttgcgctatgctgtgacttctggggctcggataacccaccatattccgcgagtacaagctccagcgtatctggcggcaacacggttgcggccatcagggctacgacagtatagcaagccttcgtaataagcgcaacaggcacaattatgactcgataattggggtacatgataaatccacgcaacatgcgcaattttggctcgcgtcagacagaaagtgcctacagggcatgcaaaaaatacgcgactcagcgatgacggtctgactcaacgggagcaatccgattaatggagagcgtgacatagcaatcacatgacgcagccaagttcaaacggtaaaaataatg

SEQ ID NO: 61042 - DNA, 326 bp, Zea Mays
agcaggaaagttgctcgggtttattgtcagccatcgaggaattgaagccaatccagaaaagatcgaggctatcatgaggatggaagcaccacgatcacagaagaaagttcaaagactcaccggatgtatggcagccctaagcagattcatatcaaggctgggagaaaaaggcttaccattctataagttactcaagaaggtggacaaattctagtggactttagaagcacaggaagctctagatgcgttgaaaaagttcttgacaacaccaccggtgctgaaaccgccgcaccgagccacgccgactcaaccggctgaaggtttgc

SEQ ID NO: 61043 - DNA, 359 bp, Zea Mays
gcgcaccaatactaggaagcacaggggctaatccataaaaatccctagactcaggctaaccccgcagtggacggcaggtttatttcggtaaatcccaggggctctttagtaagatatccatggtgaaggggtattggcgaatcacggccgcacaatctgtaatcggtggtcaagattagaccacgcaaagcccgaaccggtactcactcgcgaccctcggatctaagatccatgctcacggtcagccacagtacgtttcaaatctaactcgttcgatctgagttgcatggccctgatctagcagaaccgagggggaactctacattcaatctccaccgccaaccactaaatcaacggcc

SEQ ID NO: 61044 - DNA, 1617 bp, Zea Mays
aaactaaatattgtagtatatttagatctcaaccacaacgacaatggtctaaattcccatttgatacaagtaatttatgtatacacttctcacagatcagccactatgcctcacaattagcatataaacttgtggaatctaactaattaacatatattctctgaagattacagcaggaacacccttttgcttgatggactgccttgtgtggttccaaaatataaattaggggcacatgggatgaggttctagcagcatcactaattaaactaaatattgtagtatattttgatctcaaccacaaccacaatggtcgaaattcccatttgatacaagtaattaatgtatacacttctcacagatcagccactatgcctcacaattaacatataaacttgtggaatctaactaattaacatatattctatgaagattacagcaggaacacccttttgcttggacaaactgccctatgtggttccaaaatataaattatgggcacatgggatgaggttctagcagcatcattaattaaactaaatactgtagtatattttgatctcaaccacaaccacaatggtctgaattcccatttgatacaagtaatttatgtatacacttctcacagatcagccactatgcctcacaattagcatataaacttgtggaatctaactaattaacatatattctctgaagattacagcaggaacacccttttgcttggacgaactgccttgtgtggttccaaaatataaattaggggcacatgtggtgaggttctagcagcatcactaattaaactaaatattgtagtatattttgatctcaaccacaaccacaattgtctgaattcccatttgatacaagtaatttttgtatacacttctcacagatcagccactatgcctcacaattaacatataaacttgtggaatctaactaattaacatatattctctgaagattatagcaggaacacccttttgcttggacgaattgccttgtgtggttccaaaatataaattaggggcacacgggttgtgggggatgttgttttagggaggtgaatgtggttcctaaggtgagaagatggtcgcgacctagaagggaagggatggggatggccgctcctgctcccttttgacctaggaattacagaggggaggaggaagacgtggtggctggttaggaattaccgaggggaggaggaagacattgtggccgcccctgctccgtagattgatctattgacagggaacagaaggaaatcttgaaggagatctagtgagcttcgattcaggcggggttgttgtagatcgtgtcaattccttttctgtttacgcgcgggttgaggtaggtattcacgccaatcactgtggtcgtcgtgaaggaaaagttggattctatgtttaacgatcacagaggtcagctcgctaaccatgacatgtttttggtcgtcggctgggttggacagagcttgcactgtgccgccgagactcctcacaaccacatattacaggtggtcttcattttctggtcgttgataagcttttctcttgtatatatataagtgttagcttagtaaataaaaccctagagaagctttgattgttg

SEQ ID NO: 61045 - DNA, 681 bp, Zea Mays
tttgcttccatcatgacagggagttccgtccatgatgccctgagaatctgcggcgatgctccacataagcaatcatggtggccctagttggtcccttcgtctgcaaagaccacactaaaagggggtgtactccgacagtgcgaaaagcgctcaccgatgatgtaagcatgaggtggccctcaacttttctctctccctggtgtccttcgcttggtgaaactctcatgcatagccgagattcagggttcaagagggagtgcctctggtatatatactggagccagggagatctggtcatttgaatactttgtttggcagcgtcgttcggttgcagtggttgcggtgaaatcttaatagaatgaagatgagatcctggcgatacgaccccactagacggtggcaccagcttacatgagggaaacgggaagtgtggcattatatgaagtgtacgcatgtgtgcagttatcgcggatatgtctgcgtgtgcataggatcgagataggagggctagctggtgaggagaggtcggcggaccccggctgtgtcgcaatagccgtgattctagttcggactgaaggtaagggatgagtctgacggtgaaggcctacccaccagtgactagagcacatgctttacaaggctgagcaacggagcccatctaccagtagtggtgtatgcatg

SEQ ID NO: 61046 - DNA, 2153 bp, Zea Mays
agcgacccaagtttttgcatgaagtgtaagcgtgcgccaagttctgggatgcgagtagtgttctaattcaggctttttcttggtctctttaataagttgtccgaagtttagtgttttattgagtcaaccgggctgaattttttttccatatgacattggaattgatttttacagattcagtgctaaacccattttgggtggtaattttctcatgtgtgttattgtatctgatgaatcgttgtgtttcttaagcactcctcgcattctagatgccataacattcatatcaatgcttattcattctgaaaagctgataattgttttgataaggggtaccattatggcattatgtgtaatgacacccctcttcctctgaaatgtttccacatcgaactctgttttcctaatttatattctctctccctccctccctacccctctctctctctctccccaatccacctatccacaaaaaagaacaatcaggatgtatgtagtgagtagtgactatactaagtctaattgttagttctctgcttatgcaggtacttgcctgagtcatatatcaggagtgatgacgtaagtgttagtactttggaaagaactacatatagcttagtgtttattttgcattcttactaacatcagttcatggcttatgtactatgtgcacatatggtttctcccacttattcaaatccctccacctatgtgtttaggtctttaaggtattagcgaaatatgtgaagtaataaatactctattttcactgtataagttttattcaagaataagttaggtgtgtactcaaaggactttatttcaataatcagttaaatacataatgcttaaaacttatggaagacatgttctagcgccaagttaggaactattgcacatggtactctagtgctatgtctgatgttgttttgaacatggttcaatttaattgtatttcttcaaaaatggttttgtcatggctatataaattttccttaccctgcaatgatcttatgatcgttttggaaccatttatcagtttcctggcttatactagttaatataacagcaatttcggttgcattatgtcacttcaaaatataaaatgtgaatttagtggggaccattttttcagagatcttgtgataaagtgagaggtaacattaaaaggatttggagttcagagtgcaatggctatacccatcacttagttctggagggcctccagctttttgacttccagaagaaggaaaatgaaccacttggaccagaatatcttggtgtcatgcaggacacaatcagcaaattgacctatgaaacacttcagtcagtggcttgtgttgtcagtcatgacaaggttacttttgataagactaggtctgtaatggaaaaaattgtaaattctcaccttccaagttacttggccagcttggatcagaatgatattgcatgccagctattcaatatttttagaaatccatgcagctatcgatctggttctgtgaggcttgtcacacctgtgtcaccacaacttttgtcttctattaagcatgcgttggatgagcttgatggaatgccaatgcagggtcttgttgcaatgaataggaagattaaaggaaaatcatgtgccccaaaatttggattaactgctagcttttccaaaagaatgcatataatcaaaatgataagaaaaaggtgcaacaagattttaacagaacttgaggaaggtaattacctgccaaaggaattagcaaaggcaatgtcagtggtgaacttatatcagaagcagaagctgaaaaatgtgagtatttcacaatcagagtttttcccctttgcaaaagaaactatttctttgcagaatgatatcctgaatgccctttggtcacttccaaatctcaagcatgcgaagctgaaattgctgcacaccatactggatcatgattctaaatttgaaaggaagcacttagcaactttgaggaactacttgacagaatgtttgtttggatgtgatgatggtctaccagatgtggccctccaagccatagcctctataaatcagatttctagatgtcagcatgttgtgttaacggaagagagggaggatgctgaggtagatgctgtactgaacttgagcagtcatctcaaagctttag

SEQ ID NO: 61047 - DNA, 661 bp, Zea Mays
gccgcacagagcccgttgtccggtgttaaccccgcacgattcatggacctgcacgatgccgtgtgggaccaccctgctggagtcactttcttcgctacgaccgaatcacgcgcaacaacccccacgctcgagcaacaaactcactgtgattcgctcaacgcatgccgaccttggtttctcccgcaactgaccctctcagctcagactcgccccctctgacgcatatataggtcaccgtgaacccctgtgccaatccagtagccatggcgtgcagagatggaagggagagagaggaattggcctgccactcaaatcgttcgctgccggtgtgtcttcggcctcgaggtacggacccactgtagttctccatctgttgtggttgctcatgtgatcgacggggtggggtttcgccggagctgtaccatacgcgcatcaggccgccatggggggaaagacattcctgcatggttgttctggtgtcagcactcagcaggggaccttggggcatcgctgatcctcggggcaggtgctcacgggagtagctagtcgtgggagtccttggcgccgtcacaattcctcactggggccggattgcactactccggcaacttctgccatggggaactgtggcgccaccgccgtggtgggcgcatgccttcgc

SEQ ID NO: 61048 - DNA, 985 bp, Zea Mays
atggcatctggttggaagactaccgccttgccttctgcatggcgggagtcaaggatgatcacctgatcatccggttccttcctatctatctcacggagggggcgaggccctggttcgagcacttaccgatcgacaccattcatgattgggccgacctcaagaaggactttgtgggtaattccaaggcacctacaaactccatgggagctattgggacctcaaacaatgcgcctaaaaaagtagggatagcctccaggactatatccagaggttattccaaaacagaaacgaactccatgatctcgtggttagtgccttcacctatggcaccatgaacgaagtgacggttcacaaacttggtagcaggcggacgagaacaaccgctggcctcctcgacatgacaaccaattttgctgacagagaagacgcattgggggcaatctttcgaaggggaagacccccacacgttaccgatgatacgagtggtgtaaaggagtgtcgagaacaccccgacaagcgctagagaagtaacaatgcctgttgtgaaggaaatgaagttgccaccatcgatcacccatccatgctgccaaccaaaaatggcagcgatcacttctagaaactgatggatgcattgtgcccgaaccttggctacctcgttcgccataagctccacgattgcgagcttctgaagcgcttcatcaccaatcctcccagcaaagaaggcgaagccagaggaggtcgccaagaaggcagagcaggacatcaccgatgaaggctttcttgagccaactggatgtcgtatgatcctcggcggtcctgaggcttatgatgacaagcgctacctcaaggtggcacaccgctaggtacaggcaacagaccctgttgttcacaagtacctctagtggtcggagttcccaattgtcttcaactgttgcgaccatccggagaagatcccacaccttgggatctgtcccctcgtcattgg

SEQ ID NO: 61049 - DNA, 989 bp, Zea Mays
aggatgtctacttatctgcacgaaggggtgcagcggattaatttgagataaatgtgaggtgtgttgaaactggtgctttaatatagtaaagatgtatacggtagagtaaccgagcaataatcaaacaatttatatttacgataaaatcatgataacacagggcatgcatatacttaattagatcaatgctaatcacaagcagttccattttttgatgaagggagttcttttttaaaaaacaattcaagcaaattacatcaagtcgatataaatctttaaaatagttctttccgactgaagcacaattaaataattttctagtgcaaatgaggaagcgatatataaactttagataaatttcatgtattctctataacaaggagttaaaaggaaggattggtaggcccaatatttctgtcccactcatgcgattattcgtcatgtgatgtgcgacagttttgactttccaacttcgctgcgacgaaaacccgtctcatgtcctaattagatcgagaactggttgacaatgaccttgttaggaaccagtaaaacctgcaattctcctccatgaccatacgtaaaaattactactgagttctcgctcccttatcaatgtggagaaaagtgacatgtatccctatccatgtatacgaccattaatagcgtctgcagactgtacctattagctgtatatattcagtcaaaaatagtgactttttccccctacatgcttgtcaccagatgaaggagttaagtgagtgaatgacacaatgacacaacgcacatgcatgcatgacaagaaatgcgaacctctcaccgttgaatgaagaaaacgtaccaacgagcgggacgatgttccgatgacggagtcggttgatgatgtcgacctcggcgaggaagtcgtcgtagcaccggttctcgtcccgggtgaacttcttcacggcgacctccacgcacgtcgtcacgccgtcgttcttccctgcggatcg

SEQ ID NO: 61050 - DNA, 950 bp, Zea Mays
tgggcccatgtgacaacctctcccgacaccgtggccccatttccatcgtgtaaagcattcttgttatgaagactccgcatgttgggatgacatgacaacctctatcttatttttcatgtcgcagctccacgtcatctcgtgcaaaaaaatgccaggagtagagactagcaagagcacttgaccacgattgcttcttctgaagcagcataatttataagttggtaccgcaattgttagctggctagtatggtactatattttgcaagttgtgacgacaatggcagcctgcagcttatttggtgcgccccacgtcgcatgcccaggaggctgcatgcctctggccctagcctagcctgtcgttcgagtccccctctgtcgctctccctccccagcgagcctcgctccacctctccttgcaagccctccctcgcatctgtctcccaagacatggagatgccttcctcctcgtaaccgttgcgccatattcagtccgcacccgcacgctccctctccacgacctccactccgccagctctgctcctccttgctctctagcacgcgcgcttggaggtcgtggaggttgatgacggaggcgtgtgagagcactgatgtggattaaggtagagcaccgctcccggcactcaatttcctctcacgaagcactagattcaatagtggtgagtttacacggcaaggaccgccgccacccggactcaactggttctatcttctccaccaactccccctcacacccactcactcccgaacacacactcccctgaaagctttactgggtccactccggcccagcaacaagcacattgggctttctcacccatcgtggcctattgttaatctgcatgtccatctactcgttgacattctcccctccttgagactcggcttgaccccaagccaagactgagggaaaccttttcttgatcaactcc

SEQ ID NO: 61051 - DNA, 513 bp, Zea Mays
aggggaagattcgatccgggcaccatagtctgatgttgtttgccaccaggccaaggcgtgaggatataaactcgtggtcgtcgcacccccgttgagaattctacagcttatccccttgcttccacgacgaaccgcagagagggcaccaccgtaagcggaaccagggagcgtcgttatcagaggttgagcaagtaggtctgggagattcttcaggagccatggatcatggctatgggtctatggagccagaggagcgtgtggctatcaatcaattgctcaccggagtcaggagatcatgttaacaactcactactagtgtgtattgattaaactcaacattagccattacagagaattatagtctagaaggaagaacaacatgaggattaaggataggagaagaatgctgaatccactctagaagggtctagaagaacctagagaggaaggtagaggatacatggaaaagaggaaaatggagaagggagatgaacaacagtattctgatattca

SEQ ID NO: 61052 - DNA, 591 bp, Zea Mays
gacgggttcattatgcaaaaactcagggaccattttacaaaacagtcgcactgaaggggtacgggtaactgtgagtcgcccgatcaaatctgagcgatcaggttagctctacccatgattgaactagtacccaacactggtcgtctgatccccgatccacggatgtgagcccaacaacccgaggtctattctcacgcgcacatcacgcgattgacgatcaggattgaatctcgtcaaaggggtatgcgatcatctaatcggagccgtccacatagatccaacgacacacgatgctttctccctagatctaatcctagccgctcgcttaccgatctatgactcacatatcgtcttcttccccaggcggccggcacagcggcacagaaccctgcatgacggcgcaatggccgacacatgcattcagctaccttcctggcctaaccacgcagaagaaagagcgacagatggcaataacgtgaggcttcatcatacctgcagcgaagtcgtggcaaagttggccaccgacatgaatcagatccacgaccaagttggatttcggcgaggaaattcggccatcaccgaggttccttt

SEQ ID NO: 61053 - DNA, 825 bp, Zea Mays
ggggaatgtgtcgagaggtttgataacccgaccgagctctgtttgaccgatcttgctatgtgtttgtgtgtgtctgtgcgcgcagagaaagctgtgcgggatcgatggaccgttgaacggaggcgcgtctgctctgccgcatgtattatattgattcaggtggacggtcgggtttcagagagactgctgctcaagtctttttacgtgggactgtgggagtgcagctgctgcatccatcgatcgcagcgctaggttctccaggtacctcaacttcactcttcactcgcactaactcatatccgtgcatatttaaacttcacttaacgaaccaacggtgcaaaacagtgttttaaataattatatacgtgaactgctggatatggatatgatctaagagcctaaactgcagaacagtaaaatgcacgagcacatgcacatacgttctggcgttctgccaactgtaactaataatcctgcacccgtactttgttagccctttctggggtgttgctttcagcagagacagggcaaaaaacacacactacggttttacagcacactcatggcattaggatacgtatttgctgcgacttgagcatcagcgtttgcgcgcccaccaagcaaatgggatggcaaattattgcacgggtggcgacggatccgtcggttggccagaaccgcgactccaagtgtgtattgtatgtacgcacggtcctacacaccggtacgcagacctctcctcgaccggccccccctgctggcgtgcatagtcaaacgtgagcccttgctgattactagtactagcctgagcatttatgagcccgg

SEQ ID NO: 61054 - DNA, 809 bp, Zea Mays
ctagcagagatgccgcggacgcgaggagagaccagagaggggggtgcgccgagcagaagggatggtggcggcatctagcggtcctgatggctaagcactaaacacaggagaggcgggcgcgcttgttcttataccccgcgaccaagtccgattaagggccatcgttggcgaggatttcgggcgttcagtttgatccacactggccaacgaaccgcgcgtagctactatgacccggccaattcgtggaggtttattacggacagaatccggtttgcggcagagtaggagctccggtcgcgttggttggcgacgagggagatagagctgacctggtggccccacctggcagtgacacagtgaaaaagcaaaagaaaaggggggcgcaagtgggccggcggggtgcttttcagcccagcaggcgcagtgaagacgcggaaaggggaagatgggctagaaacagatatttcagcccaagtgacgttttcataatttattttctttttttctattttccattttaaattccaaattcaaacagaattcaagtttcaaatttcaaatacacgttcagtcaaaacttcaacacgaatacatgaatatactttttattaatctatttattataaaaatgcttttgaatatgtcacttgtatatttcgaattacatttattatttttgaaagtagtttctaatttagatatttcaaggaagtgtttataaatatgtatattactcatataaggatcttttatatatcctcgtataaaagaaaacatttatttaaaagaaatatgcctctttaatagga

SEQ ID NO: 61055 - DNA, 828 bp, Zea Mays
cggtttgcacctgaaggtggctttgcactcggaggtgtctttgctaagattttattttaatccagtgtcgccctgaggcggtttgcaccaagaggttgcgtcgcacgccgcggacgggctttgcctggcgtggcggtgactgcctttagggccaaatgttggctttgggagcctttttagccattgacatttgttgggggatttttgctgctttattacaaggctcttcctcattaaaaacctcgcccccttcacgaggaaaagagcgcgaacctaaatctcaatggttgaatattgcatgggcattctgaggccctttcgagcaaagcatttttacacatagaacctttgtaagttttctacactctagctatgatccagatgcacgcctgtttggctggttagcctataggaacacaccgaagtcttctttgagacgatgtagggcccctcccattttggtttgagttttcctctcgcttgtgttaggggtgtccggataaggacgagatcgccttcatcgaactctttggttttgactgacttgtctctccaagtcttgatttcttcttgatacttgatgattgtgccgagcacattgactatgtagtcttcgagtaagtccttgtccgctggttcatcgacccccgttgctgagttgttttccactcttggggacttgaaattgagctcttgtggtgtcatggcctccgcgccatacaatagcttgaaaggtgtgaaacctctgcatctagtctcggccgtgtttcaaccccaaatgacttcaggtagctggccaggccatcgtcccttcgtttcgtcgtgtag

SEQ ID NO: 61056 - DNA, 779 bp, Zea Mays
tcttgatgtttcttgagacagaaatgtaagggacagaaaatgaaataacaatagattcattgaaatagcttcggacgtttgtcctagcccctcaagtgtctcaatagatgtgcttcgacttcggtacggtgttgtttactgttctggcttcatattgttcccttgtgtctcgctgtggtatgtcttgtgtagaaaactatggctggacctgaagttgtcctggatgttgctgctcatatgacaaaggtgctttgtgtaaatggctgaggcaagatccatcgagccaaagagtgacttggcgaagcaactgaagccgagggttgtggacttggttgttggttactaacatactctggaatgtatggggaatagtatgaggcggtgtggaggacctgctttgactgattctgacatgctttagcttcggcgatttccttctatttctagattgtaacttgataggttcttgttgtatgcaccttgtcctctccaaagaagaggcagaacattttcctctattgggagttgaatgttcctccaacactccttcctcctcttccacctcttggggccaatggtctgaaggtattttgctgggttcctggattgagaatgactttgttgtccttgggtgtgattgtctttgtctttgttctaatttggattgtgtatggtcctaacatgccttgggttgaaccatccaccgaagcccttagtcatctcggaatatctcaaggcctcgtcttttctttgtcaaacatcattgtctggtttgatat

SEQ ID NO: 61057 - DNA, 914 bp, Zea Mays
atttttgatgtccctcgtaccgacccttgtggtcatcataccattcatatccagcttccattaatcaggatatgctttcaagtaagatcaagcagctccaagcacgtgaccggccaaaattcatagaaaagttggtcgagtacgattccgaagttggcaaagcgtgttccaccatcaaaaatactcttaccaagatggttgtgaagcagtatgaattagcggacacatttgctgagatgatcgatgatgtccttcgcgcggagtctgttgacacatacaatgatgcggaagcgcctgaaccagcaaaaccatcagatacatctcatcatctatcgtcaggtgaccttcccacattgtaacttttttcaatttatgcagtttagttcaccattttcagtagtttctgttcaattactaaaaccttttccttacagaggcatgcatacattctggtacctaaaatacttcggacccgactatgccaacttcgcagccgactacgaagttggcaggcacccagttcgaggaaatacatgaaatgcaacaacaaatgcgtcgtgcatttgaggactgccctgatgatttggacgttactgcgcccatggagacgaactaagactcaaactctaaaaagcaggtattatatacaatctcatcattgttacattatatgttaatttcccactttgcattcaaatattagacaaaatcataataatgtcaacaggattaccattttaatgttggcaacaaactgtcaagggacataaacatcccacctcaacatataccagactgcaacattatgagctcatatacgtcttcacacttgccgatgtttgacgccacaccgcaaaaacatgtatatgtttcatctttgttttatcctttgtaatctcaattatcgattaaat

SEQ ID NO: 61058 - DNA, 315 bp, Zea Mays
ccatataaattcttacaacccccactagatctcaaatgctgatccaaactttttaatattttcagaactttcatatgccagtttgttgtagagtaagcttcaccaaagcgtcttatagcatgagcgatcgcagaagggaccgccctcaacttctatgtcctcaattaggagatcctcagctcgtcagactatcgctcgccaaacaggtacccctctcctcccccctcgctttaatttcttcgctatctaccacagtgctagcacgatgttcaacaaacacttttaccagatagatggatcgcatgaaaactcgtg

SEQ ID NO: 61059 - DNA, 433 bp, Zea Mays
gagaatcagacttgataattgctctttttacacccattgccataagcttcctcatgcctagcaacaaagctttgtactttgcaatgttgttcgtgcatagaaattgcaacttggatgcatacgaaatcttgacctttgaaggtgaaattatgacaacatcaccaccacccccaaaggatccccatgagccatcacaaaacattgtccaaacagtttcttctgatataacaactttgtcctatgagccaggagtccaattaataatgaaatctgccaatgcttgagattgtatagctgatatatggacaaaatcaatgataaactcattaagctcagcatcccattttccaatctgccccgaagcttcactgtttcttataatgtctttcaaaggtgcgacaaaagcatgatgatgttgtgggattggaaatag

SEQ ID NO: 61060 - DNA, 811 bp, Zea Mays
caacaccagtggtcggctaagcatgtctgaatagctctctgataagtcgctccagcatttttgaggccgaacgacatggaggtataacagaaggcttcgaatggggtgatgaatgctgttttttcctcgtcttcttttgccaagctaatctgatgatacccggagtagcaatccaagaaagacaacacagaacatccggcagttgagtccaccacctggtctatcctaggaagtccgaagggatccttcagacagtgtttgttgagatctgtatagtcgatgcacatgcgccaatccactttattctttttgagtacaagaacagggttagctaaccactcaggatgtaacacctctctaatgaatccggccgcgaccaagcgagccagcttagcacggatggcttctctcttgtcgggcgtgaagcgacgcaatttttgtcggatcggcctcgcctgggggtagaccttcaatttgtgctcgaccagttctcttgggactcctggcatatacgcaggttgccatgcgaatacgtctcggttatcttgcaaaaactggacgagcgcgccttcctatttgtcattcaagctggaactgatgatagccgttttgcgttcgtcggtgaaccccagatcgattctcttggtttcttcagtcggccgtatagaggtcacgacttgagcttcattcacgtgtaccgcgaggtcttcctcaggctttgagtttgcctgcgcagaagaagtcgccgatggtttggtggtgagggccgcctgaatggccactcggaaacattatgcggcgccttggaagt

SEQ ID NO: 61061 - DNA, 413 bp, Zea Mays
aagtcatattgacgccatgagagggagatattctcgtgacatgtctattgtgagggttggaggagacaacactgcccctgcccctgcccctgaggaaaatgaagttgttatttaccgaagcttcttgatggcaggcctttggttcccgttgagcaagtttgtggttgaagtgttaaagatattccagatctttcttcatcaagttacccccgaagctataattaggatggggatgtttgtctgggctgtaagaagccaggggctggagccgagcgtgaagtgcttctgcaatatgcacgagctattatacgagacgaaggctaccgacaaagaacaataccacaacaacttcggttgttatgggttcattgcccgttctaatgcaagctacccggtgccaacataccggaaaa

SEQ ID NO: 61062 - DNA, 607 bp, Zea Mays
caaaatcgagggtcacggagagagctgagggtgtgaaagaggaatgcttatgaactgaacgaagcctggtatggggcgcatcaaaggacactcaaggacgggaaacatggacaatcgtgtcaccccatccacgtcctttcaaactctaaggcatgcgcaagcccccgagcaacatctatgtcgctcaggaatccccaagtactcgaagtactcgggggaaaaggtcggcctctatccaatttaggggcgtaactcgagccttaagaggagcaatttgcaccggaggtaggcactaataacgccaacacccaacactcctttctcttagaggataagcacacctgctagatgattgcggattcgaaccctctcgtcgggcgtgatgtcatgactccaactgatgggggccttgaggggaatgcctagattgaagcaagggagtcatggccccgataaggtctcctgacccgcaacctataaataaaaccattattgatactagcccttgtggggcaaggaaagtggaaccgagatgtactcacatgatctcacattgcggagatagatactcgcgcacccgattggccacgcctctgtcatttttcgc

SEQ ID NO: 61063 - DNA, 554 bp, Zea Mays
gtcagtcgcgacgatccgcgtgatcgacgaccttgtggcgatgggatggaattggtggaacgccaacaggcgccttctcctttggtgatgaattcaaatgcaacgaacaaagcttctagccggccgccaccgcgcgctctgaagaagtaactacatggaatgacgtggagcttcttccatggctacgttagtttgatttctttcgatctgatctgcccctagaatgaattaagggaacaacctagccccgaccgacgacccccttgcttgtctcggcaggcacagagacgtggcagtagcagaggaggctgcgatcgatgctagaggggacgggaaaggacgatcgacggacggtacgtacagagctggtccaagacgacgatgggggtgggggaagggaaggggcaacctcaccacactcggtgtccctggctcgtgtccggcgacggagttcgcgagcgcaaaggacacgcgagcgggcgatgggtccttaccaccaatgggaagaaccgaggaagagagggaggcgccggagcctcttatatggatggatc

SEQ ID NO: 61064 - DNA, 534 bp, Zea Mays
accctggagaccgatcctagagatgagatgatcgatctattgaaggaatattcagattgctttgcttggaattacactgagatgcctggattaagccgagagatcgtggagcatcagctgcctattaaatctggttttagacctttcaagcaaagagctagaacatttcgtccagatcttctcccacgcatcaaggacgaaatccaccggctgctagaagctgattttatcagaccttgcagatacgcagagtgggtctccaatattgtgccggtggagaaggagtcaggtaaacttagagtatgcattgattttcgcaatttaaatagagcaactcctaaagacgaatatcctatgcccatagccgacacattaatcaataatgcatcaggaaatagaattattagcttcgttgatggtaatgccggatataatcagattttcatggccaaagaagatgcgtctaaaacgacctttatatgtccaggcttcattggtttatttgagtgggttgtcatgacatttggtctgaaa

SEQ ID NO: 61065 - DNA, 540 bp, Zea Mays
aggcactatccatgtgtcgcaatcattgagccacaattgcgcctgttgcgcacggtgtggatttatcgtgtacaccgactaccgagacataattgcgcctctcgtgcttgttacggaggcttgttgtgttgtcgtggccctgatggccgcacacgcgctgacaccagatacgctagagcttgtactcgcgtggattgtggtgggttgttcaaacccctgaagtcacagcatagcgcaaccttcgtaaataatttcgtttggctctatattttatttgattgtgttatggcatcgtatatttatatatatcgccaagtggccataacaactatattaaatctgggaaattaaatcgaaatacaataaaacacagataagttaaatctctgctctctcctcgtgcataaagttttacccgaagtaacctgaagaaattcaatattaatgcatgaaaacctttttggcacagaaaacatcacaaattgggattttattagtaagcaataagaccttatcagatgaataaatgctagaatctca

SEQ ID NO: 61066 - DNA, 1081 bp, Zea Mays
gagcaatccgcaatgcatcagtggggacaaatttagtgtcatcagcagaaatcaaaactctgtcatcaggagcgccggcctctaaggtgacttcctgacccgaagctcgtgccgctgccatgcaaccagaatgcggaggagaagaccctacgtgaacatccatggaagtatgagagggagaaccaactcggacaccctcgggggctgggtcatagctcgcgctacccatccttgaggaccgagctctctgtagcagccacctctaaggctgaaggaccttcaacaagttccatgggaatggagcaatctagatcagcctctcgactcttaagaccacgctccaaggtcgacgaggcacaagatgctgctcgggataactctaacccggcatcaggcacatcagcgcaaacttccatcatcccaccgtccgccggctccgacaacagatcttctgggaccatgtcttcgagagtctgatcaaaatttgccagcgacaattcttgcagaccaacgagagtagacaaagctagagaaggaacaccactactctccccgctggctatgtagcgtcggctgttcttccgaatcaagggaatttcctcctcctcttcctcatcttcatcaataatgcggatggtacacccattgggatcaactttggccggattacacccattgggctcaacatcatcaaggtcacacccattgggttcagcatcagtcaggtcacacccattgggatcagcttcagcaaaaaccggcactggcacttcctcagcagcaggagcagaagggtcggcgtcctgattcaagcatgacactcgacgaagacgtctctttttctttttcttcccctcagcaggagaagttggatgattggttcggcgaggacgcttcgggcgaatactatcagacctctgagtttccacagctttgccagactcggggatgggtgctacagccagtgtttcagcaggggctgcatcagaggaatcttcagccaacatgtctagcatggcgcttatttctgcatcactcggattcaaaggcacctcgaaatgaacctgcctctcgtcgtcgg

SEQ ID NO: 61067 - DNA, 875 bp, Zea Mays
tcctatcacacacgttatccttataagttgatatgtgtcacattttcactatttagtaactttataaagctgattatatatttcatcataataaaaactggaactcttcaggtcaggttcatattctaggtcatacaaaagagagaatttgtttttcagtttcactggtaattttatttgaacagaaggggtctgtagttaatgaacaccactgcctttttagttccttgaagggcttcgtttggattggctgtcaatggtgggattatgaagctgtcttacgtatatgttattacatgtggtacggtagagtgaaaaggagcttcaccagcactacccaattaacattagcaatccaatcaacatgttactcctttaacattgttgacatggtttggtttagccattgaagcactgagcctgggtaaggccaagcctgtgagacctggatataccatggcagtaagggtcagctaatctcatagcaatattacatgtgtgtgcgcaatgggggaatgtaagcacagctcattatttcttgagatggatataccttttggccccggcttccaatatttcaaacctgtgtgttcgagtatatatttggtaaggatattgaaatcctgtgttttgaggtggtgttttacctactaagtcttctactccatttatacctcccgagggctcaatgcaatatatccacacattatacacaatcatgtttgctttcactaaccacgagtttaggttttgatcctgagtcaacgcttccactactgccaatacgccaataatcgatctgccaccttattgtcgagcagcaacaaatcatcaggatggctcgccaagtcgccgtcatccatgggttaccacgc

SEQ ID NO: 61068 - DNA, 279 bp, Zea Mays
caggtggcaggaacatgaggctaccagagaccgtgagttggaagctagctagctactagttccgtttcgattatttgattaattggtcgagaatcctgcccaacgtactggctgtcttgaataatgatcattaagcagctgatatatgacgcattattgaaattggtttcgttcaagaggacatgggaactgggatgcagtattcactgtagaaatgcacattgccctgcgtacttgcacggtacaggcacagctgatgcgcattgtccagggctcgat

SEQ ID NO: 61069 - DNA, 703 bp, Zea Mays
ttcttctcaagccagtcctcctcggcgagaaggagtcgtcctgccttatcgacgaggtgttcgacctagtcgtcgaatcgatcctcggccgcacgcagacgccccaccagttcgtccaccgagagctgcttgagatcacagaacatttcaatcgtgacaactacctgggtgaagcgcgccggaaccacccgcaggaacttcttgacgacgcggacatcttccacgacctcgccaagtgctcgaaggttgccgacgaggttggtgattcgcatcccgaaatcttcgaccgattctccgtccttgaacttgatgttctcgaactcttggagcatcttctgggcgttcacctccttcacccgatctgcaccgagccgcatcaacttcactgcctcccacgcctccttcactgtgctgcgcgcgccaagagactgccacatctctttcggcaccgagcgcaggagcgcgctcatggcttgacggtcatgcgccctcttggggttgatacctggactgatcacatcccagatctccagcgcctcaaagttacactgcattaacatcgcccactcggagtaattatcacgagtgaggagtggccacatcagtgaactctccttcacgccgccaccggaacctgatgcttgattcatggtgttcgacggctgtcgtcgagggagaacacgcttcttcttcgccggttctc

SEQ ID NO: 61070 - DNA, 571 bp, Zea Mays
attttgtttattattgtccatatcgctagtgggaatacagtagtgaggtgatagataggcatttaggatatattagcgatgtgaccaatgtaagtctatccgctctcttgagcactctaccttttcaaggtaggcaggtagcctcagctcaatgcgttcgctaaccatgtgtttggttacggtcagaacaggatggaatgatctctgctattgtttgattggagggataggatgacctttagtttctatttggtttgagggataaatggagatgaattgatcttgtcctttgtttggtgacaatataggacacgctatgttgtcattattacttgcgcgctccttggtaacatacaaccagcatgtatgaatccactgctcaagctgctgctgtgttgctcgatgttcaaagcagtgtgctgaaccagctggtgctgttttcctcatatgttgtcgacagctatagctcgcgcacacacacatacgcttctatgacagaatcagtgcttgagatggtgcggtggtgcacggttctgcctccagcatcagccacgcgcgagcagagcccccg

SEQ ID NO: 61071 - DNA, 454 bp, Zea Mays
cccagggtcgcctccctgtctcgtatttattatggaggacggcgcggacagcgtggtctcaggtgccatcattcaagctatgtcgactcctgaccttcgtagcctggggcttggcatggctcgtcgtgttgcgccctgccagcggtctgcacacgtaggcctagtcacgatatataggttatgagtgcaccgcaggacgagggacacagggccataaatgtgccacagtccgagaggtctgtaggtcatgagtgctatgcggctcgagaggttcctaggtcatgagtgggaagcgaatcgatgcctctaatgcggctcgacgccaggcgtagttaatacggttgatcacttatgacgggtcagtctcgggtcaggcacgggatccactcaagtagtttccctccgacacgtccggccccctgtcaggttctgccacgcgcgaccccaagatcgg

SEQ ID NO: 61072 - DNA, 414 bp, Zea Mays
gtaaatagggctatccgacgcggtataagtagatatcggtcgactaatccatcgcggatggtccagattaggtcggatcccaccccgaaacggtatgcagtgccagccctcagatctggatccaacgaccacaatgtacttgaccgaaacgtcaccacctagatttccaccgttcgactaggatctgatggtcgccatccctccaagcgaaggggtacacgatgttttaatcatgaccgcccatcaagattcgacggtggacatcgtatccgcctcgcacgccgcccccttctacgacggcgccgccacgttgccatggcgaaaaagcccgacgagcccccgcctggcgctacggtgccccgaatcacaatggacatgtgtaacacactcttacaaacgcggcgaaggtgatcg

SEQ ID NO: 61073 - DNA, 729 bp, Zea Mays
ctccaagaatcgttagtccacaaacagttgtcattaattaccaaaacattaccaaaggggcctagatgattcacagacacatttatagggaacatatttgatttattatagttaacattcaggccagtagcagaagcaaaagagttgaggattgccttgaggaagaaaagttgcttcgggcatgcttctaaaatcaaaagagtgtcgtctgcatactgaacaatcgggaaatcctggtcaccaatatccggtagagggagcttaagaagattccgcagcctagccttattgatgatgctttgaagaaggtcagctgccaggacaaacaacagaggcgaaaggggatcaccctgcctaacacctctcctgcaatgaaagggcttaccaggaactccattaagtaacaccgaagacgtgccagagtgaaggatgctccgaatccagttgatccacttaggaccgaagcctttgtggatcagaacctggataatcaactcatgctcaaccgtgtcaaaggttttttcgaagtccagcttgagcacaacgatctctttttttgaggagtgacataagtgaatgtattcaaaagcccaggccaagcagtcttgaatagacctccccttgatgaaaccatactgattcttgtgaattaaccggggcatgaacggttgcagacggtttgccaacagcttcgttaagattttcatactattgtttagtagagaaatt

SEQ ID NO: 61074 - DNA, 665 bp, Zea Mays
ctggattttaacataaaatatctattatgtacaaccttttgacttttttgtgttgtgtaggcatggggaggatcgtttgccggtgagtggcataatacataggttaaccttgccttgggtgccctttgttgtccgcactaccctagtttgttgaagatgtccaacgaatctagcatggaggagatccccattagtagttgaaggagaacaagtactacacgatagacagggactaatttgcgattacttttgggtaaatattctacttctatttgttcttttttctaaatattcttattctgtgattttgagtacataatcttttatcttgtagctacgctatcggttgcttaaaggtatggattacatgggccacattgaacgagggttccaaaggaatgcatagaagctagagaaggatgcagcctacaatgcaaggattcagaaaacaaatctttacttttaggtgcatccttatgaataaggtccttcatgcaagaaacaacggtcctcgaagacatacctcattgaggaacaacaccttgaggttagtattgactttgctttttcatgtttgtttaatgttgtgatttgtacgatagctaatcttatgtgtgtgggtgatggttttatggatggtacctattatagatgcctacaatgct

SEQ ID NO: 61075 - DNA, 363 bp, Zea Mays
ttctcaaaatgtcacatgaaggtgatctgaaagcaaagaggcatagaatcgaggcattggaaagtgagttggcaaggtgtgactggatcaagggtgagtcacttcaatcactctttgatcgattgatgttattggtcaacaagataagagttcttggtagtgaatattggagtgattctaaggtaggctattcatgagagcctacaaatagaaggacaagagcctagcaaggatgataagggaccgtgatgactatgaggagatgactcatcatcaattgtttgctaagatccaacaacataaagctgaggaagcaccaaccaaggcaaggaacatgcatgttttggttgtcaatgatcaaaa

SEQ ID NO: 61076 - DNA, 894 bp, Zea Mays
ctgcaatgtacaagtacagtggctcccctggctctggagctaccagtatcagtagggacacaaggtgatgcttcaactcttggaaggctcgctctgcctcctcggtacaagagaatgggccggacttccgtaagagcttgaagaagggtagcgccctctcagccagccgtgagatgaagcggctaagggcggccagggaccccataagcttctggacgtccttgatccaggcctgaggcctcattgcctcaattgccttgatcttcttcgggtttgcttcattgccccgatgcaaaactaggaatcctagcaacttcccagcagagacaccaaagacgcacttgtcccggttcagcttcgtgcgtgttgcccgcagcttgtcaaagactagggtcaagtcttccactagagtcgaccctctcttagtcttgaccatgatgtcatcgacgtatatctctatcctgcccctaatcaggtccccaaaggtcttactcatcgctcgtacaaatgttggcaaggcgttcttcagacagtagggcattacaacataacaataaagtccatccaatgttccaaaagcggtatgcttcctatcttccctagacatctggatctgatggaaaccagagtaagcatctaagaaggacaagaggtcacacccggaggtagagtccacgatttgatctatgcatggaagtggatacgggtccttgggacaagccttattaaggctggtgtagtcgatgcacatccgaagcttctcgtttgcctttggaacgatgactgggttggccagccatacagagtgattaacctcttcgatgaagccagcatttagcagctttcggacctcctcacggatgaaatcctgccgctcaatggactatcttcgag

SEQ ID NO: 61077 - DNA, 466 bp, Zea Mays
gtggttttgggacttagagaaattttgatggctctagtgtgctttccacttagtgaactattttgaggtttttgttgggcctttttgtaatactttccttagtaaattttgtaggtttactaatacacttcatctttggtaaaggtttccttttatgatttggccatttgcacaatcttttccctttaatccccttgttagggtttaagggtctaagaaggaattagggttttagaatcttgtttgtgggtgaacattgtatgaagggtagggtttctttcttattatggtaaattcttatcttaaccatgcctctaaaactttgagttccttcacttcccattttagcatatagtttaagtaggacacatttgtgcttctttggccagggctttgtgtaacacctggggtgttacaccatggccgccatcatacaagccacctcagcttcctatgtatgacgggc

SEQ ID NO: 61078 - DNA, 310 bp, Zea Mays
catgtctcgggcaagttggtgacgaggtacgccaatcggcccagttgacttgcgtgcagtctttcttgtacgtggcggcatttttctaagggggaaatcttattagcatagtttttagcatgatgcatgtgtaattacagaatcaaccttagttgattcacaccttctatacattgcactcttcctatctggtctttaaaataaactcttcagagatacttaggtaagaagggaaaaaatttctagataagtcttagaaaactatttttgaagatgtctcatagtatctgcagagatgggcttcgctccg

SEQ ID NO: 61079 - DNA, 1009 bp, Zea Mays
cccgatctcaccactcaccttaccagttcctgccagtggaagatgtccttcaggttctcatcaagaaaaacggggaagtccgccacccactgtcaaatgacaaaaccgggggccggtaatccaatatgcaaatatgatacactcattgccacatatgcttccctctctagtgtcacctagctccggatgatccttgacacttttgcccaagcaacaggtctttgcatcaactacgatgagagcacccttgttcccattcatgttgacccacaacatcaagccggtcaattcacctcgatcctgcagtgcggtgccaagttggaaggcttcccccaaacttactttggcctccctctgtcaagagcaaactaggatagcatgcagaaactcctcccgcgtgatcaccactatgagagagcatcgggaatggtaggacaacttgcttccgccttgatgattagatggatagtggtccgatcacagacagcttcccctcccttgcaagccatgcaacgaatatggaaaccactgtcaggcaagtgctgcttgatgggcttggatcagcacctcaaaccacgcctgagcacaacctcaaagacaggagcttgccaccctccagaacaccctccacgacatctctctcacacaacaaaatgataaaagactaagcccactgattgacatagaagggatcctaaaaaccggtatgctctacaagctgatcaatcaatgactacctccaactttgataatccagacttcgtgtgaagctctttctctcctaaagtttaagttctttgtgtggatcctcatataaggaaaggttaaccacaaaaagaaccttgtcaagaaagggatgattaccagcgtcgtgtgtgaccttggctctgtcaggcagatgaagattacgaccacattatcttcaagtgtctgattgcttcctccttctggcacaacatatataggagtgcacaacatcgacaacctaacgacgtccaagccatgggaa

SEQ ID NO: 61080 - DNA, 384 bp, Zea Mays
aagtcatcggcttttcaacatggagatcattcaataaagcaccaatgtataaaggtcgtatcagattgtatccttctcggccatgaccatttggtcaatggatcaaaaggaatagaatggaggtgccccccagtctggatagacaaagggactatacatgtaccatggattcatcattataccattccatgtttgaacaggataatataacgatgatgagtaaacgggtggaaagtaccctagcctcataggatgaataggcgatgcttgttgtgtcgcctttcgggtcgttttgtttactcgtttcgtcttagcaagtgaccggggtttcttcgttgaccgatcacgtagaacggtcttcttgctagtatccttggagagcaa

SEQ ID NO: 61081 - DNA, 671 bp, Zea Mays
ccaagccacgttgtttttgggaagtcaactatcagacaagggcaaattgaaaagcgatgaaaggcgaatattttcatgatttgtccatagtgagggctgggggagaagacactgtaacccttcctgaaggtgatgaagtggtagtctttaggagcttcatgaaagttgggcttccctttccgctctacaaaatgttggtcgaagttttgaagacattcgagatataccttcataagcttacccccgaagctctaatcagagtgggggtttttatatggcccatgaggagtcagtggttggagctggatgggagatgcttctgcaacattcatgagctatcttaccagatgaagacgatcagaaaagaacaatatcataacaacttcggctgctacggcttcgtgcctcgctctgaggcgaattaccctgtgcctacatttcggaagaagtggtcaggttcttggatgaaggaatggttttacgtgaagaatgacctgaatcaaagggaggatgtgagaggcgttatgcaacgttctatatggtcatgtttcggcattagaaggccatccatcgcacttgggaatgaagtgcaggcgtgccaaattgctttcaacaccaaatgcacctacattggcacaagagatttagttcaagagcacattgcttataaa

SEQ ID NO: 61082 - DNA, 495 bp, Zea Mays
gtagataacatcggggcggggtgaaaatatccggtgaggggtgaatccagtcgctggccgaaccgaccgtcgtgtcccgacgcggtcagtcacgctggcatcaccggagctcgtcgtttttccggccatgacacgtaataaccaatcctccgcgtcgtaagggtcgtggcaagccgcaggttatcgttcgcagaacagttccctcttatgcgccacggtgagcaagccactgtgaaatatcctagcttgataaccgtgatctcaatcccaaaattcttgtccagttcgatcgggacctataaattgaggatgccctctgctccgcttcttagttacgcatccaacccatccccagctagctcctatcgtgcaccaccgcgccccaatttcgcatttcccccaattcacttctttgcgctcccgtgtgttgtcgtgtcgtggaccgccaattctaggttcgttcttgttctctttgttcatgtttcaacaccttta

SEQ ID NO: 61083 - DNA, 1272 bp, Zea Mays
atcagaaataatctgtgccatagtctcagtggtgaacaatgcagttgcccagttgtcccgttcaaattcctgaactattccgctcattgtcgccaccagtttgctgatttcttctttgatttccttgatgtaggcaaatcaatgatacattatttagagcgtgattggttgcctgctcggcccagcctgagcgtatccagtcattcaggcccatggcggcatgctaaagaggtgcaataggctattgtttggttactttgtttcatctcatgatggcccattagagcttgcctttggttgcaaggctgtacagacacttgagcatggcaagcctcccaactagagaacagaagacaccagtcatgacaacgatgttctttctcctcactaagtatgcaccttttcctcttgttgcctgccgcagacccactagtagcacctgcagctgcctcctagctcttcggagcctccccaaacagccttgaaacatcatcaaccttcatggcatctgtttgtagtgagctctcagcaaagtaagatgtggtacccattgcaaacttgccagttgcaagaccattgccaaagatcacttccatctgcttgtaattttctatttggcatgtttaagtactcagcattcttagcccttcagggtgtgcctatattgcaagctcacaaatgttagtgtaaggctggaattaggttagtgggcacttaggaaaggttacaaaatcacagatacaattaacatacatcttgatatggccacctatagtgcacttcatctagactgatcatgtgtcattcatcatcatcatcacaaaggggctatttgtttcggtttttcgctagattttagccgtcatagtcgacttctagataccagacacagaaaaccgaacgcttcgcatctcagtgcgcttcaatgaaaatcatttttttttgtaaaaatcgcctaaatctgttggaactttgttccatatgctcttggcaagttggtggtgcgataaggcattgggaagcaagagtgcagcatggcaaagcgacctagattggtgatgctgggaatggttaggtttagcggtgcaggtgcagggcggcgactagtcactagagcgtgagctcttgcgtgctcagaggagatttcatacattatttgctccgtacaacaaaaaaaagtaaaaaaaatatctgtatccgtattcgatttgtatccgaaatttatatttattatttgagaagatatatgatagatttgagatttatctttca

SEQ ID NO: 61084 - DNA, 1103 bp, Zea Mays
gaaattgtctatttgggaccgtgtgcgtactccatgagatgttgattccgcttttgattgatttgtcataactctccgcaatttatgcaggtagcatgccactgattctgacggtttcttgacatcgttagtggcgattcactgatgaattttatttgaaatagttggcccttcaacattggtgtcaacctttgcttcctttttgatgtttgcgtcgacattctgaggaacaattttgtctatgtccccctcgtcgagttccttcgcaagaggtgatatgattgtttcaacgatttttgtggaggtcggtgccatattttcctgcaccatggggtatggaatgatcgaactatctttttgttgcattggtgttgaattcggagttggtgacttctgacgcgatacacggcttaagatcggctcatcacccaacttgatgtcgcgtcgatgccaaaggaccaacttgttcattgcctcctgcaatgttatggtcccctcaactggaaagtctatatcccaatcttcacaaccactatctgtgatctctagaacttggaccacaacatagtatggcatgataggattatccttgtagttaacaagtcctggttttaccaaaccagtagcagcttgttttgtttttgtcccagatcgattgattggaatatgaagaaagcaaggcttgtcctcaacaatattgtctatagggtacttggtgaaatcttgcatagatcctacgctactagggactataggtggactcatgtggtctggcttgagttcaaatgataagcattctgttttcttcattttgttcatcacgtcattaatagccttttgtaccctttcatcaatagtctcttcaagggtcctttttgacttctcgtgtttcctatatgacgccgcatactctggaaacgcctctctccaggaaatcttagaagagattccccgagcccgtccagtgtgttcaggattgcctagtgctgcagttagtatgtcattctccctcccaggcttaaattcgcccttctttctcttatctgcatattcttgaatttttgtcgaaacttcgcctaccaattctggatgcaaaagtttgc

SEQ ID NO: 61085 - DNA, 384 bp, Zea Mays
tgctaccaaaaaaatttggcctagctactaagagttagctcattgtcgtatttgtcctaccactcaagtagctcatgtcatcgatcttgttcttatcatgagtggcatctcctagatgctgaggtgggtgctccccctcacgaagcaacatgtattgtagcctgtaaatgcatctgtctcgaatgtatgccgacagatgggattcgtgcaacatacctgggcaatacacgatgaattactcttttgtgccttcaggtgcattgatccacattacttccattgcccaagtagagaacaacttctctccttgatatgagtatacgacccaaacatgggccctggtgtagtgtagtttctggccaaaatagatttgcccactcgtgc

SEQ ID NO: 61086 - DNA, 1146 bp, Zea Mays
caacattgctcagatagttcttgctaagggtaaaacttcctgaggtgctctatattccatgaattccctacttccgtgccatccatttgagtaaaccgatatgatcctggctgagtgacccccatcactatgaatggtccctcccatagcggtgatatattgtgccgtccttctcccgttagaattcggcgaaggatcaaatctcccactatgaaggatcgatgtcgtatagtattatcatgatagcacctcggggtctgctgatatctagctgactgagttactgtattcaaccgctcttcttccagtacgtcaatatcttctagactggtagcctccgcttcagctatgttttcgaagaccagccttggtgcaccaaacctgaggtcggcaggtagcactgcctccgaaccatagaccatgaagaagggggtgtttccatgcagagctcgactgggttgagttcttaaactccaaaccacataatgtaattctctaatccacttccctacgaacttttcattcttgtcgaagactttcttcctgagtgcttccagtatcattccattagccctttccacctgaccgttggctcttggatgtgctactgacgcatatttgatttggatgctccgttgttcgcagaaatcaaagaattcagagctagtgaaattggatcccaggtcggttatgatgctattcggtatcccaaacctgaatattatatcttgtatgaattccactgccttggctgaagttagagaagcgatgggtttgtattctatccttttagttaatttgtcaatggcgaccaacacatgagtgtagtctccctgagctttcttgaagggtccaatcatgtccagtccccaacacgcaaatggccatgttatgggtatggtctgcagttgctgtgctggcaaatgctactgctttgataagaattggcaagctacacatctctttactaactcggctgcatcactctttgccgtcggccagaagaaaccagacctgaagaccttcctaaccagggttctggatgctgcgtgtatcctgcactgtccgacgtgaatctcatctagcagttgcttcccagtaaccgaaggaatgcacttcatgaggactcttgttgcaccccttctg

SEQ ID NO: 61087 - DNA, 309 bp, Zea Mays
agttatactgggccccgtcggcgctttagaggtagccgccgagttatgctgggccacatcggcgctttagaggtagccgccgagttatgccaggacgtcttgctttttccgagtgatgacttagcactttttagaaatggtgtctgacctgggaaaaccccatttatatcacgtcgtcgcatgcctctgcgttccgagccctaacttcacctttctgcctccaaacattactctgtttccctctaatttcgcttcctttcaatcccctaacgagattgtgatggcgcctaagcggaagaaccaaaattc

SEQ ID NO: 61088 - DNA, 511 bp, Zea Mays
gtggtggcggtggacgcgggggcagctggaggggaggtcggcgtcgccatcgggaaggttcgtccggagagtggggaaagacgtggctgtccggaggttaggcgagtcgtgttcgctgtcctgtttaggttctcgctgttcaccgccagtgagtggtgcaccggctgacaggtggactgtaatgtatccgggccagctactactgatatccctcatgccgagcccaggagagacttttggcattatagaacacggcaaagttggtttcgtagaaacggaggcgtaggcgaaggtttcgacgatatggaaatgcagagaatgcacagctgctgaaatagacacaaaatcgttattagccgttgatggtaaccattaaggatcctccgttgttgtcgtccgtccacgcgtcgttctcttcagtcgtcacagccggtctcgctcccgctactgaggtatctcctctcttcttccagatctcatgtttcttcattctccatttcccttctgtcgc

SEQ ID NO: 61089 - DNA, 647 bp, Zea Mays
gttttcctgattagttattgtctagattgtttatgtccataaagagcaaggtgaacagaattgctgacataattttaagaaacgagtgatggctatattgtcataacatggggggtcgacagagacgtgcccttctccgcgaccaccaaacaggtctttgatgtggctgttgtgctctctaagaacatgcatgggttccagcttcatctcgcccgagcacctcgccatcgcgctcttcaccctcgacgatccaactaccaacatcctcctaaggaggtaggttctgttatttattttccattgcaactgattttcagatccagtgcaatcgatatcattgacctattgatcacattaccgtctataataaatacaatagtatgtttattctcccttccgagctaataaccctcccacgtcgccccttccgtcgctccacccaccggagccaccaccgaacctagagcgcgccttccctggacgatgtctcccacgcgcctgcgcggctacgccagagtgcgtcggtcctggtcgctctgggaagaagctacacgtggcgcagatttactccgtgctccccaccgagatgcagcgacgccgcctcatgcgcgccaaggtcgtcgctctcatggccatggtcagctcgg

SEQ ID NO: 61090 - DNA, 654 bp, Zea Mays
gtccgccgctggcgagtttcgtgcatgcgccgccatcgtgggaaactcgctccacagtcgattgaccatcggtagatgatcagggaggaatgataggatgtgttgaagccgctacgatcactagtctgatgaaggagggcgtgaatccatggcaatttctcaccggatcccgggaaccacacaccgacgtggctgggggactccgcgtcatcaatcgtcggtaaggggttattaaagatgttcgctatcctgtagtgtaagtttatcgccattgggagagaaggttggtgcatggaggcgcgggatggtcatcgccggccatggctccgccatgggagctgacagcgtcgccgcacctgccatgagtacgatagggatgtcacggaggagggcctcttgaccgttgatctcgcaatatgcggcgacgattagatttattgtaacggttcggccaagtcggtagttgccatagatccttgatcggatggatgtgtgatcgcgtagttcatgatcttttatgggccgttggatcgagatccgatgcccctggtcgcgtaccggtttgacctgggcgcgatttaatctggaccacctgatttcgatcggacggctaggatcgtcctataccccttcgccttgacaatgttgttaaag

SEQ ID NO: 61091 - DNA, 546 bp, Zea Mays
atgtgttcacgttgattttggacgattttcatctaagcgatttctcacaaaagcatactgaaaagatggccatttggcagtctacaatagcttatggtggccataagctggtaaaaagccgaagacaagtttgaagtgtgccatagagcccgtagttcaacaaagtaaaccaatcatagatgcagttatactcgtagagtcttctatactcctataaagcacaagtttcaacagtcgtcctgcatcacgcacgaagagcgaagatctgtttatctcccacgtgtctcgtctaaccaatagagagataataatgctagcccatggataacccttatctcgagagctaaaactaacctcgctataatttgtgtgtcctccttctcctctatctatatctcttctctactctgtctagcacgaaatacatagatctattcctctcccccatacactacccgataaacttgtaatcggaaaagaaaaaaaatccttcagtcaactacacatatgtgcccgaggcccatcgttttgacccaaaaagcccaa

SEQ ID NO: 61092 - DNA, 810 bp, Zea Mays
aaatttccgggatggccctagcatggtgggataccttcagcactactgtcagagatgctacctagacagagtttgaaattgctttccgagagcaccatgtgccccaaggaatcgttcagctcaaggaagacgaatttcgggaactaactcaaggtggaagatctgtcagtgagtacgtgcacaaattcacagaattggcccgctacgtgcctgatgacgtcagcatagaagctaagaagatggcccgctttttgaaaggtctcagacgagaactcaagaccatcctagacaaccaagatttcctcagcttctcgcacctctcaaacaaagccatacaagtggaaagggcaagggaagaagaaaaaggtcacctcaagaggaaattccaagtcctccgagctcagcagcaagaccggcaccagagaactcgatcctttgggtttccacccaagggaccaagcttcaatagactagctggacccactctgtcacatttcagtcagcagagtaagatctccttttaggctcccttggttgcaagcaaccaaccgccagcaaatgcatgttggcactgcggagaccccagtcacttcaagaacaactgcccccagttgaaggcatcaggacctgcttactccaactcggtgaatggccccaagaataccttagcacccgccccaaggcaccctcctccatcagccagcagaacaagacccagtatcagggaagggcacgagtaaaccacgtcgatgctcaggaggctcagcaagctctgggagtagtgctcggtgagttcctttttgaatttac

SEQ ID NO: 61093 - DNA, 1035 bp, Zea Mays
tgttaaactcgatgtttgcattcttcacccccaaaacataaataaattttgatgcttgcattagctaacatttgcatttattcttgatcgaaagcagaattcctcactttcttactacacgcggtatacaccatctgagttgcgtggttgtgtaagggtactgcaccggctcttccgtttgggccctggaagcaatcttcctgcaattagagaaaaatacagtcagcataaggtgagccttgcctcctacataaggtgattgccgatgagaatcattactttggtacctactctgatgctaaatgccctaccctttatctgctcagtacaaatttgtagcaaagaagtactgcccacagtcaatccctactaagttcttccaggatctgacaagttagaagccaagattacttctagttactcaatgaaaccttcctgaggtacttagtgtgatactatgatattgatttgacagatagttttgaatgcaaggcatgcgcgcggccttgcgtttagcagataaacaggttcaagtaaactgtatgtcacttgtggcaatgttgtttcagtgttgtgctttgattgcttccagcatcgtcttatacgttgctgttgtggtcttctcacgctgtctagaacttttattgtatagttctggaccttgctcataacaagggtagatagtttggctaaagataaagtgtactcattctctcattgttatctacgtgttgcttctgtattctgaagattctgctctgaaacccagcaaatgtattatcaggcatcagaatagtagagtctgagtcaatttttgctattgggaataagtgggagggtaactttggaaagcaaccgatcaggttatctttgctaatccaaaagttatttcagggttatgctttaatatgtctttttactgataattatgctaatgagatcttcagggtcttggacgcatggattgcaaacttgtatattagcagtacatgtcatttgggtatttaaagtcttaagtttgtgttgtctaaattt

SEQ ID NO: 61094 - DNA, 654 bp, Zea Mays
gttggagaatctttggaatcagaaaacccaaagttgtttagaatgttctccacataatgagattgtttcagaataatcccattctcacccttaatcagttttatgtttaatataacatctgcctctcccaaatccttcatataaaaattttgagataaaaatgatttcacatcatttatcacatcaataccagtcccaaagattagtatgccatccacatacaagcacaatattactcccttaccacctacaaaccgatagtacactcaagtgtcagcttcatttaccataaagcctactgacgtcagagttctatcgaacttctcatgccattgctttggcgcctgcttgaggtcatataagaatttccttagtctacacaccatgttctcctgtccatgtgtcacaaatccctctagctgcttcatatagatctcctcgtcaagctcaccattaaggaaagatgtcttcacatccatttgatggatgagtagatcatgactcacagcaagtgctattagcacacgaattgtgatcaatctggcaactggtgaataggtatcaaaataatcatcacctttcttttgggtaaattccttggccacaagtctagccttgtatttatcgacagtaccatctggtttcagttttttt

SEQ ID NO: 61095 - DNA, 1242 bp, Zea Mays
agccccactatggggtaaagacttaggtgcaacaaacagatcctgaaaatcagccaccaatttagtaatgttctcatcctccacttcacccttatctgtgtctgttggttccatcaacacacacacccagacttaatttcccttgagtcatttttgcacctatatggcctacacagatgacacttcttgcatcttcgcacaatctccttgcagttgtatacattttcttgatgctcaaaactcagagtcttgtgaacccaatcacattgcatgggactatatgattccaaccaatctattccaaaaaaacatcaaagactcccaaatccaatactctcattgtagtcacaaaagtatgccccctagcccaccacatcaactccttaacttgactgtcgcttcttaacatctctctgctggcaaccttcaccaccattggactacactcctcagtcttcaaacctaatttctctaccatctccttgctaataaagtttatataactccatgcgtcctcgaacaacaacatcgccctaattctaatgcacttagaaccataatttccacagatggcatttagagacaacatattatcaccgtcttcctgcacttctttttccacctgctctagttcttccggggacaacaccctagccatgtcttctgctgtcaacaaatttaaatgagctgcagctcccttcccacactttgcctagtgccctggttcatatttctcccacaggtgcaacacaaaccatcagctcttctatactccttcaactgcctctccttactccaagttccactctctattcctccctttcattcacttcttcctactcctccagacttggaaatcaacagtcttgccgaacatgcttctggtcttgtccataatttcttgttgtacttgtgccaataacacagctctgtccacagtggcaggtaattgagccataaccataccttgcatttcttacttcaaccccataatgaattagttcaccaagaatgtatcatccaaccctgggttgtgcacaatggcagcatatcttgcttctttaaaatcttgtatatattcatcaagggttcctctctacttgattatctgtaacctcctcatcgccttgggtactcatctgccccaaatttgagccaatggcttgactggtggtgccgtggtgccttcagtggaatcctccctggatcaggaaggattgatcaggagcacctacgctagga

SEQ ID NO: 61096 - DNA, 436 bp, Zea Mays
gtggaggtgctagccctagaagtggcgaatgaacctgtcttgcaagtagtggagacaattatgctaggggctatggagatatagtgtttcctccatctattgttccatcaatgcaacctaggggtgatgctcctcaaccatcttctattcctagcatgagggaggagaatctgagtcgaaggaccatcaaagcatctttaatgctgattggcacccaaacctcaccttctcagaggaagtaagacccatttgtgtttcctacagtcgagacatcattaggacctaggcttagagaatgtcattattgactagatcccaaggcacacccataagaagtggggcctcttagataaccatagtgaccactaaggggttgcctttgcctccagacatcacccccctttcaagctcaaatggtcgctaagggggtctaaac

SEQ ID NO: 61097 - DNA, 1201 bp, Zea Mays
aatggaccaaatatgtctaattttaaaagttcgacgaccgaagatacctggttctaaatttaatagttaaatatagacttcttcgttcataaaacatatgtgtctatttgtatgtttaacactataaaaatagaggtcatatattttatctatttatgttgttcttatggacataagagataaaaaaggaggttgtgataaataggggtaatttggtccatttgtatgtgaggtaagcaataaaagaatgcaaaatatagatagagtgttgttttctgaattaatttggtaaaacaagtgctattctatgaattacttgaaatcggatgctattttgtgaacgccatctcaaacaattgctatttcatggattctcccaaaagaaattgggctgcgtgcggtagattcggagctgcgtgcatgccgtggggcccatggcggttttacggatcgtgatgcatgcaggtaggcctaaccgtatccttttcctatggtttctcctctttccatacccacgactacacatgatgtttcttcttcatcgagttcacgacattacgcatgccgaaatgcaggcaacagtagggtcaggtgcgcctgtaacaccccagatgtttatcgtctgctcgatcacgagtgcggatcttaacacgtgatagcgatgaataaaatggacactaaattttaattatctcgcaaaagttcgagtttggtgtcatatttatttccataatctaagcaattaaaagggggtcgagaaacttttggattatcgaatcttcgtttgctggtgaatttggaaatgttcggatcatgcgcgtaagtgaatgcgaaaatcagaaaacttctgatcttatacaaaatttggagccccacgctgtccgaaaagaataattcgccaacgcattaattaaattgtttttctcaacatgtgatccttgatgttaaagcgaatgatcgacagctgatgagaatcgtaaaattagatgggactaaatacagtcttgaataccgaagccgaactcgacaacttgagtttttggtgcaaaataattacgtctctgctcgttagctaagaaatcgcgtttgaagattcatagttaagatttattcctcctgtaaattatccgactttaaattaaatcaaacgtagtctataccggtttgtctggtatcttttgtttcgtccgatttacatctc

SEQ ID NO: 61098 - DNA, 395 bp, Zea Mays
ttagattccaacatacccttatactcatagagcttatccagttacctaggggcaaaatagaccaactctcattctattgatctgagagccatgctccattcacaaacatgcttcgccttgacaaactttgagatggcaccatgtgctacctttgattcactctagaactgtgccaccaggttttgaggtcaaacccgtgaaatcattgttgggtgattctgaggctcaaccataaaaactccacaattatcgtactccaaatgtgtcgaccctgtgctagacatgtgtactacttgtcctcaaccacgtcagcaacatgattcccctgccatgtcctcacaactattgatgttcccaggtgtcaacattgtagtaggtcacatggcttctatagt

SEQ ID NO: 61099 - DNA, 569 bp, Zea Mays
agggcttgtgggggatagatatctctgggtcctcacgaacatagaaacatgtcatgggccgcctaacgggcctccctacggcttgccttgtgagataggtcactgggccacagccaggccgggcgagctcgatccaggcagacgaagatcggacgtccgggttatgcacagaccaaagcactaatatcttgggcaaagaggttccgcacacttgaaggcctaaacactcagcattaactcggccgaagaattgatcgaactccgtataagtaggaatacataccgtgataaaggagcaattaggtagaatagatagtgatcacaacttgtaaagggacaaccctttggtcacctatataaggtcgagggtgtacccctactaaaacatctcataccatctctgatcaaccacatcttagcaccaccacaaagatcattagcccacttgtagcatccacgagctactagattggctggagaactcatcttccaccacccatagctcatttgtaatctgtatacctaagtgcaattccattacacatcctcaacaggaagtagggtgttac

SEQ ID NO: 61100 - DNA, 953 bp, Zea Mays
gtaaaaaatggcaggggctcttatgcaaaactgctcggccgaaggggtatccatcactctcagccgtcggatcgatgatctatgatgctgattagactgtacaagatgtgaaccggtaactcctaccgatcgtgggatcaaggatcaacggatgtgattctaaataaacgaaatctaacctcacccacacatcgcccgatcgacaccccagatctaattgggcgaagggacatcaagatgtatctccaccgcccaaatccggatggacgaccaagagaccatctcccccccggtggtggaacacagccgcacacccccaactgtggcggcgacatcatcgaggagcatccaacggtcacgctggggcttgattcgaagcgtaactaggtgctaaacaatgcagaggacgtatagaatcgatcctagggacattaccgatggctgggaggcagagcgatgctgtccacgcggcacggcgggctcacggcgaaaccccatctcctgcgacgaatttacctcacctcgacagcaaaatatgtacggtgaggccgcggtcacctctagcatgttgagtcgaagctccctagatatcttgggttagctcgacggtggcaagcacgacgcccaccaacacccccatggtggcaaggattttctttgctgcctgctccagagaagataaccgggcttcgattgctaggccaagggcggtctcggccgattatatagggcgagggaggacttagacatgacaagcatcccaacggctccccctggatttactcaagcaaacacattagtctaaaagggtcaagttggagtacatcctccccctagacatgtgcatcatttgcataaggacttgtgaggtccgggggtgacttgtacaacttgagcaccaaaaataagcaagtaaagatagaaatgcttcatagaacatgatcaaaggcatg

SEQ ID NO: 61101 - DNA, 409 bp, Zea Mays
agggttacgggcgatactaagctattcgatctaaatctaacggtccagattagattttaaccatatgtgaaccggtacacaccgaccaccggatcactgatccatgtttcagatcagaagccgactccacccaatctgcacacgccttagaccatacgatctcgatctaatggtccacgatcacctggatgaaacggtacacaatcttctaatctcggccgttgacggtctgatggacggctagggacacgtctccctcgcccgaccgtgccccacgccggcagataccgcccacggcggcgccattgccgccgcccactccccagacgccctgggtgacctgagcccaatattgtactggtatcgagctgaaggagagacgtgcgaaggagtgcacttacccaaggga

SEQ ID NO: 61102 - DNA, 719 bp, Zea Mays
aataaaatggcccctgctacaagagagatctgaatgactagatagcttaggacgttgggcccaggatgtctgagacgacgatgccaagtggtggacatggtggtagtagccaaagcatgagaggaagatgcggcagtggaggaagtgggtggtcggagcgtgtacagtggcctcgagctgtcacatcgagcgataagagttctggtagtcagatccttcacagaaaccaaaagggtcaaactcaatggaacaagaattgtcggtggtgaaccgacaaacggaaagaagattttgtatgatgaggaacaacaagaacatctttgaggtagaacggtcacgaaagcaccaaatcacctactgaggtgaccagaagggtggaaccgttccccacaatgatagatgaaagggagggatgaggatgagagtgagataatgtgccgatagcaggtgtggtgtggtaggagatgcctgagttgaccacccaatctggagaggtggggagcagagtcagtgctatggtgttgaacgaggtggcgagggaagcctggtcccaacctccagccaacgggaccaaggggccaaggcaggggtccacggtagcgagaggggaggcagagccagcgacaagtgtggtagaggggctgccaaaggcagtgggacaccgtaggagggcgtcgtcagtagagccagctgtgaggggcatggcgaagaagcaccca

SEQ ID NO: 61103 - DNA, 533 bp, Zea Mays
attataacatcacatccatgccttctctatctaactgcattggaaagtgcacttctatctgctccgtgcttcccggcccgattcaggcattcagccgaagccattctccatataagtcccaaacagagaatagggatgaggtagtcaagattgtaggcgctagtgctcaactactagcatctatagatatggacacaagtccaaatttggtgctactcggcaccatcgatatcactagggaaaacaaatacgtcaaagagatccacttcccaatagtactcgaagatagttcattgacttgacactctctaagaggttcatacaaaaaacattatcaagcttttgacatgatcgacaactagaataatgctaaagagagagtatgagagaagtctcacaatcaaaattgagatcgcaacaaaggcagggataccagtactacaaccttgtgcataccagtactacaaccctagagtgaaacctacgatactcatatcgtgttgtttaggactaaacatcaacaaccccttgac

SEQ ID NO: 61104 - DNA, 1090 bp, Zea Mays
ctgcccctccacggaggaaggctgggacgccgtgcgccgcgtcgtgggggtcttcaaggacatcgcgcgggtgctggtcgacaccttcgcgtcaagatcgaacaagtccatgatcccgattttctctcgatccctcctttttctgcgttcgttgccttttggtgttctttgctttataagatcttctttcttttctctgctacatggtgaaagtccgtattcgtcggctacttttggatgcaaaaccgaaatcctttgttccgctcgctagttacccggaggatccggagttggaacagttcctagaaatggagcaattgcaccgtctaaatgaatgcctagttgcttcatctaggaacataggtccacatacgcacggagtggaggatctccatggaggccggttctgggctcttggatatgattcagactctgagttggaggaagaggaatccagtgtggtacctgtggctgtggaggcaccgggttttgccgatcccaaaccatcgttttcgtcggggatttcggagacatctgtttcagtaagtaaagatcacttcatgaatgtgccttctccgtgtcttatcaaaaaggcaagggaggatcggcgtccatggcaaggtccactgcctaaaccgaggagatctcctatgattacgttcgggaatgctctgagcaaggccagagtgttttcgaagaaatcgtactcttggtctgatgctcgaagttcaggccccaggcgctccccgtgtttttcggtccacagcagtactccaagatcggtgcctgctcattccggcaatggaggcacagatgtcgcatgttcaaatttcaaaaataaggatgcaggatctggtgctgtcctgatccagacgttttcaattaaaccaggcccacatgtgtctttcaggcctaccaagggcctggtttctctgtttgcacgcacgagaactaaaacagggggacctagggcaccgataaccagacctagtgccgcaccatttggatacaccatatcctacgctgaagccctcgtcggcaacatggatggtggaggacggcggagtggggaggacggaactggacgtgg

SEQ ID NO: 61105 - DNA, 523 bp, Zea Mays
gttttattctgttatgtacgttcgtcagttctgctctggtgtgattatgcatataactgaactggtttatgtcttttgatacacttatttactgtatgcgcttgtttatccagtgccaatgcgctgcctttctatgttcagttatgtacaatattttcagttcttctctgtattgattatgcaaaaatctgatacggtttatgcatataactgaactggtttacgtccttttatatacttatttactgtatgcgcctgtttatccagtgccaatgcgctgcctttctatgttcagttatgtacaatattttcagttcttatctgtattgattatgcaaaaatctgatacggtttatgcatataactgaactggtttacgtctttttatatacttatttactgtatgcgcctgtttatccagtaccaatgcgctgcctttctatgttcagttatgtacaatattttcagttcttctctgtattgattatgcaaaaatctacatattggtttactcttattcatt

SEQ ID NO: 61106 - DNA, 284 bp, Zea Mays
cctgcacacagcttcggctttgaagttttaggagcacacacataggacccaccatctggtatctttcatcctttgattcatgcaacaggacctgcaggatttagcctgggaagccaagccgtatgcccggacccagaggatcacagttccaaatactagggtacccgttgcagagtgatggagcgtgcagacttagggtacggaaccatgctaagcagctacacagctccggaccactccaggagacgagcgcccattctctagaactggaccccaggttgccg

SEQ ID NO: 61107 - DNA, 383 bp, Zea Mays
tgaccttgagccagtcatcggcatccagaggatcaaccgcatgggagaatgttggcgggtgatgactcataaaatcccggtgcttatctctggccggggggtgcattctgctgttgatgctgatgctgttgattctgctggttttgctgaatttgttgaacagccgcagtgagtccatgcagaatctgcatctaggcggcgatgaactgctccatgttgggattcggtggtggtggtggtatttgttgaccacgctggttccggttgttgttgggtccttgacgtgcgttcaccatctgattggttaggaagtgaaatccttagaaaagtgaggagtagaaaagattatagaggggaacatcctaagtttattattatttttt

SEQ ID NO: 61108 - DNA, 1016 bp, Zea Mays
gcaagatttgagcacagctgtggtattgtggcaatgtgactacaacacaacagaacaaaagcgatattctgaaacaggtaaaacacctctaatggcatgacaagagtatggcaacatacattgttaaactgaaacttgtgaatcacttggaaatttgaatctggactgaattaagatattgggaggatgtttagttaggcagtgtagcatttagagaccaattcctagtctctataacattgtagggaaaaagagtgcttctgttaatgcgtctctatgctctaaccctttaagcgtctcttttagaagctccttagttagaaataatttattggcatggcaccattcagtagctcgtgtgatgaatgttcaactaatagatcaaagtgtcagacttccttttatttgattttacccttgcagggcttgcgaaatttgtgctttttggttggttgaaacttcagacaactatatgtatcgatcaatacaaaggctggaatattattgcacattcgcttttctaataaaacaccagtttaaaacacacatggcgttatttcacagaagcaacgaagaagacagaacttaggttctgatttcagacttcaaaactagccatgatgatttctacaataactctttccccagaaaggttcaatcacttgtccgttgtgttgtgacacgtctaatttacatgcatggcttcacatccattcttaacaattgaagtaaaatagtaaaatattttgaatcttttacagggtgtgtgaaatctaactaccaacggggacatttcatcaaacaggttatggtcacacacttcctctgtaaagtcctgacaaaagaccaagaggagcgcctacctctccggctcgacgccaaagacgccgtccctccgtatcacaaactcgcacgattgctctggcaggtgcggcgcaaacgccactttcatccacctccttgcgctcccgctggtgccattcccttccacctcccgcgtcaggaacaggcgcgtg

SEQ ID NO: 61109 - DNA, 534 bp, Zea Mays
tcctcaagtactatgggtgtagaccaaaaaattcttctcaaaatagttattttgttttggcagcacgtaaaatttgcttcaataggccgcataggtgtgataactaccatgggtttacgcatacttatataaggtaaatcatgcgtactagcataacaagcagagatgaatgaatgtgaagctccaaaatcaaataatatagatgagggaaccgaattaataaggtatgtaccaatggcgatgtcagaaacatcaacagtaacctcaacattgatctgattaacccgagcaatactgaatccacggttgttggctggcatctaattctgcttgttgggattactacctcaagctggagtattggtgttcttcttaggacatacattgacaaaatgccaaacttcaccacacttgaagcatgagttgccagtagtggtgttttggccagtacatctcaccggggtgccagttgccgtagcctgacgagggcgtggtgtctgagttgccagtaggactcgactagatttataggag

SEQ ID NO: 61110 - DNA, 876 bp, Zea Mays
tttggaattagttttatacataaaaatatattctaggggtttatttgagaagtccagggactaaattataatttaaaaagtcaatcccgaggcttcctaaaaaaacaggatgacgagtttatatggggaaagggcaatggctcttaggcaaaatcactcggctaaaacaatgtaggtgaatactgaccgtcagatctcaagctaatgactcatattaaatctgagactacacgctgaaccgacaagctcatcaggccgcaagatatgcgatcaacagcccgcgatcagcctagatccctttaagttagcttcaatccccctccacacgatcttgatcgaacgggtccggccaaccctcccaaccggtatgagcttgatgtaaacctagccactagcgcacgatcggatggtgcacctacgtcttcaccacccgactggccaggacggcggcgctgccattctcacccgacggagcatcaccggcgaggcccccttatgcgtcccgatgcccgattcccaataccgataggtcccaaacgaggcttaagctatcgcaaattgatttaatgtgttgcttaccagttatagtggttggagcagagcagcccacgtgaaccgacggcttcgcagcggatccgtggctccgacgagtaattgagccctccccggccaccgaaccctcccgagctctcgacccgcgctaagctattcttccggttctgcccttactgtaccggtgaggttgcagatcgctaagcacaggcgcgatggtgatatgttttctcacgacggttaccaacctcaccccagcactctcctctaccttgcctaagacctaatgaagtggtagcatggcacggtgatacttataccccg

SEQ ID NO: 61111 - DNA, 422 bp, Zea Mays
caaaatccgaaatgagtggctcttctatggaaaacaaaatcgaggggttggtggtccagtcgggcccactcggtatggtagttggatcacgccgttatgttttcccgggccgcttggaagatgggccgaagacatgaatcgtgacccatcgggcccattcggaacgaatcgtccactcgtcctgttgttgctcatccatctcctccacggtgggagactcggggtcgactatccggtgtcctcctccgtcctctcgtcaccgtgcgccgcaaccaaacacatctctttcaagccactcgttgtctcgagtctttttttttttcattataaactccatttcaagcggctttaataaaatagtcttttctaccatgtcataccgttagaatagaagtattagccaacttaaatcaatttcgttt

SEQ ID NO: 61112 - DNA, 673 bp, Zea Mays
cggcagattctcccacaaaatgcgccgatctcgggggcgggccgaccatgcgggtcctcatcctcgtctataaaaccataccgtgaccctcttccccaccatctggagcgctgagatcggagcagagagatggagaagtggaatcgagggtaggagagagaatttggcgccgcctcttgcaatctacgcttgtgcggtggctcgggggtttgggaggacttcgcaggagcaagccagtggccgaccggtggacttggcgtggtcatcggtggcgagctcctttccccttgccgccgtgccgtggactgagttcaacactgctcgatcccctgtaagttgcccaccatctaattcgcgatcgcctctgcatcgttttgcgtcagcgcttgtggtgaatcggtcgctgggggggaatcagctcgagtggctccgaatgtggctccgccgttggcgacgccgccgcgactggttgaccggaagttgggagaaggccactggtcattgatctcctgctgacggccacagttagaagttggttatcatttcacccaagcgatcggtgaccatggatctccgttgggtcggccggcgttgatcgccgccgcgagcggggcctcactgtcgcggtggatggaggataggggaaagaggaagacgggtccctggccgtagg

SEQ ID NO: 61113 - DNA, 615 bp, Zea Mays
ttttgactcccttttttacgccttgccttcctagaactggagctggaggtgtcgggtctccgagagggcgtggacaaggttattgccctcatttgtgcctaaggcactgatcgggaagagcgcatcctcaatgtcctgaaccagattcctcaagtcgttcgccacattgctcgtcgatgtgttgtcagcgccctggctttcatccaattaaggccgggcttcgagttacatggtgtcggtgacctgttggaagacattgctcatgacgatctgagaatatggaggacgactttggtgtagctaacgaggccatggtcaccctcgttcagctagaagatgctatcaattgttcccctagccaggtcgcgatattaggtagccacgattacgggattacccatacatatcttggctcttagcgagccttgtaactactaagtgttttatgttgcttgctttattttagtcatgcagtgggggaccccctgtcttccttctattttcctttttgcgcacttggggttggcatggaaatgggtttcggtgtttgaactctagggccctgttcgctattcaaatggtctcccaactacgctctattcgggggtgtcgagg

SEQ ID NO: 61114 - DNA, 766 bp, Zea Mays
tgtcagaacgaactgaataggattgcgatggtacagtgtctgaaaatatcagtgacgcaatgcacctcaccgccggtgatccccgcgcgtagattcgcgccaaccactgcgatttgtgctctgagagaagtggataaccacggtgggttaaaagattggacgggggtggatttggtcgcgggccagagcttatcggctgcactcgatggtcgtgcgacgtggccgagcggccaatgtcatcgtggaacgtcgatgtcatcatgggacgccgatgggacgccgacgatctcaatcgtgccatgtcgtggtcctttcaccatgtaaccataaccatggcaagcccagagttactatccttgagttattatgccgacgagcaccacgacgaactcaccagtacaacccttgtcaccgtcgtgatctaaacctcattcaaattcgggataaccgtggccagcctctataaattgagcgcttcccttgctctgcccccttgtcatgaacccagcacaactctaaccatggcctgccatccaccatagcccgagaaattgtgatttccccaaatcagtcctctgcgcctccgcgaacactccctccgtcgactcaccgctctgtcccttcacccgtcttcctagtcatcgttcttgagtcctggtaagttgctaaagcttatcatgctcccaattcaaacgctaccgcattgtgttgttggcaacggacccggaaaggcttcaaatccgtgggtgctcgtagaccgagctct

SEQ ID NO: 61115 - DNA, 304 bp, Zea Mays
gtcgtgtcgattccaacaaccatagcatgatgattcagcttgctacatatttgacaccatagcttttggtcatgacttgaggagccttgatttggtctagtgtagcttccctgcgcccacctcctttgttctatcctcgaccaaaggtgcttcttcctctgtggccatagcttctgccacgaccatatccatgcatggtcgggtttgtagatgagagaaattattgttcttcatagagaaacatattttgatgactctcacaatcgagagcttgagcatacaatccattgaatgaatggctcta

SEQ ID NO: 61116 - DNA, 554 bp, Zea Mays
cgatacgaactcagggatactcaggacttcataagtgctatttggaccacaaccaacttagctagaggcccttttgtgggacctattcttaaagaaacatgaagtattccaagttcaggtatgatcaaaatctacgaatgatcaggagatagggccaaaccctacctcaatgagagaagcctcagtctcacccttatccagctcctcaggccattcccctatcagtctgcattgccaattcagctattccaaattaccacgacaaattattggagaaatttgcaacttcgtgttagataaatttagacctctacattaaatataagatcaatttatttctcgaaagcgcaggagagctacgcaccatcatattaagaaaggaaaggtccaaaatggaccaaaatacaaagcccggagggcagaaaacaaaaactggacctaagcaccaagatactaactcccatgcctcctctccaacaacataagaggagaaccagaagcaaaggagaaggctgactagaccctatttaaggcaacaataagcccaaactctc

SEQ ID NO: 61117 - DNA, 315 bp, Zea Mays
ggggaatggtcttcacaaacaccgactactgagggtagataccaccaacgagataatacccttggctgtactcgtcaccattcaacgtgaagttcatattttgtgcttcaccattgagcacgccagtgaacaacaacgactgtttgagcgcgttgacgtcgttattcgaccccaacgtcccaaaaatgcatgccatatcaacaagtcatatgagaaaaacacctcaagcatgatcgttggggatctaatgtccccctctgtaaattgccctctctatccaatcagatagttcctacactttcaacgcatgcaatc

SEQ ID NO: 61118 - DNA, 458 bp, Zea Mays
gttggttggttctttgagagtgtggttgggcgaatcctcgatttaggctgccggttaaagacggtggttggcttcgagttttatttgtcaggttgcactagttattgctgcttgcagcaagttatcttggcttctttgaagctagttatctgaagattgatcctacgtcgtgaagatcgggcatcgtgataaatcagtttgtattagcaagcaagctaagggtaatgctatcttttccgctggtattcttgctgaagaagtcctaagggctttgctttattccgattagcttttttgacatatgtatatgctaaaactccgaagctcctgacttcgtcttcttgtcttcagtatatgcatgctctcttcagcccaaggtacccttcggcattctgacgtgttaaccttaaaacagtcttaccaatagtttatgagattacattttaaggaccttcagc

SEQ ID NO: 61119 - DNA, 625 bp, Zea Mays
ggacgaccgataaaaccagtgctttaaaatagtagcgactataccagcttacctaccaataaaaactaggactacgatactaccactaccagattcgacaaatgacctaattcttgttgcattgccttcaagggaataacaatgagaaaagccaaacaatttgatgattacttagtttattacgactcggtatctatttaaaacaggaaacaaatcagtagcatttcaactaaaacgtagcctcttcactaagcatatagaaatcatctcaggacccaattaattttaaggtttcgaaccttgcatcatggatccatttgtcatatagaaatctgcttcgcttcgtaaccagatttcaacacctgaacacttgtaaaatggttttggtacgtatctgtcaatgccattagcaataacagaacccttctcaaccatttctgacacaaccacatcaccaagaaatggtcctagctctaggatagcttctttattctagcacacggaacaaaagcaaccaaataccataaagaaagttaagtgcaaccaaatgccatagagaaagttaagcacaaccagcctgcacaccactctttctgaagaaatactacatgcaagctagcacttg

SEQ ID NO: 61120 - DNA, 450 bp, Zea Mays
gcggatagcggtagtcggggtagatggagccaatagcgtcaaaaattctgttcaatctcttctttcctcgacttccaaaggctgtggataatgcattgtcttccgccttggaatatgatccaagcagttcatcacttgtaacttcgatgcatttcagccagtcatcgtttggttcatcgaatttatcaccatatttgaatgtgtacttcagccagactagttcaccttcactagattcggtgatggtctccttcagcatttcctagctctctacaagcggccatactctgaatgctatgtgctcttgaattaaatctctcctaccaataaagaagaagacagtaccaaatgccttctgacatgcttcggcggcttcgtcaatttcaaccttcggccttcggaggccgaagcgggaccaaatggggcgcataataacttccttaatatctt

SEQ ID NO: 61121 - DNA, 714 bp, Zea Mays
gttggacagtggacactgcataagatgtagggtataaaggacatgaaatgaatcaaaataagggctcctttggaacacatgaatttcataggaatcatataggaatttcacaggaatcagttaccgttgtttacaattaccgttgtttacgtgaacggtggcttggcatgttgtatacttaatatatctatctagcaaatacactgtatgtttgcttatgtgcaagtttttttgggcattaattaatgcctttgaaacaaggcaggtcgaccctgtctgacactttgggtttcaattcacgatggagctactgatcatgttcatcatggcgcgggggatgatggcggctgggggcacagcctcgcctgtggactccccctccccctcttaatagtagcagagatgagggcaaatattcaggaccagtttgaatcgaggaattatatagaaatttaattttgtagtgaaaccgtaagaatggggaccccacattccaaacacacctgaaaggtactgtaggctatagtaatatagaatgtacttatacatatataagattaaataaattaggtggggataatttcgacaagtgtcgtcaccacaacaatacaagaattcggaaatcggactacaggaggtgccagagtggccctgttgttcatgaagttttttgttggacaaacaatttaaaacacaattacaccactgttttgc

SEQ ID NO: 61122 - DNA, 337 bp, Zea Mays
ggttccttcttagggtcattgttctaggatttttctaagttctccttgtttttatgaaataacatgtggtgcattttctttgtactaagtgagggttcaacaaaattttcttatgaactatatcacctaagcaagctagaaaaatgtggttggcctcaggttctcattttaaattcccttcctcattttcttaaggtttgggccaaaacaagttttaaggggtaatctttccttaacatagtatactggggagtttaatatttttgaacagtgtagttaccagttaagtatatctccaaattttcccagccccagtctaaaagtatttttatttttc

SEQ ID NO: 61123 - DNA, 932 bp, Zea Mays
gatggccgggggcttggatgcaagagtggttctatgtgaaaaacaacttggttgaaagggaagatattaatgggattatccaacgccctatctggtctcgcttcggcattaggaggtcatccactgcccttgggaacgatatacaagcctgtcaggctgcctttaatacagtatgtacttacataggcaccagggacttagtccagaagcatattgcttatagagtgtagccgctcggaagtgggtgggagatgccgaaggaaactgctgctgggtccagcgaaggtggtttggcctatctgaaatacacattcaagtacaggagccaattcgatgagccgaatgatgactggctggatgccatcgaagcaaccaatgatgagttgtttggtgcttactcgagggctgaagatgatgccatatcgacaggcttcgggggtcgaggcaaaaagatactaaataaagtttttgatgtcatcgggttcgtatatccggattactgttatccttcgcgaaagcaaggaaagaaaaggaaaactgctgcttcggcaatttccagcacgccaaagccgaagaaagctaaggttttaacacaccgccccaagcgtattgaaacggccgaagtgtcgaggcctattgaggggtcttcttctatatctaagctaagtcgctctgatcctaccaaagctaggacaaaattggccggagagccagaactgaagacgacatcggagcaaccaaaggctttgagctcgttgcaagaaacggagctgccaagggtatcaaagattcttgcagcaactccaagaaggaggagaatggccagcatattagatgatgtgatggagtctgtgaaggtacaaactcccgctttagcacctgacacagagagcgaaaccttaaagaaatctgacgaagctggtgtggcgcgg

SEQ ID NO: 61124 - DNA, 527 bp, Zea Mays
ccgcggagcgccgtggaaagccaaaggatcgactggaaccattgtaagaaccccctatccggacccatcaccttctcaatttcgtttagcgttccgtaccctagagaaccatgtaccgttggggtttgcggggtcgtcggccatggagtgccgtcgtatggccctgctcggccaccggagtttggcttgtgtaggaggctgggttatccaccgtcggtttgggaatgaacgggtatgattgagtctggcacatcacttgggcagtttgatctcgactgtgggttatcgatccatcggttccctgggagatctggtttccgtcgtcgatctggggatcgacggtctcggttcaagcacggcagtcatcctagtgtgttaatcgggaccctagatttctaatcgggcggccaagagcccttcataccgtttcagctgagctatttgcgttatagtcctcggagtttcatggaaataacccgccgtccatcgccgctattcactgtgtcttaggaattttaccatggagc

SEQ ID NO: 61125 - DNA, 312 bp, Zea Mays
atgaccttcatatttgtttaactgattcagtctgtcatggcgtattgatccatccatctaagcaaatcgactctttcatgcaaggtgtttgataaggctcgtgccttcaattctaaagcggctgatctacagactacatgcccttgcattgcccatctcagggcacccttcatctgggatattcatgaatcattttgctctagattctgatggtcggactagatgagtggacaaaagaacatcgaagtatgttggatgcactccacctatgtggctttaacttgagtggtgctatttacttctcttgcttat

SEQ ID NO: 61126 - DNA, 795 bp, Zea Mays
atggagaagcctgccacgcggaggtgcaggtcagcggtggcataaaaccttcggtgagaaatttttccgcgccaaccgaaccaccagtccagacgagcagcagccaaccactagaggtctcgtgcgagcacccggggtccactagtgcacttcgatcggaccctttggcggagatcccagacgcgacggcgcacgatcatacttccctcttcttcttcgccgaaagtggagatgggcaggtagcctggatgacaggaagtcccccccgagagtcccgttttatagtcctcatcaggagacagagtccgcgcggggaccaagcttttcccccgacgatagcagtggccgttgcaatgccacgcgatgagcggcggtctggtaggatttggggaggactcagctgatgaccgggtcccacccgacaacagcgggatgaggcggacgaggttgacacacagccccgggtggcaatgtgcacacgcggcgtggagagaagaaaaaaacgaagaggtgggccacagagaaggaagtggaaatggggatgtggggttgacagttgggccccaattgtcagtcttagagcaggaacacagggaaggtggcacgggttagtgggccgccgggagaacaatcgacccagtggccgaattcgtttattcttttctttttctattttttttattttcctttttattattttattttgaattccaaacttgaattcaagcttttgtggcgaattttgtactcaacttttatgtgtataatttgaacatactacttatagaataaatt

SEQ ID NO: 61127 - DNA, 434 bp, Zea Mays
ggcgtttcgggatgcttcccgcgcttagctcccgtgcgattccatggctcgcggctcaatttggtttctgcgcggtccgacttgtctagttctgcttgcttggttagttcttcgcggttgcggcccccagtttgtgcggtgtggcgttggcggaaccttgtggaggctagttgctccaggactttgatgtgagtggattactgaataattttatttttatgctggaacatttgtacgcgctacgcggtggctttcgtgtcaggtgaaaaggttcgattctgcttaaccgtggccttcaattactattctgacggctttagcagagcaatttagtagtactagtcattaatggtcccaaattagtatgatcgttccgatttcatggggtttcggtatttttcggtggggatttcgtttctgcttccataactcgg

SEQ ID NO: 61128 - DNA, 2131 bp, Zea Mays
cggggagtgatgtcgagaggttcgtcgcggcaatggagcgcctgggccttcccagctttgccgcctctgaccatgacagggtacggtattctcccgtggaccaccaactacttccgttcagcagcagtttttccatatataacaggggccgaaaaatttcggttgggtttagctatgacttgagacttaaagagagagtatgatagtacagtagtaacattttggaaaatcgtctgttaattcagggtggacagggatattacacgtgattgcagcgtgttacagtttcaaatcgaagaagctcggactctgctttcgctgtaggtggttgatgcttgccattgttcagtttgacgattggcaacgttaacctcgatattttctgctttaactgctactggatgctggatgcagctgatgctaacatccaagtctcaatctcaaccagaattttttttccgccaaacatatgagatgtgactccactactcgactaacatataatacaatgcatgccattgctgtccaaatggtttgcatgcactgtacgttccaatgtttgatacattttcctttaataatttcaattgaacccaattcatggtaacaaaattaatgttaactcggtagcttgtggaaattacttcaattatgtcttttttaaatatctgaatatgagcatcagccacgttccagtgtgatgtcacattcaagtattatgatgatgttctggttattaaatttataatatctgaatatggacgtcagccatgttccactgtagtgccaaattcgagtagtatggaggtgttgatgttctgacaataattgtcacttatgcaatactaccgtggaacattcctggtgtctgcagctctttctacaatagaaaaaattatctacctgatcttatttggctggcattgatccagggcccaatgttagctgtcatagtctgtcttcttgcactgaggggtctgtttggttccaatgttggggaaggcttgcattgtagccttgaagcaaaaagtaggatgcacaacatggagtttcccataagggtgaacggctgctgtactcaaaattgtcagtctagagaaaagggtgaagggagcataccaaaggtctccagaagtccagctacgtcaggtgagaagaagtttttacagtacatgtcaagctttcagcagtaacacagagggaaacagagagagcagagcatagctattctatttgttttgcaatatgaaatgtcaaacaaatcatatttatcagtgaaaactgtagttacgaaggttatgatgtgaaggaggttagcttatcagttaaaacatcttttcctattgtagagccatcatctccgatatcaatgcctgaactatcttctatttcaaggcacactcgacataattttcatgaagtcttccatctgagacaaggaatttactctgacatgcctatttctaaagttttggagataatgaaatccaccaacttggatgtaagtggaatatagtgattctttctgaaatgtgcgtgagataatgtcagcccaaattctgatctttttattctttgcatcatgtggaaccaattttacagaatgcccctactcagtcacttttgagttttgtgaatgccatccttgatcggatcattgaaaatgagaatggagaaattccttatgtaggctactcaaaagcaatacagttagttgtttcttttcatacatgagaactttggtacatttttgttttatacttctttcatccccttggataaaaagatagcattctttgcacagaatatcgcttgcttgttgagaaaggtaataatggagattgaacgccgcatttctactcaagcagaacacataagaaatgtaaggaatgctattttatacttatttttcaaattattcttgttgtaactcttacttgtatggcagcaaaatagccttatcagagcacgtgaagagaaatataaatcaaggataagagtactagaggcacttgcaagtgggacaggtggacaaatgcaaataaattcaagtgcggcaaatggaaaaataaatgtaagttctagttttcatttgaaacctattatgatgagttttgttagactcttttat

SEQ ID NO: 61129 - DNA, 567 bp, Zea Mays
aacatgtggaccgtgccaagaatgaggaggctgacgcattggccaaggcagccgccagaggcgaggccctgccctccgacgtattctaccatgtcatcggcacgccagccgtccgcagctcagaggggctccaaataaccaatgacagcgagggccaccgcatagtcaacctcatcatgaccgaagactggcgggcaccaataaccctgttcctgcaggggtactatcatccaatcgatatcaatgaggccaagcgcctcagacatcgaagccgggacttcgcactaatcgaaggtcagctttacaaaaagggggtcagtcaacccaagcttaaatgtgtcaccgagaccgaaggcgtccaaatcctgcgcgaagtccacagtgggacttgcggctctcacgcagggcctagggccctagccgcaaaggtgatctgtcaaggtttctactggcccgccatgatctgcgccgcaaatcgggtcaccaggtcctgcgaagcctgccagaagttttctccacactcgggaagccattcgcaattcacaaagctaatcgcccacacgtggc

SEQ ID NO: 61130 - DNA, 599 bp, Zea Mays
ccgacgtgagtcggcgctgcgagctgtggaggcggcggccggagaggatctggggtcggtcgaacaggtggaggaaccccgccatgcagccctggtgcatgggccgctcgtccatccgccgctcttcgtcctcgtccacgcccatcgccaccatcttgcaactcctctcgcgtctcgccttcctctgctgccgcgcgctctgggtgggtcgctctgttcggctcccgcttttgggagcaatttaaagcggtggcgggggagctccgaatgacgatactaccccgacacaagttgtgtaaatttcggagtgccactgtatctcgtcgtcgacgcgtcggggtacgatacgagcgggcggggaggcgagaagttgccgcctgcctagggagccggggcgtcgtcgacggcatagctggccgttctgacgatgacgcgctggccccggtgtcaggcacctttttcccttatttttgtggtttttttcggcggcttgtttaaaggtgtgtcagtggagctcgtgccgtggtgcgtgcgtgcatgggttcgctggctcgttcggctttttacagctaagctttgggtgggtgggtgcgtgcgtg

SEQ ID NO: 61131 - DNA, 345 bp, Zea Mays
aatatgctccctctcatagacgaccaacttggcgtgttgtggtgcgataggttggccatagaacgcaatggggccgtcatcttgatgtagcacaacgctgaagcctgtaccagatgggtcatagttgacgatgaatgttgcgccgaagtctgctagttgcagggtgcggttggcgaccaaggcctgcttgagggcgttgaaggcctgatcggtggcgacatcccaaaggtaggactccttcagcagctgtttgagtgggtggacaactagatcaaaattttgaatgaatttgcggtagtaacccacgagtccaatgaagccacgtaaacccttgaccttcgtagg

SEQ ID NO: 61132 - DNA, 482 bp, Zea Mays
cgtgctcgacctcaattcagccgggaaggcccctaccagatggtcttgtgctcaggattgtggatattggctggacctgcactgctcctccagcaataacaactccttcttgggattctcgtggcgcttactttcattcttttgctcgacagcaatgaggtggttagtgaggaatatattcagatttacattcgtcaggacatagatggtaaaatgttggcaaagagtggggagaatgaaggaaaaaccgaggagagcaggaccataaattcactatttattttttatgtttggtattatcaatccatgtcccctgaatccagaagtttcacccaagagataatctaaattcatggatcgaatgctaaggggcattatgggttgttgtattgtcttatgtagtttgttcattttattatgcacttgtttatagtttagacagtgtatctggtgtcactactcactatattatgatgttccca

SEQ ID NO: 61133 - DNA, 423 bp, Zea Mays
gttgtgaagcatctaggccccaaagtgatgttttggtaaataatgacaaccatttgtggacaaatgaattcttggagaaataagaatgcaggttggaccacaaggagaagagctctactgaaagtcttggagacttaaaacgttggtcgtggaatggattaaggcaagggtataacatagatttttacttttgctggtcacaaggtgtttagagaagaaaattgaccagtttagtaggctagataggcgtactattaagaggggtcaatgacaattctatgtgtgaaacttagtgcctcatagagcatttagatgttacatttacatgagaactaacaacgcttccgatttcgagagttaaaatcttttcaaaagcgtgtttggaaagggagctaaaagcctgtgtcgcggaccgtccgcgat

SEQ ID NO: 61134 - DNA, 975 bp, Zea Mays
ggcagttgtggcccgtcgatcgactggaggagaggagaaacgtctaccctggaagcagccacccttgtacgaaccctgcagcaccgagcctggggtcgggcgtggcagtgctagacaatgggggcctagtgaaccgaaaggaaaacactcgagtggatcccttgcccggcccgagaccgacccatcatatagtgactggccacattaactacgcctagcgccaagccacagaagaggcatcggtccgcctcccactcatggcctatgagcccctcgggctgcaacgcactcatagcctataaaccccacggactgtggcgaatttatggcccacgcgccccatggcttgcggcacaatcatgacctatcagaactaggcctgagtgcgcagaccgcttacaaggcacaacaagacaaagtcgtgccaaaccctaggctacggaggccaggggtcggtgtagctcaaatgatggcacttaggccccacgctacccatgttgtccgctataaagaataagagacaaccagacgaccccgaggcccacgggtgcacgtggcttcacaacatggtagaatggtcggttttaccatcacccggtgactccttcttgaggaagccatcgctagccgaccccctccttggtcgataaaaggaggagatcgatctccaaacaaaaggaggacaatgagacaagagaagatgcatagaggacaccgagacaagggagacacccagacaaacacctagatgtgaagatgacggaccgacgaaggaaggaggacgtattgacgaggacccagaggccggagctccgctgtcaaaccaagacttagttaggattccactttgtaggccttagcgccacctcctccacaataagagacttgggagcctctcctcccactctcacccgcttgtaacccctactacgagcattgatcagcaatggtgccggtagcgcaagccaccaagac

SEQ ID NO: 61135 - DNA, 477 bp, Zea Mays
ggaagagattttgatcgatatgaatgatgaattatatgatgatgcagaggaggaggagggggaggaatcggagggcaatcatgtgtcaaaggctcagaaggcaaatcgaggcagaaaaagattgaagggttgtagtcagccgtctccttccaaagataaggcaaagagaggaaagcgtgctggttgctggaagtattttaaggagatccatgttcagtccaagaaggagtttggggttttggtgacaaaagccaagtgcaaattctgttataaaagctatgcataccatccaggggggcaacttcacagctaaaccgtcatttacagaagtgcacacagttccagaacaaattggctaaggcaaaatctcaacttcctcaaggtactctcacatttactgcaactgatggatctattattgttaaccctaatgaatatgatcatgatcacactagactattgattgccaagatgatc

SEQ ID NO: 61136 - DNA, 621 bp, Zea Mays
ggccttcggaggctgccgagggaccatgcatcaatgctaagaaaagaaggcactaccgaagaatccaggttccctgcccccggagcccctgccgaggaattggatttcatagtgtgtcacgcttcatggaaaaattatcaaatgagcaaattgccaaggatctgcagtaccctcgagggtccttggtgtatggtggggatgatgaagatgacttcctttattgtctgccagacaataaagagattcatgtctggcgagagatggcagacaatataggatatgcgaagcttgagttaggtttgtctgtaatgacgaaggaccaactcgcagatagccttgcctagaatagtctgaaggtgggaacactttaacttgttaaaaagcagattatttttttagtttatttccttttcaatatgtgctcattgtttatttttgtagggcttaattctgagcatggctttgaaggcccagaagaaagcagaagatgaaagctgtcagctagcgcttggaaatctttggtcagaagccattacactaaggaatgaagctcttgaaaaagacaaaaatctgctctccttagtggataggctgaaaaccagcgaagctgagctgaatgca

SEQ ID NO: 61137 - DNA, 407 bp, Zea Mays
gcaccaaaaatagaagaagggataaccacatattaccatggtggagagggatcaaagaagcgagcagccagattcacagcgaagttttcctccccagggttagcaggaggagtgttaccagttggatcctggggggataagaagaagaggggcccggatcaccttggtaaggaggaggggcgaactgatccacatcatcagcaagaaaatcttcctcaacttcttcatcatcagaagacacaaatgggacaccataggcttgttagtgccattcatttatatcaggaggtggtgcatgaatgggcacatcaggggagcaagaagcaaatgggtgacccatggagactgactggcagcgcagattgtcatcaatctcctgttggcgcctagccagctcatgcacatca

SEQ ID NO: 61138 - DNA, 765 bp, Zea Mays
tcgtttcgcgttcctattcctccatataaataagcacttggagtcgattttgcttactgttctttctcgactaatctgctattgtccccgtctctcaaagagcccttagcatttttcacgttagctccttttccgcacccctcctttctgcctccatggtcgcttttaccctacgcaccaccacttgaaggcgtcttgaggacctagagaggaaaggggttctcccccttgagtcggtttctggctagcgtctagaggagggacgtggtgctctggtacctcgcgatggggaggtcgtgatgctggcctccttttacaagccaagcgtgacttcaggcttcccttacatcccttcgtgcggggttgctcttctactatgggctggagctgcagaatctccatccaaacaccgtcctccacatatcgtgcttcatcatgctatgtgaggcctacctcggcatggagcccattggaagctgtgggtgcacctgttcagtccgtgggcgaaacctagccgaggcaatcaatcttttgttggctcgttcaatatccagcttcgaggcttgcgcatgtcctacctctcgatcccccttccgtccttcgtttgaagtggtcagtggttctatgtctggaaccttagggggagcgctccaccgttcacaggtcagattccggtgaacaaacctaagtggaccttcatggactgtcgactccagtcgctcacaggccacatgtaacaccctaaatttggtggtataaaatttc

SEQ ID NO: 61139 - DNA, 669 bp, Zea Mays
ggctgaatatcgaaagtccatggggtcttcatatgtgtgcatttgtgctagatgagtaatgaattgaacagtaacatgcagatatattgttatttatgtacaagaattagttcagccttaaaatccatagaaagatttagtttatggcacacataatggtgcttttctttctaccagatttctagtagaaatacacttgctgcttcaaggccccattactatctgaattcattgttgattgacgggagcaaagtagcagaccagtttgggtgttttggtcagttttgtggctaaatagtgttgttgtttatattttttattagagtattttctcggtttgcaattgaataggttttcaaaaacagaaactctgttgttcattaaatatgtttgaaatttgaattggttaaatctcatcctagcataattctaccagtatcgaaactctgcagttcattggttaaagcccaatgcataatattctgaaactctaaatgctataggtttacagcatctgccgcccctgttcaggttcctgcacgatccggatgttcccggtcagctgagtctgcagatcagaaaatgctctctgtctccagtgaattgcggtgggatggcaggataggaaaaaggaaagaacaagccgaacatgaaagtagcaacgtcggg

SEQ ID NO: 61140 - DNA, 392 bp, Zea Mays
gctgcagctccaactccggcgtccgctccgctgctccagctcccaacttccccccgaccaggtccagtggccagccggccaacgaaccagtatccgctctaacttcgtcctgtgagtgaatgtgtgaccgtgtgtttgcaggttgcttattggattggatgcaaggctgttggcaggctgtaggcgtgtaggaacgccggggtttgcttgttggattggaagtaggtttgcttgttggacgtgtagggctccaggtttgcttcttggattagatgcaggtttgcagtttgtttgttggattgaacgaaggtgcagtggcagtgcctagaccctagtgcagtttgctcaagagtcaagttattcaggttctggaggaaccgaatagaccgaac

SEQ ID NO: 61141 - DNA, 872 bp, Zea Mays
tcagttacttttctatcgcaaataattagtagaaaaatacatgctttaatatggtaaaatgatagttacacctgatgtgttatgtttgtgtattaattatggtgttcattttttttctacattaataattatttcccgtagtaaataattagcagaaaattattaaaatgtgtgtgcagactatattacgctgactaaaatcgctctaaatatttatgatgtgttgagcttttggactcacgtcgagcgattaaattgtataatgggtactcagacacgccgatcaggctgcgttggtaatcggctgagtcatggcattagctgaatattgactgcgccatggcaatacgacgcaatatttgtgtcgttcgaacttggctgcgtcatgtgattactatgtcgcgctctccattaatcggatcgctcccgttgagtcagaccgccatcgctgagtcgcgtattttttgcatgccctgtaggcattgtctgtctgccgcgagccacggttgtgcctgttgcgcacgttacgtggatttatcgtgtaccccaattaccgagccataattgtgcctgttgcgtttattacgaaggcttgctatattgtcgtagccctgatggccgcacacgtgttgacgctagatacgctagagcttgtactcgcatgaattgtggtgggttattcaagcccctaaagtcacattatgcgcaaccttctcgtaaacaattttatttagctctatattttatttgattgtgttgtgtggcattatatatttatatatcaccaagtggccataacaactatatcaagctctatagtgcttgaataatctgggaaactaaattgaaatacaacagaacttagataagtt

SEQ ID NO: 61142 - DNA, 503 bp, Zea Mays
aatttatgcaaaatttcattcatatatgtaatacaatgtgcttgatagcacaagaaaatattagcatcaaattttatacatatattttattcttatatgttagcgttctcgtagctgccgctctagcaacaaaccccatccatttcgcaacaaccttcgtccgcttcttccgtcgttgcaccgccatcggcgaggaggattagagcgctcgccttcaaataaggatgttcactaggtgataaaagttgcatcgagtccagctaactctgaacctccgcgtcgcccctagggaccaggaccccgtctcttagctcactcgtcttccgcttcagcgcgagctctgctccgctcctcccatcccatgggcaacatggcatcaacggtagatctacctagtgtgcgcttcatttggtcactgttgttctcgtcgggtctattattgtagagaccgctctaattgtcgtgtttttcgcaggggacgtccacatacaaggacacaaact

SEQ ID NO: 61143 - DNA, 796 bp, Zea Mays
ggcgattccatgctcaaacattgttctagcaccgttccaatggcccaatggtatctgaagcccatgcagagcgatatcagtaaaccagaaggggaaaaactcaaaatatagaaaagacggcccgtagattcaagataagcccaagtaaccatgtttcggatgtggcccgataaatggggcaaacagcgttgaatttccaaagttggcccatgagttactctaggtcaaagactttcagctcggatagagttaatcatgcgattggtcctcagacgttggatcagcgtaacaaggtgttcaccttagatcgcgccgcctccgatcctccgcgactttcattctagtggcattttacgtctgcgatgccatgttgcggtgtcgtgcgatcgagtctggcccctacgcgcactagtgaaattcacaagtctccatggcgtggccactggccagggctaacgactcccgacaacggtagaggcctgctattggtgaaggaaagccggcatgtgatcccaagcgcatgcaggcctgagcagcgagcagatacgatacgatgtaccgtaccgcgttgccttttttttaactttagaacaggggagatagagagcacaccgataaaaattggaggaaaatatatataagatcgaggtggcattcctgccaccccccccccccccccgggcagtccatcgaatcgaagaagaatatgttctggaaggaggaggccgggtcgtgacgccaaggcatgcaatgcacagtcagactccacacgcgaacatattcctcacaatattcg

SEQ ID NO: 61144 - DNA, 595 bp, Zea Mays
caaataatcaccattatcccgacctaacttaagtcacctctgcaaaatagacgtgtggcataataatagtgtagtcattaatcaccaaaacctaactagatcaaaataatccaattagtgattcttgtatccgatggcacaagcccttcatgagaatgcttcacctcggtgcaagctttctgagatgccatcgccactttgaactacatcatgggtttgaggcccaaatctaacaaatagtttgttggtggttttaagatccaaaccaccaaacccagttcgagaagcatacatgctatgccactctcatggtctcgacacttgtcaccacttgtcctcgaccacctaatcaccaaggtcttcatgccattgcttgacttggtcaaccattgccttgacatggtcaacacggtctactcctccacatgcacacttggttgataatgtctctacttcacatgcatacttagttgattatatctccaagtattagccacccatgattagtctttcagccctgagtttattagttcaagcctcacatctgtccttcatcgcgtcaatctacatagtcgtcaacttttttttggttagt

SEQ ID NO: 61145 - DNA, 1127 bp, Zea Mays
ccggtacaacaagatgaggttgatcggtggcagtgtaccagcatggagagccgtggcacacacacgacctcgtcctagagcagggggcataggcctcccagtctactccaacacgtatccacataaaacattgtatcataggcatccgaaacacctggcacatcctcgacaataggcactaggaaaaagaagaggtcgatcaacaatgtaaaagaagacgcgcgtgcagccccaacccacctggggcgggttcagacaccttcggacatgagatctgatagccacaatcccccccgaaggtacgcgcgtcgaccaacatcatcaagtatgatggctccacgaatcccgcgtgtggctggaagactaccgactcgtatgccacatggcgggaatgaaggacgaccacttcttgtccatcttgtggaaggggcaagggcttggcttgagcacctgcctgctggtaccatacatgattgggccaacctctgaatagcatttgttgggaacttctggggcacctacaagcgccctgggagctcttgggacctcaagaggtgcgcgcattagagtggagagaacctctaggactacatctagaggttctcacagaaaaaggactaactcccagacaccacagacgctgatgtggtgagcaccttcacctacgacaccaccaacgagccctagtccacgagcttggatgggggcaactaaagacggtcgtcgacctcttcgacattacgaccaagtttgctgacggtgaagacacggtggggcgatttttcgcaagggaaaagaccccatgacgccgatgatcccaacggtgagagaagggaccgacgggagaaccccgacagacaccggagaaattaccgcctcacgcgcgtcgaggaaggagaagtcgctaccgcggatcggtcgcccagtccaccggcaaagaacaacaacaaccatttccagaagtcgatgcacttgtcgtgtcataatcacaacttccccctccaccacaaacttcgggagtgcgaacacctaaagtgcttcatctccacgcgcaaggaagacgcctcacttcgaagacgacagattttggagcgaacgtcggcaggctcgaggtcttcctcttcgac

SEQ ID NO: 61146 - DNA, 1002 bp, Zea Mays
gtatcgaaaggataccaaagccccggtaattggctatcgtaccatgtggccgaccaggtggacaagtgagtggttctatataaaagctgatgagaaaaagagggaaaattgatgactatggtcatgagtccgatgagactaagcttcggaatgacaatgcccttgtgccacatgcaacttggctccccgtgctagttggccgaagttgaatttagagtggtagctaccgagattagcgctagggacctagtgcaggaatatttggcaaatagaacatttccaacttctaggggctagggatgccgaagaaaaaggaaggtggaaaaaagtatgaacttgttcggctcccctatcgcttcaaatttgagaaatagttcaagaagtcttgcaatgaatggctagaaatgatcgagaccatgtgcaatgagattcttggcaattatacaaagaaggaggaccagctaatgactgctgccttcggtacccgaccgaaacgaaggttgaatagggtaatggatgcgttgaacttcgaatacccagattatgagaggcttgatgaatggggcgggggtgtaaagagaaaacaggttgtcagcatccgaagcaggtaggctgcccggtccgtaaaagaagatgaaaaggccctaaagaaagcaaaaacaacgctagagccaaaggcaacaatttctaagaagcaaaagcttgaccggatgccctctactgaaccgaaggtagacgaagcagcagagaaaacccctctgtcgccgtctgctgccgaagtggtcgaaattttgaaggtaatgactgaatctccaccattcaagctgctaagtcctctaggattggaactgacaaaaaattttacagaggaaggaaatgccttcggctacagaagagaagattgaagggcaaaagaaatggcgaattgtgaatgtaatgcaagcaattgagcgcacgtcaccttcagcttcggcgatgaaagcaacaattcatgcggatgct

SEQ ID NO: 61147 - DNA, 291 bp, Zea Mays
cgggtacttgcccgggtggtcgaagttgagccactgatctgcccgagtgaaggtgatcgggtgttcggaccatcgatacggggcgggaggaccagtggtcgccaccagtatctgacggtcgttgagcttttgttgcctcttgctttcttgtgacccatgtccgccgaagatgacgttgacttctccgtcgacgcacgggaatgcttcgcctcctcccccctcctgctgttggggttgtcgaggttctccaggtcctccttgtggtgggggaggtggcagaggttggaaggg

SEQ ID NO: 61148 - DNA, 521 bp, Zea Mays
gaagaaggctggtgcattggtcaaaccgaaagacatcacagtgaactcatacaaaccatacttggtaatgaatgtcgtcttcggaatgtctgaaggtcggattctgagttgatgataacctgaccttagatcaatcttggagaacatgctggctcctctcaactggtcgaacagatcttctattctgggcaaaagggtacttgttcttgattgtgacctcattcagagctcgataatcgatacacatccttctggtgccatctttcttctccacgaataggacaggggcggcccaaggcgaggtgcttggccaaatgtaacctttctttgacaactcatcgatctgcttcttaagttcaaccaactccggtcctgatactctgtaagctctcttaaagatgggggcggttccaggaagaagctctatggcaaattcaactttccgctctagtggcatacctggtaagtcctttggaaacacatctggaaactcagacacaaccttgatgctctcaattggg

SEQ ID NO: 61149 - DNA, 575 bp, Zea Mays
agaataccatgtttgagccacactcctgactgccatgacaaaggacttcaccatgacagtggtgttgccaccatatgatgatatggttgcttcgtaacttatgtggaactgctttggtcagaatgcccgtcatacatgggaagctatggtggtttgtacaaaggtggccatgaggtagccttcaactctgctgctaggggggagcatcatcaaaagcaatgttaccatgattgaaatcgtcataccatacatcatcataacttgggctttcctaacgaagctctctctgttgtggcctttgtccttgctcgttgtcttgtgtgatatggcgcatctcttcagcaacttcatcaatcttcttctgtagttcagacagccgaagcattttctcccttcttctctccacttgttggtggatagcctctagatctctgatctcttgatccaactcctcttccagtggtgttgggctaatggcctttcttttctggttttgggcctctctcagagggagcccctcttggttgatgtccagcagtgcaagggcagcccctggcactattgccttcttcggc

SEQ ID NO: 61150 - DNA, 321 bp, Zea Mays
catggatcagagcttcatactcggctgcattgttggaggccggaaatagcaactggagggcatatttgaggtgctcgcctccaggtgcggtgaagagaattcctgctcctgctccctgtaatttcagcgagccatcaaaatacattcgccacacttctgcagtctctgggttatctggtacttgctgttcggtccactctgatacgaaatcaaccagtgcttgagttttgatggcaatacgaggtcggaattcgatgtcatgagatcccagctcacaagcccacttagctattcggtcaatggcttccttgttgtgaagaa

SEQ ID NO: 61151 - DNA, 552 bp, Zea Mays
attgttcgcggggtgtaggagatcccatatcccatcaacttaagagccagtttggtgatcatcctagaaatgtccggattgtgggtcacctcgcccaggggaaatggcatcaccacggtgataggatgcgattcaaaatagtgtttaagctttcgtttagtaattaagatgacatgcaagagcttttgtacctaggggtagcgagttttcacataggtgaggacttcgcttatgaagtagacgaggtgccgaagcgggcacacaccttcctcttcctatctttcaacgacgagcaccaaactgaccccctgggtagtccatgcgatgtagagtaagagtggctccttgtccttcagtgggaccaggataggggcccgagtctggaggctcttgaggctgtcgaatgcgtcctatgcctctgccaatcctttgaagcgatcatctttcctcagcaacttgtagagtggtaacccacgctccctgaggcatgacatgaagcggctgagggaggccaagcacccccatgactcgctagatgcccttgagatcctg

SEQ ID NO: 61152 - DNA, 2227 bp, Zea Mays
cttttagagacaataattctacctttgcaaaatgagcatgcatcaaacaggcctgcaaatatgtagctttccttgcaagacggaagaaggaaataaagttccccattctgcatgctctgaatgtataggaaatgtaggcattagatgaaagctagtacaaatatgataagcacaaaataatgcttaatggtatgactaccttgcaacttctcttgcaaacaagatctctggactgcctctaatttcacgagacatcttagcaagatccagagataactcagcaggttcaacctaattcagatgtatctatgagtcagcaaatatcagaacgcaaaagaccagatctgctcaagttgcctcaccttgtaaccaggatgtttgtctaacttgagcagtgcataataaccccgaaactccttttctgttgagaagagaacaccttctctcctatggtcatcatacatttgaaatagctcaactgatgttttattcatctgctcaatgttgaggtgtgcatcaaaaccctcggaaaaaccttctcctttgttgtattcacataattcatgcatcgcaattatgtggagccttatctgctcaacaaaagacagcttcaagatgaaacattccaggaaataagggtgcccacagaataaattcatagtggctgatgaaataaacacatgacaaaatatatatatatatatatatatatataagtaagtaccatttgctcaagcatagaaaatagcctcttgattgaagaaatgttgcattctaagatccattcttattgctcgcatcctatcccacaagaagttgtataagcccaagaaactgtcatcatatgtgtgatccagcaaactaagaagatactccattgtcttctgtaaaattggcagaggccttatcaagtctgcatctctctcagcagtcctattatactgtaaacaatcacataatgtattccatcaaacttcttgttatcagtgattagaaataattcaaatgaaatactgtcatactgccagcttacaaggaatgtagtatgtacctttttaacagcgagaagctcagtagttaggtttctgtctccgtccaatctttcatacctatcaagatctccttttctctcacgctctgccctctcaggttctaaacggaaacaaggatatatatgcaaaagatatattagttctgtatgtttagaggaaggtatatagaaaaggcaatgtgaataactaaatagtatcgtgtgaagacgatctaaggaagaacctgggcacatatcagggcaaagcccaacaattgcagccaaagctgtggaatccatgtcaaccaaagtattgtcatcggtgtcatcatttgttctcaaaggagttcttcccactgatgtggcttgtttggacttatctgcagagcttttaactgttttcacaaaatcattagtattttctactggcctgcttaattcaacatggaaacgagccagacgcttggcttttgcttgttcctccctgcacaaaatgcttcatgagtaacaccaacaggcaacatacctaatcattaataaaaatattgttgcaaggagagaaaagtgaaaagccatctagtggataataagtacctctcaagttcagttgaaggggtcaaatgatcatcagcagtagcatccaaagaagagatccctgttcttctggtagcgctaagggtagaaggctttggtggagaaatagctaacgtgtttagttcattggagtctgaaagatgagacatctgttgtgatggtgaacatgcaccaccaatgcgtgattgtatttgatttctgaacttggaaaaggatgcatcagacctgtaataattgcacaaaaaacaactattagtatcaatgatcaaaaggcacaataagagctctcactttttttgctaactactgctgcatgttaaaatgttatgactacccaaaatcaacactctaaccaaaactaacatgaaacgaaacaaattcaaagaaaaaaaagtattacttctggacatcagcatatgcatgaagattctggactgagttgttgctgccaaaatctacagatgatgacctgatattgcctctggtatctgatggtggtgacttgaccatgcgtgtgaactctgatgcaggtgatcgcatcctttttgaggcttcaacattttcatcattgatggtatccgaatagtcaaccagtctgcaaac

SEQ ID NO: 61153 - DNA, 1274 bp, Zea Mays
aaaaattcaaatcaaacattatgcaaacatcatcgtcacatggttattattgtaatcatagttaagaagtttcaacgtctaatcatgaaatcaaacttattacaatatgacataactctagagtagcctcgtgatagatcctggttctccatagtgaaccctcttgcagggcggggacacggcaatggcagggacttgggctttgggtggattccttccttcaagctgagcttcgggggatgcaatcctggcgtgagattctttcagttctccatgtacccttgaaagatctagggtagcactgtccaggtcagtgttaagacgtgccaccacacctacaaaggtgttgaggcgatcttctccagcttcacctagaacaacactagtgtggctttctccatgaagatgtagaggaagatgtctatacctcgtgtcatgcagctactgccggtaagtgtgactgagagaccatagggctcgcctagtagcattgctgaccgaagcagcgtaggtagatcgcggcgtcagagactcatgggttgatagagtcttgaaacctctatctcctttatccatcaccctgatatgcactccagtgatgtagtagcaagcccagggaggctcagacactcgccttgtgtcatacaaaggtcggacgtaagttcctagcgcatgcagaacatcctgcaacaggttagagaagtgtcccgtctcgaacattgaagtgtaatgctcagtgataggctatatcccaacgaagttgtcttcctgctcatcgttggcttcctcattgttgatttcctcttcttcttttttcatcatcttcatcgtctccaccatcactagaatcatctggatcgtcgcctctaggagcaagagcttgggctgctggtgatggcggtgctgaagatgaagctccagctgcaaatgctagtgattctgacaacgggtgagtgtcgccagaatctcctctgagctatcctccagaatcactccattctccacacgaaggtgatcgagatccacggggacttcctctactaccactaggtagacaggagcctgccatggcggagggatatagttggtgttcacacgggtggtctggatagttcgcaccatctccaaaagaaaatgtcatcttagttcaaattttaaagaggtaagataaataaaataaatttgtaagagcaaaataagcatattttgaagagactaggctttccatttctaactagtctaatgacctagagttagcatagctctgataccac

SEQ ID NO: 61154 - DNA, 510 bp, Zea Mays
ggggcatagatgcctggaacagaagggagcgaacaacattattaatggaccgaatgatgtgttcaactttaccgttctgaggtgaggtgtagggcagtacatgcgaaggtggatgccctggcagagaagaaaggtatgagcactggagttgtcaaactcgcacccgttgtcacactggatgaccttcaaagtggtgccgaactgggtagaggcgtaggtaatgaaggtcgctagcgtgctgaaagtgtcagatttaacacgaagaggaaaagtctacatataataagtgcaatagtcaagaatgaccaaataatatttgtaaccagacacactaaccactggagatgtccacatgtcacattgtataagatcaaacttattaggcgcacgagaatgagaagcatggaaaggcagtcgaacgtgacgcccaagttgacaagcatgacataaagttgaacaatcctctaaattgaaagtgacacttgatgcgagcttcgacagagcttcatg

SEQ ID NO: 61155 - DNA, 513 bp, Zea Mays
acatatgagttctgatccttagaatcctaatgtgttgtgcacttagacaaccatcgattgcttggtaaaaattttgtactctagtatttgtttgtgcatcaccttgatgatgtattgatatttggtgtgtttgcttccatccatcatatggggtggagatggttgagcaccatgggacaggaggacccaaccaatcaacctcgaggcaacatattctagcgcaggaggacaatcccatggatggtgagagtatttcatttcgatttctatgtaatgctattatgcttgtgattgtactaagtccatgattcactcatgtaagttgggtaaatttgaatctgtgattgactctagggagctaagacgtcgaggacaaagttctatatcatcggcctcacaggcgtctaattctcactcctccgcctaggacatggagattgccaggatgcatgaagttataaggcagcaagctgagcaccaaaggtagaacaatgatactatgtgaacctctag

SEQ ID NO: 61156 - DNA, 591 bp, Zea Mays
gtgactgtaggctgacggtaaaagttatatactagagcattgtgatagataatagtcgatgactatcaatagcgtggtcgatagtatgatcgattgatgatgtgatggttgataaaattcacttgcactagatcgagcctaagtacccatgcaccttaggggtatgtctgagtagggtcctgttatggattgaacatgtgggcactatgcacgatgctgactagggtcgcacgagtagggatggcagtgtggcgagtttagggtgggtcctggtggggccagggacgagtctgatatccctccatgggaccgtgactttggggacccaaattgttgcaggttcccggcgatttttgtctcttactcgcgggtgctccacgagccctgaatccctcttaccctagctgtcgcagcctctaacctatcgacttttaacttgcagaggtgcacagactgtagacgatattctcttctcccgctcccatccagggtctcccctctcctaccgcctctcctcccaccctccctacttccctcactcgtccgcttcttctctcctcctcacccaatcgataatggctagtgttgtca

SEQ ID NO: 61157 - DNA, 759 bp, Zea Mays
cgagctccggcgagcctacaccggccgattcacgcaacgactggtgttctactttggcttagacctaattcaagcactaacaagtgtttcccctcaattaatttcattaacggagctctaacacgctgtgtccatggtgacagcggacaccacgagcaattgaacgcgttcccggcgatctaaggggtcctagtccaattggcggggtcggggagcatcaggagaacctaaggatgctgagacaagagagcagggagcatgaacagacctggaatacgttgaccacggtgagggctctaccatggtgacggaaatagaattgggggaatgggaaattggagagttgtggtggctaatcggtggtaggagcgggtgctcaggcttggtgacgacccaacgcagcagaccgtgccatcaatttattgtgtgcttgagcggtggccagtgaatttgatagagatgtgcgacggccggaaagtagggatgagtcaccggcgcgttttatcgtagcactcaccggctgaggggctacggcggttatcggcgagctggtgcggctagtagcaacgtggttaaaggcctggggcgtggcacaatcgcggtgaaagacgccaactctggtgacggccataaagccacgtcgctggtgcaagtggtcgaggaacagcgaggccacagtaacttgaacccatccgcgacgagatcttttcacaggtgagcgaaatccactcgcccgaggcacgaatcgcgacagccggc

SEQ ID NO: 61158 - DNA, 636 bp, Zea Mays
atgacatctcatgctggttcttatgattgtgcatttaattgaatttgaaatccaaaaccaaatttgaaattagatttgaaaattaaaaatgagaaatggaaatgcacaagaaaaaaagggaaaacagttttctcctactgggctggctacctcacttttggcccagttctctgcaaccggcccatttcttctcccgcactcctccatttctccacgattgcgcgcacttacaccaggggcccggtggccagtctgttgacgtgcgccgtatcactgatctatgggacccactcatcaggacctcccccttcctcgctcggtctcgaacagaagccgtggacgccgccatggattcttcacgattcttcacctgattcaatgcctatctgatctcttcccgggttctctcccaagatccatgcaccgctcaaccaaccctcccctgattttctcgctgccagtccggattgtgcggagggtagctaacaacttcaccgctggccgcgcggatttaacaaacgccgcgcgaaacctcgccgcgcatctcggatccctcaaccggatgcatagcgatcggtggggaagggttggcactgaccctgggtataaaaccggccccgcagccccccctgaaac

SEQ ID NO: 61159 - DNA, 670 bp, Zea Mays
gactccttcagtccttctagttcaggcaagtactgttcagtgactacttccttctcggatggggacactaactttactgtcctcttgtcacaactgacattggctttgtttctgtgcagccaattcatccctaggatgacatctaacccttgagtgcccattactactaggttagcagggaagtctatcgcccttatttcaatccttagattcggacacatcttatcggactgaacttttctcccaactgaattaactcttaaaggtggaattattggttctacgaagatgttatgtgcttctacctatgatgtagaaacaaaagaatgtgtggcaccagtatcaaataatacttttgctggataggattcgactagaaacatacctactgccaggtcctgagcatcctggattgcttcggcctccatgtggttcacctttccatggttgtaggcctggccacgacctcttggtgcttgttgtggtgctccttgtcttgctgaagtgttgaaatatggcgactgctgagttgccttttttgggcagtgtttcgcctagtggtcttgttccccacaatggaaacatgcgcggcctcctccttgcgctggagctacttggttgttctggttggttgctggggcaggaaggcgaggtgcctggttgttttgac

SEQ ID NO: 61160 - DNA, 334 bp, Zea Mays
gtgacaacttcagcttcttgagcaagcccctctggcctaaatatatatgctttgactcaggaacagtgttatttactctacgtgcttcggaaggctcccttctatcatgttggtgcaagtcctacattggaaactgaggatgacccataggtacttgctcatatgttgggggacctagcatgaatggtggagtagctctccaacggctaggtgaagaactagttgaagcaattgagcccgaaggttgtgaattcggctcttgatattagatgttgtggaatgtatggtgaataatatgatgatatgtgaaagaccacctttggcctacttggct

SEQ ID NO: 61161 - DNA, 838 bp, Zea Mays
aacaacagcggtgaccgcagcacaactggcatcgtgggaagctcgacgggaaagagcatctgcgaccctattatcggtgcccttcttgtacatgactgagtactggaggcccaggagccgtgtaaacaccttttgttgccagtgagtatgtaagcgctgctcattgaggtggattaagctgcgctgatctgtatgaatgacgaaagaagagtgttgtaagtatgacctccagtgatctacagccatgagaatcgccaagtattccttttcatatgttgaaaggccgcgggttttgggtccaagagccttgctgatgtatgccaatggatgcccatcttgcattaaaacagcccctacaccctgatcacaagcatcggtttccaaaacgaaaggtttcgagaagttcggcaaggacaacacaggtgcttgactcagactagttttgaggcactgaaatgctgtgtcatggtcagaggtccaccaaaatgcagaattctttttgagtaaattggtcagtggtttggagatgatgccaaagtgaggcacaaactttcggtagtaacctgctaagccaaggaagctccgtaactcctttgcattagacggtttaggccaattgaccaccgcagtaattttactcggatcggtttgcacaccttctttgctgatgacatggccaaggtatgagatggagcgagttgcaaatgtgcatttggatagtttgacttgccatttatccttctgtaacagggacaacaccactgacaattgctgcaggtgatcctcaagggaagagctgtacaccaagatgtcatcgaaaaagacaagagcaaacttg

SEQ ID NO: 61162 - DNA, 770 bp, Zea Mays
gaggattaaggcctacaacgatgagcaagcaacaacagacgtgtagctcttcgtcgacctactcgatgaagtgcgcgataccgtcgtgattcgctccaccaagtaccaacaagacttacgacgctaccacaaccaacaggttcacgacagatcatttagcgtcgatgacctagtgctgcgaagggtaatgaccaccaaggacaaacatatgctttcgccgccttgggaggggccctacatcattgcccagatcttgcgcccgagggcttaccggctcaaggatagcgacgataacctcttgaacaatgcgtggaacttggagaacttaaggaagttctacccctgagtaacaatttctaaccccctcattttcgcactcggacaagcagaacatgccgaccaagtcgccatgacttgctcgggggttagaagataggcgtcgtggtctatggtccgccccaagacatatttccctagtgtgtggtccaccctagacgtatccacgccctagaagatcctagtgtctgcagctatgatgaagattgggatgaccagtcataaggccgtagcccgcggctacgatgagatcgggatgataggtcgcaaggccatagcggaagcaacatttaaaaatgaatgcagcttcacaagccaaatgtagggcattcgtccgtctggtcccatatttcaaagagtatgttacaaagacgttaaaataaaaacatcatctaaacatcagtagatggctccagactctagggccatcaaat

SEQ ID NO: 61163 - DNA, 514 bp, Zea Mays
cgccgctttgcgctttctgtcccgtccactagggatgcgcaacgtgtcacgtgtgccagcgaacggcgctgcccaggtggcggatgctggcgagagacaggtggttgtctgcagtctatactagagctagctgcagccaagtgtgcttggctgttggcttgtggctgtacgtgagcttgagatcaatatcatgcatgcacctgtcaaaaagtttttagtagagggagctgagctgggaacgggggaaattcttcggttgatgcgaggggaggagggagatcatcatttcgctggcaagagctttgtatcgtcgaaacgtggttggaacacaacagctgtgtgcttcctctgattaattacgctgtatgcttgattccttcctggcccgtgggtgtcccggactcctccctggcccgtttgaacggacgacaacatcagcgtcgcattggcttccgacgcatgacaaggccggacgggatgaccatccacgttttcagatgcttttacattttgg

SEQ ID NO: 61164 - DNA, 605 bp, Zea Mays
cgaccggaatgtcccatgtggtttgatttgagatggcgtaaacgaacatggcctaaatctcctttgatctaccctaaccaaataaacactaagtgggggacttgtgcatggcagcgttggatgtggcctaaccctttcgtaggtgggttttttttagtacgtgctactaatctcttgtagtggtgtattttgtaacttatttttgttttaatgaaacaagcgttaacgagcatgaatcaccgcctaagcaaagctgcttgatggtatttccttgagcaccctggtcaaaacgcatcaaaacccggtcaaaagcgaacctgagactgattcttaacagctcaccgggaagagtcggtacactaatctactacgctgtgattcaataaacaaatcaggacaaaagacatgtacatttggatagatctccttagcactcaacgcaataatcaaatccaatcagcacctaccaaaaggaccgctagtataatagacagttgctccatggaccgataaaaaaaagtgatgaatcccggccgtgagaatgtatattttttcatacagtaacgccaatttccgtcatgatttagagagttcaaccacaaaat

SEQ ID NO: 61165 - DNA, 782 bp, Zea Mays
tctcagcccactcaagttctttgctccgtttcaaattgagtccctaacttgaatcttttattggtttgtgttgaaccttatgcatctgtaatacctgaattctagacaaactagttagtccatgtgtttgtgttgatcatcaaccaccaaaattaattataggaaacggttaaccctatttctctttcatgggttttagagcaacttatagaaattaatcaatttttattagccaacaacaactatttaaatttttgtcgaccaaaaatcacatagtcgatggagattggtattttttggcttagggagaaggcaattaaaataagtattttttgttggttgtaccgatcaagtcgacagaaacgactgtatcacgtggccgatgaaaattagtaactttattctcgtttcacaagctgttcgtttgactttaatctaaaacatcttttattatttttacattgttttatctttataaattacagtcgcagcagtccaaacaactattccgcacgcgtacttatctctcttctcactcgtccgcccgccccttccagccatgtcatacctgtccgtccctaccgtccgtatttgcctctattgctgcccgtttgtaccttccggccatgtgatatttgtccgtccctgccgccgtatttgcctctatttccctgcccgtttgtgtcacgtctgtcggcagtgtacgtgcatgtcatgtccatcctacccatgtgcctttgaccacccatgtttcgatcgttcgtaactatgttgttcaaacc

SEQ ID NO: 61166 - DNA, 637 bp, Zea Mays
gcctggggagggagatgggcggggtagagagagagggaggctgcagagagtgcaaggacggacggacacgctgctcctcgcctgcgcgctcgcgctgttcgagaaggcaagctgggctgggcggcagagaagcagaggagaggagggtagaggagtgggagagcagcggcggcagtgggcagtgagagggagggggcaaaggagctgagaaatatatgaagggaataaaggcaaaggcgttgggcccctttcttttcccttctacggttctagtcctcctacaatataacctttgctctttagctccaaaaccaaggcgagattgtgacctttgtaacgtttctcttcctaccaagatcgccagattgtaaaattgggcattggtattagtattaatagatcttttcgtataaatcatggcaaaccccaccacaggttttagctctttggcagtaggagtactactgaaccactgcagcacccaatgccgctgttactagttagcaaatgtataatgctagcagttacaatatagactactcccccctgtcctctaatacaggtggttctgattccgagtttgtttcaaatgaaaatcttcccaagtctgttcaatgttttcttctgaaaaaaaata

SEQ ID NO: 61167 - DNA, 398 bp, Zea Mays
gtaagttgctggagaatgcgggcttacttatttctttctcttctctcttgtacttgtactcctttaaagcatgagtttcgacggtcgtgtgtcgtcgtgcgtcacgtgcgaagcgtgtatggttattcccctcccttggataagccttatctcacccgaggcaaaattaatctcgatataaatttctcgcattcatatcgtttctatctcctcgtacatcatatgcggaagaaaacgcgacattaggggcctatagaggaggctggtcgccatggctgcagcgacgaggatggcgcccacggcaagcggggagggggaaggggagcaagtcgttaatccatccatcataaagatcccatccatggtcgttggtggttcccctccacccccatagccac

SEQ ID NO: 61168 - DNA, 489 bp, Zea Mays
gaggacgtgagggacgtcattcaacgtcctatatggtcacgcttcggcatcagcaagccatcgattacgagggaatgaagtgcatgcatgccaaatggctttcaacaccatatgcacctacattggcacgagaggtttagttcaagaacacatcgctttcaaagtgtggcctctggcaaatgagtgggaaataccgaacgaagttgccgctggctccagccaaggtggcttagtttatcttaagtataccttctgatactgaagccaatttgatgagccaaatgattactggctagacgctatagaggccacaagtgatgagctactcggagcctactcgagggccgaagacgaggccatgacagtttcctttggcgcttgcgggaaaaagaggctgaatgggatgttcgatctcattgggttcgtttacccggattactgctttcctgtccgaaaataagggggaaaaagaaaaactgctgcgtcaac

SEQ ID NO: 61169 - DNA, 420 bp, Zea Mays
tttccatgaaggtattgaaaggggttgcaaggcaccagccgactttaggtggctcgcttttattctccgacatgtatcagactcggacacatacttggctatttccctcttcatccttgtccaccaatacaggggtttcaggtaatggtacatcttgttgcttcccggatgcatggagaatttggagaggtgagcctcgtccaaaattttcctcctgaggtcctcattttgggaactaccagtcagtcttcgaaccataatgttcccttactatcttggcggaagcacttatacttttcaatcttttggttaagcatttccttgaggatttgcactcccttatcaccaagctgggtcataatagtttggtctagcaaggttggttcaatggagatgtagtccaaggagatgtagtccaag

SEQ ID NO: 61170 - DNA, 636 bp, Zea Mays
cggcggagcttttttgtaccttcggcactgttgcctctgtcgaagggctcaaaatctctggcatttttgttatttcttcaatttttgatccttcagttttatcagctgttgtctcaactagtctaattgaaggtaacttcggcattatagccggctcttcagtcctctgcacaggaggagcggtctcttttgtttcggtagctgaagaggctccttcatcaaatttaggtatcacaaccggttcgatgtaatgcggacggtgggtcagaaccttcaacttttttcccttcggcacaggctcatctggggtggccgaagtagcagctttcctctttttcccctgtccacgcagcgggtagcggtagttggggtaaacgaagccaatggcgtcaaaaactctgttcagtctcttctttccctggccttcgaaagctgcggatagggcgttatcttcttccttggaatatgctccaagcagttcatcacttgtagcttcgatacacttcagccaatcatcatttggttcatcaaacttatccccaaacctgaatgtatacttcagccggaccaaatcacctttgctagagttagcgatggtctccttcggcatttcccagttttccataagcggccata

SEQ ID NO: 61171 - DNA, 705 bp, Zea Mays
gggtaacgaaaggtcccttttgggttttggtgcttggatgacaacacatttaaaggactgaccggggtgttaagtgttgagcaggtacttagtgtaaagtttacaaggttcaacacatggattcaagtgtgatattccatataagctgatatgacttggattatggatatcacaagtcaaagttgaaggatggacatcgctaagtgggatccaatgtacatgacttggagacatctagttgaactgaggacaatggcaagaaggacttcgagggaccaagagcaagggagaaggtcaagaggactgaggtacctaaaaccaagatgaagaagaggtgcttgcaaaaggtcaaggttgatcaagctaaggaagagacatgttgcattgaagaccacaacataaggacatgacttaaagccattgaggaaattcatatcgtgttatggtttaagtcataaggctcaagatcctagctcgagagaagtcatggtcacaagaatgagtagaagtatcaaaatcagaacctagaagggcccaaagagataagtgcactttgattgagtttgggtcactcctatgtttgggaatgttcttagtgaccattgaaaggtgttggagctgaaggtatggctaaattgatcaagtcatgtgacttgaaattctagagcccaacacatagttcaaacaaggtgaaaagggcaacat

SEQ ID NO: 61172 - DNA, 844 bp, Zea Mays
agactaaccaaagagacgatacaaggtcgaataagtaagaactcaatgagatgcccccagcgggtcgagccccctagtgggactactcgccaagacttaactctaccatagggtggtcggatttcgcttgcataacccatctatagcaatacggcttccttccccatgccaactaggttggtggagggtgtccctctcctaaggaccacaaaaagccttccgagcgggatgcatgtgtgtcaagcgactggaggagaccaactcagaagagcaccctttgaaactatgtctgtttcaggcacttcatggactcacgatcagtgcaagatgaccatcgtgggaaggatccacccctaaactgtgcacacactgaataaaccccaagcaatccacatgtattacttagaggctcgtgggctacatctagcagatgcgcttgtgcgcacccaagaaattcggtcttcaaccaaaaatcagtaaccatggactcacactcatcgtgtgacgaacaccgttggaagcgtccgtccccaaaccacagacatgttgaataaacccccaagcaatccacatggattactcgggggctacatatagcagatgtgcttgtgcacacctgagaaatttgatcttcaaccaaaaaccagtaaccatggactccctcaacaagtgacgaccaccacgagaagggtgtgttcctaaaccacgcacacactgaatagaccccaagcaatccacatggattactcgaggctcggggccacatttaatagatgcactcgcgtgcaccaaaaaaatatcaagcaaatgcctttgcacaactccaaggagttacacgaaggct

SEQ ID NO: 61173 - DNA, 618 bp, Zea Mays
tctgcgtgattactccaagctccagcagctcaccagatgcatctgctccagactggccactgaagctcctgctctggtacgtatactgtattcatcggcagcgcagaggaaactgtttacatgcatatgcatggggtcgggtcgggtcgtatgtattcaacgtatgatagatgtttgttaatcacagatcgaatcaaacgccgtcaaccagaatggagaaaccatggacaagattgatgccctagacaggatggttggactcgagatgagagaactggctcaatgtgttttccgcagcggtggcagctccgtggatagagagacgaggcagacgtttctccatgtgaccaagagttactactacgttgcactctgctcgcctgaaacagttgagcatcacatctccaaagtcttgtttgaggatgtcgtctagcaacgatgtttatattagagctccaattctagtgtatccttgtgcatgcaccgtgaaggtgtcatatgatgatgttgtgcccagcttttctctttacgatatgtaatcagtttatattgattggtggttcttcagggtttgccagatttacttgtgtacgagacatactgacaggaaaatgggga

SEQ ID NO: 61174 - DNA, 561 bp, Zea Mays
gttgggtttgtgtcttaaactaaagttccaacgtgcaaaaatctacattgactagattagcatttggatcgttcagtgttgtgtcgtcggcataaatgcctgaggatccaagagttctgcatcattttctcattgtagtaaatgtttgtagagcactctctacatattttattctgtattcttaagtacgagacacactagtaatagtaaaccttactagctatgttctattcgaatgaacagagcagcatgcatattttttaattcaatatcttcttgggaaacctctcgtgccttagttctaaaaagactatatacatgggtttcagctaaccttgttgtttgaatcctgtcatgacccttttcattttatgaatgaatgatagaaatttgaaaggtttgagtctgatgacttgcattgccagtatttggagcaataatgggatgtttatatcatctgatgaagaatctcttgaaagaaatatagagcatcaaagtgatttattgattaatttccttttatttctcttcaatttgaagggtaggaatataataccagtg

SEQ ID NO: 61175 - DNA, 477 bp, Zea Mays
cccatgtcaacttttcaaccagtcatatccaagaatcacatcaataacgttggatcctaggaccagtaggttgactagaaaatctattcattgaatcttgagactaacatgggggcataagtatgtggtcttcattgcacctcccagtgtactaataagtaacatctcctttaagaggatattttggtatgttatatttttccacgaatggctcacttagaaatgaatgtgatgctccagaatcaaacaaaactgaagcaggtatggagttgatgagatacataccaagtgctacatttggtgcgtcctgagctgattttgcggtgatatggttaactcttcccttgttctggttttgataacttttaccctgagtgttattacaaataggtgtactctggtctaactgttggttgttgtttttctgaggtgtctgagtgttgcacttgcaattattggcatagtgcctagtttctc

SEQ ID NO: 61176 - DNA, 1429 bp, Zea Mays
tgaacgcttacaaaagttttggtcataacccatgcgcgaagaagaaaagggaaatggaaaggaagaaaaagaagaactggtacaagccttctcaaatcaacaaaagtgtctgcttataaaaatcaatgatgctaatcaataaaatagaagaaaataatatgacatcatgataaaatgattgcatgagccactctgttttgggatatataaatggtaaacactaaaatacttgtatgcgtcatccttaaattccctgctaaaatactacattatgtatttacaatataaacatatttttactaggttgaagtaattcctggttgctagattttgcaagaaaaagatccaacgacatatggctagactttgcagttcaattgttaatgtggcgaaagctcccaaatgaaaacaaaaaatcaacgacatatggctagtttaatctaggtgtgagtaattcttggcattcttaatctggcattcagtctttcgcacgatgctcccaaatggaaaaagctccaacaaacaccatacacagggaagtctaaatagtcggctagaactgctatttagctattaaaaaatccatcaatccagggtttacaaaggtgagggtaatcgtcatagtcgaacccaccagatgccgcaaaaaatagtgccagcgatgtccaggtaagcaagaatagtacctaagactaccaggaaaaacatgcgaaaccaccaagaatgaagcgctaacccatgattcccacagcggagatgggattgtcgcttcaccccgcagtggtgtcatcatcctgttgcttgcggcgtggcccaaacaaaatccggtatgggatggtgaccgtagcctgcagcagatatcaagagcattggcgtcgaagaagctgaagaagcaaattgcgcgaaagaaatcaaaggtaaagcgaagaggatttctcacctattcctcgcttgctacagcaagcgcgtgtcgcagcacccgatggcgtctgcacaaaagggagaagtccagcgatggagaaccctcactgtcaggcgccagtcgccaagtccttcactctttcttttttattgctagttgcaccagcgttctgaagactaacagtgcgtactgaaaagaatatttaagaaaaaatattatccacaagaataagagtgaacggtgcagcaaattatcaccgtagcaacgcttgaggagagggggaggggaggaggaagaagcttctggcggctgacgtgcatcacagcgatggacgaagcacctatgggggcacccaggccagcgaggcagcgtttgaggcggcgatggggacgggagaaggaagttcatggcggtcgagttgcgtcgctgcgaatggacaaagcacctaggggagcaccagggccagcgaggccgcgtttgcggcgggggacgaaggcacccggacga

SEQ ID NO: 61177 - DNA, 482 bp, Zea Mays
ggcgcgcggcattttgtgttttggcgggaacgaggcggctgtacagacagggtttaggcatcatccatggctccatgcagtcgattattgttcagttatttcggcgccacgaactgaacgagacggagcagggcaattttctctggaatggaagcagggtccagcaggcaggaggtccatccggaacagtaggagctgtgtatctatcccatcagtttcacgcatacagccatacatgcatacaactatactgttgtcagccccggcgaatcctgaaccccggtgacacactccaactagtttgagagccacaaaaactgaaggaggctgtagggcctaaaacctgattttagctcttacaatcccctccgattttatggctccgaaacttgctctagcccagaatgccgaactcaaactcctgaaaaaaatgcagagctattgtggacagttgcttgtgctgtaaaactcaacatcgtttt

SEQ ID NO: 61178 - DNA, 580 bp, Zea Mays
aataattgtgcagcaagaaagaaagacaaaagacgatgatgcacatgtactatatgtaaatcatacttgtaaactttgtgggcatgcctgtaattgcatacgcgactgtatctttcttctataaataggtgaatagcgccatgcataaattcaccttttggtggacccctaagctttgtctttcttatccttcgaggtaccttcgagatgtctcacttgtgaagctgaagatacgcgtgtaaatttataatatattaagaaagatagaatgaagagtgctaagacacatgagatgagtaaaaaactttgtcctttgtcacattcccatacattgtcacttcatcttcattccctctattttaccttctcccttatgtcacccttttaagaaagaggtaatcaaagggagaaggttgtcactatctaacttttgttgccttgtttttgataccatgtagtaatcaaaagcaagtgatcaactttggcgcccacctccagtcatctcatgaccacaacaagctaaaccacgacgaaaagcatgtcaagccatcagacttcattgtcaacattgaagaagctt

SEQ ID NO: 61179 - DNA, 1445 bp, Zea Mays
cctttttggttgtcatgaccttcctcttttctcatatttttgagaattagagtaggaggtcgtggtcctcttcgagggtgcagacgggttggtcacatttgttcgagcctagggagctgatcgagaggagcaacttctcgatgtcggcaaccgagtttgccaagccgttcatcgtggcgcctgtcgcggtgttgccaaggttgtggccttcgttcagttctggtcgtgctacaagctcagcactggcaactcattgaaggacatgactactggtgccctagaggattttgaagatgacttcggcatggatgctgagggtgtggttgacaccctttcgctggaggatgtaatcaacagatcccctagctagggtgtagtcgaaggctgctttggtcatgggatcgcacgggcatattcgcccttgaactcttgtgatgttattgcatctccttaatttggtcatggagagagccccctttttaactgctcttggtgtcttttcagtgtttggtgcgaaaaacgggctttgatatgtgtattttgggaccttgcttgtcacttcccgatcgtgcaaagggcggctcttaaagcgatttgtgagtttcaacatgcggtcttgtgaacctctaacccacactgatgctaggtcatccacccttatttttcctaccatgcgtatcctcgggggaaacaagagtatcatatcgagggcagggtggtcggactgcgtcgctgtctggtcgtgtttctacatgaggcttaccatacattatttgagctagggctccttgttcgttacaataggtctatctagggaggcgcatcaccccttcccacacattttgttcaccgtaaggggaaacgcgagttgtttcgtgctccctttgatggttgaggccatggcgcttagttgactggtcttatcatggcctccttttgtgaggcgagcaccgagtcccccgttccttacggggatccgtctgggggcacgtcctgtctttcagccattccttcccatgcatttcattcgtcagaaggggaagagtgagctgtaccatacttccatcgatgggcttcaatcgggacttccgaatgtaccctcctttttgtggagcaatcccccgagtccctcattcgttataggggatccatctaggggcatgccatgtctttttaatatttcttctcgtgcattacgtttgctggaaggggaagggtgagttgtaccatgattccctcgatggttgagatcgtggcgctcgacgagctccaaatgagtgatcgaagtggcgctcgacgagctccaaatgagtgatccgtgtgaggccctaggactcaaacatggtttagaagtgcccttcgtgcccatgccctagggtactggccgctttggtgcccacttcataatcgcctcttgctctgttgttttgggagtggtcgcaaac

SEQ ID NO: 61180 - DNA, 561 bp, Zea Mays
gttggtacttcggttcctgctgctaaagaagtgcctgtgactgaatttattgacgctgaccccaatgggtgtgcccaatctactgctgatcccaatgtgggtgctccatctgttgctgatcccaatgggggtgctgcatgtgttgctaatgaagatgacggggaggaagaggatgaagttcctttgactcagaaaaacagtcggcagttcatcgctagtggtgaaagtagtggagttacatctcctgctttgcctgctctcattggtctgcaagaattgtccctggcgaattttgatcagactcttgaggatatggttcctgaggatttgttatcagagccagcagatgatggtgtgatggaggtttgtgttgatgtgcttgatgctgggttgaggtcatctcgtgcctcgtcgaccttagagcgcgatctcgagggtcaggagactgacttggatcatcctggtcccatggaagtaactgagggcccatcagccttagaggtggctaccgcagagaacttggaccccaaggatggtgttgacacttacccagcccccgag

SEQ ID NO: 61181 - DNA, 684 bp, Zea Mays
aaacttttgaagaaattcttagtgacaggggggatttttgtgccttcactgctgcccgcgaggctgtattaattctagaaaaggtcggttgtgatcatggcaaggctgtagtttagccagaatttgttttctcagccgacgatattaaaaacccttcaaccgaagcttctgcattaggtgggaaattttactccgaagtatggatgaagggcggtcgtgagatagctgatgaagctattaggaaaaacgagaaagaatctcacgatgctcaagaagaagctgctgagcgcgcgaggcttataggtacatctattgcggtctagcttcataatctgttttagcttcagaactaataaacatatactatggtgctgctgaactatctcccccaccagagtcatacgacccagaagccgaccaggccctaaaggaagcgctcgagacgattaaaattgccaatgaagttgtcgacgaagctgtcaacaaactgttaaacaaagtcaccgagaaagtattgaatgaagtctaaaactttgtatatttgagagtttagtgtttatgcatggctttcgttttttgtgagaaccatgtatcaactatttgcatgtatatcaatgtaatatatttctttgtgatgcctgaaaccttcgtacataccatttttgagccgctggcgaaaaaaca

SEQ ID NO: 61182 - DNA, 337 bp, Zea Mays
ctggcatgctagataggggttgtgtcgttgatccaagctagctcaatgaccatcacatcccagtgcaagattgctcttcgccctggaaccatgttctgcttcggaaccatctcgtccatagtggatgagaagggaactctgcaccgcatagcagacccgccgaagaagaagctttcctcggagatcccaaagaaaaccagagtagtgggtggcgcagccgcccgcatcccgagcgaagatgacctcttacaaaccaaaaatcgggagcttacctacccgaagaactccgttgtccacctcgcccataaaggagtggacacggatcactagaaagaag

SEQ ID NO: 61183 - DNA, 383 bp, Zea Mays
ctcagacgaataatccaacttgctggggaaatctgaacaacataaacgtaagtaagtcgatggtactccgttttgatgtaatcaaaaacttcacatggtgtgaatctactagtatgcacttattcaaatgtattattgggtcggctgctaacaaacataaacacctttcaatggtttcccatataccgtaaccaacaatcgttcaattgcatatgtgcatcacgttgctacgagtgaatacacggggcagtaacatcttaaccaaggacgtacatgcaacctaacccctaatgaacacatggggatgcaacggatccggataatcacaataggagtagcgaagggggagatggtacctgcgtagtcgccgagataggaaaggg

SEQ ID NO: 61184 - DNA, 578 bp, Zea Mays
ccatcgtagtcgtaccatggatggacggatgcgcgaattgtttcagccgggcggggcccggcatcacatgggccgcaacaacaatggcgcatgcactgatgcaggaaacaatcatagccttaatgctcgcacgtacactctctctcgactagttaaggtagtaagagcagtactaatcatgtgtagataatcaggccgtgatctgacagggaattcgcgcggtgccggcctttcggattccgaatgaatctcgctttacaccggcgtacgtacgcatgcgttcgtgagtggcctttccaggtcggagagaatatatatacgagcgtgctagtatataatactcctagcatatgtgaccgaaagcgggcagccaatttctagttcgatgatcagcatcagcgcaggacgactgaaaaatcgtttaattaattagttagacacgtaagctagagtttcatggagttcagacttcagacaaacgacgatcggtcggtacgcgtccgcgacctgtgccgctgtgcgtgcgtgtaccgtgaccgctacggctttgtaccgattccatgtggccctgcacgtcg

SEQ ID NO: 61185 - DNA, 1496 bp, Zea Mays
cagggggagcataacctacccaaggcgacctaggaacgagcttcactttggcttgaacactttgagagcggtctgcccacgtgcacggcggaaaccgtgatgttaatcccgtgttcccaatcacttacgcccgaattggtcaaacggatgctacggtgagcattacgtgcctacagagttgctagaacaacactcgagagaggcagagccttaccagagtggtccggcgacggagcgcggagtcttgtgctcaccggtgacagagaaaaggggaaaatgacgtcgcgtcgactctgggtgaaattgggggatgggattaaggctataggaccgtaagaggctgtgctttcatcgcgcgcaatcaatttgggcgaaggtggagagggcagtgcgaatttgacttcgatttagttcactggtgttcgtgatgaccgagcctcgccgtgatccatggggatatttatagccgcggaggtccggcgatctcttcccagccacggatagcttctttagtgcatgcctagcacgtaaaggagtggtacaatgaggtagaatcatggtgtagaggacaccgcggcggaaaacgattgactcggtggccaccggtgaggtctccggctggactcggggtagggtgccacgtatgcgctatctaactccggcgttatctgttccctaccgcgcacggattcagacggcggcggcacgaatcttcgcgcagagaggtcgccggcggtgagcacacaacgctggcagtctgatccacatccgagcactgtaccatggcgtttcttcagtcagtcgacctgacagagcatcttggagctcgatttactcctgattttgtgaggtgaccaggctagctctctgtaccaaagttatagacctacagttaatcttcaactttgccatggagcttaccataaaatagttaccgaatccaactcaaaatcaggttcaaagtctgcctaatttcactgttactggaaattcagacttaagatgtcctgacagcctgactttgagggtgattatctccaaattcttcacaacaactgagctcacactattaagcaaaattgttctcctatgattggtctacaactttgatgtggttccctagggcaaaaaccctagaatttgaaagatacaaaggctcaaagttgaagcaatcacactgatttcagacttaggctatatagaggtcaagtggtactttttgcaattagccccaaaacttagggtttggcttgtaaatcttcccaaatgtgaaccatgtgactttatatgctttaacattatagtttttatactttagtccaaatgtgcactgtttttgcacataggcccctagggtttggatttagggttttctagggttccaatgggggtttttggtatctcaggggtataaaagtgattcaagttcattcttgggaacattttataactattcccctaaagcttttaggttttctcaacttgggttaagtttt

SEQ ID NO: 61186 - DNA, 514 bp, Zea Mays
ttggagttactgaagcaatttttgctatctttggtacctccgtcccttgaaatagactcgaaacctttaattgttccgctgctatcttctattttggctcttcggtcggttccatcctagcttcggcgtgagtgggatgacttgactcgagagtagaagacctttcagtaggcctcggctcttccgctgtttcatcgcgcttggggcgatgtgtcaaaaccttaacctttttttgacttcggcgtattagagatcgccgaagtagcggctcttcttttcttcccttgcttttgcgatgggtagcagtagtctgggtatacaaaaccaataacatcaaaaaccctatttatcattttgttgcctcggcctccgaaggccgcagtcatagtgtcatctttggcccttgaataggcaccaagtaattcatcgctggtggcttcgatggcgtctagccagtcgttgtttggctcatcaaattggcttctatatttgaatgtatacttcaaatagacta

SEQ ID NO: 61187 - DNA, 551 bp, Zea Mays
ttggcgtagctccgagtctcaccggtgccgcaggggagagagagagagagaggaagctgtacaccgccgtcgcgtccccgatttcggccctgtgagtctctccgtgcgtcggggattgaaccggggagttccctgctgtggattggcggccggagcccttgaatttcgtcgtcgtggtgcgaactccgccgcgtgtccgccaaactcagtggggcggttcgtccaatgcctgaatcaaggtaagaaaccctcatctagttcgtcttgttggttacatcgtgtagctccgttcaatttgacagaggtcggggaggtagcaggatcggtctgcgccggcgtgatgctcaccgccgtggagatcggagtgccgctagctatgcgctattggtagaagaaaaccctcgtccgctgatctaaccaccaatggctaggattaggtcaagctgtatccctctgcgcgatgcatcgtgaccatagatctagtgatgaccggctctgggtgcatacagttccatgtgggatctagcccgttggatcaagatcgagtgtgc

SEQ ID NO: 61188 - DNA, 477 bp, Zea Mays
cggatgaaggcctcgcttgaggctagggataggaccctcgaggtacaacggacacagtagtaggaaatttctgcaaccttgcatagacatcacctggagctggaggagaaagctacctaggttacctttatcaaggaggaggtcgagaaaaagaagaaactcctcgagaggttgaactccaacaccacaaccttagagaaaatccttgacaagcaggcaagctaattggccgagcgtgaaaagaccatgaagcttaaggaggacgacttcgacgaacggatccgccaattcgatgtgtctcatgcattgctggacacctaggtgctggaagccacctagaaagcacttgaggccctccaagtgaagtagcgtgagggggttcaccatatcgtcaactgggccagcgaggccagtattgggctggtgccatttggggtaagccccatctaggcgggaccagcggcctcgatcatcaat

SEQ ID NO: 61189 - DNA, 903 bp, Zea Mays
ggtgttttgaagctgtcagacagatcaacaccaatggtgtttattgggtatgaggcaagcacaaaggggtaccgagtctatgatcctgtggccaagaaacttcacatatcgcgtgatgtgatctttcaagagagtaaagcttgggactggaaacaagaaactcgagcaggatctgcaacaccagtgtttgatattgagttttactcggttgctggaagaggaacagtaccagccgagcctgtaactccaaaaaattcagaaaatgcagcagcatagctagtcgatcctgcaactctagatcaacaatcgcctctccaagatgattgggctatcgacgctggctcagatggagcatcaaaccatgcaacaccgcctgggagtccagctgtgcaaggaattgaatttgcaactccagtcacgggagaatctgtcaactcaaaaggagtgccacaaagattcagaacattggcaaatatcaatgacacaactaatgagattactgattttgagtacagtggggtgtgctaccttgcagcagaagaacccagaagcattgagactgctctgaatgagcaatgttggagaaaagccatggaggccgagatgcagtcgatagaagaaaataaaacctggcagctgtctacactacctgctggccatcgagccattggcctgaaatgggtattcaaagtgaaaaaagatccagagggcaatgtggttaagcacaaagctcggttggtagcgaagggatatgctcagcgtgagggggtggattttgatgaggtttttgcaccggttgcaagaattgagacagtgagattgttgattgctctggctgctcagaagggttggcaagtgcaccacatggatgtcaagtcagctttcttgaatggtgagttgagg

SEQ ID NO: 61190 - DNA, 463 bp, Zea Mays
ctaaattggaaagtgaaggcactaaaagctttagaatcatggttaagctaagtattgatcataacaagaaagaaaccctagccttcatccattctcactcatgaaaaatattctaaaccctaattcccctcttaagccattaaaccctaaacatggggttaatggggaaagagtgggcaaatggccaaatcatggaaggaaacctttaccaaagatgaagtatattagaaaatctacaaaatgtattaaggaagatattacaaaaaggcccaacaaaaaccctaaatcagttcactaagtggagagcacaatagagccatcaaaatttctctaagtcccaaaaccaaccctagcctaaagatcatatgtgttcacctttgtgctggcgccaaaaccacttggaccaaataacaaaaagtgtccaaattacctaaggcacacccctgaaaagtttgaaaacaaa

SEQ ID NO: 61191 - DNA, 459 bp, Zea Mays
gtttatttcaccatcttcggcatcggtggaagcagcaattttttctatctctaccggggggtcttttgcatgatcctcatcacagccagcatgcgtcgtttcttctgaccacccacattcccctcgtcagtgaagcaatcttcttctcatcttcagcacctttttcaacccccttctcctttgactgcaataagcttgtcagatctgatcctagaggacttagcatagaaaacaggaagggttcagtcattacctttagaatttctattacaccgacagaagaggacgaagaagtctcaacaatcttctctggtaaatcttgcatctttgtctcgataggttccaaggttgaagattttcgctttttaggagccgaatgcttcgacttcgctgaaattttctatttcttggaagcagctctttacttgtctttttcaatagatctgattgtttgttttt

SEQ ID NO: 61192 - DNA, 563 bp, Zea Mays
gaccattttgtctgaaccaccagcccagtgagggctacgtgattgacttttcggtagttgtctttcttctgccgtttagtgtcaaagtctgcgctcaatcccctggtaatcatgtgaatgaccccacggaaaggttgattggcgaagtgttcttgtttgggtactggtgggggtggtggtggattttggtgatgtggtggtggaggaagggcttggatctcttggtgttggtggtacatatggttttgctggtggagggatggaattgttcattgtggaattatcgctggtggtattgctgggggtggtaggtttgtgcaataactcgttggttatcaacttgttgatttctggccatcctgtctttggcagccttggttttagggcagtccctggtggtgtgcacggagtcttcgccgtgaaaaagtcaataaaaccttcgtggttgcgggactcggcctttgcctctgcctctgcctctgcctctggggttgctgccgtggccctgttgtgtggggtactcttggctacgagcggtgtctccagtctgctgttgattggtg

SEQ ID NO: 61193 - DNA, 476 bp, Zea Mays
tgcagaagcaagactcacatgctatggttgcagcggctttgcaacagttaatgcttgtggccaaggagtgttttacccaggcacatggatggcagtctaatcttaggtttgatagtcactagagctgagctgccaaagtttgttttcccttgactcttggatggctttctagtcttaagattgttagcctctagagctaagttggttagagccttacggttgtgctaggtgcttcttcttttttaggctgtgtgtgttgtagaggccagaagtttttttatctccaagaactttgtatcatcttgatgttctgatcttggtttaatttaatcttccattattaaaaatatacttaagaaactcgtttgtacaataaattcaatatatttaagccttgtatcttattcactagaacccctcaagatagggctcattaagggcttatttgttttgatgttaatctatgtagactaggt

SEQ ID NO: 61194 - DNA, 713 bp, Zea Mays
aacacttttagctcttcgatcaacggttgcataaatacattgattttcatacacagatccttagggcccagaataaccagagcaagaaacatggcctcttatttcatgcatttgctagtgggagattgtagggcatcatgaaaaccggccaacacgagtatcgacagaaacttctgctaaaaggcatgaatccgttcgtcgtcaaactgagacggacacttctagggtcccttacaaattctggatcaaaacggtctagtgcctaccatgcctcgccatctgatggatgcaccatgatatccggaccttggtcctggctattcctttccttatgccatctcatttgcttcattgtctcctgatttaggacaacctttaagccgcggagtaataggcatgtaccgaagctgcttgactggcacttttgcagtaacctcagtcccttcctcatccaccaccattgcataccttgacttgtcgcagttcatgcagtgggtgtcattctcgtggtccctttagaacaacatttgagataatatttgtagactgatacaagttctctggcatcttatggtttggtgggaggacatcaataatcagcttcatatatttttgtagcaattatttgagaagttgtactttgacttcatcaccataagtcgtgttacgacctaaagtacaatgacgttggtgccctcgtgcactttagcatc

SEQ ID NO: 61195 - DNA, 613 bp, Zea Mays
ctaaattcacgggtataaagcctagagcaacaaatcaaggaattaaaggaagaaaaggcgtcccttcaagacaatctcgagatggcggaggcgaagaagccaacactcgtgaagcataccagactctgaagatggactatgctaagaaattaaagaagctcgcccccgccaagaagatccaaaagcggttcaagagccaaggatgccagactgaccgaaaagaggaagccccgccaacactgcctccctcagggatagaaaacttttccgacgttgaggaggtgtccctagatagccttgacgatcttcttagggagtttggggacaccctagaaaacgctcgtgcgtagtgtgatctgtggcaattgtatgcttgtaatgaacttgagtgctaaacaaaataacgtgtttgagaaaaaaatatggcatatgcatagtagtaatcctttctcccctctagcagatggcctcggataaaaccacgcctaccgccttagggattggagcaaggtctcccctaggtgctgaaggagaagtcggtggagaagggagtgagacccacctccccacacctccggagctaccattagacctagcccaagttctggccaac

SEQ ID NO: 61196 - DNA, 594 bp, Zea Mays
gccattttttccggaacgtggggacagggtgtctcgcatcagagtggtacacaaaggagtagcaaccaaaattgttatgatattgttccttccccactgtcttcgtctgataagataattcatgttcattacagaagcagtcgacgtctggttccaacccctggctgttcattgcccagatgaaaaccccgattttgatcaaagcttcaggggtgagttgataaatatatatctcaaatcttttaagtacttcaaccagtattttattcaaaggaaactgaaggctagccttcataaaacctttgtaaacaaccacttcatcaacttcaggaagaggaacaatattctctcctccggccctcactatagttgtatcacataaatatttacccttcattgcttcaatctgtcctctcttaacagtggattttccaaatacaacatgacttggcctccacgaccgatcttcggcatcatcgttgtcactctccatatcaaaatcctcgctgtcactagaatctccagaaaacccagctaaaatttcattagtaatcttctcaacattggaccactccatggcttcgtaaaaaccag

SEQ ID NO: 61197 - DNA, 618 bp, Zea Mays
tcctcgtgcgggactgtgcccattagcatttcatcgagcacatgaatgcttatggtcgcttaactgctccgatttgtaggttgcggtccatatacgacagcttagcagcactaaggtgtcactgcaggggaagacgtggtgcgttagttatgaatagaatcagagccttacctagattggacacctgagccccgattcactttcgaccttgacacgaacgaacatgtcatgtaggcgctcttgttactctcgcttctcagtttagtattcgcccttctttccttatgctgattttttgttgtgttaactgtgcaaaaatgtgcaacttctccttttcgtattgttcaggatgatggacttaattgggagattatttgacggacccaaaattcaatcaagaagtttatgtgagcagtttagtatctgaattctgagcaaggataaccattaggatgacatgttcaaggttgtcgcggtgcccatggtggagaactgcatagttagctataacagccgcattcttgcttacggccaacttaactgcaggtttaagttgctgatcgctgttgtaaatactcaagttataagattgcattgttatgggtttacctttcaatt

SEQ ID NO: 61198 - DNA, 699 bp, Zea Mays
ggctgcggtggatcatcaccggcgcacggccagatcactccaaacgcgcccagacccgaatccgagaggtgctacgcgcgtaatagagcttaccaaagcttgcggaggcgcttttacctcggatcgaagcgatgctggttccttcctcgtgattgtgcggtcggcggtgaccttggcgcgacggcgagcaatcggtgagtctttgggtcccgtccttgtccaccgaagccacactcgcaatgctggcacaccaatgaacgcacacgaacctcaacagggacccacgcggtgatggtggaggcggttcgtagtggcggcagcggcgcagtattcctcacgggctgtgtcgtgtaatgggttgaggcgcgcaggtagtggcttttgacgaaggggatcgtgggtgcgacagctggcttatagccacgaccaggtaagcactaccccaacggcgcctggaattttgtggaggctgttaccggcgcgcacgattcttctggggaagaacgctctgacttgccgggcccataagacagtgaaggtggaaatgcgagacatgtgtggaacacgtcgcacgaccgatttgtcagtgagaacgtgcagatggtttctgtcccgcgcgtgcgtgcgggctgaccgggcggacccacctggaaatctctgcgggcgggcagcgcgtaggaacctgaagatgacacgttg

SEQ ID NO: 61199 - DNA, 328 bp, Zea Mays
gtttgtgcgtcttggggttttgtcctctttcacggtttggggtttgtctctccgtttgtgagcagacgactgtgttgctagtgtttgtaaaacttggccctaacctcaaaagaggtgaaagttggaatttgttttccattatctaaaaaatattaatttagctagctaaatcagggtgttcctgattttctgctgatgggctactacaattttctgtccatgtagtcatacaatgatgatgttactaagtttagtcacacgactttaaatatagtctcactagcatttctcatatatttctcatcaacataatattagctaagtgttg

SEQ ID NO: 61200 - DNA, 370 bp, Zea Mays
cttacctttctgcctcatgtataattagtaggcgcctctcatgacatatcggtcgctgagagagacttgtaggacctcacaagtaaacacatgacgaactagaggtagccaaaccagaggtggcctactctgcctcctcctcatccatgtacgccttgtcatcgtcgcgtcacatcgacggcatgttgcaccgcatcgacagtgtcctactgctctgcatcgtcgacctactgcaccttcgcatcgtcctacgggtgcacctatgcttccttctccatcctacatttactcctcctccgcctcctcggccttccccttattccaccacctaccatcttttttcaatcacctgcaattaataagagtaaac

SEQ ID NO: 61201 - DNA, 704 bp, Zea Mays
tatacatatatagagggtgtttggtagccgcaccaggctcccgatcaggctattgtaggacctagttcaatgtttggcccacggatcgtgtgcattggcctagctcggccattagtctgtctccatgtaaacatgagtattaggcattcatttctagctcggtccattcggagcagcgtgcgacccgcagttaacttatcctagcctctcgtgccctggtgcagtctaggatttgagcactcctcatttacaccatcactcatctcgctcatctcggatagtttgctcctctgttgtcttatcgcctcacctcttgtctatagtgtccctctcctagcaaggtgtgagcgcaccctatgctcacatgaggtgcaggtttgggatgaacttgttcatgtccttcctcttctccatccttggtgctatagtttttgcttcattcttctccttcgtccttggtgctactatttttgcttgattcatgtacatttctgtttatgcaaagttggttttgtataaccttgttatctaactactatatgtaatgcactctagttcttgctgatgcttttaaactttgcttcatatctagggtttcacatgtttcattatgagttggtagacatctgttcttggtagatctagatgttgcatacttatgttgtggaggctagggataatggacctgttgtgaatggtgaggt

SEQ ID NO: 61202 - DNA, 336 bp, Zea Mays
agactttcacccttagggcacgtggcagcaccagacctatccccgagcgagaagtaggtcctgaggctagaggtcctatcagactggtccagtcctatgagcctggtggctcagttcgttactatgtggttagagttaactacaagggtatatgtcttaacgcagcaggagtgggtagcctagttatagggcactgacagtggcccctaggcccacctcgagagagactatgaacccataggtggggtcaccactgtgatcccgtttcaaacaatctgactatgacctggcgctcagtagtggcatacctgtggtcatgctagttgttagatctcc

SEQ ID NO: 61203 - DNA, 700 bp, Zea Mays
tcaaactgttaactatcaactaactttgattcgattggacttggaatcaacacacttactcgacttagggtgaccactataccctactaacggagcaatcggcttaagtcagcaacgacttaagacggtgcaacatgctcgcgcttactaaacttagtatgaccactataccctactaacggagcaatcgacttaagtcggcgatgaattaagacggtgcaacatgctcgcgcttacttgacttagggtgaccactataccctactaatgaagcaatcggtttaagtcggcgacgacttaagacggtgcaacatgctcgtgcttactcgacttagggtgaccactataccctactaacggagcaatcgacttaagtcggcgacgacttaagacggtgcaacatgctcgcccttacttggctttgggtgatcactatacgctactaacggagtagttggcgaagacctaagacgatgctacatgttcacactgagtcagcttaggggaaccactataccctactagcggggcaatcgactcaagtcagcacgatacgatcacacctacctatcttaaggcgaccactaggccttaccacccaagcaattggcctaagattataaaaagttccaaaaaccagcacgccacatgtactttcataattgttcaggatgactgttataccctaacaacaaaaaca

SEQ ID NO: 61204 - DNA, 582 bp, Zea Mays
aggtattcttgcaccaaatcccgagtactaatatgctccgccacaaccctaaattccacttcggctaactggaagggggatccgagttgcatattgtgcaatggctgtgtcatgctgaagctcaacctcaggggactcatcactatagtcataagcttctcccacttcttcttgtcagctttcacataaaatcattcacttgtccaaccagtcagtcacttggtgtgatatccgatcacaggagctttagtgtctttccggtatgcaaaattgtaacatctgaagttcttatgtagtccatcagctctagcctcagtctagtagtggagttcatgcaccccggcaaaatccttcagcgttggcactcttcccttggcttcggagagcccatatatacacactaagtctaactatggcatttggggtgagttgatgaaggtagatttcaaacttctttaaaacttcaccaatcatgtcgtaaagagggaatcaaagacctgctttgaagaagcttttaaaaactagacttcgtcattccttggttttggaatcacttcttccccagcaaatcgaactagttcg

SEQ ID NO: 61205 - DNA, 421 bp, Zea Mays
gcctagaccaggaaaatcagtgatggtccaaattattgcagcacgcaactgaaagtattcaccctttgaggcatcataggtcttcacaccattaacaaacatatcaagcagatcatagactaggggctaaaaataaacgtccatatcactacccgcagaagatcgaccaggaattaagacaaacaagataaaatttgaatccttcatgcacatcgatggtggaaagttgagtggaatcaatatgccaggctaaatattgtaactaacattcattgtcctatatggattgaaaccatctgtagcaaatgctaagcggatattacgactatccatagcaaattctggatacttttgatcaatatctttccacaagggtgaatcgacaggatgcctaagcaaaccatcttttactctgtgttca

SEQ ID NO: 61206 - DNA, 313 bp, Zea Mays
caacgatctcaccgacaaggcgacaatgctacgccaggcttcgtcaacaccaattcacctgcgtttcaagcagacgttcgatcctgtcgatgttccagatctgatgtcgccccaccgtcacaccaacgatctcaccgacaaggcggcaatgctacgccaggcttcgtcaacaccaattcacatgtgtttcaagcagacgttcgatccccctcccccaaaaaaactcccaagcctgtggcaggttgctactgctgcttcctgacttgcacgtaactatcctattctaatatttttgtttattacagctgtcttg

SEQ ID NO: 61207 - DNA, 510 bp, Zea Mays
tggcaatcgagccatcaaagagtggagatgagaagatggtggttaaagaatagtttctatggatgcaagaggcgatggagagttttgagggatcccaagcggtgataatccccctcaggagctgtcagccaggatggtttcaaaactagtgacatggagagggaggaactgctggaagactgggctcctatggtaagggaggacatttttgtctttgcgaatgagcttttttggctgtggggggatggtgcgggggagggcataggcagagggtaggcgatggcattgcattgcagtgggggtggagttcttgtcgtcagacacaaagtcagagtaggcagtgatagtggtagggtggggcaaacaataatgtgctagagaaggcgagcggggcacgtgtggtgggctcacggaatcagctgtaggagtgttggataggattttgctctgataccacttctgtcacacccgaaattaaggacaaatccgggtagtgcgccaactcaagat

SEQ ID NO: 61208 - DNA, 796 bp, Zea Mays
ggctttgtgaatttcatgatggatgatcagcaacaaaatcttccagagaattctcaatttgatggaacaacgtcacatgtctaagatgttgaggtcaagaacaatgttggaattgaagaattagaaaggggccaaggatgatttggaaacaggaagaagatgttagagtggtaattttaaaacttgaactcatgtagtagtttcttgcttgcataaaggagtaacactgatatatttagatttttaattccttgtctagagatgagtgcttggctcaaaccctctattgacccaatttgtgggaacaacaagaaaagcgacaaatattggtaggacgtagcggatgaatacaaccgcaccaccgagacaaatagattaaggacaagaactcaggtgaaggagaggtggcataaaataaacaagtggacaaacaagtttaacgactactggctgaaggctaggagagtgttcagcagaggatattatgatcagatgtggatagacgaagcacagaaatggtatcaactagatcacaatgggacaagttttgtgttaatggatgtctggtatatggttcgtaaccaagcaaagtggattggatataacaaccaggtgaggaataagaggaaagacatggacaacaacaatgcagcagaaggactgaaggagattgtgctgaagaatttggccttcctcggccgatgtgggtcagaaggcggctaaaaaactagcatacgatggcaaaggtaaatcaaaaggaagtgctacagacatagacgaatttaataagtttgaa

SEQ ID NO: 61209 - DNA, 537 bp, Zea Mays
cctatgtgtacccttttgccttcttgtcgatcgtgttaatgcttactgcagatgccgtttctggatgtagcgcttgagtagcaactcaaaactgttgagttgtgcttcagactatcttctccacgatgtcagccgagtgattattggcaatgtcggcgcttttagaagtgatagccgagtgatagtgggccacgtcggcgttttagaaataacgaccgagtggttactggtgatgttggtgttttagagataacagccgaatcctttggagccacatcactgctttaggaataacagccgaatgactgctggcgacatcgacgttttagaagtaacaacctagtgataacgggccacgtcgaccgctttggaaatagtgtccgagtgaagtctggtaatgttagcgtttttagaaataacagctgagttaatttgggctgcgtcggccgttttggaaataacggccgagtgatgacatggcacgccagcgttttagaaataacagccgggtgatgacatggcacaccagcattttag

SEQ ID NO: 61210 - DNA, 351 bp, Zea Mays
ctccaacctagtgtccctaaaaactggggagcttatgcagcacgcctgacatgtaatcgacgtttatttctctctcccggtcgaccttcttatgacgatctaccctgaagtacgagaggtaccacttctctgacaccttgggcacctgatcttgttgtcgctgttataaatgaatacgacacaagtgccattcttaccaagagactccatttcttcatgcatagcacccatccacttttcactatcagtagacaatatagcttctgaataattcaatggttcctgaacattatcaacttcttcagcaacagccaaagcaaaagcaacattgcactcttgaatcagtctttg

SEQ ID NO: 61211 - DNA, 629 bp, Zea Mays
ttactcagtaaacaatgctatctataataaaaaatattgttttgtatgaccatatgcacgatctgctagatgtagccttattgtagttataaagtcgtagtagaacacaacatggtcagttcacgatgttgaacatttagtattgtcgtgatcagtacatgtttccacaccattgattgcagcgtagttggtagacgatgcaacaactcatactttataatacctttgggtaagcctaccaccataggtgtagctacagtgatagctgtatctacatagttgcattggctcatctatgccatgggtatggctacagtgagcggataagcatctagtgaccaatggggagttacatatcgcaccagaccatctcgtttagggccattacacaatattgatgatgtactgcctatggcctacctgctccgatgatgttttggagagctagaggtccgacatgagagcccccggttatgcaggtccttaggaactgcctacatggggcttggcctctaagctatatggcccgatgatgccaagttggcactagccacacttatcttcttccttctgctggtaaaattcctcggtggatgttttgccactgttcagggtatgcattacaccag

SEQ ID NO: 61212 - DNA, 496 bp, Zea Mays
cgaagatgcaacgtgggagctcttggaggatttccgagcgacataccccgactttcagctcgaggacaagctatttcagtagacggagagagatgttatgatcggcatcccctacaccagacgcatggacattagtggctaggagggctaaggcccacagccaggccacatgcgaccatgagagattagataagaattagctaataaaaaggagagattatctctagttagttggataagattagataaggattagctaataaaaagaagatattatctctagttagttggataaggattagaagagatctcatagctcttattcttagatcagataaacatcagctaggatataaatacttgtaagagatcatctatagaattaagcttccctaagggagctaggagttggaatcaatctctcttacccgcacagcctaggtcagccacggcacccagtatcgccgcccccatctccctcgcttagctgttcatc

SEQ ID NO: 61213 - DNA, 356 bp, Zea Mays
cgagactctattcctatagaacatgttttatcttagttcactctgtacgaaataaagcacaacagaccaacccaacccatagagtcatgatgaattgtataatctatctatccccacctaacatcaaataagatttttatccacaacatgtaatctcactcatccacatctatcttaaccttattgcccaaactcggatgatatacactgacctcgacccaatgagaccaagactagaaaagaacaagatcaacctcgtcaaggaaggagagaagtcaaacttgatctttaaatgcattaccatccaacacggaattcttttccaccataaactttcttaccctaggctattcttg

SEQ ID NO: 61214 - DNA, 475 bp, Zea Mays
tttgattatatcattcaacatgctgcgagaaagagattatccgaagaagaaaattttgaagccaaacactatgcccgggaactgaagtatccgaagggggccttagtgtttaacggtacggatgaagatgatttcttgtactgcctcctggacaacaaagaattatccgtctgccgggagatggtcagaagtatgggcttcttgaagctcgaagctggcctttgcgccatgacgaaggccgatctcgcagatagtcttgcatacaacagtctgaaggtacagaaattgtgaattttgaagcttatgaactctggaatgaagtcttttattctcatgttaatccttttattctttcttgcagggcttaatacttagcaacgccctaagggcacaaaagaatgctgaagacgagagctgcactatagctctcaacaaccttcgaacagaggttatcaggttgagaaacgaagccacg

SEQ ID NO: 61215 - DNA, 598 bp, Zea Mays
caatcaaatgatataaaagaagactacatgcgccagagaactcgtagaacttttggctaagatcggtacatgtttttatcagtttaataaatatttattattatgtgctatcagtttaataaatatttattatatgactgtgcccgcgggtgtacccgcgggtgccataaacccgcgggtagcgggtttgggtaacatacgctacccgtcgcgggtagcgggtgcgggtacgggtttaaaattaatctcacgggtatgagtttgtaatctctgtacccgcgggttttaaacatgttgccatccctaattttgttcatggattactttggatggcaagaaggcacgggttctaaaacggaaacaaagtatctgcagattttttgtatgtctattatgagcaatatatattatgtcaatattaaaatgtgaattgtacaagttgattaagtttttgtgttacataggtttaaatatattgtttgattgtatgagcaatgatcaattcaacttattttgttaaggtaaatcattgcttcattttaaattatttgttgtgaactaaaacttatacacgtacatatggatttcaggatttgta

SEQ ID NO: 61216 - DNA, 466 bp, Zea Mays
tgcgcgacactggcggttcagtcaatgttagatcagcgaggcagtttgcagaacctggattgaggcccgattctggtggtggtgtaggtccagtgggcatcacaacaggttccatattgttgtcagaactttgttgtgttggtgcaatgggaccaatattctgccgtccatctgcatcttgctgcaactcagtatttgttgcttcatccggaccaatctccgctgttcgtagaagctcaatcccaggagttatcatgtcgatgtgcctgatagtttcagtgtatgctctgtcagatttgcttcccgctcttcccaggcgcattaactttggcagcagcttcgacaaccttgactgctctgtctcattttgaccaccaacactcacatcgtgccggttccacggaaccacagatcttgcattacgtgtatatcgcttcataatgtactttttaggtatgttttggac

SEQ ID NO: 61217 - DNA, 756 bp, Zea Mays
attgaaagccacctggcatgtttgtatatcattcccaaaagcactggtttgcctcctaatgctgaagcgagaccatatagggcgttgaataatccctctcacatcctccctttgactttggtcattcttcacgtaaaaccattccagcatccaggagcccggccacctcttccgaaatgtgggaactgggtagctcgcctcaaaccgaggcacgaaactgtaacaaccaaagttgttgtgatactgctcctttccggtagccttcatctcataagacaactaatggatgtcgcaaaaccatctggcatctggttccagtccttggctcctcatggcccatacaaagatccccactttaatgatagcttcgggagtaagttgatgaaggtaaatttcaaaggttttcagaacttcgaccaacaatttttctagggggaaccgaggcctggctttcatgaagcttctgaaaaccaccactttgtcagcttcaggaagaagaacattattctcccctccggctctcacaattgaaatatcacaaaagtatctccctctcattgcttcgatctgcccttgtttaatagtcgattttccaaagacaacatggcttggtctctagggccgatcttcggcatcttcatttccactttctacatcgaaactctcactatcgctggagttttcagatattccagccaacatctcatttgcaatcttctctgtgttggttttttccatagcttcataaaatccggc

SEQ ID NO: 61218 - DNA, 681 bp, Zea Mays
ggtgtttacagttgcactggactttcatttgcttctattctatgcatttggaaccaaacgcatgagtaaaactttgtaggaaccatttataacgggtgaaactattcatgctatctattaaagataactattcactgctatgtgcctatgttttgaacgggcatgttcctttgttgactgaaccttttgagagcaagatgttgacctgtgtagttgatcgaaaagaactcggtgcggttgcgtcaggcaaaaagcctgcttagcctgtagattgagcctatttgccagaaggggcacagaggataggagaggtgaggtagtgtcctgtgtgcggactgccgaatgctgctactgttacacctacagtaatcctttcgtgatgcccgcattattgcttacagtacagggctaaggcctacagcgttattggctggcaggtcaaggcaccttggtccataggaaacagtagctttgcttagaaagcgaaagatccttttactaacaggcatctaatccacgagcgcagtttgcatctaatcagttgatcgcgtcatgaatgaatgtgtcatgggcaaacacaggactggaatcacgcattttgagacgtctgatcgagcgttggttgcagcttgctgcgtcacggcctgcattaagggaggtgtttggtttctactctttaaa

SEQ ID NO: 61219 - DNA, 586 bp, Zea Mays
aaaataataaggataataacaatgagataataattctaaaggttggattaaaccctaaattaaatttagggtttggaatagagaaggagagagaaaatactatacaatacaaaaaaataaatttataaatagataaatttattccacaagaatctatacaaatcatatattcagaaaaatgagtgcaaaatcaccacaaatttgaaattcaaattgagattcaaaaataagagaaaagaaaaaaaagaaatgaataaaacgctacttgggcctaaaacctacaaaaccggcccatttctgttccacgcgcgctagccatttttttcctccgcgttgcacactcgagccattgcaggtgggccccacctagccacacgctccacgcagccgtgctctctcctcccctcactgtctaatgggtcccgagcgtcagcgatttcttctccacccaccacgactgtgaacgtggccgatttcgtcgccggggaaaacggcgtgagcggttgcgctgcgcgctaactccgcaccccctaactccacgtcgtcgattcttcataagcggaccgagaccctttcccctcgtgct

SEQ ID NO: 61220 - DNA, 476 bp, Zea Mays
tccctcctttcctccccaaacaggaaggcagaatgtctagtaattgtgaggtcctagagtctttactgcctacgaaggacgaaattccggagcaggatcgggccgggaagcacggagcagacagaagtgcactttccaatgcagttagacagagaaggcatggttgtgatgttataatgctgaaggaccccaagaagagattatgtcctgtcgtttaccaccaccgcccgttatttgtgggcttcaccgagggctagaaacatttggtggcagcaaacgaccttcggactggggacgtctacgagcttgttaaggggccagacgatggtgagtcggtgtactctgtccggatgtgtgttcacaaaatttaaagccgccccggctttatctatgcgcttctcttctcttaggtgggctgctaagtgctcttttagaaaatccgcttgcgatgtgtgtacactataaaaggactagcc

SEQ ID NO: 61221 - DNA, 489 bp, Zea Mays
gcactatcatgataaggctatacgacatcgatcctttgtagtgggagacttggtcctttgccaaattctaacgggggaaggacgacacaaattgtcaccactatgggaagggccatttgtagtagcggaggtcactcgaccaggatcatatcggcttactcaaatggatggcacggaaatagggaattcatataatatagagcatctcaggaagttttatccttagcaagatttcaaaagctatcggggcagcattgtattctgtaattggaaaatacatcatcaataaaaagatttcattctcaaagggcactcgaactgtttattatcaatcagcacgcttactcggcatagggtgaccactataccctactaacagagcaatcggcttaagtcggcaatgacttaagacggtgcaacatgctcgcgcttactcggcatagggtgaccactataccctactaacagagcaatcggcttaagtcggca

SEQ ID NO: 61222 - DNA, 725 bp, Zea Mays
gatcaatcccacaaccatgaatcgggtggcccaagtgtaggtccaccctcagatgtcgggtcgtgttgtgcccacctctaggccaaaatctaagtccaagaatggctcaattggttttaaacgtgtcgtgtcatatcgtgtcgggccatcatgacgagctatgctaccatggctggtggtccagacccgccttgcaacaaagatcgaaaatatcttttccgtttttagagcttgttttctcattttttgtaacaaatcttgaaaatatctcaaaaaatggtgggctagattgggtgagtaagatcgggccacaaacaggctagcctacgccatgctcaacttgatgggctatccatgtttagcattagactaaataggtcgacaataaataggttgtgcacgtgtcacctgaaaggcttatccacaagcccaagcatgaccatgatggacctcgggtcaactcgggcacgattattgaaaggcttatccacaagcccaagcatgaccatgacagacctcgggtcaactcgggcacgattattgtcgtattttgctatgcccatgccgagccaaaatagatgtgcctcatgtcgggccatatagtctcacccatctagtcaactatagctggctttgccctgctcttaagtcatctccaacattgtgccataaaatagtgccaccaaaactaaaataccatatcatttaaagtgtttagagcatct

SEQ ID NO: 61223 - DNA, 319 bp, Zea Mays
gcctaatcccatgtaccaacattaagtaactcacactagattaaatcatattagattagatagaatctagattaggttggtatgactagattaaactagttaagatctgattaatttatttagggacaagtaggtagatatgggtaggataagttatgatagttgaaaatcttgggtgcttataattttatgtcggtctatacagattttgcaacccaacgcataagtcaagtacttgtatatggttgagctggtatagggaaccagtttaggttaatcgtgtttataggagtagtgtctaatttatgccactagcatt

SEQ ID NO: 61224 - DNA, 365 bp, Zea Mays
acaccgacctggatagtgctaccctagacctctctagggtacacttggagctggaggatgcacatgcaaggatcgcagccctggaatcttagcttgatggaaggaatcccccggaagttcaagtccacgccatggtgttatcccctccccacaagaggatccgctatggagaaccatgatccatcaccaggctactttagattttaaaatttatattgtaataagttagtttccacgatagacgaaaaacatcttttatattattacaatattaataataacaaccatgtgatggtgttgtttgaaatgtttgatttggattttttgattgagtgtgatagtcttatggaatgatgtccataaga

SEQ ID NO: 61225 - DNA, 543 bp, Zea Mays
tggggaccaatctcaaggcgccttgatgatagaacaaccagtgtttaaccgcttggctctcctgcaacaagtgttagacaatgtgggaagagatccaggcccaagttgtttcagtcaatgcaggtgcctctaatgtcgcttcaattgttgtatgttcctatgctgtcaatctaagtttacccagcatatttgagaaaccttctagcttgctactctagggtgcagatctccaaatggtcctgactccttctaattttagtccactctctgtttttgaagatgctcatccattgccacttatgccttgaacgacaggttctaaattttgcaatttactatacaagacttgttgaagcagggttcctgttgggtgccttctcctactgaaactcctcaaaatagtaatacatcaatggttttcaagtatgtttcaggtcattcaaagcagtgatgaagctagccttcattcgacagcctttggttaaacaatgtacacacgaaggttaagctaggaagttttgacccatggtctgagcatgcaac

SEQ ID NO: 61226 - DNA, 2122 bp, Zea Mays
gctgatggccgaaaggtgccgtcagacatagcttatgtccaatggccaccgtcggaaataagagtatttttgaccctttacgacagagggacgggcaccgctgaacataagcctacgaccgtccgtcgaaaataacttatgtctgatggctttaaccgtcgaaaataccgtgttttactaaagtgacgaacaagcaccacccacgtatatgtatttcctttaatctgggttgctgctgctcgttgtagtagcatattattgaccaaacttctaccacgtcctacgtacaatcatgcaagagtacgtctggtttcacatcagacacttattcacgttgtgtttgttttttcaaagaagaatgtaaaagttcatgtacctgagctctaggacatgccatttttgttttcttttgtttttttgcaagcaccacgtagcagtttaaaagctaaattccaccgaatctatctctatatatgcatacactcagaatgtctccaaaaccctccttaaaaatcatttgggaagtcaatgcatgattatgccaagtgatcgatgaacaaaataaatagagggctctatttttatcttcctctctagtagtttttagtaattagagaatcttcaggactctgttgtataatttacttgctaaaccagagacaagttaacaaaataagcaccaaccttaatttaccccctccaatagtttaccatatgaactttctaaaaaaacgaattgtttggcgcagcaattccaggtcagtgcggccatccaccatgttcgtcgacagataggttgtcattctcggttcaccccatccaccatgtgtgttagtaccggaccttgtacattattccccatgatcttcatgggacagcgacggtagaagtgctacacaaaaaacatttgtcagcttattcctttggctttaatctgtatcggtttctactgtttctacaatatttttgtctctatagattgcagctgcagcagcctgaacagctggcttcaacggataccagacaatcgaaactaaatgtcttagcttatagtctcggttgcatgcaccgatattaattaattgatatctttaataccaattgttgaatatatgttcaagagacaatcatgacatatgataacactaatgagtctttatggtaaaaacacattagtaagggtctatatgtaccaaaggtctggcatgcttgagagaatcatattagctaccgctgtctcttcctatggttgcagacgctcgatacgtcgacaccgcttctctcgatatgcatggtgttagcgcaccgatattacgatatttcatcttcacacgtatggatataccatggtgacactgttgttactgtggtgttgatcaataatgaacttgaggaggatgggcaaatgtgttgttgttggtacgtaaggacattcgatgacttccactacatcaatgtgtccttccactgtgttgcgcgtctagtagtagaaatgcatgattctgtagttacatgcaatcttggttaaacatggtagatatgctagtgtgtatcgtgcatgatttccattagtggtaccagagctaggtcatgcacaatttttgatctagattatttgcatataggtgatactcctagtatattgcatctatttttctttggttatagcaccacttaggacaaatgaggtaattgccggtatagtcgcatatctctaccgactagaatcaccgtagggataacaatacatgtatcttttagattgagaaagtcaagaaatctgaattggatatactgttatggctctatgtcacacaattgtcaatatgattgatagtaaaaatagagacatttagcttgtcttgaaatcaactagatttgattaatctggtgatatttatatattgctttcagtgatgtgaccaggaatttctgagtgtaggacatagattatttggacaaaccattttcataccgcatggtagtatccggctctccacctagcatggttttatagagaatattatgaataatatgacccaaatatagaaaccacatataggacttgatgatgtagatcaccatgataaatggatgacttctatcctacatttaatataat

SEQ ID NO: 61227 - DNA, 433 bp, Zea Mays
attgttaacaggtaacaaatgttaccttcgccgaaggtcctcgagatattgtgctaacaattaaagattttccaagtattggtaacacgtagcgaaggttacctgcgtcagcacccgcgtataggcaagtgacaaagccagggaacttcagcctcgtcgagttgatcggtggacatgaacgaaggggaggacgtacgaagcatgagaggaacccggcgagcacgacggataatagaaaagacatccttaccctcacaaatgttatagatcatgtaaataagacttgtgggtatgtttgcgatttcatacgaagttgtacgtcaccattataaatagaggaacaataccatacattactacggacatgttgtggaacagagtatagagaaattgctctgccttcgaatgtgtttctcgctaccttcgagctctc

SEQ ID NO: 61228 - DNA, 1169 bp, Zea Mays
cggttatatattattagtaggatatatagtctaattaaataggagaaagaatccatcttagatcaaagtaaatttaaattatataatctgatacatgctctaagtcactaaatgttgtctgatcatctattcttcgttcgtgttcactttcgctcaacatcatgattagtatttctttatattgtttacatcataggatagaatgtttttgcttataatatatatatagtactttgaacctcccaataattgttttgtactcggatcaaccagtacgtgcatgatatgtgtatgcatacgtccgtatccatcgatcctcgttagactaaaccgaagagacaacatagcagcagctgttacacattcgacatttccagtgcagtacaaacgacacctttcatcatccaacagctctgagatcatgtatagtcagactaaaccctgatgctgcaaactgaggaattaatgaaccctggtgtttaagtttaactgtgacgatagttctctctgctgtttctgtatcacagatctcggtcgaaagctaaggtgacgatccgagtgctgatctgaagagcaccacgcctacagaggagtgcgatgatcatgaaccggtgacgacagatagttctttgctgctttggcattagatttgaaggccaatcgtgtgcagcagagttaggctgtccccgctgggccactgtgtctgtatgtgttacgtaaaaccagctgcaacagcgtacttgatccccacgctatatatcatccagtaggatggatggaacgcgaaacacagcgttgtacgacatcaacgccatctgctctcgcgcgcgtcttcgcatgctcgaatgaaagtagagatttagggttcggacagccttagacgtagttcggtgacgactaatatgccaatacagaaacacaacccgaccttattagtaccctacacactatcatcaacaaccattccccgcgtgccgtacgtcaggccggtctgttgcgttctttcgcggctgcttcggcatgtatgcaacagccttcggaaacggggccgagatgaattagaaatactggacgtactagattgaaagggtaactgatggttacacttctgatgatagactacagacaaatctcttagcagtgtaggcgtccacacagagccgcgttct

SEQ ID NO: 61229 - DNA, 615 bp, Zea Mays
gggtgttgtttctaatagttgtcatcaagcaaattttgatttggctccacaacataggtgcataatgattctttgtgcaaatatgaaccttaaaacacaaacaacaaaaatcagatataaacaaattgggtgaaaaaaacagtgccaactactccattatgttttatttgttaacatttttatggtcttccaggtggactatcaatatttatataataagggtatactatgatcataatttatctagagtcaattggctgaaggtagacctataataacactgcaatcaaagggataacactgggtatgaaatcataatacgaggacaatgcatacgtctacgacggttactggaagtaaaagatcccaaacatttgtaatatatgcaggttatgcagagtaacatacaataatttattggaaaataaatctaaaacaataaacatgccattgcctgctaggactaccaaatgggacttacatttacttcaaattgttaggcctcaagtttgttggagctataaacagaacaaggggagggaagctacatatattacaaatgtttgtcagaaacgaggaaacaaccgaacggtagttgagctaattgaatccatt

SEQ ID NO: 61230 - DNA, 686 bp, Zea Mays
gtctggattgcgcctcaatttctagagaagacaggggcgaatccagaatatttcccagactcagtcaacagttgaaataggatgacaggattatttttaaataatccaggggctcatatgaaagacggccaaccgaaggggtatcgtggggtgttggtcgtcggatttccacaggatggcccggattacacccatccgctacatgcaccactacgtaaccagagtcgtaggattagtgatgaacggcagatacgcacatgttagccctagccgtgcgatgggtcatcaacgactagctccttaatgctacgaaggggtgcctacagcgtgatggagaatcaaggcgaaccgagtggggtgttccataccatgaatcgacgcttggttgatgatggccacggtgggacgcgagctcggcggagaattctactccggtgagaaattccacgattacagtggttccttcttccccgcagacctcgcgaatacttccgtcgcacctcgatgaggcctctcccactttgcaatcggccgggggacaacgagggtgagatccaccatggggcgcgcggcggggtggcactctgctcttctgtatgcccacggcggcgatggggaaaacgacgcgcaggaagctgggtcggaggtggcgaacttctaacaggcccggataggtagagcgcgtc

SEQ ID NO: 61231 - DNA, 596 bp, Zea Mays
caaaaactcaaaatatttctagacataccttgtggaaactatttccaaagaactcagagacttcatccggcacaactttgggtcagcttttacttttaccattgatggtcggatcacaatagtattattactaatctgtaattgaaaagaaagaatactcagttttaggtaagctaggttaagaagtaaagattgccacacccttcaaaactacgttacaaataaatatcatagcatatactttgttagggaaatgtcacaaggttgggtttttttgttggggagggggtacatttttctatccacgacattaaggggaaaaaaagaaaaccacatacattagtgatcagttgggcttgtacaacagctccatctgccgatcctagaataatacaaagactaaactactcggaaacggtatcccttcagttcaatcacactagtgcaatgaactcccatgagagcaacggaaaaatttgacactatacaaggaagtgatcacggtgtagaaatgtaaaaaggataaacagatattagaatcaactaaggtccccaaacaacaattcccatgcaaaacctgccaattgccaagtaaa

SEQ ID NO: 61232 - DNA, 809 bp, Zea Mays
ccgccgccgccgccacagggagagctagcaaggaggtatataggtatagccgtatagctagctagctgctgctgcgtgaacggggaagaggggagggggctgctgttgcagtgttgcctgttggcctgttgcaggctcagctcgcaagtcgcgtctgcagcagctgctgcctcagggaggggctcattactccctcgttgcgtgctgcagttattgcttgctaccgctagctactgtgtacgttttggccttgccaataagctctaatggagaggatgcagctgcaactgcaagggtccatcgcctcttcgctggtaagttcacatacactacacagccaggggagggggcagccgggcaggcaatggagcacgcacgcagcttccatttgtagcggcaggcagcttctttctggaggaagctccgtcgtaaatgcaatggagtattaattctcctgctcctgctgcatgccgctgctgcctcctctagtcttgacgcttcctttcccttccatgccctctctgcattgttcacctttgctagtacttccctctcatgtcgtcgcagtggcagctctgccgccggcacccacgcacgcacgcacgcacaattcaatgcgcaccactgtactcgctctctgtgcttcctgctaggagatcgacatcgactcgactactaggagtatctttaatgtcgttgctgctgctcccctttctcgatcggcttgctgatgatgtgcctttcttgctccccttccggcgatggcgtggtgatgacgacggtggcggtaatggaacagtgggcagaca

SEQ ID NO: 61233 - DNA, 410 bp, Zea Mays
aaaggagttgttcggttcggtgtcttcggaaaactcagcccaagatacattggatcgttcactatcttggcccgagtgggcagcctggcttatcgcttgcaactgccggattccatggcaggggtacacccggtatttcatgtctctatgttgaggaagttcttgcgggatccggaccatcagattgagatggaaccaattgctgtgcagcaggatctgactttggagtgtcatccggtgtgtatcttggaatcctcggagcgtgttttgaggaagagatcaattaagtatgtcaaggtcttatggactaatcagtctgagcgcgaggcaacgtgggaacttgaggagctgatgcggcagaaatatccagaactttttattgtgggtaagtgttgttgattcattaatct

SEQ ID NO: 61234 - DNA, 1545 bp, Zea Mays
aaaccaatgacatttgaatatcactggagtaagaggtttggaaccaagaaaattgagttcatatatttctttgattcgtccaaaataatcgacatcgtcaaggccaggcgtaaagactccagaacacgttgtttttcgattgggccaactttgatcgtagtttgttgtgcaaaaacggtatccattgatgtcatacccagaatatttattgaccctataagcaaagttgttggatacttgtctcaactcggcactcatagacagatctctttggccctacaagtattcgcaagttaaaagacgctaaattgagttcatagacagatctctctaacaaactaagcacataccttacgtttgaatcaggaaatgaaatcaggcaatccatttctcgcaccctttataagaagagtatcatattcctgtggagttaggtcccttgatcaacgccagaattcgtgaagaaattattccatgtatggcgtcacctcgtcaaggttggtcaatacatatagcatgatatgtcaccactcttcatgtgtcagggtcttggtggtcgaaccacttgtgctaccgagttggccttgaaatatgccgaggttcgattcattgccgccatcattgtaacgagggggtggattacgcacgctcggcagtttgtcaccgtagtaagttgttgtgaagtttgacacctcctctagaatgtatgcctctgcaatggaagcctcgattttgcatttatttctacatttctttcgaatagtctttagacatctctcgattggatagcaccaacgtccctgcaccgccccccatccgtgcctcataggggagatgaagaatcaaatactgcattggattgaagaagccgggcggaaatatcttttcaagcttacacagtaacacaggtgccaatctttccaagtctgtaatcacagtctgagataactcttttgcacaaagctggcgaaagaaatagctcaactctgaaagcgctagctagacatgctcagggacatagcctcgaaccatcgcaggaagaatccattcaatccatatgtggaagtcatgactcttcatccctaagactcgcaaagtagataagttcaccccctactcaggttagctgcatacccatcaacgaacatcaacatcttgatccactgaagtacttccttcctctaggccctgcttaggacaaaattggccttaggccttctccatgtctttccaccactaggcggcttcatctcttggtttggtctatcacataacgctgctagatccactcttgtctttacgttatccttgaacttaccaggaatgtccataattgttgcccaaagtgccttggcaacattcttttcagtgtgcatcacgtcaatgttgtgtggaaggagcaggtcgtcataataagggagccgagtcaagcccgacttatgtgtccacatatgctgctcaccatatcccacaaaaccaccttttgtattggccacgagcccatctatctgttgacgaattttggcactagtcatcgttgcaagt

SEQ ID NO: 61235 - DNA, 360 bp, Zea Mays
ttcttgactgtaatgcctacaccaaatggtatcttccctctaggatacaagtgggttttcattcagaaacaaaaataaaaatggtgaggtagtgagatacaaagcaatggtagtagtgcaagggtttacacaaataattgacgttgatttcaatgaaacttattcaccagttttgagtgcaataactttccgatatttaatatcattggtagtacaaaatcgtttatctatttagttgatggacgtagtgactgcatatctctatgggtcactggattctgatatatagatgaaagttctaggtggaatagatgtaccagatccaaagacaaatcgcaatatgtattgcgtaaagttgca

SEQ ID NO: 61236 - DNA, 557 bp, Zea Mays
tcgaatataaagaattcaaaacaatagatcaccttttaaacctcaaatgatgtttctatgatattgtgggcattgtattcacactagagggtattagagtacaactagtggatgaagtcgttattgggctatctaataaccttttgtgatactaggtttcctataatcccctctattcaaggcatacctagatggtgtttatgtccactcaagtaaaacatcgcacatcattataccacatcgtttctcaaaataaaataaagaccatgggaaatttagccaaattgcacgagagaactatccaaacttaggttaaggttgtaagacaccttttttccaccatacagttgctaaaaagttggaatataaagaattcaaaacaatagatcacctttgagactaaaaatagtgtttctatgatattgagggcgttgtattcgcacgagagggtattagactacaactactggatgaagatgttagtgggctagctaatgaccttttgttaaaacaggtttcctataatcccgtctaatcatggcatacttagatggtgt

SEQ ID NO: 61237 - DNA, 366 bp, Zea Mays
gacggtctcattttctgtttatctggtaaacagatgcgagagatctaataagctacgttgacgcccaccaaaccattaaagaaaccatcccgtgacacgtcagagcatcatcagttgtaaaccacgtacgggagtacttgggagcgaaaccacgtccagttgggaatgatacacgaaattgtctcgtattttcttggccgcgccactctctgtcactgataacagttggcgccgttcctggatcggaagtcaaccctctccagcttataaacttaacatatatatacctgctgcacactgtcactgactcacagcggctttctgaaatgaaaaactccaacaacgtatttcattcggtattagtgt

SEQ ID NO: 61238 - DNA, 1224 bp, Zea Mays
gcttgacattgacccattgcagaaaattttagacttggcaacagagacgggacttctcagcaaaatcaggggccgctcgccttgccttcgtctctcattgtatgctgatgatgcggccttgtttattgcaccaaaaaagaggaggtcgagacaatactaaagctgctcaggctatttggtgaggcgtcagggctgttgacaaacttccataagtccacagttgtgcctatccgttgtcaaggtattgacctcaacgcggtcctaagaaatatgccggccagaagggctaccttccccttaaaatacctgggcctcccgctctcatcatccggactgaagaagagcgacttttagttcttaattgacaaaatttcgaacaagctcagtggctggaatgggaaaaacctctctatggctggcaaactgactttagttaagtcagtcattacctcctaagcaatctaccttctctctgctttacgggctcctaagaaaatattgaatttaattgactcgagaagggaaaaaatcctttgggctgggtgtgcgcaaattacaggaggtaaatgtaaggtaaattggatccgttccgcaaggccaaaagagtgcggaggcttgggtatccttcatttaaccaaatttgcaagggccttgcgtttgcgttggctgtggcaagattgggcttcatcagctaggtttctggacggccttggaactcccttgcacgacaaaagatcgacagctcttcgcagcagtgacatcaatttcggtgggagacgggacaaaggtgtccttttggaatgatgcgtgggtgcaagggttaagaccgaaggacattgcgcctctcattttcaatgtgtcccgaagaaagaacaaatctttgagtgaagcgttgtggaatcatacttggatttgggacctcaacctgttttctgttgaggtgacagagcaacacattgtggagtactgtagcctttggtcaattttgcaaagaatatccttgcaaccgggtatttgcgactctattagttggaaactctcagaagaccgacaatattcggcgaaatcagcataccttgcccaattcctcggctctgaacttacaaatatgaagtagatcaattggaaggtatgggcgccaccgaaatataaattcttcagttggttagccatccaaaataaaatttggacaatggatcgtcttgcgaagagggattggcccca

SEQ ID NO: 61239 - DNA, 459 bp, Zea Mays
gaaagtacgaaggagctgaaccatattgcattagtattggcggcccaaaaggaggatatgttgctgatgcatgaaactcttctcctccccaatcctgatttctagatttacgcttcggaggtgattttgatggcttcaaaggtgctctagatggcttagcaatgccagtttgatcaacatcctttgccttaatttgctcatgatatttagccagaagttgctcaaaagtaacctttgccttttacccttttgtttatcatgaccttcacctccaaatcatttacattttggcatacctggtgcaccatgccccatggcgcatccggtcttattagcctttcttttgcccggagccttccgagtaaccaccacatgtgttagatgtggtgcacgagggtcaccaatgataatatttttcctttgtctttatcggtcgaatatggccgaaccaagactttc

SEQ ID NO: 61240 - DNA, 581 bp, Zea Mays
ataatctcgtcctcgagatttaggaagatctagggaaaagatggggaaaatctatacgaagctcttcttctctttcccacgttgcttcatcctctccatggtgactccattgcactttgcacatctttatcaccttatttcttgtaactcgagtcgaagtgtcaagaatcatgataggatactccgtgtaagtcaaatcaccctgaacactgagctcttccattggtaactgttcctcagggacacggagacacttcttaagttgagacacatggaatacattgtgcacatccaatagactggcaggtagctcgagttggtgtgctatctccccaactcgcctaaagatcaagaatggtccaatatagcgaggggacaatttgcccttaactttgattctcctcattccacgaagtggtgacactttgagatacacataatctccttcctcaaattccagtggtctccttctattatcagcatagctcttttgtctggtttgagctaccctcaaattctctcgaattatacggacttgttcttctgcttcttgaatcagttcaggcccaaagaactgtctt

SEQ ID NO: 61241 - DNA, 319 bp, Zea Mays
tgaggataagggtgttcaaatgattaaggaaatgaccaagcaaaaggcagagaaatacaagtgcttccatcaggacagcaagggaattttatggtttgaagaccgattggttgttcccagggaccttgagctcagaaagaagatactagatgaagctcacctttccaaattctctatgcaccctggtagcaacaagatgtaccatgatctcagatctctatactgttggaccaggatgaagagggaaattgccaagtacatatcagaatgtgacacctgccatagaatcaaagccagtcatttgaaggcagcaggccct

SEQ ID NO: 61242 - DNA, 353 bp, Zea Mays
tggatagccatatcctcggccagacaattttggtggtaataacatggcacctccacattcagtactaaatccacataatctcggtccattgccaattggaacttcaatgaggtcgttgtcaagtatgtttgctcctttagattttccaagcatatcttcagctgatgcataccgtgaacatcatgaggtcactaccatggtaaggagtgtattgcatggacatattttgtcgcaaaactaagacactttaaaatttcttcataggatgttggccattatacttaaacaatataggaatgttgttccacatgttttgtaacctactctgtatctctaacccatttgcataatag

SEQ ID NO: 61243 - DNA, 803 bp, Zea Mays
ataagctactgaaatgaaagagattctaagtgcatattagtgatattgatatgattgtagttttggaccacttttgcaccacatgtgatgatttttgcaaacttttgataaaatctttttcaaagttatttgcgtatggcctaaggtacaagaatgaaattttaatagcatttctaggatttaaagatttccccttttttcaaatgcttttcctttgcccatttacaaaactccccctgaagaagttctcccctttgttataaaatagtttaaaacgttttcagaaaatagtggtggtgcggtccttttgctttgtcctaaaacattctccccctttggcattaagcaccaaaaatgaagaaatgttgaggctttttcaatagatatgaaattgaagtacatgcgtttgagcaagggtggttgataccgaacaaatatgaagtggaactgctccctttgctcaaaactccatttccctttcaatttgagactaagcacaacatatacttgaagaacgattagtctcaaggatttaatgtgtagagaaatgctccacctaaacttgtgcatacaagcgatgaatacttgtatcaatgcaccttaggacttgtgaggtatgaggatgcaagttctacacattgaactttggtataagcaaaaatatgaaagaaatatataagatcaaaagatatgtcaatgaagctttattatagttctatataatatagattgctccccctaaatatgtgccttgagaggaatacatattttggccttaaatgccaaatgcacataatgaggtc

SEQ ID NO: 61244 - DNA, 715 bp, Zea Mays
gttttcaccactttcattgtcttgtggagaaaagaatgcaatgttttttttttttgaaggctgaggaatctgaaggaaactaataaggcgtccgatgcactaacgtgtcgttgccaaaaaaaaaatggttcggaaatttggatccctaaaatgattttgtttttgatgagttgaccctgatggtaatttaatttgtaacgacagatttgctgcaacattttcgctctttattatcttggttgcaaatagttacgttattcaggttttaattgtccagctagctagctagtgatttatatatgggtccgatcgagggagttgtcagcagcacgtcgtgtttgaacgggggattatcattagtaacaatgcaacaaacaagttacctccttgcattgtactactagtactaaacgtatttgatagaaaaaaaatttgttgttgctttccggtttggttctttcctatagcctgcagcaacacacacacgcgcgcatagcttaactgccaagtactagcaagcattggcgtgcgtaggacccaaagcggacgcaggcagagttcattgaccagtagcacgtacgttctagttgcgagttgattgggatttggtaaacatcattaggacaagtagaacaagcctctccctcctccccctcacctttcagctaggagctagcatggcgattgaagcaagaagtggggacatacaaaggca

SEQ ID NO: 61245 - DNA, 518 bp, Zea Mays
gttctgtccttgccagatttcactgtcccgttctttatagaaaccgatgccagtgccgtaggagtcggggcagtccttatgcagcatggtcaccccctcgcctttctcagcaaggcgctgggtccaaaatctcatggcttgtcaacttatgaaaaggagtacctcattgttatcctgacagtccaacaatggcggtgttatctttagcatcatgaatttgtcattcttaccgaccacaaaagcttgacccaattgaacgagcaacgtcttcataccccttggcaacataaggttttcaccaaattgcttgggttacagtataaaatccaataccgacctgggactgagaattgtgtggtcgatgcattgtcccgccgtgcaacagctgactgtcaggctatattagtatttgtacctcagtggttgatggacgttcaagccagttacactctagattcagatgctcagtccttgttggcgaagctttctcttgaccccaatgttgttcctcattatac

SEQ ID NO: 61246 - DNA, 971 bp, Zea Mays
tatttgagtatggttgctatagcaaaatcaaagctggattatagatcaacaactttgttacagatgaattaacatgttgtcacataaaaattagagaatgaaggcctctaactcgctctgtcaggcgctctgatgggggttctgatggtacagtggcttgacaaagaccagcagatgcagtgcacctcatcgccgatgaccccgcggcgcgatcctcgccgacgctatgattcgtgcccggtggcgcgcggataatgacccggggtaaaagatcttggtgttgggatgagctcagacccgaccactggattattcaccgtacccacttgttgtacgaccaaccgaggtgtcctcgctatagttcgccgcctttgtagtcgtgccacgtgcttaggaacgttaccatgtcacagtgaaccgtaagagggagtctgtccattgccgggagttttgcctcagtgaaagccacgttagcgctcgccggtgatttccccctctctctggccgcccgtgtgtcttccccaaattggatgccaccgttgttgatctctataaattgagcgctcagcgtgctccgttaggttgttacgcaccaagtgcaccagctctcgcctctgatcatccaccgtagcgtcccaatttcacttttcccccaattctgttttccgcgccgccatgaacatctcgtcgtggccagccatctactggtcagttcaagattctctgcttgatgttctagcatcccttaagtttcctgttgctcatagacccgtttgattgaactagaccgcacggaaacaccaagaacacctcggtttgtctccggtattcaccgctgtcgtgggtagatgaactccgggccggattcacgcaattcatagaggaattagggtcgccaggggtaggaataggtgtcgaatgagttagggcatcagtcgttgcgcatcctggccactacaagctcgccggag

SEQ ID NO: 61247 - DNA, 965 bp, Zea Mays
tgatgatgatatccatttcctcatcatcaagtctggaaggatcaattggaagccctttgcttagggcctcttcttccttcttctcatttgttgccttaaaggcaatggcttgtggcttgatggtggtggtgttttcttgatccaaatattcaatgtgcttggaatccttaaccattatctcatggctaaaaaatttgccaagcacctccttttttgagacatcttttcgtacctaggagtttcacaaagtaaagtagcgagagttgcattatgggaatgagggacattagcatgagtttgacgacttcgtggtccattcacttcgtgctcccatagttttggacttggtttgccaaggatttgagccggttgtacatctcttgtggtccttctcctttgttgatggtgaaccatccgagctcttcttcgataagctctatcttagttatcttggtgatcttgtcaccttcatgcgtcatcttgagtgtgtccaaaatctccttggcgctctccaacccattcgctttgttgtattcttccctacataaagaggcaagtaatactgtggtggcttgggagttgcgatgaataattttggccacctccttcaggttataatcctcatggccactctccggtatttgcaaccctaaatcaacaacacccaaatgcttaggtggagtgagtatatatagcttttcattttgtgtctccaccaagaataatcttcaccatcaaaatgtggtggttttccaaattgaaccaaaagcaagggagtcgtagaatgtttaggaatgcgagaataatcaaatggagtacatgtaaaggtatttttaactagtttgcgttcatggcactttttggaggtggattccttggtgtttaaggttgatggcaatgtgtcggtctcgtagtagtcgatctatttgattcttctcttttttccatccttcttatgtcacttg

SEQ ID NO: 61248 - DNA, 477 bp, Zea Mays
ggaaacctcccacttcagttcatcaaataagaagtttcctaggcctagctggttattaccgtcgtttcatcccaaacttttctagaattgccaaaccaatgacagagttgttaaggaagggagttaaatttgtgtggaaccaacaatgtgaagaagcctttcaccttctaagagaacatttaaccacaacaccggtcttagctcagctcgacaatgccaagccttttgatgtgtattgtgatgcttccggtattggactcggttgtgtgcttatgcaagagaaccgagtcattgcctatgcttcacgtgcacttcggccacatgaacagagttatccaacgcatgacctggaattagcggctgtgattcatgctctaaaaatatggagacattatcttatgggcactcgttgtaatatctacacagatcacaaaagtctcaaatacattttcactcaaaccgaattaaacatgagac

SEQ ID NO: 61249 - DNA, 396 bp, Zea Mays
cgagctttgagtggattgttgaaaataatccactcaaagatcttcatctcatgctttagggatcaacattttatctttgtctcatgctttagaaattagcattttgtcttcgcctcatactttagaaatcagcattttatcttcatctcatgctttagaaatcaacattttatcttcatctcatgctttagggatcaccattttgtcttcatctcatgcttttgcgaactccaacaatgtggtctgcccatgccttgttaggtttgaaatttatttgatcggcgacagattggacgtctggtagatggctcttggctggtcttcatttcactttgtgcttcaatgcttttgccgactagacttgcagttcagtagctatatttggctttcctttta

SEQ ID NO: 61250 - DNA, 585 bp, Zea Mays
agacgaaagcaaaaggagactattgttgtggaacgaaacgagcgctggtttcgtcgtgttgtgagcaggcgaaagctagcttgccgcatcggtctcatctcaatgctggatttggtaacgtacggcgtggatggcagtgccgttcgagactaccatctcatctagtccgctactagagtagactagtagagcaggtattatattcccctcccctcaaaaaatcatgatactaccggccggccaggcctaatctgtcgctcgaaatataatctcctctcttcgtttattattattcgatcgcattgggggggagtctggctgggatcattggatgcctttctttcttgaccccacttttgagcgctgttacgttcctccccatctaatctacctatctttctttcttttttttcagcccattttccatcgctgaaaaaatggtcatgtcatgtcgtggttttttttttctcccaccaccaccaccaccgtacgtaccacatgcacgcacggcgctgcacatcccttccactgctctctcaggtctaggattttgattgctgacatggacagcagcacccgtgggac

SEQ ID NO: 61251 - DNA, 311 bp, Zea Mays
gctacatattatgtaggttataagctggacaggttgaggtaagaaaggttatggcaaggaaaagacttcatccaatatgtttaagtcttgattcatctcgagatttgctttgactattatatccttccttgtcgatgtcgatcttttcttccccggtcttggtcacattgattcatggttagtgtattttatcggacttggggagtatggttaagatagttatggatgagatagaatacatgatgtatgtcaaaagtttgtttgatgttaggtggggatagacaaattatgcaatccatcatgactatcgg

SEQ ID NO: 61252 - DNA, 456 bp, Zea Mays
cacccttcccttccttcttccatcgttgtgagaaacggctctaccctacccgtcacctctatgggtgccacggttcttcccggtccctttcgtttaaccatcgtccttgtcgccctcaatatcattcaaaatcttctttatgttcgttagttcactattgacaattcttgttctatggaatttgacccgttcggtctgtctgtgaaggatcttgtcactaggacccttctcgctcggtgtgacagccccggtcccctctacacgcttcgcctgcctgcttcccctacatcgacttctgccccgcctgtccttgcagcggtcgcatcctctgtgacttggcatcgtcatcgtcatttctggctataagtattatttactcgttctcgatgacttctcgcactaattgttgacttttccctacgtcagaagtcagacacctttcccaccttgtctcac

SEQ ID NO: 61253 - DNA, 331 bp, Zea Mays
ggtttacccaattactcataccagtttgaaattgtgtattaatttatacaacatttttaggtattataattttgagaacttataacaatagtcaattatttgtaatgtaagatgccagcggggcaaacttttctcctgatattatataccaatttgttttataaagcattattttgatctcttcattattcggcaaaaaagagaagctttggaatagaacatacaaggccaataattcgttctatctgggaaaaaccacctgattgctaagctttcgattaagcaaatggtgattgttgaacaacgtagttgtcgcagatctccgatccgg

SEQ ID NO: 61254 - DNA, 604 bp, Zea Mays
caacgtatacctggcaacgtatagttatatgcgttggaagttattaggttccaacgcatgttatgtgttgcaacctatatccgttaaattacaatgatactggcaacgtttaacatgtgttgcaaaccgtatacgtagagtaaatacgatcatagcaacatttaccatgtgttgcaactgtatgcgtagagtaactagaattcttgtaacgtttacatgcgttgtaaaccgtatctgtagattaattttggtacttaagcaattttgcaactatggccgacccgtgataaaatttaactcgcgggtctcaccgatatccgacccgtgataaaatcaggtcgggtacgggttttaactttcacccgcgggtcctggcggatatccgaaattatttcagttttcacttttccgcccactagaaaccggcggaccggcccattctccatctttattcaccagaaaccctattagcccacgagaattaattagtttccgtcggttgctagattaaccgacgggagttaccagcatgtacttctcgtagacgccttcctctcccttacagaacctctcccgctctcccaaaaacctcccaccccaccgc

SEQ ID NO: 61255 - DNA, 288 bp, Zea Mays
gatcaacttagcagtcgatcggatcctcgccatctaaggaaattactcccgaagatgttatgtcgaaactacttccgaagtggtgttagatgcagagtttcggagtcacagaaaattttggcagcaagtggttgggggcagtaaatgtgactcgctcccactcgctctatcacttttatactgataagtgggcgcgaagaggtgcgagtcaagtctgcgtgagcaggcaatgtcgccttccccttcttctcatctggtggaccgcgagtctaactctctttctaccga

SEQ ID NO: 61256 - DNA, 467 bp, Zea Mays
gataaggagagtgtgtggaggaaaacaggatcgaacaattgaacagaatcaatactacctctgcagctctgctccttcctccgaattcctgttcctattatggatgaactgctcgacgagttatatggggctgcctggttttcaacgttggacctccgtgctggtttctaccaaattcgcatggcgcccgaggatcaacataagacggcatttcagacccaccacggccactttgagttccgagtcatggcatttggccttaccggtgcacctgctacatttcaaggagctatgaataagacacttgcgccacttcttcgcaaatgtgccttggtctttttcgacgacctcttggtttatagtccgacatgggaaactcacttgcaacacattgagctcgtcttgcagctgctttccacagattcttggcaagtcaaactgtccaaatgctccttcgccaagcagga

SEQ ID NO: 61257 - DNA, 388 bp, Zea Mays
cccatagtatctcatcaaagtgtgcagctgtttgggggaaggagagcggatttttttttgcaaaggaattagcatcacatggaaagataggggtgctttaaaccgttacaatggcgggaaccatgtcaatttggttgatgggttgggatgtatgtcgtgtatatatcgtgcaaaatactaatatgaacggtacatattaatgtttgtggagtgttatctttactacatattaagacagtaaaggtagtctgcctcccctcgttctgccgttctgccgtccatcgatctggaccgtccgtatcctatcatgcgtctgcgtctcccacactccatctccctccaccgcacgaccgcacccaatccctaaccttcccccgcacgttcctct

SEQ ID NO: 61258 - DNA, 623 bp, Zea Mays
gctgaattcaactagaggaatatgtagatttttaggaacatattctgttgttgtacctatttagttgagatttaagaattttagtagcaaatattttttataaagtagaaccaaacacatcatatatatctccatgggggctataaataggaacccaacaggctatttgagtggtgtgggagacgaggaacatatatagtgagttgaggctcatttatagtagctttggacacccaagtgctcaagaaaattagtgtgaatgctttgtaaagtgcttaagttagttaaaccaccgcttatactgctcgctctaggtttaggcgcaatttttattgttgtttgtaaaccacttgccacttggtgcttgcacgcactatggttgtgctcggagtggcttgtactcttgtgatatcatgccaattgcatttgtggtgtggctgctatattgtactagagggaactagtctcatgcagtttcggccaaaacttgattgtgaatacgctagggagtggtttggaaaaggctgttctagagaccaacttgcacatgggaaaagcttgagaccatccatagagttcaccgaatgagagttaggctcttgcataggcatccttgtgatgcg

SEQ ID NO: 61259 - DNA, 279 bp, Zea Mays
ttccagttctttgaaatcatcggagaaaccaatttatttggatgtaacgcaggatcgagggtctgtgggattttcgagctgtgtatgtgtatagcgcaaccaacaacatacaatcaagcgtgtgaattattatcaatatctttacttgctctactatacatagcatgcatccttttgttaattagctcatcgatcatatctatggaggcaaggcagaggggcttttgtttctgtttttctacaaatagtggacaagtttaggaagctggcagcactcat

SEQ ID NO: 61260 - DNA, 391 bp, Zea Mays
ttcggggcgcgagcgggggaatctgcctttaaaaaggggttcatccctcgagtagcagccatgccttgcttctctcccactcgcggtgccctttcgccttcgagctctctgcgcccctttgccttcaaggtttctgctttatgtcgccatagtttaccatggccttgtaagttcatctcgagcatgccagactgagtgggtgctcgacatggtgtgccgcctacttggatgggatgtgtcagcgttcggcagaagaatttgcgccggcgccatcctccccggcgaacttgccgccagagagttcgtgctctttttgtcttcaacctccccagcgggttggtgccgccgatcttgcctttcctctgctggaggtgcacggccccatgggggc

SEQ ID NO: 61261 - DNA, 483 bp, Zea Mays
gttggttccataagctatatttttatccatttgcatcactaaagctgcaatatgccttgggtctttgacaacctttagcggggcaaatgagatggttttgatttagtaaaactattttaccatttaatcatattatgaatatgaaacatatctgcatgtggcaatgctttccatggtatttccatttgtaatctttttttgagcaaaaccatctgtcatttgttcctttcaatacttagtatctgtgcaatttgcgtttagaagtgttcacaaggttaacatttcagaagtttattttttccaggacataaatttgggtttcctgattgtgctgttatctatgataaaggcatttgaccctactagttagcattgttttagttgacttgatgcttttatctatttgatttgatatatattactacaattcacatttggaagacatgtaagagaagtatatttagctgaaactgcactggagca

SEQ ID NO: 61262 - DNA, 378 bp, Zea Mays
cagggcatacttcagaatggacaactggttgctgtgaagaagcttgtgcaaacatccggagttcatgatagacggtttcagaatgaggcaggcaatctccagtttctggagcacagaaatatagtcaagttacttggttcttgttaccaagtagaaaagaaattggtggagagaaacaacaaacattttctatcagatgttccagaaaagtttctatgctatgaatatctgtctaatggaagccttgacaactatatttacggtatgatacacatatggctgcataattgtttccttcttttcgttttttgactgtctaaatacagaatcgtatatggtcttggtctacaataggaagtaaacattatgaaggctatt

SEQ ID NO: 61263 - DNA, 487 bp, Zea Mays
aaaaaatcaaatcacgtgcttgttttggtgtttctagcccttgtgtgttttacacttgaaattgcacctgcacaacttatagacactcatagcttgaccgctagaccaacccaagtctccttgtgcacttgtgtcaaaaaaaatattgttggtgtctagttgcgcaaaccctatcaaggccatgtttctttccatgaatccttgcccctaaaacttcatagcatttctgttgatcatcctagctgatcctgtttgcctacctcacttttcacctgaatcaggtaatctttttcctcgtgaatcatgttctggctttgtcattcgaatctctggatcccttaatgattctgccccgttatctggttatctgctataacccgttctcaagtatcggatgttgatcttgcctaaatctctcatttctgatcattctcataccccttctctaaggatcatgacgtcattttatcaacttatctctgaacgg

SEQ ID NO: 61264 - DNA, 642 bp, Zea Mays
gtttggtgatatatatatataatataaaatgtaaaacttatctctgcaacatgacacatatatagtaaaatggacccacatgcggcccgatcattaatgtgtcacacaacagatctaagtcatcattttactttatttcctatcatttacgtaccaaggggtttagggttaattgttggatattgtgagtgagatgtaccattttctataagtgtttcttcattttgttctttatctaactattattttaatagatgcatgaggaagatagactaatacagagacatacactacaacacatgtcgctacgtattgcccctgtgctctgtgttttttccttctctgcggcctgcaccatcgatgagcggcgcaagcgctgctacctcctcctgaacccctccgtgcacacaaggatgctctgccgcgctaccccttggtgctaactccctcccccgaattgcttatttttttctcttgcctccaccccatctcagatcaagttcaagccgttgggcccactctgatgatctagccccgaaatccccaatcgagctcgatcaaagcccgtcgattccactggattggacctcccgccgcatttgaattcctcacaatttccacttccagtagcttctcgaacct

SEQ ID NO: 61265 - DNA, 392 bp, Zea Mays
gatttctgggcttcgttggaacgctggaatttcgaggaaccatataggaatttcatagcaattagttgtttgggcggaggacgaacttgaccttgatccatctaacccgactacaaccagacatttcttacacaggagcacttcgacttcgacgcacagtagtcttcggacgacttctcataggggagtcaagaggagggccctagtaaaccccctgaaggcatttcaccgacgattgtgcccaaaccacgcaaaggcaaggacgtgacttcgctgcgccatcggaagccttgcctgcgacgacgacctcgcagaaccgagggtgcaacacatagttggagactttgtcaggctacgaaagggcccaggactccgcctcgacgccatctgga

SEQ ID NO: 61266 - DNA, 340 bp, Zea Mays
gttcttcagatttttagcacattccatagctatttcatagcatttttctttagcatcacaaagctcatcaacatttttctgtgcccttgatctttcaatttcacatatttcatgttttactacttcaacattaaaattatcagttgcttcggcaactttcttctttagctcttgcatctcagcttcatgagtttcagcttgagcagaaagcctggctttgctagattttaatgtctctaccaaagagagtaggatcttatccttctcaagagcttcgtttctcaatgttatgacctccgaacgaaggtttccaagtgctattcgacagctctcatcctct

SEQ ID NO: 61267 - DNA, 375 bp, Zea Mays
acacatgagtgcttccaccattgatggtgcaagcctactacggtgtggactaattattcggcctcctgtgctaaacacggactcagatgccactgttgaaacaggtattgcaagcacatcacgtgcaatctttctcaaagtaggatatttgagcccagcatgctgccaccacaggatgatatccaaaccctgtgtcctaggaagcagtggttcctctaagtacaaatccagctctgtgcgcacataagtggaggtcacatctggttgcttggacatgtaatcatcaaaagtgtccattcaatcctcctctaacatgtcactaggaccactacttgccctaggtcaagcaccatctgttgtggctacaacttctag

SEQ ID NO: 61268 - DNA, 290 bp, Zea Mays
aaaccggtacaatttcaaattgctttgaattgtccaaaccggtataccacacgcacatgacatcatctcgatcacgctctcttcaagcagcaggcagcagttcgaaacccacgcaagtttaactgatagaacgcagatctatgacaacctagtaagatctgaaggcttcttatttaccctcaccaataaatgctcctgaatgctaatttagcgtgtgcatccttattttcggtctccagcaagatcctctaaagggacttagtaaatgtggatgcttctgtgactacgag

SEQ ID NO: 61269 - DNA, 485 bp, Zea Mays
atagagtatgcctttaaagcatagataggtttgggcaagaaagggtagggtaagaaaatgcttcatccaagtttgtggatcttgattcctttgaagatctggcttgaatcttatccttccttgatttgatgaggtcgatcatcttcgatcttcgttcttgaagttgttatccgaatttgggacatgtagttaaggcagattcttaggtaaacaaaataggttaataggtggttatgagttaaataagtctaagtagagtttgtcttgttgttttgcttctagattggttggataagttatgtaacatgttatatcggtcaagttggtgttatcatcaaggataatgggtattggtgttaacataactagggacatagttgagataggtgtgggtacatggggtaggtagattgaaccgagttttttttgcttgtaagataattgggttgggcaacctataatatagtgggtcggggtttctcgga

SEQ ID NO: 61270 - DNA, 358 bp, Zea Mays
ggcatggttctttgaagtgtttcttgaacttaaaatgatagggcagtcgaacaagttcattctttttcttctctcctttaagcttcggcatactccattcctttaacgttggaaatactctattggctaagtattcctaaaccaaatccctagtaccaatatgctcagacacaactctaaattcgcccacaacatttaggcatgatgaccccggcgtcatgcagcactggggcctagttaacccgaaggttagctccagtgggctctgaactagcttctcctttctcatcaaccttaacataaaaccattcagttttccagccggttggccatttggtgcggtagctaaccaccggtg

SEQ ID NO: 61271 - DNA, 717 bp, Zea Mays
gcaccatcatgtgcgcgagtccgtgatggcatttgaggcaaagaaacatttggaaaatataatatgccagcatacaccatcatattacattaccaaaatgtaataattatacagactccatggtacaactcgacttcattacttattttacataagtataacatctaaactataatattctagtcttcgtcatcctttgttgcttcattttctgctgtaggagatcgttcatcaacaaggttcatggaaggagggggcctaaaaaggtccagctccccatcaggtccttcatttgctgttcacgatggtccggctcccattgcagcaacgtcaaaaggcacattcgggtgcagtcgagcatacaatacatgtacttcttttatgtaaagtattgcagtacacttgtaggctgtcgagggccacactaagctctgccacacgagctcgagcttttgcttcgcggtcccaagcgatcgaacacgagttgacggcccaatcaatggccgaatcccgttctgaaatctcatattgcaagcgactgacgtcaactgacaattcagctatacgttggttgtcctgctcccgtgctctattcctgtgaagtagctctgaccgaagttgttccaccctggcttcttggtctccaattgggtcattgctgccactactactcccttcatgtctggtggctatgtgatggcgaggcacgccaaaagg

SEQ ID NO: 61272 - DNA, 772 bp, Zea Mays
ttcttctcataatcctcaacatccctaggagcataccgagatagctgaataaatttgtccctatattcgctcacggacatacttccatgtttgagggatagaaactccttctttttaatgagtccagcaggaatatggtaattcctgaattgagtggagaattctacccaggtgattgtgttgacggcagcatgagcagcgcagtacgcatcccaccaatccgcagcggggccagtaagacgacccgatgcatagagcactttctctctgtccaagcactgagctgtgttgagcatcttatctacatactttagccagtcatctacttgtagtgggtccgtggagttggataaggttggtggtttgtgactcataaactcctgatgcttatccctgggtggagctggtggtggtggtggagatagtggtggttgctgctgttgcacccttcctccaggcgcatctcctccctctcttggcgcatctcctgacgctcctgtcgcatctatgtgtgcatatcatccatagtatcagccatctgttgcattatctgcatctgggctgtaactgctggatcagctcagactggtggaggatttggagaattcatctctgcttgttgttgtctaagcactctccggttatgtggattggcaggtagatcatttcctccgcccttcctagtattgaccatctgagttagaagcatatggtgtttggcaagggaaattatttggtaggcagaacgaataggctagtagctggttacgaa

SEQ ID NO: 61273 - DNA, 425 bp, Zea Mays
caatagatttgtgttcggtggtggatgctagtgcagactcacttgcaatggtgaatcactgggacttaaacgatgaacttgggtgacgaggttatacaggttcaggccaaagccctagtttagtgtagtgatgatcatagtattgcaatggtatgtgttacatcttgtgtgcatgtgtgtaagaaaaaggagcgcctgctattttatagctcagggctaggacgttacaaagattacttgttctctacatgtatgagggcgatctatcgccctggtttgacgtagtcttcttgatgcggctcgtagggccatgcatccatactcctagtatgacatatcctctcgctcatttgtcatatgggttcctatagcgagtccttcactgacatcttcatagaagtgtgtggtgggtcccgtcggtcaac

SEQ ID NO: 61274 - DNA, 773 bp, Zea Mays
cacatttttgctaatggaagcccacagttttggattagggatcaaggtgaacgcgctggagttttgggtgaggggctgaaattcagaaatatcttactattttttgtaccttatttagtgtattacaactttcataattgactcaagtcatggtaatgtagttttcttggtctttattgagttttcttaatagttctccattgcccttcaggaagggttattaggggttttggcattttcttctttcttacacttcatatggttaaggcatggttcctagtgtgaaaaatacttgattaagttcttgcctctaaattttggtgccttttgcacagtttacttcacatgttataatggtcacaaggtgggcattgaggaaaaaatcctaggtaacactgggtgttacaacccttccccttaaaagaatcttgccccaagatttgggtcggggttctccaggggcgaggacaaagttacggcttgctttcataatgtgggtttgcttattaaggttctttagaaaacctgctctttgaatgtcatcttcttcgcaacttcagaaggaagtcctttttgtttttgttttatagcttaactcggtttatgttaagatcatctttcttatatttggattcaaagggcagggggctggggtatggttacataccgatttctttaggtagacaatcgaggtagtttgagcgcagaaaatcttcagtctcccaggtagcctcttcctctgaatggttgctccattggatcttatacatttt

SEQ ID NO: 61275 - DNA, 494 bp, Zea Mays
gttctctgcggcgcactgtggggtacgtatatgtccatcgcatttcccttgcttagggcatcgtgtggggctcctcagattagagcatggaacacgggttgggcttgggaaatcttccggccatggcgccaccgttgctgactgcatctctccctggggcgcgtcggcatgtgaccagttggagacgaagatgtgttggccatcgatctcgggttggtcggccacgattagttgagagcggggaatgttagtaaccgttggatggccatccaacgcctagggttagatcgagaggaaaggagggggtaaccatagatctatgaatgggcggttctgatgcgttcgcgcatgatccagacatctagttgatccaagccatcgatcatggatcctctggtcccgggcgcttggtgattattaacgctccagattaaatctgagccatcgggctctaatccaacgaacctgatgcagccataccccttcggctgggc

SEQ ID NO: 61276 - DNA, 422 bp, Zea Mays
ttgagactctcttccaaacagctgtccggaaggaccaggatgccattagggatgcacatgatagagaacgaagcaggactgcaggcgaaagttcaacttttcttttttgacaataaatgttcagttgattgtcctatgctctcactcatactccggttgctgggatttatcgcgtggatgagaggaggccaagagtctgttggtgtgggaacgaagcgaatgggtgtgtgaaacgaggagataactacggtggcatcgaggtgtagaccatgaacgacatataattttggacaaataaaatgagctaaaacgccagttaaaaacttggacggagggagtacacactatcggttgccttcatgccttgtccactgccagccagccagccagggcaaggtcgtgcggggatgatgaggaaacgc

SEQ ID NO: 61277 - DNA, 604 bp, Zea Mays
aatcggcactctatccaagagtgttggattcccgaagctagacaccaacattagctgttaccgatggcaccatattgtcggtaaccttttttattccaacttcaaggtgagacatttgtctagatttttattacctgtgtagtggattgagtgttctaatttcaacatgttttgtatagcatgttgttaagcaagccgttgaaaatgtagcaggatactaaggatagaaaaaacaaagtcataattaaaggcttagaggataaaatcaaggaacttgaaggttctctaaaagaaaaggacatcctgctacaagcagccgaaggttccctcacagaagcacgatctcaaaatactaagttgagcgaggaactagacgaagctcgaacagttttggatgaaagttcatggcgctttgaccatgagacaaaggagctcgaagcaaaggtcaaagccgaaactagatgaagcttttgagaactttcggaacaagtgtgctgacttcgctactcggtgcgttaatcggttgaaggggatattcaactcggttggagctgcttctgaagaaattaacccttcagccgaagacatccccggggcctttgat

SEQ ID NO: 61278 - DNA, 918 bp, Zea Mays
cttcagtgctggagaaaatctgaatgggcgaatactgacaggctgagccccttcaattagtggaatattatggccacaagaatgactaggaggtagtgatgtaggcggctaaaaaatatccttgaaagtttgaaggagctgctgaactggtgctggcactgagaggtcttcaaaggaatggagttgggctgcatcatcttgaggttcagccacatgccatatttccaataaggtacccgccagcacaagaggcttgcggccatgaagcaccactgtttgacctgaataaggaagggacaaccatttatgcttccaatcgacagtcatcaggctgaattgctcgagctagtccatgccaaggatgatatcataacacgacagtgggataactttgaaagtagaagaaaactacatgttttgtacaaaccactgtgcttctggcaattccatgacacttcagtatacaccatttgccacttggactgataaaggagtattcatatgtgtcaaccccactaatgaagaagcatggatattgctcacaaaacagtgatagcttcctgagtcgagcaatatgagcatatccaacccttgtaactgaccttggaaccgaaatgccttggattgagtttttgtagaaattgcttcagtagacaataaaatcatgaactgttcagccgagtcttggaatccggcctcaggttttgtggaatcggaagagagcatgtcctagagcttctgaacaacatgtaactggattgttgtggcacattgatggcccttactccacttctcggtgcaatattgacacaggccacgggctcggcgataagcacgaagagatgccactttgctatcagcagaagatgctggcgataaccccattttctgcttaatattgtctcctgaaggtttctc

SEQ ID NO: 61279 - DNA, 786 bp, Zea Mays
gaggtctagggtagcactatccaggtcgatgttaagacctgccaccacaccatctagggtgttgaggcgatcttctccagctccacctagaacaatgctagtctggatttctccacgaatatgcagaggaggatgcatgtacttcgtgttgtgtagctgctgccggtaggtgtggctgagggaccataaagttcgcctagcagcatcgctgaccaaagcagcgtaggtggatagcggcgtcagagactcatgagctgacatagtcctgaaccctctatcacctgcatccatcaccctgacatgaatgcgagtgatgtagtagcaagcccgaggaggctcgtacacttgccttgtctcatataggggccagacgtaggttcccaacgcatgcaaaacatcttgtagcaggttagggaagtgccctgtctcgaacattgaagtataatgttcagtgacaggccataaccccacgtagtggtcctcctgttcttcgttggcttcctcgttgatgttttcttcatcttcttcttcttcctcttcatcatcttcatcatcgtcaccagagtcgtccgggtcatcgcctccaggagcaggggcttggactgctggtgctggcggtgctgaagctaacgatctagctacgaaggctagtgattctgccaatggggtgggcgtaggcagaaactcctccaagctatccaccagaatgactccgttctccacccgaatgcgagggagatccacagggatttcctctactaccactgggtagacaggaacttgtcg

SEQ ID NO: 61280 - DNA, 1059 bp, Zea Mays
tctttggcagagaccgaactcaagtcctaacgagagtttcccctcagctaatttcactaatggtgcactaacacgccctatccacagtgaccatgtgatcaacggccaaactaacgcgttcccggctatttaagaggtcctagtccaattggcagggtcggggagtatcaggagaacccaaggatgctgaaacaagaaagcagagggcaagatcggacctgaatcgagctggccacggcgaggcttctttcacggtggcggaaagtaggtttgggggaaatgagaaattagtgagctctggtgatcaattgagggcacgacttggtggctggatgcgtgactaccctacagacctgacggtgtgctcaatttataggacttggggcagtggctcgtgaatttgagttggcgtggtggcggtcggagatgaaaggggttactggccctcgcgatcagtggcatttaccgtggcaacctcaacggcgatgaccagacgtgctagagcgagtcactacgatgaagtactgcgtctaggcacgtgtcatccgagcggcacatggctaactcctgtgaacatatccacatcggccgtgacatgctcgtgtacggtggccggagtagaatagtggccggagtttatctcccgcgcgatatttcttatcgaggagcgcttatctgagttcggtcgggcgtgaatcgcgacgccgacgcggatctgagcgcaagatcattggcggcaaggtttctgagctggcgatccaatccggtcactgtaccatcgcaagctcattcagtcgacctgtcagagcatgtttggcatcgatttgctccagattttgtgtaatgactgaatcaactctctgtatcaaagttatagcctgataaactagctacaactttgctacattgtgcacccacaaaaagtcacaggatccagcttagaattaagccctaagttcgtgcaattccactgtcagtctgaattcagacttaaggcagtctgacagctcgactttgggcacatttttctccaaatttttcatgtgaccatggtttaat

SEQ ID NO: 61281 - DNA, 468 bp, Zea Mays
aacccagcttgggactgcgacgtaatttatttataaatcctgcatcgttggcctcgttgcctccgttgttcgcaaggatttatgcaaggtaagcttttgtatctgtgtgcagttaacacgaagctacggcaatgcgccggcggtcgccataaacattgatcgtcacgaatacatagctgtcccttttgttctcacggtactctattccatggcccctgttgctttcctgccattgtaaattaagcgtgtctgcccacatagccaccgtgcatcatgcctatatggctatatatatggtggcatggcgctgcaattagagtcggtggttcccctcccaaccactcaacctagttcgataggaaaaaacttgggattatagttttcttccattcgacaacttccgcatggacttcacggatgcttgcgacagctcttcgtgtgatcatcgacaggccgctggtgccatac

SEQ ID NO: 61282 - DNA, 455 bp, Zea Mays
gacgctcgagtggactcccagctcatcatcgaccaggtcatgaagaatgcaaggatacaacatggctgagtatgactccctccaccctattgcgaagtggttcgacacctggaggacaagttcttcgtcctagaacttaaccacatcgcgcgacgctacaaagagattaccgacgaactggcaaagataggcttgggacaaaccacggttcccccgaatgtcttttctagggatatctacgaaccctcgatagtaataaaagaggcatatgaacctgcccccaacaccgacacgcccctagttggtgagcccgaggccatgcagattgacggagaacaaggaaggaccactctagctttagactgatggaccccgtacctagaatttctcctctgagggaactccctcaagcaaggttgaggccaggtgcctggctcggtgggctaagacttttg

SEQ ID NO: 61283 - DNA, 682 bp, Zea Mays
ctgagttctgttctatgttactgggtcgttttgggcgtgattagcatgaaattttagttcgccaatttttgaccattaggcaatcgggtattgtagctcattacattgaacaatttgctggcctggtagatcaattgattgcatatgaaaatagcaatgatcctttgtatttcattatgcgatttattgagggattaaggtctgatttaaaagctgctattcttattcaacggccgtcggatttggatactgctttcgtgcttgctaaattgcaggatgaagcaatggcccatgaggtgcactgacggcgtgatcaaggaaaatcggaattctggtcctcaggggtgcatgctgccaaatcaccttgtcctatatcagtgccacccaagatggataaaggttcagcacccatgttgacagatgacagactgtatggagacactgctcgtggaagaccaagtgatgacaagttgttggctctgcgtgcctatcgtcgtgccaagggtctttgctaatgctgtgcagagaaatggtctcgtgatcataaatgtccagcatcggtgcccctcaatgctattttggaggtctgggatctaattccggaggaggaccaagaagagtccgagaacaaatctctggagccaggtgagcagctgtttgttgctatttcggaggctgcttt

SEQ ID NO: 61284 - DNA, 489 bp, Zea Mays
tgcgggttggttttcaaattccaggagggctcttttgcaagacagcaagccgaaggggtatggatctgtattaacctttggattaaaagcccacggcccagatttgacccaaccattaaaacgttgagacccgaccccgaccgttcatccaccgactgacgaacgagatgatccccgcgaaacaacagggtagcttttaatcaaaaccacccacaaccagatcaacggtccacgcacaccccctttctcaccggccgaatcacggcggcaccccgcctggttgcggcggcgaacacgccggagaacggcaatccggccctactgcaattattttccacaaacgaaacgtgctatgcggagatgagacaatggcgatagggttcaagttcacttaccggtggttgggcacgcaaagctagctacccacgcggcatggagggtccacggtggagccctatcgccggtgagcaattccggggttcagcggcg

SEQ ID NO: 61285 - DNA, 463 bp, Zea Mays
aagtactcaagttagcaggacaggttttagttccattatttaagattttagggggtatacttggtaattagaagtaggtgtggctagtcgtggaagtttgattaaggttgtacttaacaatccttcaatttcttagtgaagattaaataaggttcttggctgaagttatttatgacttaatttagtacttcattaatcctttctttcccttttcctacttgggcttttagagtggctttgaactacaacactgatttagaatttacaaaacttctgtaaaaattacagtggcttctcactagtttgtataattcagtctaaaaaattgaggcttaaaatgagaatgggtttctctgcacaaaaatattaaaatttagggcaaaggaggtgctttgaactaaaactctattctagcagtggactttactctaaggtttatttttgcttgtatctaggtgcaata

SEQ ID NO: 61286 - DNA, 521 bp, Zea Mays
cggtgctcgtggaaagaaaaggttgattagagtattcgatgtcatcgattttgtttatcctgattactgctttccggctcggaagaaaggggcgaaaagaaaaattgcatcaacgaccccctctactgcgccgaaaccaaagaaaatgaaagttgtaactcaccggccgaagtcgtattttttggagagggctgctttactgcctgctgcagggagttcgaagatagagattgttgagtctaccgtagatgccttctcagcttcggaggtaatacttttttctttttccttgctttaaattgaggagaatttaatctaatgttgtttttggaatttttggaacagacaatgaaaatacccgctgcagcagtcaaagctcccaccattcgtttggaggagacaataacagagagttctaagaccgaacagcagccgcaactgcagagtcctccagtaatgccagggttgttaaggacagcaaccattccagcggcgactcctaggaaagggagtaggatggc

SEQ ID NO: 61287 - DNA, 615 bp, Zea Mays
atagattgttcacttgttatcactagagaatttatacctctttttatattgattaaatttccctagtgtttgtgattttagtcaaaaccgtctattcacccccctctagccggtgtcctagatcctacaagtggtatcggagccgaggactccattgtttgtggatctaatcatcccggagtgggacaaaatggctagtaacaacaatgtgcacattgggaagccaccgcatttttatgggaataactacgactattggaaaataagaatgtcaatgcatcttagagcaatgggtggaaaaatttggcctattgtcaaggatggatttgttgtgttgaaagaagatgaaccattcgttagtgacaatgagaatattcttacaaatgatcaagccatgaatgtattctatgatgctcttgatataaatgagttgaattgtatcaagaatctcacaaccgctcatgagatttggattaagctaatggaaattcatgaaggaactacaattatgaagagtgccatgctatatgtgtgtaaaggaaagtttgagcaatttattatgaaagaagatgagagtgtatctgatatgttcaaccggttaaatgagatagtgaa

SEQ ID NO: 61288 - DNA, 524 bp, Zea Mays
agcaacagtttcgtcaatagcctttttcagctcctcagccttgtctttggaaacctttgaaggagcaggcgtcgccacgttcgagggcctcataatagcatctagcatgtttgctattcttttcccctttttaggaattcccaccgaccccctcttttctgaacacacaagcacaccagttgtaacacgctccagagcaatactacgatcaacactacactggactagggcacaaccctatactagtataaacccaccgtctcaaacctcacgttagagtccctttgattcaccattcggagtgagtccgcgctaatcccccatcgaacacaaattttactacccctagtttccaaaaccacgatagttggcacgccaggtaggaggacttttagagtgccaaaagacacctgtcacttcgattgtccacgcatcgacattcaccgacgacgaaaccttcacgtcgaggagccacatcatgttcagcaccctcgacttccttgccaccgccaccgatgatctcc

SEQ ID NO: 61289 - DNA, 568 bp, Zea Mays
gcattgcatcctcttgctgttagaattgaggtgtgacatccccttgctgttgggaatgacgccatgagacattgtatttgtaagacatagtaatttgcctttcagccctctttgcaaaatgaaccaactcagtgagacatgtgtaattttccatatccactttatcagcaatgggtttattgaggcccaccagaaaccgagccattgttgattcctcagcatcagttatccctgtacgaagtaagcacatctccaattcctgaaaatatgcatcaacactgcgattaccttgcacaagacgtttcagcttcaaatgtagatcacgagaataatatgcaggaacaaaacgacgtctcatttccctcttcatgtcttcccaggttatacggtcatgcccaactctatgatattcagtatggatctgattccaccaagttatggcatagcttttgaactcaatggctgcaagctttgccttcttttcagcagggtattcatacaaatcaaatatttgttccactttggtttcccatgcaaaatagtcatcagcattctccttgccgctgaa

SEQ ID NO: 61290 - DNA, 1131 bp, Zea Mays
ctaggcagggataaatgttgtcatttagtcccttttatcacccatgttagtcccttttatcacccatgtgaggaactaaatactaaagtcaattagttcctaatttagtccttccatttagcaaaatatggactaaacgggactaaatattagtccatctaaccaaacggggtctaagacgtggtccgtcttttttcctgaagagctgaaaataccaaagtttctagttttctgttagaggagctcgcgtgtagtcgaaacagtgattgccattggcatgggttggcatatggtggtgattggtccaacttcctcttccgtacccagtactgccgaattcagtatatgttggttttttgcttgcatagctaaaactgggcctgttcttttttccccaaaaagtggccttggaaggctagaagtagctgttagtgttattggttacgaactctgaaattagaagcttgcatggcttatctcctctccttttcattcctggtaagatcgatgtctggagtttaaggaccaacagggtctctttatctccatcttccatcgatccagctgaatatctgtatttggatttattctctgaaattttcagagttccatcttatgtgccaacttgatttctggacatgacttaccattttttgttggtacagttttctcaaactgatttgtgattttgcttccctgaaattatttgcgaaaaaagaactacgagactgctgtctaattccttatcagtgttctctaaatgttgatggctgtgttctttgccttatatgttgatagctttggactctacgcacatcatatcaactacatttttgtgactatttttggattccaaagaaaacaagaaaggactcttacggtccatttggttggagagccacgtgagtggagcggtttcattccagatctggagagtggagcggcggtccgtttggttggagagccacgtgagtggagcggtttcattccagatctggagagtggagcggctccattccagattttgatattgtgacttacctggattcaactacgtggcctgagtaaaagaaatcctctcgtccgactatgcgccaaagcatggtgtaaggcccagcccacattcttatg

SEQ ID NO: 61291 - DNA, 417 bp, Zea Mays
gtcctttgtcgctaacacttcaattgcgtgtttgctttgttgtcttcgctatctatttcagagacgcaggttgagtgtcttgaggatgaggagttgatgcttatggttagttagtttgcacaattccacaacaactgcatgaactacaagcatgttgagggcaaggatggttgcttcaacttcagagactctaaccacttcattaccaactgccccaagatgaagggaaagttacaggctagcaaccacagctaccacatcgttcggcgcaagggtaagcgtgactatacctccagtaaggacaagcctaaggggtggttcgataagaaggtgctcaagcaaaagtacctccaaaaggccaagtttaaggattgcaccttccttgcctcccttagtgacctcaacaacgactttgac

SEQ ID NO: 61292 - DNA, 511 bp, Zea Mays
cgcggtgccatcacttttgttcggagttgggaccggaggccgtctgccgctggatgacgaacggatgattgggattaaaaggggaaaataccgcttcacgtgatggaatggtggtcgtggatccgcgagcggacgggccgatgccatttaatcgtaattaaaacttaagcattgatccttgatccggcggtcatcatcgcacacctgctcaggtgggatcacgatctaatccaggcttttgggatcggatccaacgacccataagtagcgataccccttagcccgaacgcattttcataagatcccctggcgaataacggaatcaacccgccgtccgtgggtgctgttcactgagtcctgggagttttgcagactagccctggagctctttaataattgtgcgtgtagtcctgaggtcagagaaaatgggaaaaagagtatagaaaattaatttctagtgtaaaaataattctagaactcatttaaatcatagaaaattcatattaaatcc

SEQ ID NO: 61293 - DNA, 550 bp, Zea Mays
taagaaacgaaagtgcttctaagcttgaagaagtagaggttgcctcaacttcatcctttggtgcagatatttatcctaaggcaatagaccttgccatgagaatcaccgaaaggatgttcctctaaatgaaggaagatgaggcgaagaacaagattgaataagaaaatggtcgatgaagaccaaataatgaatccccctcttcacaaggttcgtctttcatttttacatctcatatgtgcttggtcgctattgagaatgacaatgaaagcgaaagtgggggatgagtaggaacattaaaattatagtgatgatgaggatgaccttcaacaattcttcgctcaacaaagcaagaagaacaagatggtcttgttttaactcatgagaagagcgaaagaataagaaacatttcataagcaagaagacatcatcatcaacaagaccaaaagattagataagttgatcaaacaacatgaggagctaaagtgctctcatgatgacttggtccgaaggtatgatgacatttcaattgggaaaactagagctacgatct

SEQ ID NO: 61294 - DNA, 679 bp, Zea Mays
cggatattaataagccctttgatgtgtattgtgacacgtcaggcagtggcctcggctgtgtgctaatgcaagaaggccgagtaattgcatatgcttcaaggcagttacgccgacatgaggaacattatcctactcatgatctggagttagctgcggtggttcatgccctaaagatctggcgtcattatttgctgggtaatgtctgtcatatttatacagaccataaaagcttgaaatatatcttcacccagtcagaattgaatatgagacaaaggcgatggctcgagctgatcaaggattatgaattagaaatccattatcacccaggcaaagcaaatgtagtggcagatgcgctcagtcgcaaggcttcctgccattgtttaacagtgaggacttctgacattacattatgccaggaaatggagaaactaaacctgggaatgattcaacatgggacttcaaatcatttgaagctggagtcagtcatcttacaaagaataattgacgcacaaaaatatgatgagggtatgaagcacatacgtgagaagataatggctggaacagtcaaatgtttcaaagaagacgatcaaggcgtggtatggttcaataaccgcatagtggtgccgaagaatgaagagctccgccagcaaattttagatgaagcacatcttagtcgata

SEQ ID NO: 61295 - DNA, 637 bp, Zea Mays
cggcaatgacgctggaatggcgaggagcagcagcacgacgtagaggatttccggcgacagcacagacagcaagtgactgcaagccacattgcgcaactcagtgcaggcagcagtaccaagggtgggaggcggaagtggagacgaggaaaagcttctgcgcggctgcgtccatgatttataggctagggagggaggtcaagcgacgttccaaagaaagaggaaggggaagcgtcgtgttttatatgcgagggagggggagctgtgcggccgttgatgaatgtcgtcgtgaagagctttgaagaccattaatggaggaggaaatgacgtgaacacaaaatggtcgctgcaactcaacgcagcataatggggaggaggcgagcagctagctgtgcagtggagagatgaacagacgagacatggtggcaggacgctgcttgctccattatggacgaagcgaccagttgacagtgcgacgtccatgaaacggaagtggcggctgcgatcctgagcgagtgcacaaccgtgagagaagaaaggagatagaagaagaaccatagagaaaatgatatgtgggctcgggatccaccgatcagcattaaaaaaacgaggaaggcaaggttgtatgtgggttgggctg

SEQ ID NO: 61296 - DNA, 669 bp, Zea Mays
acgatgggaggggatagcaagagggaaggttctgccgtgggagagagaagcagcgagcgtgtagcagacgcctgagatcctccacatctagcgtctctatcgcgtcggcatacataattgtatcgcccgctaaacttaggaaataaaaccctttacagggtgttgttgaagatagcttgatcagtgtgtgtgcgatagcggcaggaggagacgaaggagaaagagaatgatgcaggcgatagcaggggcgtgttaatgacgccacacctgcgctcgtcaacacccttttcaaagctgtgtagggacgcaacaatgtcgagaagtgtgcatatttagagaataggtccacaaccaccaaaatagtgtcagcatgagcagacctgggaagcccctcaatgaagtccaggcttatgatttgcaaagtagcctctggtacttgtgtcgatcaggcttagattgttggcaaactgtgcaagctgccacatatgacttgatcataggttttatgttctttcaggcaaacaattgcttaattctttgatatgcaagaggaaatcctgagtgacccccaactagattgtcatgtaatgcagatataatctgaatctgaagagcttcacaagaccccacccaaacatggcctttatatttgagaatgcctgattgcaa

SEQ ID NO: 61297 - DNA, 482 bp, Zea Mays
ggaatgttaatcacaattttgtttatgcaagaggcgataaaggtatgtaatttacatctgttaaatctgaatgatttagttttagctgctgatcgcataatatgccatatataggggatggttggtgaattcagtgcccctgacggtagtaatcaaagtcaatcaacattccagttccagtggctatatattaatggtttgcttggatttatcttttcaatgggtgtactatatactgcattagctagcaggagcgcaaggtcatcgctatatggcactggtttgtcatatggcacatatgtacttccgtttccattatggtttcaacacaatagttactaatgctctagataaaatacctgcagcatggcaaaggagcttaattgcggactacggtgttccactgatggtgatactttggacagcattgtcatattcattgccaagcaggatcccttcaggggtccctaggaggctcttca

SEQ ID NO: 61298 - DNA, 985 bp, Zea Mays
gggattttgatctgcacactctgctgctatgaattgatcggagagccgtcaaattcaaattattattatcccgacccgaccggtttgtcgccgattcgattccattgcccttgcccccgtcccccgtgcgtgtcaattatgcgatccgagatgtattgagcttagaaccagggggtctcaaattgagttgatcaggcttcttgctccgcatggtggacgctgctgtttctggcagcgaagatctggcggaatcgcccgagcttcagcttaacgcattgcgagtccttctcggtaggttctcttggttcgtgtgcacaagtttatgcgcatcgacatcacatttaatcggttggtacggtgttgttgtcattgtcacatagaaattatcacatgtatgtacttcctgtagcaacgcaaagtccattcggtcgggcggtacatagttttcaatgcctgaacggaacgggcttcgcgtgcaattagtcataccttgactgtacgtcatgctgatggtttgtgcagatcgtgctagcgtagagggctgtggtagaatactaggatgtctgtcaatgtcatgtgagctttacattccctaagatgtggtattgttttcactgaatagactgatgcatgttaaacctgtaagatgcgcctttaccttgtcgatcagagtaagaggccaagtacatgcaacgagtatgagaatttcgagcactgcttattgcaactccccgcgtgtgcttttatcaatgatcaacatactcttttacaattcaatagattgtgcatgccatgtactgggagatgtgatcgcatggtattttgatgcaaaatgttagggaagcaactatccttctttgctatttaaggccgtccgtgaaagtttagcttatatacttcataataatataatatatggcactcagcttatcacatacaattggatagccttatttgttgaagcctgacatgattttgttcgaac

SEQ ID NO: 61299 - DNA, 488 bp, Zea Mays
agagggtcttgcaacgttgggggcctccccctcaatcccctccaatcttccagtgatcctcttgtcaccaaatcaacccttaggatgccgaggggcctctggccctctggggctatcaagaccctctgaggttgttaagattatcgaaccatccgaggccaatgtggtgtagtgtggcattgtccatgaccgtgctatgtgagtgagctagttacacactcgagcaatttaatgaaagagttagtggttggattgatagaggtataatctatattataaagcacgagtttcttcgtgcgtcctctgcactcgcgccctctcagcgaaatctccctcccgcgcgctcaaaccgaaatcctgttgcgcgctatgtcgaggtccaagcgaaataaacaaaaaaaacaaggagcgcctaggacttgaagtgtgacaccaggtttgaaacgctcgccctctgaccactagaactcatgttcatctgttatata

SEQ ID NO: 61300 - DNA, 550 bp, Zea Mays
cctcaaatgagaacttgaagcgacgattgaaaaaggtgaatcaaagatgaaagtcttcatatcctaaatgtcgaaggagttgcggaacacttgatatagagttaggacttctattttactttagccatactataaagaggggttgtggatgagtagtttgaccaagagataactagtgtagtgttggtgcatgttcacactcaaaactaatcctaggtgtcactcaagatctcactcacaagttagaatcaaaatcagtttagaaaaacactagataagaaacaagtgttgctgctgcgagggcatcggactgtccggtgtgcgtcgtactgcccggtggtcacttcgacagctggccagagagcagaccagagagcaagcacttggcgccagccgaattttagacaggcatcgaaatgtctagcgtgcaccgaacagtcactgtgcagtgtttgttgctcctctgtgtaaaggataattgtcagaactagctgttgaaagagcaccgttggcacacagttggcgcaccggtggcgcgccgaactatccg

SEQ ID NO: 61301 - DNA, 601 bp, Zea Mays
gagccctataggatacgaactgtttatgcaccgaccgacatgaatctatgctgggtttgggcagcctgagtaaactctgaactcattagcaatttgaagttctgaaagtgagtgccttagccttcagcttttggctcatgcgtgatgatgcagaacgccatggtacgaatgtatcagaaggttaccgctgagcaccagatttagcacctggatgaccagatgatccggccatgtggtccagacagtctacgccacggatagtccgtgggttagcctgaatggtcctaagattagattaatttagactgggattcttattacttgcattattatcctaacaaatttcatggggggaaactgttagaaaccgcctagaaacgggtgcagaccttacactatatatataaagtggtacgaccgattgaaacacacgacaatcaatttatcagtccaatttcaccttatgcattaggagcaggagtaatttagcattagttttagtatttctcgacctaaatctttacctattttcggctctacgtcgtctagagtcgtcttggatggcctgccgattccaaggtaaccttaggatctttcctcc

SEQ ID NO: 61302 - DNA, 474 bp, Zea Mays
aaaagactccatacagaagtcagctacaggagcggcctgatcaatgaaagtgcgcagcttcatcacacaaaattatggttacgtacacatagcgagggcatcacatattacatcggctcaaccttcgggatgacacccatctccttgtagttgaacaacattatcctcagttcctcaccctcaaacaaatttcgctgctccccctcacccacactcaccccaatcggcgaggacaataattctcgcttaccagtcccatccacgcgaagacgacccctctccacctcgcttcgataacacctaccacttcgcgacaattcgctcactctctgcttcgccaccgccctccgccgcctatacccagtactcacgcccgagagttcctcaaaaccctccgcgcgcggcgaaggctccgctgcagccacatccaacgctgcaaaataatccaagtcctcatctgaagactcctccgtc

SEQ ID NO: 61303 - DNA, 470 bp, Zea Mays
caccacgccattatacgctacgaagtctaattcgcgatgtgtagaaccgggcggatcagaggataggacacttactcgggtttcgtgcacgcagcggtacggtccacggtgcagggaggtcgccgcggcgcccgcaaactccggtgagcgattagttcgtctccggccgctgagctggcctggagacagcgcggacaccctcggtgtgtcctagggaacaccccaggatggttgctgatgccctattgccagcaaccgagcaggcccacgacggtggtttatctatatgcggcaatggtggtattgggcacgggtcggtcaggcaatgggagcgaaatggcggctagggttagaaacttcgggcccctcctctcccttccggcagcgtgaccatttatacgtggaacgagccaccagtcaacgcaaatctcatggcttctgttgagctcacccgtgaaacgcgcggagac

SEQ ID NO: 61304 - DNA, 563 bp, Zea Mays
gtccacgaccgtggacggcgaagcaggaactccggcgagcttgcactggccgggatacgcgatgaccggtgctccaacatggctgatacctaattcaacccttaacaattgtttcccctcgctcaattccaccattcgggctcccaaactctcttctcacggtgtccgtgcaatacaagaacaacactgagtgttcctggtgatctaataggttctagcttaatcggctgggtcgaggagcatcagggacacacaaggatactgaaacgaaagaacatggggcatgagcggacctggagcacgctgaccacggcgaggtcacaaggcgtggtgtttcggaccgaattgggggaaatccgaaattggggctcgttggtgagcaattcgaggcacggcttggtggattgggtgcttgactaccttacggacccgaaggcacactcaatttataggctccgggggcggtggcctgtgaatttggagttggcgcggtggcggccggagagaagagttgcactggcgcaagcgattagtggctttcaccgtggcgggttcaccgacga

SEQ ID NO: 61305 - DNA, 603 bp, Zea Mays
cccagtatcatggcagggcacgagtaaaccacgtcgacgctcaagaggctcagcaagccctgggagtagtgctcggtgagttcctagttgaatttactcccgctgatgtactttttgattcaggagcatctcattcattcatagccattggttttgtggaaaagcatggcattcccactacacatctagaaattcccttggtcacccgaaccctagggtcagaccttctatgccacctcaaatgctcccaagccaggattcttttaagtggggtagtgttcttggcagacttagctatcttgccatcctacggattgatgcgatcttaggaatggattggttaaccaagcataatggcatcataagttgcgcagataagaccgttcttctcactgaccaccaaggaaagttagtttcatgtcaggctcagccacccgcccaagatccaatggtgtttaatctagcagcagaaagcatatctgtagtagaagatttcatggatgtattcctagaagaattgccagggatgccgccagaaagagaagtggagttctacattgatctaattcccggcaccacaccaatcgcaaaaagaccataccg

SEQ ID NO: 61306 - DNA, 369 bp, Zea Mays
aagggggatagggttccccagcgacctaatagtaatagacacccctggggtagatgtcatcctagggatgaattggttaatgaagtatgaagcaaacattagctgtgacaagaggaccgtaacattgaagtccccgtccgggagaggaggtagtggctgagctaagaatgcctaaaacaactaaaggagattgtcaccagatttcggttgatagcaaggaggccaacccgctcgaggctattagggttgtgtcggactttccagatgtgtttcccgaggaattaacgggcatgccacccgagagaaaagtcgaatttgccatagagcttatccttggtaccgcccccatttctaaaagagcctatcgag

SEQ ID NO: 61307 - DNA, 845 bp, Zea Mays
taagcgcgagcatgttgcaccgtcttaattgctccgttagtagggtatagtggtcaccctaagttaagtaagcgcgagcatgttgcaccgtcttaagtcatcgccgacttaagtcgattgctccgttagtagggtataatggtcaccctaagttaagtaagcgcgagcatgttgcatcgtcttaagtcatcgccgacttaagccgattgctccgttagtagggtatagtggtcaccctgagttaagtaagaatgcaggtcgacaatgaataatttgagcgctcttaaagtctttttattgatgatatattttttagtttacagagtacattgccgtcccaatagcttttgaaatacggctaggggtaaaacttcctgaggtgttctatgttccatgagttcccaatttctgtgtcgtccatctgagtgaggcgatatgatcccgaccgagtgacttctgctattatgaacggtccttcccatagaggtgacaacttgtgccgtccttccccccttagaattcggcagaggacgagatctcctactgtgaaggatcgatgtctcatggtcttatcgtgatagcgccttagagttttgttggtaccgtgctgattgaattaccgtgttcagccgttcttcttcgagtacatcaacatcctccagcctagtagcctcggcttctactatgttttcaaagatcaaccttggcgccccaaacttgagatcagcaggtagtactgcttctgacccgtagaccatgaagaaaggagtatttccatgcagagctcgactaggttgagttcttaggctccaaacgacgtagggcaactcccttatccattttcc

SEQ ID NO: 61308 - DNA, 376 bp, Zea Mays
cacgtttacagggtctccccattatttcctaaaccgtcccgatattatggcgatgtcaatgtcaaactaaaatccataattaaatatttacgcacaatgactcaacgttttatgccaaacgatatatactatttatgcaactattatgccgtttcggttttatgctatatctttcaacatcttatcctacatttttttaccttccgccattacttcccatgcaagatccataaattacgcgcccacgtatcatagtaatcacgtttgcatgtggaaactattccctttaattccgcgtctttcccttatgagttaccgccttgccattcaaacaaccgcgtaacggcgccgtcagtcctgcaagccgcctctaaac

SEQ ID NO: 61309 - DNA, 446 bp, Zea Mays
gactttcaacaatgttaatagaaggcacaaaggtatacaataatgtccaaaagcttccatagaaaatcgagacatgtaggaagcattcagaaccccagtcagcaagaagagaaacaacctcaagaatagcatttccaacctcaggaatcagctcaatcttcgagcaaacacccacataactgagaaggcaactttcgttgtcctccagcactaagaggcgacatgagaggtcgtagcttatgtagaaggtttaaccaaaacacatagcaacaaaggatgtattgtgtattctgtcgagaaaataagggccacaccacaaagtcttgtgagactacaatctagaaacaaaaagaattggcagccataggtcaaaatatctggccgaagcaagtatataacacaacattccactacccatctccatatgtcccacaacacatacaata

SEQ ID NO: 61310 - DNA, 394 bp, Zea Mays
gtctttgcttcagcctgctcggctgagggtgccttcggcatggcagccggttcttcagccctctgcgtaggagcaattggctctttcggatcagcagctgaagaagtcttcccaccaaactcgggcaccacggccggctcaatataacagggccggtgggtgaggactttcaactttttactcttcgacgcaggctcgcttggagcagccgaagcaacaacctttccagaggttgcaccctttcttttctgcccccgtggcgggtagcgatagtcagggtacacaaatccaatagcatcaaaaaccctatttaatcttttcttttttcggctcccgaaggccgcagatagtgcattgtcttcggacttggaatatgttccaagtaactcattgc

SEQ ID NO: 61311 - DNA, 763 bp, Zea Mays
atcagcatacctcctgctagagatctttgggttgttgaacctctgcaactgggtactggggatggttctggtgtcagatcactggtctatccggttaacattcggtggaaggctgctgctggcactgaaaattcagctccccgcccccctccatcctcagtgatcactcctgcagaacctcgtcgacatttgcactcccgttctccgccggcatacagaggacagcgtagtggaacttcctttggtcatgctcaaggcacagatctttacgttcagggttcgtcctcctgccatggctttcgtgaagctagctgcagggatcctcaggttgtgcagaaaatgactcttgagccaccccatggctcggttatagctccgacgtcctccattcttggacctcttgatgccggtttgcagacgcttgagtctggccaccccacacccttcgctcctggctttaccaatgatactggtggtggattatgcgttgtgcagaatgtgatcttggagccacctcctggttcggtcacagttccgacgctggtatctactcacaccacatcctccactcagggtagtctcgaagttgatgatgatctcctctgcgctgtgcagaacgtgaaccttgagcccacccctggttcggtcactgttccgccgcctgtgagtgctcagacagtccggctagataccagagctataggcaggaaatccctggctgaaaatctgctaaaatctacttcaacgttgcctgctggtttac

SEQ ID NO: 61312 - DNA, 617 bp, Zea Mays
gtgctacaatggcttcgacatctaccccgatactacatcgatgattggggagattttagtcgcatgtttatcatgaactttcagtccctctctgataaaccggtgcagtcgtgggacctcaagtccatcaggcgatagaatgatgaaactctttattcattcctcagaagatttcaaacaattagaaaccatatccccgaggttgctgaagtggctgtgatcgaagacttctatcgaggatccaacgatccggtttcgttcgagctatacttcaaaaagcacccgccacctctaaacaactattcagggaggcagacatctacatcaccacggatgagcgggctcaagacctcattggaggcacaaagcccgtaccaccaacatcgtaaagggacacgaaccagcaaccagacaaacgctagaagaagagaccccgggaggagatacacaccgccgggccacctgccgctcgagcctgcggcgcacccacggaggggtaaatacactggatgagatcctcgactcccagtgcatgtaccacaaggacatgtagcacaccatatggaactgcagggattaaaaaactctatcgggcacgaccgaccattccagccgct

SEQ ID NO: 61313 - DNA, 428 bp, Zea Mays
gttttttttcgactgaaccaacaattatatttggtgctgatgtcactcaccctgctgctctagatgatacttccccgtccattgcttctgtaagctctttttccgtttacaatacggatagtaccatcttattacaataacactttatgcctggtggttccttgtaggttgttgcctcccaagactggccctaggtggctaactataatgccattatacgtgcacaaggtcaccgtcaagagctcatcgatgggctggaaaacattgtcaagtacgatcatcatcaccatctctgaaattcaaatggcaccccatactcgattgagagagttccttaatttgcaaaatatttttaggggaactcctacttgcatccgtggaacggtctaagcagagacccaagcagctaatcttctacaggttagtag

SEQ ID NO: 61314 - DNA, 652 bp, Zea Mays
acttgatgaagtacttcaaagagaggtaatttgcttagatatttttaataaaactttttttaagtttttcagtgcttagttaaaatcaagtggtattcatactatcaaaggaccatttgtttttcgttgcatttcttgtggatatcgtggtcagatgtacaatacagattagtagttgagcaaagtcctttgatgaatattttaatgggtctttttctgggcacaataatctggatctgaatctgatccctgaggacactactctcttattcaagcgagtctgcctccccaatctaaatcctccccaactctcaccgatatatggtaaagtgtacttggcaccgatctctatcaaatatcaatgtgtagtgttttggtttattattattttttgctgctcggctgtgcacagatgtaccgtattcaaatgctgctcctctgactaaacatacacgaccaggtactgttctactactctaattgctgctgtcaattgtaatgactaacaatgcctgttaattttgatgtacatgttgtttcgacatgaactcaatgacattgggtaaacatctctttgacttagtaaaataattgctcggcctttttttccagccgatagttgttcatttctagcgaggggtctactttgtgt

SEQ ID NO: 61315 - DNA, 705 bp, Zea Mays
aatctgcaaaccaaagtggttgtttccattttcttaataatctcgaggacgagattattttaaggggtagaatttgtaaagtcccaaaattctactttgagatttaggaattagtattccaagatttaaataaaagtcttttgtaataagagattaaataaaagacccttatatgatttaaaccaacctttgttgaataatatgattagaaatattctaaaaaagaattaagttaaaaaataccttaataactagtatacactagacaattccctctcttgaataaatatgaacctaattttaaatggactatacattcaaaggagtaatttttactttatgtgcatacaatacatatttaaatgtttgcttaaatagaagtcgtgcatggggtagacactcggcaaccaatctgctccatggttctacatgtgagctccgattcgcgcgagagcagcaaggcggcccttatttggcaggtcttctattccactctagcttatagtccctcactcgtagcacgcctcaataaactctgcagattcctcggcgttagttgcaacaaccacccacgcaagccgtgatctccctcaccctgggtataaattaagctcggccccacgtcccactggaacccaaaccatgttgtcgcggatagttcgccgatgtgtagtgaagatcgccaccaccgttgaatcccatcca

SEQ ID NO: 61316 - DNA, 1325 bp, Zea Mays
cccgagtgacccattatgattgcttaggggtttacttagttcctagcgaagacatgggtctactttttgccgacctcttctgacctttttggccgtgtcagatacgcttccattttgtgttgtggttcttgatctggctctttgggttggtcgttagagcggaggtttcctcggtccctcatagagttgcccaggggcaacgatcaccggagcgggcgtagttcccaaggacagacccatatcgagttgcccggaggtggtgcccccccggatcgtggcttgaatgcacacaagcgcaccagtatgatgtagcccccgagtaatctgtgaggattgcttagggttacttgccttctattgacctttcttgatctagcccttcgagttggttgttgatgcatatcggttctttgttatgcacgcatctcccccggaagggcttttgggccttttgaggagagggtcgtcttccccaacctagtcggcgcaagggaaggggtcattgagatacaaacgggttatccaagtgagatccgaccggccttcatagggtctggtttcgacgagcagtcccactagggggattgacccactagaggcatctcatttggttctttcttattctatcctgtatcggccctccggtcagtctgaccaacttaaaggggccctgtggccaccccatcagtcgggttgcctttggagaatgtgaggtacgacattggatgtggaaccgagcaattgacctatgggccagtcatctgacttgtgacttgttgagagcttgcttggtccacccttcgctctatgttgggaggtagagtgaatttatgttttacctcgtgcgaggcagttgcggcgacatggtagaaatggaaccaaaatggctccattcggcgtgggtgtctcgatgggacgcaaaatggcctgctcatcttatcacgtgcggttagcgtgatggtgcggttaaccgctctgaccactgcttacaccttttcccctacgtattcctcgacacgtcttccaaagcgacacgagccctgcataacgtacttatgtatagtcttcctcatagtgccctaggtaggggagttatcgacgaggcagatccccctatgaggtttgtgcgacccctcctctaggcgtcgcttcatgttcccatttctatgtacacaaataatatggaggtgtttagagtcggttctgctcaccatgccttctcacctttgcatcagctgcctccttgctttagcttccacgttcttggatccatcttattaactttgtggcaatggtgtcattccccacttgctcaatccgagaca

SEQ ID NO: 61317 - DNA, 758 bp, Zea Mays
ctttttcgcgcttcgggtcagcctgtatgacgcgtggggcctggcctgtaacaccccaggtgttacttagggtcttcactcaagtctacacaagtcaagcccatcatcacatgtggtttaacttgagcaaagcacaccaaacttggaaatcaagatcctaagaaagtacaactcatcttagaggtcatgccttggcctatcatgcacatataatgggaagaattgcccaaaccctaatgcaaaccccctttggacaattggagcactataagtaagtatgaccaaaaggctatgaaaaccacatgatcatgacttgggccaattataaaagttgtattacatttcatgccctacaaaggatagtaagaaagtgaccccaaaaagatttcagaaaaaccccaaaaggttcaccaaaggaagaaacctaagagaaaaatcataatttttctaagtccaaaaccaacccttttccaaagatcaaacatgttcaccctctttcaaacttcaaaaccacttgacccaattgacaaagtggcgccaaaagacctctagaacaccctggaaaagtttggacccaaccctaagtcgtttgacacgacttggcacaagatttgtctctgtgtggacagctctaacagagccgacttcccacccccgtatctctctaacccgaccacatctccccttggaactcacatgaactaggtagccctaggtgcagggaagagatctctcaaaggtcttagggcaagattcgc

SEQ ID NO: 61318 - DNA, 576 bp, Zea Mays
caaaggtggtctgctttctacatgagagagaaatttgctgccctaagcgctctaggatcgtgcgtagtcgtactcctggtatggcataccactctttttgtctatcatacaggtccatgtagcaagtgtattgctgatgtcttctaggggtgaaaacgggacgggattacccggcggataccggatacaggtacttaaaatacccggggtttcgggtaccgaatacgggtaattttgtatacgggtcgaatacggatactacccggatatacatcaatcggatacgaataggatataggatgaccactacccgacaaatacccggaaagtacgggtaggatataagtacccgggtagcgggtacccgacttcagttcctgcgtccgtggagtctctggtgcaagccgctagcctgcttggcgcttttcactcgttcaagcagtcaagcccagtcgaccagcatgcgaacaagcccagtcggctagcccatccgttaacgtgccttgcagccttggacgaaaataacttttgttaatttgtttaatgacgaataacgtgacccaatagaccaaagca

SEQ ID NO: 61319 - DNA, 339 bp, Zea Mays
atttggtcctgcggcggcacgtttgaggagagcagggatggggctcctggtgggggcgcaagatggccattgagggggcagaatgatgtctagaagcatcgcgccggttcgtgtcagggcagagttcgcatgccaatggaatgcaatcggacggttgaagtggatacattatggtgatactcctgggtatgccttccagatcgtatcgaacgctcctgatccttttcgctgacgtggtcgaatgggaggcaagaattgctcccacggttaatatatagaaaatagcctaggccgatgctatggacgaagccagatccaaaattagagagaccaaattag

SEQ ID NO: 61320 - DNA, 686 bp, Zea Mays
cgataatgatgagagtctactgctgctgggctggttgtacgatagtactactagtgatgagagggacgctggctagctgctctgctctgcgttgttatgctctacgtccccgatcaaacgagagagggatggcccacgcagacgcagcagcgcccggctgtttgcatgggctataaaatggaccaccacctcaatcgataggaacgaccgggtcacaatcgccactaccctacccactagtacatactagagcagtcgatggcctcatcctctgtttctctacttgtcaccatcatgcagctactgctgccgccgtcacctacttgctcctcgctgagttgcgggcttgacttcaccagcgtggcgctgctctcctgccaggagacagcaccacaaaaccctactgtctcatgcagcgatgtcctcctctattccatcggcatctggtcaattcatgaactggaaaaaggtcgttgctcctatgtgtgtacatggtttcaaggaacactacctttgacctccctacgtgttacatctcatgcgggggtaaagactcaagtaatgtgttgcagtggaatgccatcattcctcgccctacagactgcaatggtaagtctcgaacaatccttaattaatcactacgtacttcattccatcgtattattattatactacgtgcatactcc

SEQ ID NO: 61321 - DNA, 456 bp, Zea Mays
gtttccataacagcgtctagcacgctggccattctcctcctcttgggagttgtggcgggagcctttgtcaccttcgacagttctgcctctaccggtaggctctttggcaacactattgtttttccaactctggctctttagccacaccatctttggcttcggctgacctgactatatgcatcttcggcactacagtcgatccttcagcgctccgaacagcgggagtagcttgttccgcttcgacagcggaagaggtcccttcaccaaattcaggcactacagctgtttcaatatattgtggctgctgcgtcagaaccttgatcttttttcccttcggcatagcagagatggccgaagcagccattttcctctttttttccctgccttcgcaaggggtagaagtaattagggtatatgaagccaattgcatcaaaaaacatgttcaatctcttcttg

SEQ ID NO: 61322 - DNA, 667 bp, Zea Mays
atcattgtatttgaacagcttctcagcttgctccacctacagggaaagaagaaactcaatcacaaattatatcaaaagtttcataaattagaaataacagatgcagttacgtttgacccactctatcatgaatggtaagcccactttggtttctattctcaatactgttcacacacccacaaaatttgcttacggcgtcttgtatagcactccaacgatgtagcaacgaactctcagtacgttcagcacgatttcctctgttggtctcgtagaacatatgaattcttttccaaaatgtgcctctagtctgatttgtgccttgtgtagggtttgtactaacattcaaccaggctgcaacaagggctctgtcttcttcctcactaaagttttttcctttctgtttctggtttgacttcgaaaatgtgttgctatcctttatagggactatacgcggtaactcagtcggtgtttcagataattcttcaaaattttcaaatcctccattcaaaagcttggtgtaataagactcatccccttccatctacgtagaaaattgaaacataatataattaagaaagaatgtaagaaaattttaatgaataactagagagtgaatgaaaaatcagtaacaattggtctatgtgtaacatcagagaggacattttct

SEQ ID NO: 61323 - DNA, 327 bp, Zea Mays
ttggaactgaggtaacaaaaggaaataaagccattcaaaccatgccctagatggataacatactgtgttatagaacacatatcatttcctttactgttcctttttaaaagaaatttcctttgctgttctgctcattaggttgaacgcaacattaggacgcttgcaatattaaagaaaccaaataaattacccataatgacaacacatatttgagattcagtcaggctatcatgcatgcagtatcctccaaccttggtctgtgaccaagctggtttccagtttttacacagccccaggaactggctctgtcgcttgttccaactgttg

SEQ ID NO: 61324 - DNA, 547 bp, Zea Mays
ttctaattgacaacaatagccttacaaatggaagagatgttttagttgaggaacaattagcaatattcttgttttgcctttcaacaaatgcaagtaatcaatccatacaagaacggtttcagcatagcggagagactattagtcgatatttcaatcttatacttgaagctattgtctcattatcatctaggatgatacaactgcctccaatcaataccccaattgttatatctagcaaccccaagtttatgccatactttaaggtaacttatgccctatttgattttaagtaactcatgttatgcttcaaggtattatactttaactgttatatttttaggactgtattggagcgatcgatgctactcatgttcctattactatatttcctagcttgcaagacccatatagaaatagaaagggtggtctatcacagaatgtaatggtggcgtgtgacttgaatagtaaatttgtgcatgtcagtgctggatgggaaggatcagctgcagatgtccgagtgttacaagatgcgatggctcatggtttc

SEQ ID NO: 61325 - DNA, 509 bp, Zea Mays
gtgttgaaaaggtttaacatttaccttcatcagctcaccccaaacgctatagagtgtctagaaattttcatttgtgctatttggagtgaaggggttgaacttgatgtcgaagctttctacgaagctttcagttagattcatgagctgtagctttagacgaaggtgactagaggccttcagaacaactttggttgctataactctgcttatcgaaggggctcaatgtttctaactcttgcataccgaagcaagtggccgaatgaatgggcgaaagagcggttttacatgaagaatgacttgactatgtgggttgatataaaagacattattcagactcctattgctacaagctttggttattaaaaagccaatgtgctacatcaacttcgaaggccaggctaccatagttgcttctaatgttgtttgcacgcatattggaatgagggatcttgtttaggaatttttagcttttaagacttgtccactagcagctaagtgggaaatgccga

SEQ ID NO: 61326 - DNA, 677 bp, Zea Mays
acggacttcaccgttctctcttctctctcatgtttctctctgtgtgctcagcgatacggatcacggcggccctccctttcttcgcatactcagctcaccgcacccccaatacgcggctgcaacggcgtaataagtcacggtcttatttatagttgagggtggagtcactatgaccgatcctcgcgctgagaaggtcggttgtgaaggatccgggcagagcctagacgtctggtcgcgagattcctggccatgcataatcgtgcaggcaccggacctgtagggataaggagagcgcaggagattaagccgccggggtccctgcgcaggcttcagataaagggaaaccgcccggatttccaggaatccagtagagactagagcgccgatttggttgcacgcggcgacgaacgcgatggagcaaatccggtaaagacgaagcacctgacgatgcggggtccaccagccaccagtgaagaggaaacacgcaactcggctgatagacctgggtccacttgtcgaccacaagtgcaggtggggcccagatgccagtgcgtggcacgggggaaagaagggagaatgggccgcgcagtggaaatacgatattgggccaatgcaagggtgatgatgagcaggccaaccgggatttgggcccaaacgatgttttccttttatctttt

SEQ ID NO: 61327 - DNA, 1336 bp, Zea Mays
ctgatgcatacttgatctggatgctcctctgctcgcataagtcataaaactccgaactggtgaagttagatcctaggtcggtgatggtgctgttaggtattccaaacctgaacattatcccctgaatgaactccactgcctttgctgaggccaaagaggcgatggccttgtattctatccactttgtgaatttgtcgatggcaactagtatgtgggtataccccacttgagctttcttgaagggcccaatcatgtccagcccccagcacgcgaacggtcaggtcacaggaatagtctgcaactgttgtgcgggtagatgctgctgatttgataggaattggcatgcctcacatttctggactaactcggctgcatcattcttcgttgtcggccagtagattccggacctaaaagcctttcccaccagggtttgtgacgctggatgtacgccacattgcccagcatggatctcatctaacagcttcttcatagtagccgagttgatgctcttcatgagtacccctcctgcacctcttctatacagcaggccccttataatggtatagtgggccgactgtctcatgacgctctctgtcgcagccttatcatccggtttttccttgttttttatgtatctgacgattggctctctctagtcattgggatctgcctctgcctgactcagtgcgttgcattcctccatctgatctgtagtgacactcggttgttgtaaatcttggatgaagaccctaggaggaacctgggcccgactagatcccagctttgatagtgcgtcagccgctgcattgcgatccctttccacatggtgaaattctaatccttcgaacttttcctccagctttcgcaccactgcacaatatttgttcattgagtcgatcgagcaatcccagtctttgtttacttgaattatgaccaccagtgagtcaccgtacaccattaatttcttgatgccgagtgaaacagtgaactggagtgcatacttgagttgttcacctccgggagtgataaagagaatcccagtctttgtctactgcattattggatgctagaaacaagaactgcagtgcatacttgagttgttcacctccgggagtgataaagagaatccctgcccctgctccttgcagtctcatcgaggcatcgaagtacatcctccatattttagtgacctctgggctttccgggacctggtgctcagtccactctgatatgaagttgaccagttcttgagtttttatcgccgtgcggggtcagaactctatatcatgagctccaagctcacacgcccacttggctattctcccaatagcttcct

SEQ ID NO: 61328 - DNA, 1015 bp, Zea Mays
gggtcggacggtccgagatggtactcagacttcccagtcatacacagcgtcaacctattgtacctcataagcggtgatagagattgcctcagatatgagttcatcggcaataatcttgatgggactgataaagcgcatttgttgtcgatgtgcttggcgtagctgttttagtgctttgtttatgcgacgaaaaattaggcgtattagttttttctagtgcttgcatcatcttatccatagtctccactatacgttcaatctaatcatataaaaattcctaggagattgaataacgtcggatgacactgtgttacttaccgtggggcgctgtagggcagccatcagggaagcaggctccacatccctcatcctggatgacccttaggtcgcgatttatcgagaagtgtgagaggtgccacatctttgcctcctcgctctcctaagcttgttgtttctagaactcctcgtccagcttcttcatgtagtcttcaagttcctcatgctcatcggccaacaaatcagccatagttagtcttgtgttgttgcctggggaaacatcattgagatcctagaattggccattatagcctgattttaataaatctaaaacatagtcatcccgagcagagttgccaaaacatctgttggtgcctttttgggccaaacaccaatgatcccttgatctcgctcatgtagaacgagaccttagggaatctctctacaatggaactccacctctatattgacatccttctagagccaaatagcaaccaaccctaaggccttcacatgatgtgcagaaccttaggtttggctctatgaggtgttagaccatttgcgataggtagccggattatccatggtaggtcaccggaccgtccacatgtaggcgatggaccatccacaatggcataaagagatgttgggtaaccactagtccatggttggtcgccggaaaattcatggtaggtcactggtgtgacaccccagtgtcacttaaaggttcttccataag

SEQ ID NO: 61329 - DNA, 332 bp, Zea Mays
gttgagctttagtttgtcctatcaccctcaaactgatggccatactgaaaggacaaatcaagtacttcaggatatgctgagagcttgtgcacttcagcatggaggtggttgggacaagagtctaccatatgttgagttctcttataataataactaccaggccagtctgaagatgtcaccatttgaagctttatatggcaagaagtgcaggactcctctacattgggatcagactggagaaagatagttctttgggcctgaacttattcaagaggcagaagaacaagtccgtacgatccgggagaacttgagggtacatagaccaggcaaaa

SEQ ID NO: 61330 - DNA, 476 bp, Zea Mays
gtctgatgtcacagcctgcttcctctagttgtccaagactaattatgttgcttttcaattgtggaatgtagtaaacagtagtgagtactttgtggtcaccttgtctagttttcatcaccacggaacctagtccacatattttgacagtagacccatcaccaaacttcactaacccactgacagtgtcatcaagttgagaaagtgtagacttggtgcctgtcatgtggttactagctccagtgtctaatacccagacttcatctgaacagactgcaggcactactttttcttcagacaggtgtatttcctgagaagttccaccaaatgagtcttgcacctcagcgaagagtagtgctgcattctccacatctccaactgcaaaatttgcctcctgttgtttgtgatccttcttatctctttttggtcttttacagtcttctgcccaatgaccatagatgccatagtttctacatctc

SEQ ID NO: 61331 - DNA, 757 bp, Zea Mays
aaagtttgtaaaatttgacttttccctctataaaatacgcttccctttctgggacagagtatagtaggttagtagtaaaagcaacacaaatgttaacatgaaactgttttttggcctcttttgtaactggacgggaatcttgtgaaatggtttctcctaaccgtttaactccttgtttcttatggtttgatcctctgagataaaattccctgcttgtttgtattttctgtcggagatccatttttcactgcatcggcaatccttttgacctctaaaatgctgggattcatttttcaatactctcatcgattcacatcgtgcagatgagatgagacatcactgccctcttctcaatggtgcaaactcgttggtcttccatggtttgtgctacagctacctcatatgttcgtcagcagccaaacaattttttgatccgcgaattaactggactcactttggctaaagacttcaggggtttcgaatcttccgtgtatgtttgtaacttattgctatatcgttgtggcaaactgtgagagtatggaccgtttctcgcattgtgaactttgcctcttccaagcttgtgagctacactgccgaatttgctttccaagacttccactggaggtgtacatcctactttacctgatgccctcaggtttcttgttaaaaaatgtgatcattgaacaaataaaagtcataaattttgaaggtattaactgcactaaaaatataggtgtgtaattgttttagaacggag

SEQ ID NO: 61332 - DNA, 545 bp, Zea Mays
cttcatatcgggtaaaacccactgagtatttgggtttcgggtacccatcgccatctctaatgtaaccacgcctggatcgaccgatcccatatcgacaaccctgaatacaagcttaaaccgatttctaatctcaaccacgagatcaaggatccacgacccgaacgccaaccatgacacccccactcatggcccttggatcgttgatccatgaccagcactccacgtgacaaaacgatatcctcgatctgcgggtgaacgctcgagcatggatcgacgacagggatatcctctaccacctcctgaccaactagccacggtgaacaggacttctgcggcgacgaccatggtcggcgtatgccaacaagctacccaactgcttaaactcccatcctacacacgatacaagatgcggggacgaagatgactcgataaggataggtattaccgatgatggtgatgtagaggtcatcgtccacagtgcgccatggctcggcgaagaagctccttgccgatgcgaggttcctgacactacaaaccactccctc

SEQ ID NO: 61333 - DNA, 272 bp, Zea Mays
tgtcctcacgtagatcagcgggtaagcaccgccggcgacacgtagaccgagttcatcaccacgtcgcgcgtgccccaacttgtcggtgactgctgcctgctgcacccgttcccgtgccgatgcctcaaatagtccgcaacctaccaactagtgaccaacgagcagggcgggtaggcgagcaaggcaaagcacgccaagcgcgagtccgtccaacaaacagcccatcactcactcgccgcggcgaccatccccgcagttctcactccagtctc

SEQ ID NO: 61334 - DNA, 650 bp, Zea Mays
gtctgtccaaccggccccacggtaagagcgctacagtttggggacggttggttggcgaggtcccacgcgcgatctgttgaggatttggatgaggtgttgcggtagaaatcgtcacggacgatggttggggaagaatctaggaggaggtcccacctgtcggtcggccaagcacgcgcaccaggtggcgaatgagactgagcagtgggtcccgtgtgtcaacgagtaggagcgccaatgggctatctggtttccccaactgagccaagcaggagcaaggaaagaagtgggtcgcaggtggggatttcgacccaaaatgaggttttcttccttttctctttttcttttctattttctttttatgatttctatttcaaaaacatgactcaactttgaattttaggcacaattctattatggatagacatcctaatttcatatttattattattattatttatcctcccctcaccatttaattcgagacaaattacatgattatcacaattatccttctcaactcttttcaaatccatgtttgatcttcaaatttccaagtgctcaaattcatactaatgtgaatataacttcaattgtttacgatgttattatttattcttctccttgttatttattcatgggaggaataaatg

SEQ ID NO: 61335 - DNA, 1082 bp, Zea Mays
cgcaatgtcatgacttggcacttgcagaatggtggagaaagcacacatatgggcccgcattccataaaccaaactgaaaaggatttattttaaccctcttgtcatcttgggagcctggtggttatggaatggaagcatcactgcatcagaatgcatgtgttttagatggacaccaagggtttctgatgttcttagggacatctctggggccaccgacctatggtgcctatctgaagataaaggcttgagagccctgtgggcaagttacattggtggtagcagccatggttagtttttttattttcatggcaggcctaattagttaagacgggatgggggggagtttcctattatgcctactccccaactttttggcacgttctacactatttcacttaaagtagacagtgattgccaacagctggtaacaacgtcatcatcttcatcgccaacagtcaacacaactccccctccttatccacatgacaaccactgttgagcccgcttacacatcatcactgagacgctcacagccaaactttgctcactaacaacacaggaaccaaaatgcagcacaaatctgcctccaacaccaaccgtctatatatagctacaaatatcccgcgctactagaaatctcttctgtttcctttttctactgacacagcttgtctaccaatcacacacacatcataatgagagcagctggtagcaatgtgcgaagacctcgagttgaaggccttgatgcaaatagtggcaatgtgcatgatgtagcgaaaattgggcagaagtggtcaggggacgggggaagtgaaagagaatagtggctagtgggggggtctggtttagtttgtaataagatgtgtcatcggagaagtatgaatgaggatggcttataaggtgttttttacaatattccctaaatccaaaatacaagatgggcataccaatgtcaggttgttggcaaaatactaatataatccctctatcccataatgagaagcatattttgcaaaggaaaacgacaaattttacaaaaaaaacacctaaattacaaactataaggttagaacataaaactt

SEQ ID NO: 61336 - DNA, 345 bp, Zea Mays
ctatcaggtaactcgagttggtatgccatctccccaactcacctaaagatcaagaatggtccaatatagcgaggggacaatttgctcttaactttaaatctcctcattccacgaagtggtgacaccttgaggtacacataatctccttcctcaaattccagtggtcttcttctattatcagcatagctcttttgcctggtttgagctaccctcaaattctctcgaattatacggacttgttcttctgcttcttgaatcagtttaggcccaaagaactgtcttcctctagtctgttccaaaatagaggagtcctgcatttcctgtcatacagagtatcaaacggta

SEQ ID NO: 61337 - DNA, 473 bp, Zea Mays
agatgaacgaaaaagcatgacaacaaggactttgatgacgtttattaaacatatcgttgtttttacaataccccacgaaaacttattcctctgcttttccttctctaggaaactcaaaaaatgagcgaccatagggcgagcactgcgtaatgggtcctgccaacgccttcgggtctttaaagcacgccatgtgactaaccgacggcacatccaaggcaggcttagtcccacttgaccgagtcctcatcgaggggacgagtgacgactgagccgtagagaaccccgagccgaaacacagtgtcctctagttcgtgaatgcggccagagacgagcaccattcgggaagtacgggtggacacttcccccaatagtgaaaccccaaggtagtcgcatacaaggtcgataaccatagatagattggagcgctcagcgctaaggactcggtggcgctcctccgcacgttcgagctcctc

SEQ ID NO: 61338 - DNA, 348 bp, Zea Mays
agcggcgtatctgcaatggatcgacttgtaatggatagcggcgtatctgcaatggatgggatagcggtgtatctggcgtggtggtggctagctagcgggggcaattgatctacgacgaagatacaccctaaaccagcaacacgacttgaccacagacacgaactgaacaaagccaaactgaaaacgaaattgcaaaggctaaacaagggttctaggacagcggaatttttttgtatggtaattatctggagttataggatgaaaaacctaaactaaactagggtaagcctgacagtatacccgagtctttgaataccacttgttaggaacggcggtgcccgatcttct

SEQ ID NO: 61339 - DNA, 586 bp, Zea Mays
ctgaattccagcctctaacccacgattaaacccaggtgtgtgtagaataaaacccatgccgcgaccatacctcgcggagagcagctcccaagccctttcgcgtcgctagaccctaaaaccaccatcgccgccatgggcgaagagagaagcgttgccgcacctgaattccggtgttgctggcgatcagacgatgagagggacctctatggattagtagtcaagtgggaatcacgtgcattcacccccttgcacgcggaagactctggacagcggagtgaatggtcgctggagcatcaggaccaccgcggagctcggactctcgcggccagtgctcgactccgcgtcaccctcggtatgcaaaccttccccatgcccaccatgtttctatgaatgtattgcgcatctctatttggagcctgcgctcgactgggttgctcgccggcgatggcgtccgctgtgaaatcgcgtgcgcgaccatggctatagctgggctggggggaagcggaagagcgtgtacccgtaggattcaaggcaaccgatcgtgattagatcacagcgtactgttttgctctgggaaatcctagcc

SEQ ID NO: 61340 - DNA, 618 bp, Zea Mays
attatgtccttttcgatggacattccacggggcatgtatattatgccatttcaacagacaccagattccacgtcattaggtatggcgtagtttgtaactagtgtaacaatatatatgtatattatagtatttcttggcacgctagcatgctcacatgtaggtataggctcgatgcatatatcagatagtagtcttgagcatgcctgctatctaagttatggtgatagtgtgtctgccggattgtaacatggcacatcatatttaatatattatgtgaaaaaattatatgaagtgccaacattatgagactactagagtacaccttgaatatggcattcaaattatctgaggctgaggacctttgatatctaagggtcaatagaggtccctaggcgactaagagaatatataacttcaaatggttacatagtaagctagtgcaaggagcaaaaccgtgagttcattttcactctaaaagatatatagtatattgataaggttacacctggttctgattgctcatctccattttttgttttttcaaaagtaattaattattggttgagttcaaagttgggcaggttaagttccactaaggaatgctcaagttcacttttg

SEQ ID NO: 61341 - DNA, 408 bp, Zea Mays
atttggaaaggtgagcttcatccagtatcttctttctgagctcagggtccttgggaaccaccaatcgatctccaaaccatagaattcgcttgctgtcctgtcggaaacacttgtatttttctgccttttgtttgatcatatccttgataacctgaacacccttatcctcaacctgtgccctgactatctactcttgtaatgtgggctccaccgagatatagcttagattactcgaagaaacaacttccaggtttagtttgcacaactcatcacacagggtggtcactcccacatccatgttcatgcaattacactgggcctttctgctcaaggcatctgccacgacattggccttacctgggtggtaatgcacttctaaatcatagtccttgatcaactctaaccacc

SEQ ID NO: 61342 - DNA, 1081 bp, Zea Mays
aaagtaaaacttggaaaggtctggttttgcgtgagccgccaacaccaaccaaactttacgtcactgtgacagtttcagcctttcggtcccggcgacagccatggcggacgcgggggtgacgggggtgctagccaagctgggtgagctgacggaggaggaggcgacgggcgctgctgccttgttgttgacagcagtagccatatcagaactcaatcccattcaagaagacaagcaactctaccagacaagacactaactgttcaaccacggtacatggattatgttctttgacaacctttttgagtccaaaagaaacatggacctcaattcaattattcaggagctggattgtatataatgcaagactaagcagtgtggatttcgatgccagccccaggcaacaaacaagttggtcagatcaaggaaatctacaatgcccaatgaatccactaaatatcatctatgtttccaaatcaaacaagcagacaatagaaaggttctctctgtctcatatgttgttgccactccaatactagtctaccaaactgaacatcagaaaaacgaagtcaagacaacagagcaatatctgaccccaaaccaattggagcaaaaaaataagacacgatccgagagtagccctttgccaatcagtagtcagatagtgcaaaaatgttgttctgaaaaataataaatgggagagggaaaagagacagaccattcacatgcttgttgctaaggtaatgagctccatctgattgggagcaccctccttttcctccagcatgagaatccgccttctacgagaagaggtctaccacaccgaatctctgaaaacagagtcaagatcgcagagaaatttctgccccaaaacaattggaatgtaggggaaaacgaacatggacagaatagcactttggcaattactcgtcagacattgttgaatactgcacatctaagattgaaacaacacataatcacatggtcacatgtataccagagacaacaccctttctcaccagcaacacagattactcaatattagtacccttcataaccataatctgttcgaagctactttggc

SEQ ID NO: 61343 - DNA, 755 bp, Zea Mays
cgagttagaagaccaaagtagtcgtgggttatcagaaatcaagcctcgagctcacctcacccagccatgcctcaatccttttcccaaccactcaatatagacagacgtgatcaactatatagactgtataagtaacccttgaactgctcatacagtactaaaaaataatacgaccttttaaaactattaaatatttatataggccaagtatataaaaagcacgtgtcatcgttggactctagttgatccctcccatgtcaatgctaggtttgcctaggagctcatcaaggtgtatgcttctccagttctccacggacgttcaagcctcttcatcccaccaaattgaggggatgaaattgtcattgagagctggtttggtgacaaaggaattggaggggatccatgggagaggaaatctcttgctattcattgagagctaatcgatttggtgacaagggaattggaggggatccatgggggagaaaatctcttgttattcaaattggctagacatgaattcaagaaaaatatctctccattgacgattctatcccttttgtctcttagctagctaaacaataagactaaatatatataacatctctctctctctctttgtttgctatcctagaaccaaaggcacccatgactatttgtcacatagaacatctggatccaactaagtcagccacacgcgtccaaacgagaaccgagtcagcgtgtccagatgagaactaagcacaccctaggccaaa

SEQ ID NO: 61344 - DNA, 782 bp, Zea Mays
cgcctgttcacgggaagtgtgttgtggcttcgccgcggaaccgacgcccgggaactcgggatttcttcaccggagaaggtccttcgccgcaaaaccactgacttccgtgaccagctccctccgttgccctcatgctgcggtgagtgactacatcatactcgaattccccttcttgttgcgaatcgcagccctgatgggagtagggggcatcgtggcaccgatccggcgtgctccagcgatggcttcgccgcgtgtgagggcggtgccgttgcgctctggcgtcggtagtgaatggggcggccctgaccgtggcatttgtggggagcggttcagattagaacacatatatcttttcgcttcattaaaccatggccatagatcagtagatgtgcgaacaaggtttgacgatgggattttaaaatcacgaccatcgatcatcgatctggcggtcatcactccttaccggttcgtttagtttaggactaatctatgtcgtcgatctccacgtagacagccaggattaaatgacacatacccccttcgcgcaattgactctggccgttgatctcggggtcgatggctcgggtgagttggttggtttagatctaatctcgtgcgtccatctcaaatcgcacgacctagattgaggaataccccttcgcccagacattttagcatatgagccctcgggtttataacaaaccaacccgccgtcctgtgcggaggttgctgagtcttgggaaaattgtggattagcccccgggcttactagttattatgcg

SEQ ID NO: 61345 - DNA, 667 bp, Zea Mays
tgctacaaatacaactcatctataaactctaaaaaatgcaggttcataactcagactacgtatggcactatcaaacctgtttacacgatgttatgaggtcaagtttcaaatggagcatgttagcacaaataggaaaaggaagctaagtaagcgatctcgttccaacttaattcagaacatgcaacaaaaaagttgaatatcttactggttgtctaccttatgatttgttcatgaaatttgtcatgagaatcatactaatgtgtgctacgcccctttgaacatacctcgtgtcaaagcacggcagcacgacatgtgtgtagagaactgttcaacaagtagcatagtaaatacattactataatggtgtacaccagaaaagaaaaaatgtattaggtgtgggcacatcctctcagcggcgtgtcactttgcattttggacacttcgatccagatttagttaaaacgctaaaaggtacatatcattctatcaatgtttaatccaaggtattccctttctattctacctacaattctctacatgcttacatggtttcatttaagtttgttgttatctcatcgtagtcaacatattctctaaggctgtcaactagtgaactctagctactacgacctacagacgacgaagacgaagtcaagatttctcaacc

SEQ ID NO: 61346 - DNA, 455 bp, Zea Mays
tcgggtcggacggtccggcgaaatacgccggacggtccgcggtataaccggactgtctgagatgatgctcggacggtccggccgcgtccagtacgtgtcgcgtgcctagtggttgcggttgtgatggtgactcgaaagcgtgtattggcataccatatgatggctgggtcaagggtgacccgtttatagccgatgtgttagatgcgggtggctctgtattagactctcgcgatggaaagctaggagcaactgatttctcgtattcatgtagatgcattttaatagattcatctacatattgctttaattgatctcctcgttgatccatgaaagtcgtaagagatagatctggagtacttacagcgggaccctgaagtggaggtaggagagattccatatcgatctccccttgacggatgatcttctggtggcgatccaccgtgaagtgtggcaag

SEQ ID NO: 61347 - DNA, 879 bp, Zea Mays
aaatgtttaagtcttgattcatctcgagattcgctttgactgttatatccttccttgtcgatgtcgatcttttcttctccagtcttggtctcattgattcgaggttagtgtatatcatcggggttggggaatatggttaagatagatatggatgagatagactacatgatgtaggtcaaattcttgtttgatgttaggtgaggatagacagattatgcaattcatcatgactctactggttgggttagatctctagcatgtggcagagttggtctaaggcacaagtttaggttcaagcgcatgaggggagaacaaggttcataggatttggatccagattatttcacttgtgttaacttgttaagtgactcacaatagattgaataagatcttgattagtataagttgagtgtgttatgtcaaattctagttgggtggctttgtgttaggtcagacttggtaaaatgatgtgtatcattggaaacatgtaggttaggctggttggttagaatctctctctctttttatagatagattaggcaatttatcaagaatgtgtaggtcgtttgtatatggccgagttgatctaagtcaccaacttaggcttaagtgaattagtagtatggccttatcatttgtaccagcattaagtaactcactctagattagatcataatagattagatagaatctagattaggttggtatgactagattaaactagttaagatctgattaatttatttggggaaagtaggtagatgtgggtaggataagttatgatagttgaaaatcttgggtgcttataattttatgtcggtctatacagattttgcaacccaacgcataagtcaagtacttgtatatggctgagctggt

SEQ ID NO: 61348 - DNA, 853 bp, Zea Mays
gacacttcttcaattgtgatacatggaaaacatcatgtacatccgcaagatgatccggtagttctagttgataggaaacttctcccactcacttcaagatcaagaagggtccaataaagcgaggggacaactttcctttgactttaaatcttctcataccccggattagtgacaccttcagatacacgtgatcaccctccttaaactctagcagccttcgtcgggtatccgcataactcgaggccccttgatgtaagaaacattgtaagttagggaaccttaaacaatgctcgtgcattctcttccttctccctattttactagggagaatttaccgcatgcacctccgcttgaaaggtggtggtgtgtgcgctagtctgtttctgacacatcggtgggtcaaacttgtttcctcgtcaaatgggtcacctcgacctatcatcaagcgatagagagtcgtagggcggtctttatttaatcatgtcattctccctgtttgcttcaccttcctctcggctccttatcgcctcatcttcctcattcagccttcttcctcgcccttgatttattcgtcgtgttttctatggcaacctggcactgaccctcaacacaagcacaaccccctacacaagatggtgaataagacattcaagaagatggcaatgatcaagtgggagttgaggaagaataggacaaggaggaggcaccacatccaagagtctgcaccaccaatcaacgagatcatccggtggacatgatccttggagacataaataagggagtaaccactcattctcgtattgctattttttgtgagcactactcttttgtgtctcccattgagcctttcagg

SEQ ID NO: 61349 - DNA, 440 bp, Zea Mays
ggagaaagttaagtatttggtccagaaattctccaagaagcaggaaagcaagtacaaattatcagagagaatttgaaaacagcacagtcgagacagaaacactatgctgacaatagaagaagagagttgatctttgaagtaggagacttcgtataccttaaagtttcaccgatgagaggaatgaaaagatttaaggttaagggtaaactatctcctcgctacataggctcgttcaaagtattggaaagaaaaggtgaagtagcgtaccagttagagctacccgatagtttgtcgaacgtgcatgacgtatttcatgtatcacaacttaagaaatgcttaagagtacaggaggaacaattacctatggaagaactcaacgttaatgaggatttgacttattcagagtaccctatcagaattttggaaacatgtcacagaat

SEQ ID NO: 61350 - DNA, 699 bp, Zea Mays
ttgctggcgcgcctaccttttgggggaactacgccttcctgatttctcgcccaaaagcgcgtagtatcgacctaggtgggttggggctacgctcgtgccatgttttgcacggctgctcaacttcctcctgctcccgacgcctgttgtcgaggatgcgtcgggcgtcgcagatatccccaaggcggtccttcatggggacacacgtactcacggatcatgagggttgtcctcccctgctctaagacgagaccatttttgggtcgtagctctcggtcccaagggggaactatcgatcaatctcggcttgctgcacatcggccctttccacgaagttatggaggtttcggtacatcattttgcctctggtttgctgagctctgggatggattagagaatcatggtgttgcgaggcactgtcgcaactttcagcaagctggtcacataccttccttggggcctctcagcttcaaggcgcttccgcttgacatcgccatagatgcgatcgagtttttgcacgagggcgtcgagctcctccttctgctaacggaggtagtccttgcgggcaaggatgtgcgcttagcgttaacgttggtactcttcttcttcattggtggcctccttgtcccctctatcgttgtcatttggcgggggcgttgccacgaagcagacccttttttatgcttctttggcgtcaaagtt

SEQ ID NO: 61351 - DNA, 402 bp, Zea Mays
tggaataattcgggtggttctgccacagctggtatcggagcaaattccaccacagagaaggacaataaaccatgggtaccaatttttaaaatctaaaacttgcctagaaactgttacggatcgtcaggattagaccgctagacctaggacgaaaggccttaggcatagagggagaaataggtggctaattaattaggccctgtgggccaatacttatatttttaaggatgccctaaaaaggcaccctattttcttgtgagaggcaacgtttcttccagcatgcatgcattataaaacaccaagagaaattaaaatttgagctaaccccctttctttaaaaccatccgggctctctttttctttttccttccaccataatctttacctttgattcccttccgc

SEQ ID NO: 61352 - DNA, 456 bp, Zea Mays
cacctgggctgggtgtatcatctggtatcagagctagggcccattttaagaaggtgggaatgatgaggacatcctccactattacccgttggcaaagacgcaattggcccagttggcccaattgtagtcggatgacgaccgtgtgagcctcagaattatcccacctcgcttaacttgggaggaggaagccactttaaaagggagagccacccttcccccattggactagtcttttggggcgattgagcctttccctgagttgggtgtgcctaatgaactgttgggctccgggcaaccctaatttgttgggcctcggccaaccccacctgggctgggtgtatcaaaaacggagagcaaagtctaatgatcctggatggaactatagctattggacggagattgggaaccaagataaggttacatgcaacctttgcaagaccgtgacaacagaattat

SEQ ID NO: 61353 - DNA, 344 bp, Zea Mays
caccaaggctggtcttcgaaagcatagctgaagcagaaactaccaggctagaagatattgacgtactggaggaagagcgattgaatgcagtaattcagtccgctaaataccagcaaaccctgaggcgatatcatgataaggctatacgacatcgatcctttgtagtgggagacttggtccttcgccgaattctaacaggagaaggatgacacaaattgtcaccactatgggaaggaccattcatggtgtcggagatcactcggccaggatcatatcggcttactcaaatggatggcacggaagtggggaattcatggaatatagagcatctcaggaagttttac

SEQ ID NO: 61354 - DNA, 1356 bp, Zea Mays
tgaggtgtgtggttctcaggccacaacgagccggctgattatataatcagaacgacagccttgtcgtccataccgccatcatttgaacatgctgcatgatagagttcctgcttgcttttttatcggttctttgattatttgttggctttgctattcttttttgggggtcgcatttttacgcgtttgttacatggaaaccatatgtgagctagcgatggcttctatgagatagccagggtcactggggatgaaggtcctgaacaatataattactgctctgtacatgtgccagtacatttcatccatagattctcccttgcatcaacatgttgattttagaaagttgtgtctgtcgttgccggcgccgtgtgcctaatccaatgttcttctgctgattccgttttgtcgtttgccctggggcttttgcgttggatttggcaaagatgaggacgagccatggacgcgaggatcttcactcctctccatgcttgtctaggggtattgttgtctcggtcctaaaacagacgacgtttttttgtttaactatttattttacgcatttttaaataaaatgaatagtcaggtaagatgtctaaaaagccaaaaaaacaccatgcacagcaaagcatgcaagctgtagatgtagatagacgggcagctgcagaattgtagtcaaagcatgcaagagattttggttagagaaaaaacttgagtcagctttcacttattctttctccagtttcacataaacttgagtcaatactttattaccaccattgttatgtttttgggggaaaacgagagagataagcaatgtctaaatatacttgcttacaaagtgtgcagatgtttagtacaaacattaaaattacaatactattttccccagtagatgatacaggctgcttcgtcactagatgacatggtgacgatcctccgtgtccctgtccttagtgaaggaatagaagaagtgagggatgtaaggactaatgggctggtgagtctgggggcattagcaattgaaatgaggccaggagggcatgaggtcggaatggcctcatagtgttttctgccaaaaactgattagatggagctgcatgcttcgtcactctattctttaatggtttcttttcgtgcaggtatccgttggcttttcagtaagaattttttcataagactgaaatactgtatatgctcggacttagagctaaagatccagaaatgaggaagcaattcttcaagctttaccatgatacagttttgtaaacattcttaatctttaaaagatgctaacaagagtatagaacaacaattaatgcttctgcatttcaacgtatcttatcataacatatttac

SEQ ID NO: 61355 - DNA, 465 bp, Zea Mays
ccaacacgtcgttggtccaccaggagacgcttccagaggcccacttgtcagtgtaatgtatggaagtattatttagtgtgtgctgccagcaaggagaacagtgttgtaattaccctgttatgcggaatattctttggatatagttggtggactagggtaggaccatactttggactacctgcccctggatgaccctataaatacccccgtcctatactcctacagatggacgggacacacataacgagacgctacagtttccacctaccgtcttgtcgcacatcagtgtttcttgtctctgtctctgagtgttcgacccacctgaccatgtgttggtacccaaaactataatcccctttaggttgaggcgggatcatttgctcgcatcggccgagtcagagccaccatggagcgcacgccactttagttgattacgaagtgaaaaccacatattctcaagcttga

SEQ ID NO: 61356 - DNA, 428 bp, Zea Mays
ggatgcatctgcctgactggcagtcccaggcgagggcacaaaccaaacatgccctaggcgagggcaccaaccaaacatgccctgcatactgagaaactccctacgtccctacacatctgaagcctaggaggtaggtctgggcaaaaacccgttacccgtaatccaacttcgaaattcacgaacccagattcgatatacatgtacccgaattacccaaccactggttcagatattaagtccaaaaacctgttttttgtttgattaattcagattacccatgccgatacccgatctccactaaattacccgaatttctaaaaggcatctccttgcaggctgcaacccaatatcttatgtttctaaccctaaccggctaaccaatcgattactcgaccactcccaggctcctagccctcccaggttcccac

SEQ ID NO: 61357 - DNA, 432 bp, Zea Mays
ggaagacgtccgggaattcacatactatcggaatatcttggatctctggtatgatggtttcatatactctgtgtgacaccccagtgtcacctagggtttctctcaagtgctaacccaagaaccatcattttatgtgagcaaaattgagcatggttatcaagttgatttaaaaataaaagaacccactaagcttatacataaaagcttcatgatcaaaacaaatgggtttttcaaaaaggcaaaatgtgcaaccccaacaaaaaccctaattgagccctatgaacaaaattcaagaaaatggggaaaagagtatgaaaaatttagaatcatggcttgggccaattataaacattgaagtatatttaataagaaacaataaagattgaggaagcttggccaaaataatttaaataaaaccccaagcaagcttct

SEQ ID NO: 61358 - DNA, 760 bp, Zea Mays
caaaatacccgaaatgctatatcttatgcacgtgtccagaagaaatcattgacatcataaattccaatatatctcctagtagcaacttcataaacgacatcgagtcgctgaccgtcttctccaatgacatcgcgctcgacgacacagctgcactggacgatgatgaggaggaggaaggcattatgtcccatctgcggtggcgggcagtttgcttcacctaggccaggtcggcggtggcgcacgatttgccggcgtgaatcacatgggaaaatatgtgtcggcaaggctcgggagcgagtaaacggacgagagaaaagttttcctcgtacccgacgttgatttttatagcctataaaaattcctcgggaaaccaaaagtcaaacagtaaaactttagaaatctcaatggacacattccaaaacaccccttgaggccacttcaacctgtgatcgagggcatcgttcgagcatctcccaaaaacagacttcgggaccagctcaccaagttgaaccgatccctcggggggctagtgttggagcaaaggccgaaaatgaccccaattaggcttatccggccacgactaaccatgttttagcgcaggatcaacagctaagggggacttcgacccataccagcatcgagatcctcgaccacggtcttcggagtgagcggagtgaagggccacgcaataagagggggctcactgcctcttcccccacgcgcccgaaggctcatatcctccctcgccagcgaagtctga

SEQ ID NO: 61359 - DNA, 466 bp, Zea Mays
gaactttgttcagtactatttgtgatgtgcttggtttactattgtaaccgtcgatgggaaccttttattataactgttgctgagttgtatgcttgttttctaaatcatttgttcaactgcttctgcacattttcataacttcttagcatctgacttaatttgtcccctctccacacttactagaatggacccatcaaacaatgccacttcttctcagcccatgtcaaattcatcaattggccagcagtttcctcctccaacccctatgtggccaacgggttacatgcagcagagtggtatggattgtaactttatgggaaacctaaattttccaaaccctgctcaaggtccgacaacaatgtgggcacccatgcatacaggaaatacttcttcccaatctaccatgattcccgcctcacaatcagctatgtactggaatcattacttgaactttgtcaggaatcct

SEQ ID NO: 61360 - DNA, 402 bp, Zea Mays
acgcccgagaagaggcaaagcaagatgaagaagctgctgaacgtgcaatgattataggtatccttttaaagctttttttttgtcttgttgtttgtttctaacttcgaaattcaccattatgttctttattacagctggcctttcgccaccaccggagccatacaaccctaaggctgacctagctatgaaagaggctttggatgtgatgaagattgctaacgaagtcatcgatgaagttgtcgacagactattacatgaagccgctgagaagattctaaaaatagattaaattcttgtatgctagaaactgtaaatgcttgtatgtgattgccaccatgtgcacgggacaaacatcaagtgtttgtatgtaaattaatgtaatatatttttctttgcgatgcc

SEQ ID NO: 61361 - DNA, 362 bp, Zea Mays
caagcagggacataaaataggtaatgatgagatgtccaatcacataccagctatttaatatatgatttatccattctaataacaaaaacaaagaaaacatatgccaattgcatgaaactacaagagtagtaggaataaaatataccatactttggttttcattccatcttcagcaatccacatataatcatgtatccttagattatgtcgcttggcggcatctgagtttgggttttcgacccaacgacaaatcatgtttagtgcctaatcataaattaagtagaatgttagatttcatcagctttggtatggacaagcaaaataaagagaaaggtatagactaatactcttaaagaaaccat

SEQ ID NO: 61362 - DNA, 1164 bp, Zea Mays
cccgattgttcaaataactactaaagaatccttggtgctatttcactgtctctctgacattcacacttaagcccccgcacttctatttcttcacagcgtcaagtccacgacggtgagcgcgctctccggcgaacttgtaccggccaagatgcgcaaccacctgtgctctgacttggtcaacacctaatcctacccctggcgaccttaatccctccattaattacacgaattcggcctggagttcgtctgcccacgacgacggcgaacgctaaggacaacccgaggcgttcccggtgattaagcgtggtctagctcaattgatcgggcctacaagcatccttagcatgcaagggtgctaaaacgagggtaatgaggatgagagcggacctggagacggcagtccacggtgcgatggctcacggcggcgcagagaaccgaattgggggaaatcctgaattgaggcactacggtggctaatcggaggtgagggctggtgcactggcgcataacaacctaacggagcacgctgagcactcaatttatagagagcaatcgcgaatacgacgaatttaggcggggaagggcgggcagtgagaaaggggaggagtcaccggagttatctatcgtggcatttaccggggcactgtcataggcgatggataggctacctatggtggtctactgcgacatggtaacacaactaattacggggcgcacgagcggcaagcggccaactccggcgaggatcattttggtctgtcgtagggcaagtgggtacagcggccagcacacgaccttatccgcggtaagatcttttcactgtcggtcctaatccgcaccccagagagcacgaatcgcaacaccggcgcgaatccgggcgcggaggtcaccgacggcgaggtgtggtgcatctgctgatctttttaagtattgtaccattgaaacctttcttcaaagcgcccgacagagcgaattagagggcttagttcttcaatttttatgtgacaacataaccagccctctgtagcaaagttgttaatctataatccagctacaattcgactataggaaccttgatcatttacttactcgatcaagcttgaatcgactccaaagttcatcagaacccactgtcagaccaatttcatacttcagtggtgactg

SEQ ID NO: 61363 - DNA, 460 bp, Zea Mays
gcagtctatgcatttggtcataatctaaaaggtatgatggttgcagaactcttattttattaatccttcgatccttctcgaaatacggcttaaatggcggtgcgatagtttcaacgacgatcaatcatcatttctcttacgcttattattaacacttacatcacatgcattcatagaagatatgtattcatctcattcacatgaccgcagtggggaagaaatagagcttgtcttgtcaaacgacgagatcaacatcgatcttaatagtacacttcatgttcccaaaataacaattattcttgttattatctaaacgcgacatagaaatcagattccttgttattaaagacataaataaaatatcacacaactagagaacaaaatcatcatctaattacaaggcgatgtatccaaatggctccaacgtaggcttagagctcgttagccactctaatatttc

SEQ ID NO: 61364 - DNA, 456 bp, Zea Mays
atccttggtcgttgccaaggagactcaagttttgtttagttagtatttgctgcttcaagggtgtaagttggataaacctcccatcttcttgtattcgaaacccccacaaagttggttttgtctatttcataacttcaattccacctcacaattagtgcttgttacttgttcttgttggttcttcaattgcttacaggacaatttcccttgtggccggtggtcacacacaacagaatcacaacaactattggaggttgcgtatcaattgctaaggcacatcatctttggatagttgtagtcggaccaagaatgtcgtcttcatccaccaatcgagtaacaccatctcttatcaaaagatagaccataacctcacttgaatactcattacttgatgctatgatgaatgaaataagttcataccatgccacaattgcaacttaaaaatacatgaattgc

SEQ ID NO: 61365 - DNA, 484 bp, Zea Mays
taggtatcacataatgtcatcactatgatgggtaatgtgtgaagtgttgtaactagtatagcataagacattcaatgaatcatatagtttgatcttaaacaagtatagagaagtcaagagtcaccgaatagattgacaaagcaaactaatataggtcctgaccctaattcctctaaattgtataggtggggccatatgagtctgtagtgtagctaggggagccatcttaaactagcgatggtggcgctagtataatctattggaggataagctagaagtaagaaaagttctaatcatgattcaccaacaattattggtgaaactaaccttgacaggcctatatagtctaaaatagtgtaagcaccatgtcaatttgtctctgctacacctctgcatgtcgatgttgctcttctatatgctctgcctcacattagagttgctttaccatcatatgttgttgctcttcagctagtctctactgctc

SEQ ID NO: 61366 - DNA, 333 bp, Zea Mays
gggggagtctcgatcaactaacctggtgatgcagccaccgatgttggatgcacttgcaacagtcgagcacccaccagcgatgaaccatacgacaccgccatttttctgctcaagatctcgagaggaaggctaggacgacttgagatatgttttttgtgaggttgtgtgtatcatgtccctagggtatccacatcatccacgttggcttggtatttacggcaaccacatgggtacgtatgcatatgttatgtggggtcgtacattaacgttgttgtggccattgtaacaacctctacgctataatcaccactatttacgctcaaacatgaggat

SEQ ID NO: 61367 - DNA, 383 bp, Zea Mays
ccgagccacccgattccacatgtctttgcccgcacagcgcacgacaccgtccgaacgtacattgtggcctttcacattacataatcacaaaagccgtaaaaagtaaaagtaatcagggttgtcaaacatttagattatcctacatctgattctcccacaaccagattcccccacagctagattctcataaaagctcatccaagaaaagctgaacaagcctataccctaggaaccaattattagccataacttaagcttagattagaaataagataatcaacttgagaagttgaaatacctcataaagtgggtatggagcagccaagatgtctttttccgtactgttttagttaaatgtctcgtctaaggtgacttgacaaaat

SEQ ID NO: 61368 - DNA, 378 bp, Zea Mays
tggaatagtgtgttagacatccaagagctaagcaaacatgtgcatacacaagagcaacacatccaagtgatcaaagagtcccaagtgcaacaaattgagtagagagctagacttagccttgtcttgtgagaaaaagagctagagcacttgtgtgagctgaagttgtgatcataagctctggagttaggcttccattgagaatgtaagacgatcaagagcctccaagtgtgtggagagccttgaactcattgaggaaagagaaaggggactcaagtttgatctttatgatcacttgaatgaggaaaggattgagagagacccgatccttagtggactcctcaatggagacttaggtttctttgtgaaattggactccgg

SEQ ID NO: 61369 - DNA, 484 bp, Zea Mays
ttccatggtctttattttatttcgagaaacaatgtggcataatgatgtgtggtgttttacttgagtggacataaacaccgtctaggtatggcttgaatagaggggattatggcaaacatggaatcacaaaaggtcattagctagcccaataatgttttctaccactagttgtactctaatgtcctctcgtgcgaatacaatgccctcaatatcatagaaacactatttttagtttcaaaggtgatctattgttttagattctttgttctacaacaatttttccaaatgtgtcatggcaaacatgtgccttacgatatttaacaaacattggagagtgcttccatacattttggtttaagttttctaaggacttcattttttgtaagaaatatagcttaatgttgtgtgttgttctacctgacttgacacaaacatcatatatgtataccttcagtacaggggattatttggaacttgatatcac

SEQ ID NO: 61370 - DNA, 281 bp, Zea Mays
gttaggttggattagtcaatttttgattcttgattgatgaatgctagtgaactagtgattatttaggccttctgtggtaatagtaaacttaataatacggaaaaggttcagtagacatatatatctattattaagttgattcggtcctcttgtggctataaatatgatataagtgccttgtgcttgagtagcaaagtttagagttgaaatgttggttatatatataagtgttttaggtaattaagttgagaaaactaattaaaatgcttctatccttattc

SEQ ID NO: 61371 - DNA, 1371 bp, Zea Mays
ctactgctaactgctccctcaacatctcattaaactaagcccattcagctagaagttgtgccacattaacttcaacatcatatggaatatgtcatgtagctacaaaaggagggtcatacacgtataacaccttaaaagtagagcaagccaaagaggagtggtaagaagtattataccaaaattcggcaagagacagctaagctttccactttgtaggttgagcgtgcaccagacacctcaggtacatctccacacattggttaacatgctcactttggtcgtcggtttgtggatggtgtgccatattgagattcaatttagtccccaagagtttgaacaattgagtccataaagtgctggtaaagaccttatccctgtcattgagtatagattttagaagaacatgcaatcggaccacctgatccaagagaacatggcccacatgtgcaacagtgaaggggtgtttcagtgctataaaatgggcatactttgagaaacgatcaaccacaatgagaattgtatcgaagccttcgaacttggacaacttctcgatgaaatccattgcaatgtcttgccatgcaccttggggaactggaagtggctacaataactcagtcggatgcactctttccccttttgatctttgacaggtttggcactgcttgacaaaatcctccacatcagttttcatacccttccgaaagaacaatttcttcagccgatgataagtagcgtgcacccccgaatgacctccaactgcattatcatgcagtgttgccaccaatttggtttggagagcaaaattttggcccaccaaaatcataattatctttcttgatgaccccttgagacagtgaatagccatgttcattagggttgtgtatacataaccgaaccgatagggattgagcaacggtatcagtcacataagagttcatgacttcctgaatctagatcggttgaacctcactgatcactgcaatgtcattgcataacccacacgagggagtgcatctgccattttgttttctctaccttgtttataaaccaccttacattacacacccattaactttgccatagctttacgttgtaactctgagtggagatcttgactgtccaagaaactaagagctttatgatttgtccgaatttcaaactcacccccattgaagataatggagccaacaatccatagccatgatcagtgcaataaagtcttttttgtatatagacaacttctgattttggctcccaatgctttactcaagtaagctataggttgatcttgtagaatcaacacggtccccactccatcgtcacatgcatcagtttcgatagcaaagaacaggtgaaaatctggtaaggtga

SEQ ID NO: 61372 - DNA, 857 bp, Zea Mays
gtgggttgtttctaatttattatttcacttattttaccggggtctaccttgattcctccattggtgataatatgacctaggaaagcgacttccttcagccaaaaatcacacttcaaaatttttgcatacaactgattgtcacgaagcttctgtagaactaatctcagatgatcttcatgtgcttcttcactctgagagtatacaagtatgtcgtcgatgaataccacaacaaactggtcaagatactccatgaatactttattcatcaggttcataaagtaagctggtgcattggttaatccaaatgacataaccaaaaactcatatagtccatatcttgtagtgaaggctgttttaggtatatcttcggttcgaatcttcaactaatgatagcctgatcttagatctattttttagaatactttagctcctctcatctgatcaaatagatcttcaatccgaggtaacgagtatttgttcttaattgttacttcgttcaagcttctatagtcgacacacattctccttgaaccatctttcttgttcacaaatagaactagggctccccatggagacgaactggggcaaataaaacctttttctagtaattcttctatttgtttcttcagttcaattaaatctttgacatccattcggtaagctctttttgaaattggtgcagttccgagtaatagttcaatagaaaactctatatcatgatcaggtggcatacctggtaattcctctagaaatacgtctaggtattcacacactattacgatgtgctccaaagatttctcctccaattgatttaccattgcttctgctattgctagcataattacattgacttcaat

SEQ ID NO: 61373 - DNA, 360 bp, Zea Mays
ccgtgatccgtgcaatgctaaggacgacatctatgcggtgagcaaaaagatcaacaggagagtgaaaagatccgggggattgaattggggctctcccctgcggtgcccacttgatgacgatgtggccgagcggcggtaattttggtggctgagggcttcctcggttgcgccacaccagggaccaattcaccacatcgtcgtaacggtatagatggcaagttacccctccatgagctattgcgccgctacgcgccacgaagcatagactagtgaaagatctcaccaccgccgtgaacgttctcatccgaaattcacaaagcacgcgagtgatcactataaattgagtgccctccctgctcc

SEQ ID NO: 61374 - DNA, 690 bp, Zea Mays
agggctttggtgagtgcgttctgagcaaccaaatgtggtagcgtttaaattgaatctagggcgagtttcactgattcaccacatgtcggatacacgtgtgaatttggacagaatgggggtgagagagtgggtcgacgtgggtgcgctctcggaggtgttccgcggctgcgaggtgatgttctcgatgccctatcatggtagtgttcaatcggttgagccgacgagctacgttaacattcaaggatgctaaaacatggcacaaagggggatgaacagacctaggaatggctgatcacgtaggatgtctcacggcggcgcgagtgaccgatttggggaaaaatctaattccacaggctacggtggagggattgaggggaggagcagtgcactgggcacataacaagaaggcggagcagggagggccttcaatttatagtgactacgcgagtgcttcacgaatttgggatgagatgatcttgcgaccgaaaggaaggtgagtcaccggagtgcaactgtcgcagcactcggtgaggtaaggaccctggcggtaaatgtactgtccactgcgacctattgcgacgtggtaatacccacaagcatgtggcatccttgtggcgagcagcggacgccgacgatgtcattccggccgatcgtgaagcaagtgggtacggtggccagctcacaatctca

SEQ ID NO: 61375 - DNA, 558 bp, Zea Mays
cgagtgtaccatggaggtatcgagggataaacttgataattgtcaagtgcaactcccacaaatcatgcaagtggagtcgtacctactggagcacataggcaatgccaggcttggtgaagctaggatactgaagggcaccgacaaggctctagtaggcagtagggtcagtaacccagagatcatcaccaaaggccttcaccaatgtgtccactagagttgcacatggcttacaataccacatgtcagtgcatgttggagcgaggacaaacctacccctcgaccaccctcatttgtccactaatcaactgcctaagtgcctgacaggtgaaggtgagcgtcggagatagcgcccttgcaacgaccacagcggtcgaaggcctcttcccctcggcattaacaatggtggggcctttgaatcatgaggggccgactcattgtggtcaaggagctgcgaaggatacaagggtccttccctaagcgaagactacaaaagagcgaagaaccgaaggtggcgtctagaacccaaccatggtgggccaacaccctggctattctggg

SEQ ID NO: 61376 - DNA, 529 bp, Zea Mays
ctgacttcaattgggctggacttgaactcagcatgcttacttgacttagggtgaccactataccctactaacggagcaatcggcttaaatcagcgacgacttaagttgatgcgacatgctcacgcttacctcacttagggtgagcactataccctgctaatggagcaatcggcttaagtcggtgacgacttaagtcagtgtgccatgctcacgctttcctgacttagggtgaccactataccctgctaatggagcaattgtcttaagtcagcgacgacttaagtcggtgcgacatgctcacgcttacctgacttagggtgaccactataccttgctaatggagcaatcggcttaagtcggtgacgacttaagtcggtgcgacatgctcatgcttacctgacttagggtgaccactataccctgctaacggagcaatcgacttaagtcggcaacgacttaagtcggtgcgacatgctcacgcttacttaactaagggtgaccactataccctgctaacggagcaatcggc

SEQ ID NO: 61377 - DNA, 1708 bp, Zea Mays
gcaggtggtgccgcccccggatctaaacaggaacactgagtagttcatgtaccccgaggtctggaccgcctacatcatcttcttttgctggatcctcgccctctccgtctttgggtgcgcccccaacattggcatggacgctcgtcaaccttggccactttgcagtacgtacaacggcattctctcgctccttgcttgtcttactgtctgccatgttacttgctccccttgctatcgttggttcgttcgtgtgcagaggctggaatggggtttcagctgttcctattaatgttagcatgaggagcatcttactgaagcggctccatgtttggtcgtctacatcatgagggattgagggctaagttctgatgcttgtgttggatgggattacatacctttacacttacatgcatttcacctattttggcacgttaataactttgggatttctaaactattaaacattaattcgaggttatgcatatgaagataatttaggtacatgttttcttaggccaattacaaacaaataatgttggggtgcataatagtgactttatcagtagtcaggtctgttcgcattgtctcaacagctaatagttccacaaatgatttggcaggaacaaagtgtgtattgccatcctatggtcctttcaagtttcagctattgatctttttgtgttaggtaccttagttcagacctcagcatgatccaccctcctgacgggactcaggaagatttgtgatgacactactgacatagataacaaaagtgcccatgaaacgtgcatgaaactatgatatatattctaccaatgttggacaattacagaaaaaaatggtaaatcaataaatcacagcagtataggtagcaaattatccaatcaagtcttgtcacatactactaacttagtatggtactgagttgaacaggatggaaacataacgaatactatctacaaggttcaaagcacacatatgcatcatactttatacaggttactctgaactctgaagtagtctgtattcacggatcagttgccaaatttagttgaatgaaacactggggtcgggtccaaaggccacttgatcttggtggtttaggaattttggacctggaaattttgggttgggctctaagaatgaggtgactatggttaaaaaagatccaacctgatcagccatgggctgctctagatttacaggttcactctaattctatgtccatgttctgcatttcagcttattctgtgttaggtgatgacagcgcattcaagtcagcaagtttgaggtatgattcagttctaaatttagtgttatgtttctttttcatcctcctttttttcttggggtgtctctgaaaggggtgtgctgctggttctagcaggacgctgcgacactttagcacgacccatctcatttgctaggccaaccgaactgtgcatgcaggaatccacctcacaactgtggttttttcctctgattacgattacttgtgcgattgtctcccacggaatgatgcgtatacctcatcaatgctactggctctcacacgcctgttacagtcccattgcttcatgtgttaatcttcgtagaaggatccatcatctaccaatctcagtcaattctgacttgaatgcagtctccgtgctgacttgacggcgacgcaaaaacactgttctgattctattggatcatgatttccgtt

SEQ ID NO: 61378 - DNA, 453 bp, Zea Mays
catcataaatccaattggaatcactatacccctcaagtactttaggataccaagtaaagtgaagtccataattcattgtaccactcaaatagtgcatgactctctcaagtgtgtgccaatgatcatcttttggattaccagtaatctagctcaatttgctaactgcaaaggagatattaggtcaagtagcatcaactaagtatattagtgaaccgattatctgagaataagtcagttggtctcttcctaaccccttatccttcgaagaattaaactaggaccatatcgtatcgaagaaggctagtagtatttgtagcctaagtggctcaagatcttctcaacataatggaattgcataagagtaacccatccccattttttaccaacataatgtttaggataacattagcctcacccaagttcttcatatccaggttttaggatagaaatgac

SEQ ID NO: 61379 - DNA, 558 bp, Zea Mays
ggagtatcaacgactcatcaagttcccggtgcgcgcaccaaaccactcggggaagctgcaagttggtcggtcgaaggtggagctatccacgactctagtctatggcggcgcaaccccgttctgtgcagtacaccatagtaaagttgaagcagcgaacacggtaagcttcactgaacatgtacaacacagttgaggaatcctttgagattacctggccatggtgaagtggcaaccgggtgggcatggtcaccatggcacatggaaaatggcactcagctctggagcagctcaaatgtgtggcatagtagagggctacaccagtatgaacatgggactccacactctctacaggggtctgtgagtagagctcaggcagggaggaaagcttcactggattaagcctttaaacaattgaacatggggcagatgtccctgcactagctcaacatgcagtggagatgtgttcacagtgtgccagcacaacatggatcacacacgtgcatgtccaacacatataccacacaggttcaaaggccttttaaggaacactgaacttgg

SEQ ID NO: 61380 - DNA, 893 bp, Zea Mays
ggaagagatggagccataggtcccagtggggctcgatccccaggcacccttcgcaaacggtggtgaagatggccgcctgggcaatggagttcgggttgaagttgtgcaactccaccccgtagtagtgtggcaatgcccatatgaaacggctcgatgggactccaaacccctgctcatggaacgaggtgaagctcaccacatagcccacggtcggagctggcacttgctcgtcgtctgacgcgtaccactctggctatgggccatgggagcagaggcgaagcagaccaacgtccaccaacgcgtccaaatcctcgtcgatgacgaaggagatggaccatgggtcgcggagaaggagacaaaaaggaggcaaagagcccttttgcggagatgggccatggatcttctcagccatcggaacaaaaggagacaaaaaggaggcaaagagctcttttgcggagaaggagagagtggtgtgtaaagcaggaaggctgaagcagcatggtaacgatccaaagcatccatctcgggcgaatttatagggacgggcggagtcaccgaggtgcgagtcgcaacaaccaaacgatagtgtttcgaatccgacgcgccgcaaatggtatgctgaccggtcaggacatcctgtcacattgaatgaccgtgcccgctccaagaaaaaaacgcaccaagcgccatttcacattttgcctcaaaaggtatgccctcttccctctgcctctctttcctttttctttatcccctcaacggttaaccagaagaaggcgtcttctacctcgagcaactcaccttgggaaggaaaaaggcaaggcgaaatactgttcagaggttcgaaggttaggccttcgatagggttcgacaaaactgcctcaagacactag

SEQ ID NO: 61381 - DNA, 363 bp, Zea Mays
tgccgaaggagattgttgttggatccaacgaaggtggattagttcaattgaaatataccttcagattcagagagaagttcgacgaaccaaatgatgactggttgaaatgcattgaggctactagcgacgagttgcttgggacatataccagggccgaagatgatgccttgtcctcagccttcgggggtcggggcaagaaaagattgaacagggtttttgatgcaattggcttcatataccctgattactgctaccccttgcaaaagcaaggaaaaaagagaaaaattgccccttcagccaccactgctgtgccgaagggcaagaaaataaaggttttgacctactagccacgatatattgaaa

SEQ ID NO: 61382 - DNA, 407 bp, Zea Mays
gtttgttcagggatgctgacacagatacatggaggagccggcctgttgtatagcttattttagtggaacaactgctgcctcaccatcttgccttccccttgtcgttgttctcctcatgtaagcgcagtttgtaaggatgcatgtgttggagttggaaagtgatccgatggcggatgctactactgctccctatacagtgagtacagcttggttgttcaaagaagatactgatgcccggacaagcaccacccgctgcattattggtgagcgcgcacaggcacagcaccccgcctctgcactgcacatcccagtgtgtctgtcgtttttgttccatctcgcttgcattgcacatgggtggtgagtgagtgagtgaataaacgcactaggggccgggcaggggcgaagcc

SEQ ID NO: 61383 - DNA, 512 bp, Zea Mays
taccgcagcagaattctggttcttccgcttgggcgccatcgcaatctcgctggtggattgaacagaagcgaaatcagagggaaacagaggagtggcttgaggtggaaatgtgaagttagggctcagaattcagaggcgtgcgatggtgtgatataaatggggttttcccgggttggacaccgtttctaaaaagtgctaagtcatcactcgaaaaaacaagatttctgacataactcggctgttatctctaaaaacactgacgtcgtcaagcaccactcggctgttacctctaaaacaccgacgtggcccagcgtaactcagctgttacctctaaaacgtcggcgtggccgagagtaactcgactgttatctctaaaatgctgacgtggtccagagcagctcggttgttacctctgaaacgctgacgtcatcaaacaccactcggcagttacttctataagacgccggcaatgcctgccataactcagccgttttctctatgtaaatcccggc

SEQ ID NO: 61384 - DNA, 603 bp, Zea Mays
atttcttcacagcgtcaagtccacgacgtgaacgacggtgagcgcaccctccggcgagcttgtaccgtccgggatgcgcaacgactgacgccctaatttggttgacacctattccgacccctggcgaccctaagccctccgttaattgcacaaatttggcccggagcttgtctgcccacgacgacggcgaacactaaggacaaactgaggtgttcctggtgattgggtgtggtctagctcaattgatcgggttgacaagcatgccaagcgtgcctgggtgctaaaacaagggtgatgagggcgagaacggacctggagatggtggtccacggcgcggtggctcacggcggtgcggagaaccgatttgggggagaaaggaattggggcgctacggtggctaatcggaggcgagggctggcgctctagcttcgtaacaacctagcggagctcactggggcatcaatttatagagtgcgatcgcgaatatgatgaattttggcgggaagggcgggcagtgagaaaggggaggagtcaccagagttatctctcgtggcattcattggggcactgtcacaggcgattgatagactacctatggcggtc

SEQ ID NO: 61385 - DNA, 442 bp, Zea Mays
agcacaaaggtatcataagttgcgcaaacaagatagtccttctcacagaccaccaaggaaagtcaggctcagccacccgccaatgacccaatgatgtttaatttagcaacagaaagcatatcagtagtagaagaattcatggatgtattcccagaagagttgccaggaatgccgcccgaaagagaagtagaattctacatagatctgattcctggtacggcgcccatcgcaaagagaccataccgcatggctcctactgagttagcagaattaaaactccaaatcgcagatcttcaacaaaaagggtacatctgtcccagctcatccccttggggagcaccagtcctcttcatctctaagaaggatggaagtatgaggatgtgtattgattaccgatctttaaatgaagtcacaatcaaaaacaagtatccactccctcgga

SEQ ID NO: 61386 - DNA, 1281 bp, Zea Mays
caactatcctatcgcatcccctattccaaactttgcactgtagcggtttaatctaaagtgcaaatccctattttacacgaactgctgcaaacaacctaattgagactatctctacttctctagtggatcttgtctttcctaagaccgcctttagcaccttacccatatggccatgcaaaacactattttgtattgtttgtaaagtgacgtttaaatatagtgatcgggatgggtaagctgaaaaaagtacaggtttagcgtgtgactttctagtaaacactgcagtctacaatacgagacagtcttgtacacggttatatgcacgatctgcttgccatagactaaaaaaagtatcgtgtgattttctagtttcatatatgatctctgtgctatgatttcttgtggtaaccagtgattaaggatagttaggcttctttgtgcatggtgatcattaagttcgttcactgtacggctgatttggtgaccagagaattggagaggatccatgtgggtgaataggaagaggttttctcccccatggatcttctccaatttcctagtcaccaaaccagcctccaatgtttctagaccaaggtacaatacacttaaagcggctaaagacttgctgcagttacagttgctgcagcttattttcgacacaattatttaaaccccattgttacttgccaatacagcttaaacatatcataagggcaaattcgggtgctaatgcagcttaaataaacataccatgagagcaactttgtgttggcttccaggtaagccgatgggatggagataggcagttttatttagcagtttacatttataaggttgttttgtgctagtcattgtaatctgcgattgcgatttccatgaacatctcgccaccatgaccaggtgaatttgcagtggtgaacacccatgggcttttggaaacttcacatgtttaataaagtcaaaagcacggaggttggtaactatggaagcatgtgaaacctttaacacagcctaacaaactgtaacacggttctgggcagaactgttcgtgtcttgttttcttgccattccaatgtatttaggcaaagccaagtgcagtcatgcaggttactgcaaaggggaatgaaacatgatcatgccgatgaccacagtaaatttatctcttgttttactcagagggattgtgattttatacgtaaactgtgaaagttcaattcgatcagaccaatagaaatatgctcgcgagtttatacaaattgtgcgtgggagtctggcaatgag

SEQ ID NO: 61387 - DNA, 616 bp, Zea Mays
ccagttagttttcccgttttcaaattcacagctcttttcaagcttgcaacataaccatcgggaaatttaatttttttcatccatcccattacctcgatcttgtctttagaggtaagacagaacaaggcacgtggtggcttgtcgttgtcattgagcacttgggttggtcggtcacaaagtattgctagatctattcgagctttcagattgtcgtttgttttttcaaaatgcatgcaggtgtgtatgagggcttcaacaacattactttcttggtgcatgacatcaatgttgtgcacaagaatcaatgacggcatataagggagctcccacaaaccacatatatgtgtccagttgtggtccactctgaatcctgttccgctgagcatatatttctgctccattcagacgtttaggcggtcctttggtgaccacggtgttctttataaagtttttcttatcgctcctaaaggggtgttttctaggcaaccagtgtcgatgacaatcgaagtaagtgatctttccaccatgagcaagacgggagcaatctgtatctgaaccgcaatatggacatgtcaatctaccatgtgtactccaatcggtaaaaatagcatacgcc

SEQ ID NO: 61388 - DNA, 479 bp, Zea Mays
tgcgttgacaaataaggcgtacttgcaaaattgcattggcatgcagcgaattttctctagaagaaaagaggagcactactcgccggtgtaggaggaagatgggaggcgtggcaaccgtcgttctcacggttggaggtgaggattgatcaaggatgaggtttggaggggaatgaagacacgacgggtgagaaagaatatgcggcgtgtaaaatcttggataggtaacgacacacaccacatgcatgaacagattccactggcaggtttgtaatatatattcctaggcttcggttcaaaaccatgccgaattcatttattgcaagtatttggatccatgcatgcagtataaacccaagtacctccatatccagtcagtcctaaaaaaatgtgtatatataccatggacacgccagcatgaagaacagggatatgcaatacttgctggcttttccctggattctccgcctttggcacattcg

SEQ ID NO: 61389 - DNA, 551 bp, Zea Mays
caggtctaacacggttagtttcttgattcacacctctaccagataaaatttcacccctttctagtttttctaaaatattctggtggtgtttttcttttagagcatcccttctcttgcaagatgagcttgtggtggtgacaattaagtgaatgtactcaaagaagtcatgaaccgattggcaacaagcactactagcaatagaaaccaccacaagttggagttgatgtgcaaaacaatgaacataataggcatgtggattaatatcaagtatctttctttgtaagccattaaattcaccttgcatattcgatgctccatcatatcctttgcccctgatcttggatataaataatccatggtgataaagaaggccaaaaatagcttccttcaaggcatctgatgtagtatccttgacatgcttgagggcaacaaaccgttccatcacatggccttgattattcacatatctatcttacaaaaaattagttagctaggcaacacatgaaaatagaatatgaaactacaatatgcaaataaaatatgaaagtact

SEQ ID NO: 61390 - DNA, 690 bp, Zea Mays
aaacatattattttcctgaaaagaataatgtgtgaatcatttcttattgcatgttatatggacaaaggaactaaaataaaatataaaatatatcctttgcacctcatgctcgagttttgaattgtgcatttaggttgagtgagcatatgaaaatcagatttgaatttgagtatttaaaactgaaaacaaaatagaaaacaaaaaaaagaaaaggaactcacccatcactaggctaaattccctcaaccggtccagtctcgtcgttttcgcttggcccatcccccctccttttctgccacgccagtccagtccgcacactcgtgcagtcactgaccggggggggggggggggacctaggtgtcgggctaggtcctccccacacgcacatgtgtttatgtcactagcacacgtgccaccattgtcttcttcgtcgtgtccgaacgtagctccaagccaaagttcacacagagtattcctcatccaacatcctgcaccacgtgggtcacttcctctactgcgtgggccctactactcgggagtggcaaccaccccaacctagattcgggatcaggcaaccacgtctgctcaggatttcctccccgccataacagttcgatgcaatctccacaacaaacctcacccaccgttcctatctatcccctcacgactatataagcaagccgcatcgcc

SEQ ID NO: 61391 - DNA, 298 bp, Zea Mays
gtggtcgggttagagagatatgagggtgggaagtcggctgtgtcagacaggtccaaaccgagacaaaaatggtgccaagtcatgtcaaacgccctagggtaggtgtcacctctttccagggcattctagggttaatttggcgccactttgtcaattgggtcgaagtgttttgaattttggattaaggtgaacatgtgtgatctttgttcaacggttagtttttatacttaggcaaattctgaatttttcccttgtgctcaacctttggtgaactttttggggcttttctgaaatcttt

SEQ ID NO: 61392 - DNA, 328 bp, Zea Mays
atgaccaattatatgtggacaagattgtgttttgtgtacttttatgaatgagacttgtatgtggatgtgaatgaacaactgtgtggttaggatttgtttattgtgagcttttccgattacagttaccgttttcgatataccggaatttaccggtcgttatccgttttcgactttcccgtttaccaatttcgaccgaacaaaaaattatacgaatgaaaacggtcagagctttttccgacaattaccgactgttttcacccttacctgtagtagcgtatgtgaaacgtggaagagttagaagccacgaaccttaaaccctaagtcttca

SEQ ID NO: 61393 - DNA, 874 bp, Zea Mays
taggaaaattgatcatttcatcaagcctttcttgagaaggaaattgcaccaggaaaccagagtgacacttggtggctttccaagtacgaccccaagggaaatgagagccaaaatccttctcaagatcctctgtagaaatcaaaccctcaaccactttaaccaaaccaatgaaactgcgcttaggttttttcgacagaggtttggaaaagtgagacgagtaaaaccctaacccatccgccgccatacctacaataggcatacagggcttgttttgtttggggagaacgcacctcgctgtgttgtgagtttctttgcagcagatctcacaccataaatatttgaagcaatccctagcatgatacccctccgtaccacatttttggcagaaaaaacgacgcaccagttcattctcttttttcagaattggagggggttgagaatacctgactggccgccatcaccagaagaagaggttaggatgtcatccttgttctcgggttttcctgtaaccggcttcaggcgcccgctaagactccgattcttcccccaagattgcgaaccctgaggagcatcttttgggccccaacggtcccagttagggttacggttctttggatccatacgacgagaagcagaagagcaacccgggaggggccactcctcgtcaaccacaggcggacgaaacggagaagaataccaaccaccactgaagcttgaacgcgatgaactcgggagagaccagaggcgagagagaagtgaagcgaaatgtggaaacgaatgagaaccgacaaaatcaggcggaaaccctaactccttacctgaagaaaaccctcttccacacgccgacgcgtctcgtacgtcgcactgggccgag

SEQ ID NO: 61394 - DNA, 446 bp, Zea Mays
gttcccgacgactaggcgcgatatagtttaattggcgaggtcgacgagtatcacaagcatgctagagtgctaaaacacaaacaaggaaggcgagggcagacctagagatagctgaccacgacggggtgactcacggtggcgcggagagtggatttgggggggaaacgaaattagggcgctacggtggacgatcggaggcgagggctggtgatttggcttcgtaacaacctagcggagctaacggtgcacttaatttatagtgtccgagagcggtggctccgaattttgatggggaaagctggcgacccgagagaagggtgagtcaccggcgagcgctaacgtggcatttacaggacaaggacttacagctgtcactggctgaccttcacgacttgcgacgacgtggtgaaacgaccgagagtgtggcgtaaacacgagaaacggcg

SEQ ID NO: 61395 - DNA, 679 bp, Zea Mays
gagatgatgttctcgataccagaacacggtagcgctcaatcggttgggcctatgagcaacactaacattcaaggatgctaaaacatggcacagaaggggatgaacggacctgagatcggctggccacggcgagatacctcacgacggcgattttggccgatttgggggaaaaaccaaattcgcggtctacggtggctaatcgggggcgagagttggtgttctggcttcgtaataggctaacggagtaggccacacactcaatttgtagcgtctgcaagcggtggctccgaatttgggaaaggcaagctagcggccggagcaaagttaagtcactggagtcgcttatcgtggcatttactgggcaaaggtttacgacggtcactgcttagtcttcacggcacacgacgacgtggtgaaacagcttaaggcgtgtcgtgaccgagggaaacagcgacacgatggcggtggtcgcgcggccatgtcaccggtgcaagcgggtacgacgattgagcagtaacagtgccccaagttcattctccgcgcgagatctttcacctcacatagatatccgcgcaccactaggcatgaatcatagcgactgcatggatcacggcgcggagatcaccggcagcgagatgccttgaacctggattcttgttcagtccactgtaccatcgcg

SEQ ID NO: 61396 - DNA, 409 bp, Zea Mays
cggtggattcatctgaggttccctgcggaatggcttgagcagcccacatgtaacgtgttgtggagacaagcaccctctagaagctaaaggtgataggttacccactcaacacgctccagcacctggaaggggctgacatagcgtggcacgagcttgcccttgcccttcatgaagtgtttccacttcttgctattcttctagaccatcatcacatgattagagttctttctattgctcttctcagctgtcttaaacatcctatgcaactcgtgaaggtcttcaccatgctattcacgtgaaagttcaaaatgaatgccttatatagcgtgaagggagagaccgaaggatcacatccgtagctagctcatcaataagagcgaaatcaagctgtcaaggaacgtaacccatc

SEQ ID NO: 61397 - DNA, 849 bp, Zea Mays
ccatcacgcctaaagacgacaatgggtacaaaatacctctatggccataaacaatagacccgatggataaggatacatgtgtgtggatctgctcgtgggcactgacgtgggtacatctaacctcactgctatcaactagcgcgagagggaaatgttatacgtgcacccacaaatacgacatgcccgctccatcccccacccatctccgcttccatacaccctcgtcggtatctagaggcattttgttcgttgccatatatagtcacattgttaggatctaggtcttgttgaactattctacacaacatgctttattgtttttgaatcatcaacaacaattgactatgatatagattgattgtgacgattttacataatctagtacaatgaatggcttgcactataatgaccttatagtaagaaaattatgtttgttgttttctcgtgtgattcttatgatgtttagatttattatagaacttcgtattgttgctctttacttttgagatgcaaaatgtcagcctattacccaacattgttgctgcaagacgttacccaacattgttgctgcaagacgttactgtcgttgcttgccaatgcactagttacaatatgtcatcccaccgcatgcccaagggcaccaccgccgcaaactctaaacatgtgccctattgctggtaatcatgtccctatgggccacacccctcgttactgatcaccaaggattacaagactacccacctccacgccctgttgtggttcgtggtaggttgcttccgctgcattttgttttctcattcctctttccatgttgagcatttgatcatcctttatgtatttaaccctcct

SEQ ID NO: 61398 - DNA, 461 bp, Zea Mays
cgctggtgccaaccatcttccgtagtggctgtgccgcgaagaaattggatctccctgcggcacaacctggggtaagaagaccacatcatgtttgccctcttcccctctttgcgaaacaaccgtcggtaggataggggcttcactgggtggagtgcaggcattgctccggcggtaccgacgccgcgcgatgatctcggcttggcatggcactctccagggggagaagaaacaccctcggtcattgatccgttcagcaatgaccaggattagggctagcatatcgattcatctatagtagatcctggccgtggatcgggtggtggacagatccggttgcatgtcggtgtgggtggtctagggccatggatatccgatctgatggctgcgggtgtgtaccagtttgggtgtcgtgtggatctaatcctgaccgctcgtgcgcgatcggacgacccatattagat

SEQ ID NO: 61399 - DNA, 486 bp, Zea Mays
gaggggttgcagtaggcctgcaggcctctgatgttctgccttagttcgttgacaagtatcacaccgggccacatactgagctatctcctttttcattcctctccaccagtatctggtcttgaggtctaggtacatcttggtagaccctaggtggatagaataggctgagttgtgggcttcatctagcaggatttcttgtgcctctcccttcggtacacacagacgatttctgaaccaaagggcccccttttcatctgtcctgagatccagtagttgtttcttgctagccttttctgcaagtcctgccatctcagcgtccaatcgctgagccttgcgaatgaggtcttccagcattggtttaacttctatactaccattttctcccaaacaagcattcatttatgccgattctttcttccagtcttccaggaagtttgttgctttcttcccgaaaggtttccgaccgagggcgtcagctactacgtt

SEQ ID NO: 61400 - DNA, 536 bp, Zea Mays
attttaagctcaatatttgaaacagaaatgctttctcatcaattacgtagtttgttatcggttattcatgggagtgaagggcctgttggggatgggtttcaaatccttcgttttttttatttcgactgaatccccagaatttctagagcaattatccctgtcaaaacgggttgtaagacattagaatggtctgtgggctaaaattatgggacgggatggtgcatagctcgagtttccccatgttgccggacaaccaactattctgtccattccaaattgttagtcggtttggcttttcttgatacatagcttttcctatacacctagatctacgctatgtttagatctagaaaagccaaagcggtttataatttggaaaggagaggctggtcgtaaaaaaacaaatataattattgcagcaggtactgcttctcctggtgtttttttagctttatagatgctaattcatccaggtgttctgttatttggcacacaggatgtcggccaacagttttaggtcagaacttgtgttgtgg

SEQ ID NO: 61401 - DNA, 582 bp, Zea Mays
cccttcttcctgctactactagaggagttcggtcttcagcttcaacacctcacgccccactccatcctccaggcagcaatcttcgtccacctctgcgagatgttcgtaggtgtggcaccctgcacctccctcttctgccatttcttcatgctggtcagatccgggaagactagggaccacatcggtgcctactactttcagacgaggccagatccggccatagtctacatccccacctttggtgatgcgaggtgggaaaactggcgcaacgactgggtgattgccatcaccgagaccaacaaccgcctcgtcctaccgagcaatggtccagcactcgaccgcaagcaatggaagaccaagccatccctctcgcctgagttcctgcctgtattggacaggatcaaggtcttggacacgggcggcttgacatcaatgcacgtgatcggcgatctcttgaagcgccgaattgcgccactgcagaagaggccacgcctgtcctactggttcaccggcccgaacgacatcgataggatccagcgtgggccaggtacagatctgtcctgggacgagctagaactcctg

SEQ ID NO: 61402 - DNA, 500 bp, Zea Mays
aacatagaggtgactgcacccttacctttcccaatgctgagtcctctagggtctgatctaacaagcttgttatagccacagaagaaaactgttgagggaagtgtcaaaggagaggcaagtaaagacccttcggcgcctagcggaggaaacactcagtgtagaagcatcgaatgatgaacatgatgagggtcatccttgacaccccttctccagtgattcaaaaggaaattactcctgctatagctgatgaaggtgcccaacaagtagagaacagtggcagtccccttggtacaactatgtcagaaatcgatagacttattgggaacgttgcgccagggaagaatactgagggggcagttgctgtagagacttcaacgtcaaagggaaagagaactgaggaagcctctttggaagatagaagcttcgatcttcagaacttgggcggccaacaactttccaaagaggatatatcagagctgaaagaatttgctatatctttc

SEQ ID NO: 61403 - DNA, 956 bp, Zea Mays
tttaacttgtgatttagtttcagaacaaattcaaatttgaattggctaaacagaaaataaaaatgaaaataatacagaaaagaagattgaaaagaaataaaaaagaaagagaaaagcacattcccttcccacagctcatcctcaggtgcgtcccacttcttacactcggccgacctagtccctcacccgcacatttactcgcatccacaccgcactcgaatgtcgctgacagtagggatctcttgttaggtgttctcttacctcgcgtcagagatgggccaacagcaaaccgaacaccgtgattctcatgtcgttctttcctcagccaggaccttgggagactatatatacacactgcactacacccccttgacccataagcgtcgtagtagatgagccgcgagcccattgaagcgagcgatgagagaacatagaggtagggagagccgtcagcatcaccctgtgtacgccaccgttgtgaggctacaaggcaatcgaaggagttcgcgagggcgcggggatcgcgtgcgagaaaattgacggtcgcaaagttcctctaatctcaaccacttgtgtctaatcttacaacgcactgtcgttcttctcctttcaccaacaaaacgggacgacacctcctcgccacgttggacgctcgtaggcgtaaccccgatcaagccatccgagcacctccacgcacaacggtcggtaacgaacgtagccaagacaaccgtgacctatctgatgcacttcttacccggatcattggcggcgaggtaattttgatcgctctgatccctccctatgctccaatgtgtcgggaacatgtttgaggtgctccagcaatcactcgggcgccctccaatatccctgcgatgaagcgattttgggttgggcggcttctctatcccttcctctctctctctacgttcgccactgggttgagttcctcggctcat

SEQ ID NO: 61404 - DNA, 428 bp, Zea Mays
ctcgatttctagtacacatattctctttttaaaccataatgtgccttgttcatcttccatgaaataggaggttctcccaaattaatctgtgctttaatttctttgattttctcattagattcttatcctttacgaatctcctgttccaaagtagattccacttccataaccatggcttccatattattgagcataccaaggttgagttgttccatttcccaacataactcctgtggcatcaaataggtagtaagattgttcacttggcctttacgactgaaagcatctgccactatatttgcttttcctgggtgatattgtatttccaaatcatagtctttgattaactcaagccatcttcgcagtcttaggttgagttccttctgcgtgaatatgtatttcaagcttttgttatccgtgaagatttt

SEQ ID NO: 61405 - DNA, 1263 bp, Zea Mays
cgtggggttactgtcccaacggaggatacccacgagtctgttatttacattccttttctcatctgcggccttgctcttcctatttctcctttctttcatggtctccttgatttctaccatctgaatctgactcatctgaatctcaactctattctgcaagtttctgtttttgttcacttgtgtgaagcctacctcagaattctgccgcattttggcttgtggaagtacttatatcattgtcggcctagaatggccgggggcagcaccagctcgtgggtggtgtgagtttggagatgcatcgtgggaggaagatagtacctcgacatcccactcaaggacagcatcaaaggatggcgcttggagtggtttattgtagagaatcatggcaagtccctccccctcggtcagggagacagtcagatgtttgtgctccaagttggactgaatcccccacagacttggagataacataggccagggttctgcttgccgaaattggtttgttgaaggagagaggtctgactgctgaagctgtagttgcagactttgtttttaagaacattcagtcactgaaggacagagcgtacccggcttatttgtatagtggtgtcactgactcaacccgagttaccaacaagaggattcctgttgtggatttggtaagccggctggagatgatcctcagaggcaaagtgtcgaatattggtgctcctgttgcatattctgcctggaatctgccaccttccaagacttttttcaattttgtgtccaatcctcctgctagtgacaatggcttgggtcttagagtgcgaccctctcccgaagaagttgaggctctggttgcttcacttggtgatctccccaatgatgagagacaagttcactttgagatgcctataaacccaagcgatgcagagataagtgctatgctggacatgttggctgaggattcttctgactctgtccctactgaaaccatagctattgcgattatcccagagcccgaaaaaaccttgaatgctcaaaaatctgatggtgctcacccaaagcgccttcgcccggccagtcactcaactgctcctgtcgaggggaagaagaagaaaaagaggaggcttcggcgagtgtcatgtttgaatcaggatgtcggcccttctgttcctgctgctgaagaagtaccagtggaactttttactggagctgatcccaatgggtgtgaccctgctgacgctaaccccaatgggtgtgacctcgatgatgctgaac

SEQ ID NO: 61406 - DNA, 367 bp, Zea Mays
gggtgagcttctttaacctctcagcatagtccatctttagggcccggtatgcctcacgagtgttggcttcttcgccttccgccatctcgagactgtcttgaagagacgccttttcttccttcaattccttgatttgttgctctaggctttccacccaggaatttaggtgggtgcagtgggagaaaaggtcgtcatagtggttgtcaagggtgtggagatattcggccatgtagactatggtagggtcatcttcattaggatctctccctgacaaggccaggagtcttttcctccaagcaggagtatttttgttgccaggtggaaagtagcgaaggggtgtctcagagacttccctgctgtagttttg

SEQ ID NO: 61407 - DNA, 1030 bp, Zea Mays
aggaaagcgaaggataccaaaacacaaaggttccatagactgtgtcgacggctctaggaaatgtgacctgtttgggtcgtcggtccactagggggcttccttggggcacctatctatgtaactaatttagtggcagagtgacagcccggcatatgcccgggcacgtgccccggctttggtcctgttaaccctgcaagccccgagagtgagggcacgctggagatggaaggtggtgagatgtggacaagtgcgccgttcgccggcgtggtcgtgggcctgctcgttgtctgcgtgggtggagcagcgtgagagcatggcgacggtgggatagccgaggcgcacaacgtctcatccttgtcttgtgtggtggtgttggctccatactggacgtagggcgcgggctttccgtgtggcttgtacatgagattaatagaggagagtgttttcatggactgggctgctgtgaggcatcttgaacgaaaaatccattcggtccctctctctatctgattttttgcatggaacttaatatgtcctgctacacctagggcatgtgtggagggtgattttaagtacattacatacgcaaaaaatagcacgattatagtcaatggtgaagacataatttatttagagccaaactttattttaaaagtccataaaaaatatccctaaaaaatatgacaagggtttaggtggaaaacattcacccacgcccgagcgcaacggtgctgaggctctggttctgagctggctccgccactgaactaattaattggtgtaattgtgagtgcgcaccattagaggggccacaacactgcgattaccctgttatacagaatatcttggggatgtagttggtaaccgggttatgaatgtactttgggctacctaccctaggaatgccctatagataccaccgttttgtagctagatgggacacacataacgagacacaattgttccccgccggccattttgttgtgtactgtgcatctcctttgtctctgaatgtctaggtccacttccc

SEQ ID NO: 61408 - DNA, 450 bp, Zea Mays
tgcttttggttggattcctgggccatccgacagaaaaataaggaaaaaaggatggtggaacaaggaatcaggcttatcagaaggatgacaagtgacgtgttgtgccgtgccttcggttggagaccggtggatcgttgaatttatgcgagttagccccttgtcgcctgctgatagtggttcattgccgatagtttgatcttctgtagactatcccttttttgtgttgttcgtctgggtgtgatacttctgcctcctcaggagtgctgttctataataagtgatttctggacagaacgttgtgtttctgttgcgtgttaggtcgttccttcctctatcgagtgtggtcgttattgcttaggatgtctagcatagctttttatttctggtctcctgttggctggccttggttgtctttgtcagtaggcctgtaatgaacctttgttacctatt

SEQ ID NO: 61409 - DNA, 504 bp, Zea Mays
aaacctaatcgtccacctgagacctaatagcccgcacccgcacccgagccagccctgcatccaagctattctgcgttacaccctcaagcgaggcggagaatccatcagccacctgagctagtctacatcgtgccctccggcgaagtggagattttgccagtcatcccatctagtctgcatcgtgcccttgggcaaggcagagagttagccagttatccgaaccagtctacgccgtgccctcgagtgaggcggagaatccttcagtcagtcgtcccatcccgtgccatggccttggacgaggcggagaagtcgttagccgtccgaccctaagccgcaccatcgtccaagacgagaatccccgttgtcgaaccccacctccctttcttctctctgccatggtgtctgctctcgacgtgttgtgccctcggcacgctgtgccctagacatgacatgcccttggcgtgttgtgccctcgatgagttgtgtctgtcatcggcatgcttt

SEQ ID NO: 61410 - DNA, 317 bp, Zea Mays
aatcctgcaggtcctgttgcatgaatcaaaggatggcagataccagacgatgggtcctatgggtgtgctactaacacttcctagccgaagctgtgtacaggtccaggtcctagtcgaggctacctcctgggggctgggtcaccaactctttcttaggtatactggtatccagcctcgacacgtcgagcctacatcccggggggccaagtacaagggatgagttgataacgccacacatagcaaggacaaatagcatactgataagtgctaatactgctcgataaatagtactcaaaagtatcttacaaatacaaaaa

SEQ ID NO: 61411 - DNA, 272 bp, Zea Mays
cccagtggccgcggcgagccatcgccggaggagttcaattcgggtgattccgtaccccaatcgcaacaataattggtgctacacaatccttgcgacgtgacgactacttgggtggagtactcaccggcgataatgttgtggcgaaggctgtccacggtgaggggcggcttcacggcggacggtaaagatcggcgagcaattcccccggtttccccggcttatgagcccgatgaaccgcgccaacacgatcctggcatgatggcaaggccccc

SEQ ID NO: 61412 - DNA, 381 bp, Zea Mays
ggtggagtggccgaggaagtgggagcagtggaagcaggtgtggtggaggctgtaggtgttgcgagggtggtggtaggcattggagtggcggaaggtggcgtggtagtagtggctagagcagaggggtctaatttggctagagtggagcgtgcccgagacgagaggcgacaaacatgaaaggttatctagtttgagccaatccttaactgagctccctgctctgctctctctcagttactgctactgctctagtagctctgtctaattttttcttcttctttcctccttgtcctatcggaatgggcgagggcgatcctgatcatcgccccctctcgtaggggtgacattctttgtcctcaccatactgattgctaaaactgc

SEQ ID NO: 61413 - DNA, 508 bp, Zea Mays
gattaggaataagtaggcggacgaaaataagagtcggaacctcctcgagaaggtaacaacactggagaaggaaaaggaggacctcggtcgccgacttactaatgaaaaagaggatggggaaaaagcctgtgcggaggctcatgctgcccgcgtggaggctcaggctgcccgcaagcgtactaccaaactggagttggagtcgaagaatatgcgcggccactgcgaaagaacggagtcttccacccgcgctgggttgaacgggcgcacacgctttttgtggatgcgtaccgtgaccttggcacgtagaccgtcccctttgacgaattgagggggtaggtggggacccactttctggggtggttgcaagatgagctagagttgctcccgtctatcgtgacgggtctcatgtcctacgcgtctctcgttacttgtgagggggttgtgaatgctttgtcccgagagagatgcaggcatttcgaagtcttcgatcgagcgaacgaggactttg

SEQ ID NO: 61414 - DNA, 838 bp, Zea Mays
cgcgagcgccgaaggcagtagtcatggcttcgtcctttgccttcgtataagctcccaacatctcgtcactggtagcctcaacagcctcaagctagtaatcattcggctcgtcaaattgacttctatagcgataggtatatcttagataaaccagaccaccttcgctgaagccaacagcagtctcctttggcatttcctagtcattaacaagcggccacaccttataagcaatatgctcttgaaccaaatccctggtgctaatgtaagtacacaccatgtcgaaggccatcaaacatgcatgtacttcgtttccacttgcgatcgatggtctcctgatgccgaagcgtgaccgtatggggcgctagattataccactcacatcttccctcttactcaaatcattcttgatataaaaccattgtttcatccaagagcccgaccatttctttcggaacattggcacatgacaccttacatcaaaacggtgcacaaagttgtagcacccgaagttgttatgatactgctccttcccagttgccttcgtctggtaggattattcatgaatgttgcagaagcacttggcatctggctccagcccttggcttctcatagccccaaataaaaactcaaaccttaattaaagcttcgggagcaagctgataaaggtatatctcaaatgtctttagcacttcaactagcatcttgtgtaagggaaaatgaagaccagccttcataaaacttttaaatactaccacttcatctgcttcaggaagaggaacaatgccttctcctccagccctcactatggatatatcatgtaaatatcttcccatcgtcg

SEQ ID NO: 61415 - DNA, 1050 bp, Zea Mays
gctggaatgaacttttctgcaggtacactgacctcaatatgagtagatcgtgtagttgcacgataatgaatgaacgggtatgccaccgattattacgttgacctgaatagattgtgaggtcgtaagttacgtgcatgcattggcataaccatcatcttgttcatctactacatcgcttctcttttgatgttagggtaggggctttgtctatgctaataaccgataaaaaaattcttacccaaattctcaaccatctaaccttgtaacaaatggcccgccgcaggctcaccgcccataagtctatgggaggacgtgttccttgtcactagcttgttgcgtgtgtttctcgacaccgcagctcttttcttttggagtatggtgtgcccaccttgctgtggcgcattcttttttgctttgagttaccaagagggagaggaactgcgttacttctgggaagggaggtcgtgctctagaggagaagatatctggatgacagctgtggtcaagcctcgggcagataattcattgatgggtggctagcactttggattgttaagccgcacacccagagaaggggcaggcagagccacttataagatacttcaagatttgctggatcattttcctagggagattgctaccaccatgcctggagtctttcctaggggtgatattttcaaccctaagtggaaccagccagaaggtagagctctaacaggaggtgactgtgagcagcagcacagcgacactgctacgtccagtgccatgtttgcagtgatgcagctatataacaacacggagcgcagttttgggatggtcaatagttctcatgccacggctcagaaccagttgtaccaggctcaagaagcgcatgctgcagagttagctcaagtacaagagaagctggcccaagttacgcttgagaaagatgaagctgtccaggtcagagatgtggctgttttagacaatgtgttgtggattggcgaatgccaggactaccagaccttgctggtggaaatcatcaaagaaaggaatgcagctttaactgag

SEQ ID NO: 61416 - DNA, 387 bp, Zea Mays
ccggatagtcagaacacacgaattccccatctcattcaacaacatcgcactggcaagtgaagggtaactggccacattacacaaacaataaacaatagtcacagattacatacacacagcgaggggccaccaaccccatcgcacaaataaatacaattgcactttttcccctccctctttattgcgagccgggggagggcggtgttttcactcactactgcaagacaagatcgagggcaccaaacatactacatcggctcaacctttgggataatgcccgcctcccgataattaaacaacatcattttcaattcctcaccctcaaaaagattccgcagatccccctcaccaatactcgtcccaaacgacgaggacagcagatcttgt

SEQ ID NO: 61417 - DNA, 793 bp, Zea Mays
gcggggcgggatgtccttgcgctcgcccgcacagctgccaccgagatcctgtcggtacccttctccgcgcgctcccactcctgcccaggaccaatccattcgcctgttcgtccactcagcgacagtcacggccacacctcgccgttgttcgtcctcgacagcgggatcaccatgcgtcgtggtcgtggtcagctctcatcgccgcttcaaactttcggtatgacaccttctggcgtttgccgtcatctcctcttgctcgtttaataccctgataggtcgccggaggcgggatttaggttctccggtgattatgccaccgtagtggggatcgccaccgtgccctgtagccggggaagaagacgagcccagaaccattgatctcgcgatgaacagttaggactagaagagggctccggatggtaggatttgagacggacggtagagattagtttgagcataccctttcgatctattgatcatgcgccgtcggatcacgatcgtgtggttataattacataccggttcataacccagcgcgatctaatctcatccgctgcacacagatcggacgtcacatattggcccgtaccccttcggccaactcttttgcataagagcccctccgtttctgcggattaaacccgcggtccactgcacgggtaaattgagtcttaggaaaacttacaccgggacccctgaacttccttgtttttatgcgcgcagtccagaatcataggaaattcagaaattccattagaaaatgatttgttagcacacaaataattgcagaatc

SEQ ID NO: 61418 - DNA, 473 bp, Zea Mays
tgctcatttggtggttgttgctataacaaaatttcagctggtatgaagggctgcaagtttactactggcgaattagcaagttcctatatagaaatttgtgttctgggtgctacaagttggactgtcaggagctctgaatcgcagttccgatggtacagtgtcccgatcaggtcgccagctctatccctcgtcgccgacgagccgcgtgtggattcatgcttttgccgccgtgattcgtgctcggatcggttggatagcgcttggggttgagtaaatatcatcgccgtggatatactccggccactaaactactccgaccaccgtaccgagctagtcacggatgcttcggatgtgttcgccggagatagccgcttcacggccttgcgccacgtgcctgggcacatttaccgcatcgccgtgactcgcttaagccatccgatcatcgccggggagcccgccacggtattctccac

SEQ ID NO: 61419 - DNA, 327 bp, Zea Mays
caaaacaagtgattgaacaataggtatatagcgtagcacagaaatgctgagatgcaggtcgatggcaccgtataagagattgagaccagagagtagggagagaagaaaaaggagaggttggcttgacatgtagagagggtgacgatcatcgttgctcagctccagtgcctaccacacataccaaactagttcctggctcagctgaacctcttcctcgaaagcagctaacatgtgaaattaacaagtgtggttgccttgggagttcaccacgcatggagacatgggcatgccgctctcgttttggactctcatggaagtggaggatcc

SEQ ID NO: 61420 - DNA, 365 bp, Zea Mays
tggttcatagttgagaattatgggaattctctcccccccggtcgggaagacagccggacgttcgcaccccaagctggaccgagtctcccatagatcaggaggtagctgaggcaggtgtgttgctagctgaagttggactgctgaaagagaggggtctgacagctgaagccgtggttactgattttgttttcaagaatattcagccattgaaagacagggcatacccagcttatctatatcgagggctagccgactcaactcgggttaccaacagaagaattccctctgcagacttggtaagccgacttgagatgatccttaggggcaaagtgtcaaatgctggtgctccagtggcatactcggcc

SEQ ID NO: 61421 - DNA, 375 bp, Zea Mays
cggggataggcgaacaaggaaattattacaacgtgcacatgttggatgttttttctcctttccgacgacctatgcatgcatgtgtgactggcattagaaaaattaattgaaacgctcaatcatgaaccaatcggataattgaacacgacacgagatagcagccacacgtacaaacccatgcacacaccaacaacaatattacgggtctatggatggacgtcgacgatcgacctaactataccccatccacggatcatgaattcgttactcatatatacatgaatatgtccacttatataccaacgaacttgaacactacagtacgtccaatcattttcggcgctcaggaaccgtcgaaaataaaccctatactgc

SEQ ID NO: 61422 - DNA, 696 bp, Zea Mays
ggctcacttcttctcccctgccagcgatctctctctatccctggcgatttctcctctcaccggcgatctcctttcaccggcggcgatcctccggcgacctcgccagtgctcctctcctcttggtgagcagcctcctcccctcctctgcgttctctctctctgtgtttctctaggcagtgcccccccttttgtatcaaattcaaatcttgtgaattcctgtaaaatccagtgcaaccaagttgtgaaatgtgttcccttgtgtccattgagtgtccttgcaggttcctagctccttcgggagggttttcccacctcaaatagtcgtttcaccgaaaccctagaactccgcacgtcacgtgctcggtgaaatgcccaaaccagccaaaaatgctctaattgaacccaaattttttaggcaccttcacaacacttccagtaacacttttgccaattttcacgccaatccgagattccaggccttaattttaccaaatttcccgtttcgagcgatcgtttccgagccgagtgcccaaatctttttttcttcgcctaaattcaaaccaagcacacacttcactcattttcacctatataaacctattcgtgaagtatcggctcaattccatgtcgtttcgtgcctcaattcaaattccaaacctcctatggcactatttatcgttcaaacgtcgttttcac

SEQ ID NO: 61423 - DNA, 846 bp, Zea Mays
gtgcttcctaacagctcgtgaaagatcaaattcatggccctctgataagtagcaccagcattttcagaccaaatgtcatgacaacccactcaaataaaccaatgaagcttggacatataaaggccattttaggcacatcttcttcggccatgaaaatctgattatatccggcattaccatcaagaaagctaataattctatttcctgacacattattgattaatgtgttggctatgggcatgggatattcatctttaggagttgctctattcaaattgcgaaatcaatgcatactctaagcttacctgattctttcttctccaccgacacaatattggagacccactctgcgtatctgcaaggtctaataaaattagcttctagcagccggtgaatttcgtcctttattcgtgggagaaggtctagacgaaatgttctagctttctgcttgaaaggtctgaaaccggacttaatgggcagccgatgctctactatctcacggcttaatcccggcatctcagtgtaattccaagcaaagcaatcagcatattctttcaatagaccgatcatttcatctctaggatcggtctctagggtcttgttcacaaaagtcggccttggagttttatcatctatatcaatctcctccaaaggatcgaccgatgtaaacccctgtcctaatttgtcgagatctctgaattcctctattatgtatcccactgaggaattagatgatctttgtgtgatgacggactctctggtctcaggggtcggatcgtccacgatactgattttatgctgcggtggatgttcggtcttaaaggccgaactattctgtaaaagacc

SEQ ID NO: 61424 - DNA, 581 bp, Zea Mays
gtggaatacagcagggtgaagagatcttttctacaacttcaagctgattctagattcagtgaactgaatcactctcacctttaccccactgcacccccctcctgtttacacccttggatctcacaaattctcacagcaacagaccaagttcacatgacaaaagtcattccccaagcatatccctacaagtttgatgcaacatcctaagaccaaatgtccatggatcaggagttatggtgctcccaagatgaaccaaactcactgttttactgaactgaacattattcagcatccacctgacctgacagagaaagtttagatgcattttacttacaaacttgtatagcactaagcccatctccctgcaggaaacttattcactttactttggtctccatctctactaaagaaatttcagtccaaaaccacatggatcaggcaccacaaggctccaaagttgcaccaaacacactgcaattcagacttagcttctgaaccagggtcagtgcttttacctgacagcacacttggagcagtgttttctcccatttctaagcagttgcaagggaagaacccttaac

SEQ ID NO: 61425 - DNA, 292 bp, Zea Mays
cggaatactttactggccggagttatccacggcgatgatcttcaagtgttatccagttgatctggtcacgaatcacggcggcaatggcacgaatctatgcgcagggatgtcgccgacggtgaggttgccgcgctggcggtctgatccatttcagttactgtaccatggcgtctcattcagatagcctgacagcgcaggtttaggtcccattttctccagattttctatggtaccaatcccaaacatttatagcaaagttgttctactataaaggatctacaactttgttata

SEQ ID NO: 61426 - DNA, 1088 bp, Zea Mays
gggtcctggtggcttcagctgcggacagttgttcctgaagtgactgggatcaccgcagtgccaacatgcattcgccgggggttggttgcttgccactgagggggcatggaaagagctctgactctgctagctgaaccgtgacggggtgggtccagctggtctactgaagtttggtcccttgggtggaaatccaaatgatcgagtcttctggtgtcggtcttgctgctgagcctggagaacctggaactttcttttgaaatgccctttttcctcctcctttgccctttcaacttgcatggccttgttggaaaggtgagagaaactgaggaagtcttggctagccagaattgtcttgagttctagcctgagtcccttcatgaagcgggccatcttcttgccctcagtactgacgtcatctggcgcgtagcgggctaactctgtgaacttgtgcacatattcgctgacagatcttccgtcttgagtcagttctcggaactcgtcctccttaagctgaacgagcccttggggcacatggtgctcccagaaagctgcttcgaacttcgcccaggtagcatctctgatggtgacgttgaaggtatcccaccaagctaaggccatcctggaaagttggtgggcagccagttgaacacactgattttccgggcaaccaatggcttctagctttcttttaatcgtgcgcatccaatcgtcttcatcgaggggttgctagacccggcaaacgtgggaggcttgagtctcaggaaatcccccattctgtcttgcggtcttccaccatttggtcgttgattttccagactttgagtgaggacctcgatgagtcgggtttgattggctagaacttgggctaggtctaagggtagttgtggaggtgcggggaggtgggtttcactttcctctctaatggcttccccttcagctctcagggaaaccctgctccaatcccagaggcggtaggcgtggttttatccgaagccatctgccagggaagagagtcactattatgcacatgcaaattgttttcaaccaagttattttattcattacaccaatactgtaacacccctggt

SEQ ID NO: 61427 - DNA, 788 bp, Zea Mays
gtcaatctggctgccgtgctcaacacagagttggaccacacccttgacgagttgggcaaggtttgggcggaggtagcgaagttgcgtgctgagtgcgcaacacgccactatctggatggtggttctcccgcccccgtcgggattcagcacccttaccgttcaccgcctcgtggttgcttcgactatggtaccccagactgcaggactcggatagatttggatccctagatcgacagagtcggagtctgtaataatgctagttcagtgtcttagcctaagtcagttttagttagagttagtttatttatcttatgttgaatgcttgttatgatggacatgtactgaagttggatatttgtaatgattgtcactaaggtgtgggtaccccctgcaacttggtgaagttattaataaagtcagttatttagttggctaatccatttatttccactttcctatttatctgagaagctgtcaacgaagatggtcatttgtttagtgctatgaagattttctatacatcttttcttatgctgaaagactgcagagtcagatttgatatatgtgtgttatttctacagatgtctgagaacaggcgtagaggtgcgagacatgctcatccagaacagcaggcaccccaagaggaggtagccccacagcagcatttgccaccgccaccaccgatgaccattgatcaaatgttcttgatgcagacccaagcagtccaaacaattggacataccctagcagctatgcagcgggtgcagtagcagccacctccacctcag

SEQ ID NO: 61428 - DNA, 379 bp, Zea Mays
caagaacaaaacaaaaatccacggatgcccactatgttccccatgcacaattcatcacaatacagcaaagcaactccaaaaactcatattcaaactaaattgtcaaatacatttacaaaaaggagaagtgtctccaagtcaagcaacaattgttctactttccaagtttacaatgtatcatacaggagcatttccgagagtggaatcagccagaggaccactaagggcaggagccttagccgcagtccctgatgcagcttgaacatccacaataatatcctcaggaaccacaacaccaggtttcttcacaagaagacgactagcatggaccactttatccatcgctttgtcgtaccccgccttaaaattttcacggtcg

SEQ ID NO: 61429 - DNA, 784 bp, Zea Mays
caggagccggaggaatagtgcaaattgttagaacaacaaaccttgctcatcaaagaagacccggatgattagaggacacttattatcaggtatataaagaatgaagaagagttgaatgacaaagcagcagtcgagtgactagccagacattttgctacattatgatcagtaatgaattgtataggccaagcgcatcaggagtcctaatgaagtgcattgacatatctcgaggtagaaacctgtgggtgaaaatccatgttgggcagtgtggcattcacgtcgcgtcaagaacactagtcgggaatgcttttagagctggattctactggctaacagctaatcaagatgtagtagatcttgttcggaagtgtgaagcatgccaatactttgccaagcagcaacatctctcggcacagcagttacaggctatcctggtttcatggccctttgcatgatggaggctagacatgatcaggccaattcaccagatagtgaaacaggcctataactcccttattagatgaaggcgtgccttttcaattgggcaactatttttttacatccttaattatgtgtgaatcgaatcgattatcaatagtcaggaagacaagacaacgcaatcaaaaaaaggaagacaaaacatctagcatccacgtgttcaaaataatccatgaaccacaaaggataagaaaaagaaaagaaaactcaacggactagagagtcaagatctcgaccttcttctccatgacacggacgccaatcgtgatcttactggcgccgccac

SEQ ID NO: 61430 - DNA, 637 bp, Zea Mays
agagactcaagtttgcaattagaggatacccctagttgcaatcaacaagcaacaaacgttgcaactggagcaacaacagagactcaattttgcaactagcggatacccctagttgcaatcaacaagcaacaaacgttgcaactggagtaacaacacaccatacaatggtaatcaaggagtaaaaacagagactcaagtttgcaattagaggatacccctagttgcaatcaacaagcaacaaatgtcgcaacagaaaatcaacaaaccacgcagttgcaatcattagttgcaaccaatattgaacaaacaccggtggagcaacaatttttgcttcttttttttcttaccggatggaacagctgggctgcatcaggagtgaccagagatccaggtggaattgaaggcggtggcgtcagcaacgtcttgtgatgcaagggatcacctgatccgccgcgtacacccgcttccgctgtcgcaatcggagacggcaatatcagatcagcccctccagccacaacaatctccaaggatttaggggaggagcatcgaggcgattcatggtgcggcagcgacggtggggccatggatctagggttagaggatcggaggaaggaggagtcggtgggtcagggaggcg

SEQ ID NO: 61431 - DNA, 355 bp, Zea Mays
ctgcaatcaagggctcaagccgaagctgagaaaaatacgaagctttgtgagtctatgaaagaccttcagaacaagtgcacggactttgccacccgctgtgtgaaccgactgtaaggaatattcaactcagttggggctatttctgaagaaattgctccttcggctgaagatatccccaaggctttcgatcatattgaaaacgatgttgaagctctcgatgaggttatagctgggcatagggatttatgtgctctgttagcttctcgtggcacaactactgcatttttgaaggccagatgcacccatgcaaaaatggttaacaagaaaaccttcaacctttcaacgtcagatttgg

SEQ ID NO: 61432 - DNA, 954 bp, Zea Mays
gttggcatacaagttcttgatcaacaactgacctaggtcgggctcaacttgaaatcggcacggcactcttacacgacttagggtgatcactataccctactaacggagcaataggcttaagtcgaaaacgccttaagtcggtgcgacatgctcccgcttacacgactcagggtgatcactataccctacttacggagcaatcggcttaagtcggaaacgccttaagtcggtgtgacattctcccgcttacacgacttagggtgatcactataccctactaatggagcaatcggcttaagtcgaaaacgccttaagtcggtgcgacatgctcccgcttacacgacttagggtgatcactataccctactaacagagcaatcggcttaagtcggaaaggccttaagtcggtgcgacatgctcccgcttacacggcttagggtgatcactataccctactaacggagcaatcagcttaagtcggaaatgccttaagtcggtgcgacatgctcacacttacacgatttagggtgatcactataccctactagcggagcaatcagcttaagctggaaatgccttaagtcggtgtgacatgctcacgcttacacgacttagggtgatcactataccttactagcgagacaatcaactcaaattaggaacaccttaaagaaaagcaacccgctcacatattcgagggtggcctaagcgccctgctaacagaacaatcagttcaagtgtagcgcagttacatgcacatgaaatccatgatacattatctcgctaaaaaatactaactcaatgaaaagtgtttttcatctaaacgaatcacggtgcaggagcattttttgcaggaaacctcaatagcaggagtagcagaagaagaaggtcttacgatagcaggtgcagcaagaatgtcagcaacaatgtccttaagcaccataacatcaggcc

SEQ ID NO: 61433 - DNA, 807 bp, Zea Mays
gtgatttgcatccgttcaacctgtatacgaagtgaagtgaaccaaacaaaagttgctttaagactccgcgggtgcggttgcatgccgatgtacaccaaccaaacagatggattgtgtctcttgatgcttgcgcgtggcattgtagtactacagagatgggtcgtaaatcatgctatgttacaccaattgcgttcacggtgtgcccgccatcgtatattggacggaacaaggcccgtgccgattcaaccagaaattcgatagcggaggcgatggagagcatctaggagagcttgaagtcggagcaccacttacatgtggagaagttccgaggttttcaatggagttacctaaccaggggcttggccctcgtatcggcattcccttgtgtgggctctaacaaggattaggtggaagattttgtgtgtttctcaatatcttggtgaacacactggctcatcaacgagagtttgtatctctatcatatttaagttttcgtatttatattgtgttatattctttatatgttttatcttccgaactttgttataggctagtgaacaggtttggaaaaggatgatacattgctctcggagatctacggataaaatccaagctttcaagattgaatcaatagattagagaaggttatatggattggggagacagagacggagatagatgataaacaaatcaggtccgcctcagctagaaaactaggtctagatgtggtggtttaaattggagctcagtgttaacctatgacacctaggtattgccacacgttagagacatgttgacatatacgtc

SEQ ID NO: 61434 - DNA, 356 bp, Zea Mays
ttatcaacctgagccacaagggacaagtcaaccttgtgtttgcactgtgtggctcggaccacgatcaacatgaaagtagatatagtctccatcgtaggcatttttggttatgttgtgaccctttggtcctcctagtggccctcttttctcgcctacgctagtacctcctctcgtgacactaccacagttcccacgacagcagctgagaccctcctacccctaggtgtgggatcatcagtcactacatggctccttcggcatcatgactttgactcctttgatggttactgcttaagtggtaaactccagcggctctaatcatactacaccatatgttggtaacttaagaacttgtc

SEQ ID NO: 61435 - DNA, 1569 bp, Zea Mays
cctggttctccaaatcactcagtttttgtgtcttaactctctgtgtatgtatttattcacatttcatatacttatgactatgtgactaatacgttctcacctcttatgtcatttcagtgatctcgcatgcctgcgtgcctatctcctgtcctgcctggattctctctctcgtgaggtttccaggtagctatcacttcttttgagatcctattggctgctctctacttctgcttatattttcactctattgtgcaccagtctggtcaggatggtgtggacaaagaacgtctcatcgttagagggaggagacgacgaggaccctcctcgccccttcaggcaggtcaaagggaaagacggtttatcttgaccagcaggagggcaggaagaagcgtcgtacgaacagagccgctcgtgcaacacttgcaacggtagcagcagcagaacagggaggatagttgcagatctcttctgattagatagcctacatagttcgtcgcctcgcatctcggcctcgctccactgctccactgctccctccacaccttccaccactgtgtccactactcctcttcccacttcactagctcctatcgctccagagccatccaccacttttgctatacccaccacctccaccactccagcttccattgttccccctcccgctcccatttctgcttcgcccatgcctccacctcgcttctgggagcatgacgagactgaggtgcgaccactagttgttgatccccgttttctcgaccttcagtgtgccactgcagaccgggtacatcggtttagacatgtacccgtggagtcttggttgccagctcagagggactttgcggctgcgcctctcttcattaccaggactcaggagtccttcttccgggcatatctgacaactcagattgccttgtgagcgcaccggcttttgaatttacctgcttttctgcatgctgtcggtgccgattcagagggacatctcacctatctgccaggactacattctctattgaccatgagtggcaggtatattgaggagtgggtcagagtgttctatgctacagtgtggattgaccctgaccatcagtgactgtgattccatttcgagggagaggatgtcactttgcatgccagttagattcaccggctctttggatttccagagtcgtcgactaggctccacagtctgtgctacggcatctcggatcctcctcgtcgccctcacaacggtgttgcacctgctacaactcacgtcgcggccctgttcagacctcctttcatagatgggttgtgacgatctcctgctgacttcactacttcagtgaagttcttatatgagctgatgagacggacattactacctcggatgggatacagagaggctaccactcattcagctatggctacttggtgctttggtctcacattcagagtttgatgtggttgacttccttatttgtgagatcgaggatacagttttggatggacttcgtgcttgccgtcagctatcgtatgctcattatctctatcacatctttgcgtagctaatcaggcctcctcagttcc

SEQ ID NO: 61436 - DNA, 470 bp, Zea Mays
ccccagaagttgcagcaatgggagctggaccatctggagcagctagtggagtacctgatggggagttggatctttttggagcccctccttccatgaaccttgcagatgaatgttctcccgaagctggcagtggaatgatgaaggacgaagataattagagtagtgtagtttaagtagtgtccttatgtaaagtaaataaggaagttgagttgtactaatgagtatgtataattattacagctcagcacaatgtaataaagatggtgtacgttttgcatgtaataattcaggatgtttttcttcctcagatgccatcaagaacccatgctcatgacggggcgggaacttcccgcggtggggaggaaactccaaacccgacacctgtacctcctacactggctgaagctatcgctgccttagtcaacactaccgctgacaacacgcgtttcttgcgtgaattggtgggaaat

SEQ ID NO: 61437 - DNA, 643 bp, Zea Mays
atttttgtgagctatctatattttattttttctcttttattttattttgttggctagtgcaaagcttagaatatttaacattttcttgcacaagttgttcaagaaaaggctgctcatcatctctaccactctcatttgatctagagattttgttacctcatgccataaggcacatgtgcgaagggcacgatgatgagtgcttgtcgccacgcctcttgtgttgggcctcatcttcacttgaatagtcatcccaagtcttgatagtggtaagggattgacctttagctcttttccttcttctttgcatttggtgtgggctttgtttggccaatcttccatagtgcctttttaccattaccatagcatcccttttctttgatctcttctttggctggtaaataagcaatcttcaatttgaatggtcacaccactggcattaaacttgtgaatattcatcaccaccttcccgatgattgtttattcatcaataccgaaggaggaggtggaggctttatcatcatattcatcatcatcatcttgctttttgcccttcatcttcttatgctcatcatgtgtgagagaaataattttgcttgatgaagttgcctcatcttgacttatcttttctgacatctcaaattcc

SEQ ID NO: 61438 - DNA, 571 bp, Zea Mays
acgcatggaacaaatgatgccatgaaggataaccgaacataccttgggacgatggcatagctgaaaaatatggacgatgcaatgaccagtagctccgatgacttgggggcaaacctttcacccaaacatcctgtacttgctttcttccttttgtttgccttcactccacctcttcctaaagtatcatccttaccttgatcttgagaactcccattaggatcccatgtcatgcctctcttcatctcttgtgcaccgagtttttctagcctcttgttgtgccaaattgataatcagagtgggcttctcggttgtgaattagtttggacagcgacacatctttcttcacttttgtgacattaggcatcctaagttcatatttaataccaagaatattggtagttgatttctctattgtttgggcactactagtcgaagtacctaatacttcacctggctctgtaacacataaattcagatctgaatttttggcttttctattatccttcctcaatacataaacttgcttgaccactctattcttattttgagctctagatcgattcttagaaat

SEQ ID NO: 61439 - DNA, 571 bp, Zea Mays
gtcatctttgtttgaatttgatgtgatttaacctaggttaaccacaacacttagtttactgcttgtctccgttgctaaaaaacaaatatagcttccacttccaaacattagatgcttgaggctttgttggcaccgtagtttgcaattgcaaccctaaatcttcaataaactctagttgcatagaaagttgtgtcaagcaaattagagctatacttaaaacaaaatttatcaaaaaaaaatttataacacgttggacataatataaaaactataagcaattatagttatcaaacagccgcataaaaaacgataacaccactgaccttcttgaaccaacatcctttgatctgcaatttaggccacctccaacagtgcactatccacctgattggttatctgcaccattccatcctgaatcattgtgtgcgttgactttggctgagcgtctgtttggttgcctgtacacgagaaacggtgactgcatgagtggatgcaaaataagtcattctgaggtcatttagctgcatttgcacatactccagaaatagccgtacctggccggccaggctcg

SEQ ID NO: 61440 - DNA, 690 bp, Zea Mays
ggacaacatacaccgagccttggagattattgttctgttcatacgctctgccacaccgttctgctgaggcgtatatggtatagtgtggtgcctcacaatgccctccttcccacagaaagagttaaaatcaccataacaaaactccataccattgtcagttctcagaactttcagcttcctctcagtctgcttctcaaccatagtcttccaaaccttgaaagactcaaaggcatctgatttttgcttaagaaaataaggccaaactctgtgaattatcatcaatgataatcaacatgtaacgagcaccaccatgagaagttatacgtgacggcccccacaaatcagcatgaacataatcaagaatattttcggtattatgaacagtagaactgaactttacccttttatgcttagcgaaaacacagtgctcacagaaatcaagggtatcagcatggcaaccatcaagaaggcctctcttgctcaattctgccaaaccaggtgcactcatatggccaaaacgcatatgccaaattttagtagtctcagaatcagaagcaacaacagcattagcagagccagaactacctcgaagcacatataagttttcagctttcaaatcacctttaataaccacaagagagccttttgttacctttatgacaccgtcaccggcggtatacttgtaacctt

SEQ ID NO: 61441 - DNA, 411 bp, Zea Mays
atggaaccaagcgcaaaatgcttctgtaatatgcacgagctgctgtacgagacgaaggctactggcaaggagcaatatcacaacaattttggttgttacggcttcatgccccacgccgatgtaagttatccggtcccaacattccgaaaaaggtggcccaggacctggatggaagaatggttctatgttgagaataatttaactgagagggaagatataagaggaattattcaacgtcccacctggtctcgctttggcatcaggaggccagctaccgcccttgggaatgatatagaggcatgccagagaagtttcaacactgtgtgcacttttattggcacaagagacctggttcaagaacacatcgcctacaaagtatggccgcttgtgaatgagtgggagatgccaaag

SEQ ID NO: 61442 - DNA, 1088 bp, Zea Mays
tccgattgtaccatcctttgcattttgttttcattagatactagtaagaacttggtaagacacggtagtgtgtgttcctattcacccagagagcgtgtagttgcttattagggataacctttactgtttgttcctattttggtgtttccaatggcaggatccgatgacgagattgaggtagtcattcccacacaattttcctattgtgtcagccgcgaagacttcgatgttatttgaaagtgtatggaggaaaatatggaggaaacggtccacaagtctatccatgatgcgcttattgcaatggatttttgcaaagtgctagatagggtggagagacggataaccgagcttgtcgatcgggttgccacattggagacacgtccactagccttagtccttgttatgtacctgtcattttggtccccaaaaaagatggtagttggcgcatgtgtgtagattgtagagccattaacaacatcaccattaggtaccgtcatcctattcctcgattagatgatatgcttgatgagttaagtggttctaaatggttctctaaggttgatttgcgtagtggttaccaccaaattcgaatgaaattgggcgatgaatggaaaactgctttcaaaactaaattcggcttgtatgagtggttagtaatgccttttgggttaactaatgcacctagtgctttcatgatattgatgaacgaggttttacgcccctttattggtaaatttgtggtggtttactttgatgatatcttgatttgcagcaagtcattagaggcacatatggatcacttacgtgctgcttttggcgccttgcgagctgcgcatttatttgctaacctcgagaagtgcaccttttgcaccgaacgagtttcgtttcttggctatgttgtgactccacaaggcattgaggtggatgaggccaaggtgtatgccattcagagttggccaacgccttcgacggtgacacaagtgcggagttttcttggacttgcaggcttttatcaccgttttgtgaaggatttcagcaccatcgctgcccctttacatgagctgaccaagaagggcattttgttcaat

SEQ ID NO: 61443 - DNA, 379 bp, Zea Mays
cggaggtcaaagatccacggtgaggaagcaaggcagtgacactagaatctccgatgagcaattgcccacaacagagagcaagggagggaaatggagggtgcaaggaaaattccttacctcaaggcgagactcaggatcccctcggaggcggcaacgacatggtggcagcttggaacgatggtggcggccccagaacatggcaaaggcgacgacagggtcttagtgacgacggaggaacgacttttgcgatggcggtggcactgctgtgtactgggtagggaaaacaggcaggaagagtgcaaatgagaagtgggggcgctgggggtccggggtcttcactttgaagcctgggcgaggcgcgtgggatggggtcatgggg

SEQ ID NO: 61444 - DNA, 593 bp, Zea Mays
cacagctcccattcacccccctctggtcgcctgaccgatcctacaatagtaactccgtgccacatccgcgaagaacatagttccttgggcggtagaacaccaatttcaacaagatgtagaaggtcagcctcagaaacgatagaaatgtggttaccagcaaaagggagttggctgttgggatcgatcggagggatgtctggcgtagcagcactctattttcttttcctgggcgccttcacaatttttcaaacggcgcggtttaggaacaaaacacaaaaagatttggaacttagaaagctggagagcagtagaggaaaaaacaggaactagggttcagaggccaagaggatatcaacagaagtacgagttggcacactaagtcgggcgcagaggggtaggccgatagctcggaagagttttggtcgtagcaaaataacgtcactcggtcattacctctaaatgctaactaactgtcagacaaaagagcagaatatgcaacagcagattggcgtgagaacaactttcattcattagtgagggaatcgttacaaaatgaagaccgactcatgatgagtcggcctcccgcccctcga

SEQ ID NO: 61445 - DNA, 442 bp, Zea Mays
ctgagccggatcatcaccagcaacaccctcgagggctgggtaaacgcaagcgccatccttggggaccgagttatctgtatcagccacctctaaggctaaaggattttcatccacctccatgggaacagagcaacccagatcagccgcttgactctcaaaaccgcgctccaaggtcgatgaggcacgagatgctgcttgggataactctaacccggcagcaggcacatcagcacaaacttccatcgttccaccatctgccggctctgacaacagaccttcagggaccatatcttcgagagtctgatcagaatttgctagagacaattcttgcagaccaacaagagcagacaaagctggagaaggaataccactactctctccactggctatatagcgccgactgttcttccgaattaaggggatttcctcctcctcctcctca

SEQ ID NO: 61446 - DNA, 444 bp, Zea Mays
gtcctcataccgtccccaaaccgacggacaaactgagcgtttgaatcaatgtttggagacatttttgagatgctttgttcatgcgtgccctaccaaatggattcattggctttcagtggtggaattctggtataatacaagttattagtcttctctgggtcacactccgtttcatgtgctatatggatatgaacccaaacattttggaatttctgccgaggctacaataccagtccaggatttggctgaatggctgcacgaaagagagttgatgacgaaactggttcggttgcatcttacccgtgcgcaagagaggatgaaacgacaagctgacaagaaacgctcggaacgagtatttgaagtaggagattcaatttacctcaaattacagcctaacatccaatcttcagtggcgactcgttctaaccacaagttgtctttcaa

SEQ ID NO: 61447 - DNA, 545 bp, Zea Mays
tttgaggatacgggcagtgtctggctattggctaaagccagaccatgttacattcattagtgtactcaccgcgtactcacacacgcaggggaagttgagatcaaactaagatacctcaatgcaacgaacaaaagctgcaggttggagcctaaaaatgagtactacagttgtgttgttgatttgttgggcagaaatgttaagttttccggtgcttctaggcccatcagtcactaaaccaatagaatctaagcagaccttccttcttgcaactggtatttgctgagctgaaatggtccgccatatccatgatcagttggatttagaatctgaagtggagctaaacagctaactgagtaatctcggaaggagcacttactgcaagggagaaatttacatgaggccttgccatcggaggacaatataaggtctgttcatctcatttcttttgtgctacttctttgtgggaaatctgtatactgatgctgtactgatctgcctacaggtcttcataagatatctgcaaatcattcagaaatctagggtgc

SEQ ID NO: 61448 - DNA, 483 bp, Zea Mays
gacataggctagcgtataaaattctctagactcatgctaatcccgtagtggacgacgggttgattatattgaagctgaggggcttatatgcgaattgggctcggtgatggggtatggtgtgatctgggccatcggatcatatttcaagcgcacagattagatcccgatcctacgtgaaccagtatttatcgatgaccgcaggatcagcgatgcacggtgcggatttaatcatccgagcgccgaaccggtacacagtgttagccattagatcgagatccgacggcctaagctagtgtaaccgaacaacttcaataatttaatcatgtccgctctagggaaatccaacggctgacaactcaccctatcctttcttcctccctacgaccattctatggcggcgcagaccccatatgcggaggtggcctcgccggagatcacgaagtcggtgccccaagcccctccctgaagggttccaaagattct

SEQ ID NO: 61449 - DNA, 287 bp, Zea Mays
cgagactgtacggcccagtcaagtgctaagtctcgatcagcaagctgatcctgcaggtgacggatgtcccttcttagttcattgattctatctccgtcggcgacccaagcatcagtcctgtgttgcagcgctgcttgaagtcgactcactcgagcttcaagatctccgatggggtcattacttccactgctgctgctttcatgtcggggggccagttgatgccgaggcactccaattggtcccgtagacttgtgtgccgttagccttgtgcgtggcggcatcttttc

SEQ ID NO: 61450 - DNA, 426 bp, Zea Mays
actagctttgtcagaggatctatgacaagttcgatgtcatagatggtgaggttgcctaacatgttggtgatgaatcatagggaactggatgtgaattcttctcccaatgaaaacttcatagatgccatcaactcttagatgatcttcgtactccccaacatatcaggataactgtagaagattgttcatcgatgaatatatagggtatgtcatgagattgagagttgaaggttagagcacgagagacacaaggatttatacatgtttgtgctctagatctgttgtttcttttttgatgatcaagggttccccacccctcctttaatattctaaggagggaaggtggttacattgtaggcactgagttggttaccaaatttatgacataattgagtcggtcaccaagttgtatatgagtctaactct

SEQ ID NO: 61451 - DNA, 859 bp, Zea Mays
cacctttgcaaaactgttctttagattcttggcgcattccaaggatatttcgtagcatctctctttggagtcgcggagctcttcggcattcttttgtgcccttgatttttcaaattcgcttatctcgtccttcaattttttcactcgtttctgcaagcttctttaaatcttcaacttcgactctgtgagcttcggcttgtgcactaagtttggcttcactatttttcagcatgtccactaaggaaaacaatatcttatatttttcgagaccttcgttccttagtgtaatgacttctgactgaagattcccaagagctatttgacagctctcatcttctgtttccttttgggcccttaaagccttgcttagaatcaagaactaaaaaggaaaaatgagaacataacaacaacaagaaaagctacaaatataattcattttacaagaaaaaatgtatgcacctttaggctattataagtaaggctatctgcaagatcatcctttgacattgcagataggctgagttcaagcttcgggtagcctatattgcctaccatttcccggcagacatttaactctttattgtctggtagacaataaaggaaatcatcctcgtcattgacactgtacaccaaggatcctcgggtctacttcaaatccttggcatattgttttgctttggcaatctgctcctctgataactgcttccctgaagcatgtcacacaatgaattccaactctttagcaggtgctttaggagcaagaaatttgagtttttcagaaacccctctttttctaggattatcagtgcgctttccgaaggtctagctttggcaggaacttccgagactccagtttcag

SEQ ID NO: 61452 - DNA, 276 bp, Zea Mays
gggaattccaaatttgggggttgtagaggctaatcagaggcgagaagtggtgttctggcttcgtaacaagctaatagagcaagtcggggcatcaatttatagtgatcaacatcggtggcgctcaatttggggaagacacgctggcggccggagcaaggtgagtcaccagagttatctattgtggcgcttacttaggcaaaggctcgggataatagtttgtcgttcatcatgacttactgcgacttggtacaacgacacatagcgtggcagactccg

SEQ ID NO: 61453 - DNA, 373 bp, Zea Mays
cgaataggacgagcatgcatcatgacatacaattttaagtaagccccctatatagtatcttagtacatgtttcatccatcctagtcatgctacctatctttgcttttctatactaccttttcctattcgtgaagccttgaaactcagttcatttggtggaccagtagtttataaggtacagttgccaaagaatttgtcaacaatgcacaacatgttccatgtgccccggttaaagaaatatcttcgagtccccaagcatgttattgagattttaggtgttaaccttgaactagatttaacccactgggaattttctgtaaaggttttggattaaaaggattgggtcactcaaagatgagttatcgagttttac

SEQ ID NO: 61454 - DNA, 837 bp, Zea Mays
caaacttgtcgagatagtccatgaatacactgttcatcagattcatgaaaaaggatggtgcattggtcaaaccaaaagacattatggtaaactcatgcaacccatacttggtgatgaatgccgtcttcgaaatgtctgaaggtcgaatcctgagctgatgataacctgacctcagatcaatcttggagaacacactggctcctctcaactggtcgaatagatcttctattctgggcaaagggtacttgttcttgattgtgacctcattcagagctcgataatcgatacacatccttttggtgccatctttcttctccacaaataggacaggggcggcccaaggcgaggtgcttggccggatgtaacctttctctgacagctcatcaatctgctccttaagttcaaccaactctggtccggatattctgtaagctctcttaaagatgggggcggttctaggaagaagctctatggcaaattcaactttccgctctggtggcatacctggtaagtcctttggaaacacatctgggaactcagacacaatcttgatcctctcaatttggtctgcttcactgctatcgacagccatctgataacaacttcctttcttcggctcaggcgggactaactcggtcaccacttcttctcctagtgaggacaccaacttgattgtcctcttatcacaactgataactgtctgatacttatctagccaattcatccctaggatgacatctattccctgagtacccattactatgaggttagcgggaaacactatctcccttatttccacacatacattcaaacatatgttatcggctcgaattctac

SEQ ID NO: 61455 - DNA, 1241 bp, Zea Mays
cctaactgatagatctactaaggcctagtcccctttaattttctaagctctgtgagtccatctaattacatgtgtgtacatgcacctgccaacttcaatccctttcaaagattattatgcatacatgagcacacccatgtcctttactggatctgcgcctgcagtaaggtgtgctttgcattgaatctttgtagcccttctattcttcatcctccccacagtggtggcatttggataggcagtgcaagtgggatcaggatatgtgatgctgagacagttaaagttatgatgaagaatcaacagaattgcagtatgattgggaaactggtttcagaagttggactatgggttagcatctcaataacttagttttaaatggtctacgttgacatgtctttgtctaaaatttcattggtacttgcattatcaacctaccaagaaataaagtttgttctgttttttctgctcctttgatctctttgctaaaattcatgcggtgatttgtgttccaggccaatcaagaggttgaacagagttgtgcatgtgagcatgcattcattatattcccacagttgatattctttgtggtactacatctatggcagatttagtcgctgctgccatacaccagatgcctagatcttctttaggcccttcgtcggcgaggagtatcacaaggtacgccaatcgcttggtcttatcttcttgctctgcgaaaacaagcacacaaacccaatttactatgttatactccttggcttccgacgaggtggccgaggcgagaggctatcggtggcgctggtagtccgcaaggaaccggatttggatgcgctctccctcatcacttggtaagagacccaggtaaggaacatataagtggttgttctgatttctgatattagccaatttccctcctccaatctgttacagatttattttcccttctagggatcagcagatcccacacctattacatgatctgtccttctagaatagaatctactctctaacttctgaaccggtactgccttcttcaatatcagccaccggccggtccacctcttcaataatcgtccttcatcgcccttcagttgtgagttgtgacatactatttatattcggatctgatctattacaaatatacatgcatattatagggtgtgcatctgtatacccatgttctttacaaggtccgtccttaggtgatatgagtagtaagtctaaacttgcttcttaccaag

SEQ ID NO: 61456 - DNA, 366 bp, Zea Mays
tttggtaacaaattcatttgtggaaaagcataatatatcaaactatcctttaaggaggaaactattaattagatcatcgggaggtgaacttagagccactcactcatgccgtcagactaagcttgagattagaggaataagctttctagtagagctgataatcttggaatcgagtggaatcgatgtgatacttggaatagactacttaaccaagtatgatggagtaatatcttgtgctaagatgatggttacattaaccagtccgcaaggagaaagaattgaagtcaatgttagtatgccagcaacaacaaaagccatggtaaatcaattggaggagaaatctttggaacacatcagaataaggtg

SEQ ID NO: 61457 - DNA, 781 bp, Zea Mays
gtcgttgccggccaggtcgaaaaagaatattcagcaaaagaccccgcactcatgcagtatctcacggctgttcgcagtctcgagagacaattcaagggcttcaccttacaacatgtggaccgcgccaggaacgaagaggccgacgcgttggctaaggcaggggccagaggcgagaccttgccctccgacgtgttcttccacgtcattggcacaccggccgtccgcaacccagtgggattacaagtaaccaacgacgctgaaggccatcgcatcgtcaacctcattatgactgaagattggtaggccccaataacactatttctgcaaggatactaccacccgagtgacgtcaatgaggccaagcgcctaaagcaccgaagcagggacttcgtactagttggggaccagctatacaagaaggggatcagtcaacccatgctaaaatgtgtcaccgaaaccgaaggcattcagatcctacgcgaagtccacaatggaacttgcggctcccactcagggcccagggccctcgctgctaaggtgatccgtcaaggattttactggccagctataatctgtgccgtgaatcgagtcacgaggttgtgcgaagcttgccagaagttttctccccgctcgggcaacccttcgcagttcaccaagctgattgcccacacatggccactttaacgctgggggctggatattgtcgggtcgctacctacggctcaagggaacctcaagttcaccttcgtcgccgtcgaatactttaccaagtggatcgagg

SEQ ID NO: 61458 - DNA, 496 bp, Zea Mays
gcggcggttcgccttcttcgcactcgaagaccagtgcgccagttgtatgacttatgggaccggacccccgtgtcataagatggataccccggtgagcatcgggggagacttatcgcgatgtatcgaggcgggagcgagggattctgcctttaaagaggggttcatccctcgagtagcagccatgccttgcttctctcccactcgcggtgccctttcgccttcgatctctccacgctcttatgtcgttgtagctgccatggccttgctagaccctagcgagtgcttccagcccgaggtggcactcaacttggtgtgcaacccgctcggatggggtgtgctggcgtttgccgggaggacctgtgtcggtgtctctcctctcagcgacctcgccaccgaagattttgtgttcattgtttccaaactccccagcgggttggctctgccgatcccgtctttcttcgtgcagctgctggaggggcttggcctccagtctcta

SEQ ID NO: 61459 - DNA, 547 bp, Zea Mays
ttccctttcacttgccgagactatcgctcgaaagtgtttgagctggcagggtcgccttcgcaaagctatgaggagccccctgtctaaacggagcagcccttcgctttgatattatcgacagttctggacaaagaccttgattccaatactgattgaagtaccctccgcttcctgtatctgtgataaaacctatccaattgatgttaaataaaactaattgattggggtggacgaccttcactccaacactagcccaccgagggtccggttcaacttggtgagctggtcccgaagtcttttccgggagatggtccaaacattgccctcgtcaggttaagtggtccttagggggaggtttgaaatgtgatcgttaaaaggtgacgttttactataagtctgttggtttcccgaggcgccttttcaggtgtataaaaattgttcccgcccgcggtggaaaaacctttatgcgctggctcacaaaaaccttggcttctctgcctgagcaaactgttacgtgctttccaaccgtcgccaccggtgaactagc

SEQ ID NO: 61460 - DNA, 588 bp, Zea Mays
cccgcatgtcgccctccctcaatccagaatctatacgctcgctagctgcttcctaagcacctaagacaatagcgtatgggtccatgccgtcagatgtctcccccaccaaatatcggatctcaacagaaagcagaaaaaggcggatgcgatccgtagaaattgtaacaaacctaggcattgaactgacccggattctatatgctcggtgtataaaggcggatacctgacccctgaatcatagccatcgtaagctgcatcaggaagagatagccgaggggatcatcgccgtgggaaggttcgccgttgctggtaactcttgcctgcaccgccattaatggatcaatgggagatcgggcaggatcgccaacacgcagggattgtaatcgaggtcgattcagagcatgaaaggccatggcgcgaacgacattttcattgattgcgcagcatctgccacggtgcgtggacagcctcgtcagcatgctaatccttggtaagggcgcctccattgagttttactctctctccgcagcgtgtagcatccgtccgaactagaaatgggcgtcgtagctggtagttgggaggtccgtc

SEQ ID NO: 61461 - DNA, 1094 bp, Zea Mays
gaattatgtgttgttgcaaaaggattgtaagaacatatgccgcaccaaagtttatgatcttcccatagaagtgtaagttgacattttttatgacaatttagttacattaagtactttgtgtatttggaccgaactgttggtaaaaacatgggatggttcatgtttatgtaacatattattgcacatcaacaccatttaagttaactgtggacacatggccttttcactagtttagtgcaatgtgcaacactgttgtccctatggtcaactatctctgaaaccattatgtgtctgttgtaatcatgcatatatggatgttttggttgcagcagtgccctaaaacatcacaagtattctttccttttgcaggccgatcatttggtcagttactgcatttgtgccaattaaagcttaccaaaagagtgatttcccaaaatttttgctgcttccctatcctgaagacagtcgtcagaaatctgaatggggaaaattcatgcgcttcctttcagaaaataaaagggtaaactattttctacataaagaataaagatactaaacaagaaggctacttttcagtttgtataattgttctctgaaagaattagagacaaacctactaaccatcccggagttgtcactttggatgttacgtgagtagctaaagttgttacaaaaagtgtacagggacatgggcatctggattaagatttaagaagaataagaaagtttagtgttgatgatgtaaacaaggtactttgaggcattggatcaaaccagtttctggaaggctaaagaggaccgtgcacagaatcccatagcaaaacacatttcgttacagtgaatggatttcaaattaggggtcttggtatttacagctgaggactcttacactttctgtgtatctttacagccttgcctttggtatggaacagcataacatacaaccaccccccccccccccccccccacaactaccaccacccctgcacgccacaacatctgcttatgttgcctcttacctctaggaggctttgggaaccatccttcctgggtcagtacctgatccatccttgatctgacagtaaacttctaga

SEQ ID NO: 61462 - DNA, 293 bp, Zea Mays
catttcaaggattgcataggagccattgatggaagtcactttcctgcgtctgtcccgaccacggagcaagcaaaatatattggtcggcacggttacgcatcacagaatataatggtcgtttgtgactttgatatgaggttcacatttgttgtcacgggttggccaggttcagtgcatgacactagagtattacaagatactttgataacttatgcggacaggttcccgcatccaccggaaggtatataagtatgttgtacttttgtatcatacgttattaatttatgtcatat

SEQ ID NO: 61463 - DNA, 400 bp, Zea Mays
caaaatctcgttgaggcaaatcagccaccttagaaatctgagcaaaaacttgagtatagctcgacacaaatagtttaagttgtgagacatggaatactagatgaatctgagccttcgagggaaactccaaccgatcatccatagtccccaccttctccaaaacagtgtaagcccaaatacttaaaagcaagcttagggcaagatctattaacaacggaaagttgagcgcatggctatagcttgagaaaaaccttttctcccacctggaactcccttggacatcttttcaaatcaacatagtgtttagagcctaccctaatttcatgagagtttaagtgttaaatgatttaatgacatattttcattgtgctccctcactctgtactatcggcactgaaag

SEQ ID NO: 61464 - DNA, 355 bp, Zea Mays
ctctgagcttgaggaaaaatatcttcgaagtcaagccgacttagcccggcgagactctgatcttgaggagaagtattctcgaggtcaagccgacctggcctgagtttctgcttctctggatgatgcgcactctttgaactcttctctcaatgctcagcttaacccagaaaggacagcatatgaggtaaactcccttagttgattttgccatgcttattgttgactgggtgctgaatgttgattcttgtttgtaggaggaaagatgagctcttgtggcttctcgtgataatctggacaagttataccgtgacgctagcacttccttgactattttggaaagaagccaccgcttcac

SEQ ID NO: 61465 - DNA, 403 bp, Zea Mays
tttgtgctaacaatgacaggaccaaagaatcaaatggacaaggacaaggggcctaagcttaacgatgatgagtgtgtctctcagctggaattgaaggagatgatgcgcgcgatgactgaagcttttaaaaaatactaggactctgcctcgatatcctatgagcagcttgatcgacgagttgatgaacttgttacacgcatggacgtactggaggctcgtcccccaccaccaactctagccccatctcactctcctgtggacgacaacgacgatgacgatgatgtttatgcaccgctgccacaacgcttcgcacgtaatcgacaaggtatgggaggtaatggtagacatcgtcatcataatcctcaaccagaccataatccatttgctaagattaagttctcta

SEQ ID NO: 61466 - DNA, 575 bp, Zea Mays
ctctccccctcatcagttctagtgtacgaagaccctccgctcgtccaacgcttccccctcatgtctaccacacaagtaggagattgtctgcacacctttcggatgatggaactctaatatccccttcactaatcactgcatatttttaaactttaaaaacaacatacaaatgttaaataattgagttatagtacatagggagaattgaataggggaaattgttgggagaagaaggaatagggaaagaatctcttagggatattaaaatatgaatagatggtacgaatagggaaatttgagaggaagaaccattggagtcagtctaagaccgcccctccccctcactctccaccgacaacctcctccgccaccaaagaacatgtctccatattcatcagtcttttccaactccgatttaatacaccattgtaggtcaccatgtcgctcgatgaggagcactgcacactccaccagccatgctcaccccacatgtgtcccacctccgtgcaactactcatctccccctatactagatctaaccagactttgtttggcccccctacgttcaagggtca

SEQ ID NO: 61467 - DNA, 1091 bp, Zea Mays
ttgctccaaatctttacaacccaaatagaaacatgacagatttgccctcattaattgatgatttgcttcattaatgctctccatgcacctctttgcatgctgcatgcaaggttgctgtccagatcacgcttcatgctggccggccggtgctggtccatggccattctaaataacaaaaaaagaaaaacacaactttattcaacaattattcgtgcgttcaagttctcacccatacacatcactaaaacgttacagtagcagtacaagttcactataccacaacactaaattggtgtgtcagacaacagtcactataaatacagcataaccatcgaaccgttggtcggtatatgtcaaacacaaactgtcaggcgctaattctttatttctcgatagaacatcagtcgctatatgcatatacatgtagcgctgaacaatcagtcgcataaccatatgttgtatcgatatatcagtcggcataaaatgtccaggatcaattggccccgcgcgctcacttgtccattggcgcgaaaaattcatcaggcgcggccctcttgcagtccaagtcctagtcaccgcttacttccacccagccaaaccctaggtacttcttttcttcttcccaattcttcccagccaccgcccccgtccgcgtagtcatcagaaaaatgctgcgacaaccacgcgttcgctcatctcctacctctcgcccctcacgctccaacacgccgtgcgtcctctgtccccaaatcaccgtgtagggcaactcagtcgtgcatcctctatcacaaatcaactgttccttccccgagttgctgctgcagtctccaagatcccacccgtggtgttgccgacagctctaggtatttgattttttgctatctccctgtccacccaagcccttatccatctaacctgcttccttgttttagacgagagaatccaagaggtagtgaaggacccggacaaggggagcagctcgaacaggttctgaaatgataggatgtatgccaatttaaaatactgcaggatattaaattgcgcttgctttcagagatccaaggattaagtctaaacgataattgctgaac

SEQ ID NO: 61468 - DNA, 624 bp, Zea Mays
aacaaataataaagcaaaagggcattaaatagaagtacctataatcaatgcacattcggcagcttcttcagcttcctttgactctactcggcatcatgggattctttttcatttttctttattgctttgtcagctatctcgcggccgcccttcatccaaacatcagaataaaatttcccacccatcagagtagcttcggctgaaggttcctttgtatcgtctatgcagaagataacttctgcctgggctgcagctttaacatgttcacaaccagttttctccaaaactgctacaacccctcgggcaccggcgaaggcacaaaaatccctgcagtctctaagtatttcttcaaaagcttcagcttcttcgccgatccattcaatgactccttcgagatcgcctcgaataaatttttgctccgatgagtatgcacccacctttgcaaaaccgtcttttagtttctttgtgcaatccaaggattttttataacatctctcaatggattcacgaagctcctccacattcttttgcgatcttaaacttgtccattcacttatttcttgctttgcttttgcaacttcgaaatcttcattcattttagcaaactttttctttagttcttcg

SEQ ID NO: 61469 - DNA, 367 bp, Zea Mays
gtttttcagatcttgagcagttaccggtacgttctctagcccatcatgcatgtctgatataaaatcaactatgcaatgctggggcactcggctatcatgcattgcatcaacaaaattaatgaattcaacatccctacttttgttgcaacgtagatgttgtttctctgcttcgtcagttatgaactcatggttatgctccaaattcaccagttcaatctttgcagctaccaccctttttttcatcatcatatattttttaaatttcattccagtcttaaattgcgtacggcccgaattcctattcctcatcctaggtgtatcatttggttttggtgcacttttaccttcacgtgaacaatttatccac

SEQ ID NO: 61470 - DNA, 795 bp, Zea Mays
gttctaatctgagtcgtccatccccagatcaatagtcagggcttatctttctcctctcgactaccaaatgtggagacacccaggaccagggtgatggcgccatggccgagctcacccaccccttgcgctagggttgtaaactttgatcctaacggcgctacacgatgcggggatgatggtgatcgaatggacaggtgactcaccaacggtgatgatgggaagtcatgcacgtcggggtttaattggagccgcggcgatgacttgtctccggctagcaattccaagagctctgctcaccaattgcgcccgaagaggacatgataaccctccttgggtctcgatgaagttcctagaaccgacttgggggcctcgacgatgctctacgcgcgtgtcgacgttgcgatacgactcctcgatggagggggagcgctggcgagccatatcctgatgctccgtcgctcaacagtcctcagctccacactggaaacacatggcacccaccaatcaatcatctaggaatacaaccgaggctcgactgatgacgagaacaaggattggtcgcagtggcctcccatctctctcacttcttctctattgtcctctctcgttggtagagcgatgtcgttgatgcatgcgcaggtggtggcgcctggctcacttctttatagccctgcgaaggtcggttctgggttgcaagcaatggactctgggttcatggagatagtgacggcgtgacgggtttgttacaggagaagatcatgatgaggatgaccctgcgcctaacaaggcgggccc

SEQ ID NO: 61471 - DNA, 327 bp, Zea Mays
ctctattccagaacaattttgaggaactctacaacaccttgcgccttgtcaggccaaaggatgcagatgcattgcatctagagacggacgagagcaaagatttctggtcttcgttgagactgaatgacatcacaaaggcaaacattaatgaagtgaggaaaaaactggaccctattgtgcacatccatagtggcagatttcttcagaagtctctcccaggactgagagaatccgttgtgattctgaaccctcttctctaccagaaagaagtcatcgcaagtatggagaagactgtggcaatgggtcttgatgcagaatacaaaatct

SEQ ID NO: 61472 - DNA, 409 bp, Zea Mays
ctggttaatatccacaggatatggcatattcttttaattcttctttctcagctttcgttaactcttgtccaactaagttttgaaagttgaaaattacctcttccgaagcatcttcagctattttcttccccttctcaggtactgtagccatggcttcttcagtggctgcgacagcttcttctgtggccatgtccagaagtatcttatcaatatttgaaattgtgctttctaaatgtacatcttcggcagctgcagcttcgacatgtgcagtttcggtcgctgttgtactctcaacaactggtgccttcggagccgaagcttgcggtggtgtcccttcaataacttctgtcacagtaacaattcttcgtttttttggcctagctgtcttcttcgttatcgagggctcctt

SEQ ID NO: 61473 - DNA, 823 bp, Zea Mays
cggagccgagagtaattagcgccagtcaagaggattcgtgtaatcggcactccagacctgtctcattggaaaggtgtcacagtcacaggatggagcaacacgcccggccctaagttttttccctctcattttccagagacagtgttgggtgtccgatgtggaaagctcaaagctgtgaggtggtatgggaagagggcaaggccaagtccaacccgttggattttgtgtcacgaaggtgccgcagctacgcgaattgactggacgatcttctggattttgtgcaatatactaaaaagctagttttatataagtttcattaaatggacgtactgtcgaatagatatgttcaatatgataaagtaatatttttaaaaggagggaaaaaatagttccatcaacgatactatatatctgaagtgtgttttgttaattagggtaaaaaaactagaggcgattgcttccaaaggttagggtcagaaaagagagagaagctctctgctggatggagaaggaaagtaactggatattgcacctaggaaatgagcacgcatcacaatcacagccatgcatgcatggttggttgaatgagtgatgggtaatgctgccacagtctcacagataggaataggagtaatcctatagtgcacgcgtcaatcgttattttgcatttttttgtgctaccttattagcttgttcaaagtaagagaaaagaacccacacatgctagataatctggctagggatcgaatttacataaacatatgtatagttgcatacacgtacgtacgccggccgtacctaactgctccagaacgttctcctt

SEQ ID NO: 61474 - DNA, 981 bp, Zea Mays
acagggcgataggacgatcgaagaattccttgactttttgatgatacgcttcttcgtcgccttttcgcaaggaggaacatggcgaaagcgccatgctaccctcggtgggcaaacgagcatgacgtctctggtgaactgttaacgggtgatccagtggaggcccgagccccatttgataggagtcggctagtggtcccaagacgtgccccaaaagtacttgtgggtgattcgcctggtcccggacccgttcgatggggtccgagggctccgatgggagaccgtcacaaatcgctcttaggggtctcggatatgtcttagggtatctcgagattgtagcccaagcctcgatcatgtacggacgtacccatagtcatccctgactcgtacccatagtcatccctgactctgtgctcttgggtgattgtcgaaccctgctaagggccaacctacaaacccctgatcagtaaagggctcggagcccatgtgctttggggtggttaccaaaccctgccgagggtttaaccttcgaacccctgatcagtatgaggctcgagcctcacatccttcacagggaagggagtccgaggggatgtatcctccctgctacctgtggaggaacgaaagatgacagagaaaaagacacaccttttcatgcacttaccctgaggaggcagagccgtgccccttggcttgtgttagccggacatgacatgcggcttgcaggcgagatttaatgtgacgggatgcgacgtctcacgagccaatcgttgtggcgcatgtgcacgcggaatttgaagagatgagcccactcctggttttggttcttcgaaatggggaggcttgactcagacctcgaagggtctgccgattcctacatatacgctcgagaggggatccctcctggttcttactttgcatctgccttcagccctagccacctccatttccctcagccacaaccaagagttcgtgtgtagagac

SEQ ID NO: 61475 - DNA, 709 bp, Zea Mays
tgcccataacctaggaaaggcaaatagaattaagcatagtgtaacttcgaaaagttaccacaagtattgaaagaatgatgaaaagaagcaaccatactcaaagtatgggcaaaccacagcttaggcatatagcttgatgcatgcttgagtgaatatttgaaacatataccttatcatgctgaaagggtttcaatataaaaatgtgtattatgaaaatgctattaattggtcggtcatttgtgaagaacctagacctataagaacctaaggatgagggggaggaaataccatgccaatacaacatgaagataacacgaaaggtagacactatgtgtcattgtgttggattggtaatggcactaagtataagtaaataccttgtgtatggatcatgaatgtcctccaatacatccaaagggtagagaaattttgaattgaagatcaagacatgaatctaaatgtgaatatgaactccctttgtggcaaatcagaattgaattgaagtcagaaagtagacctttgtgtcaacaatgacaaactcatatgggaaccaaagtctagcataaagattttgtgaagatctatactttgaataagaaacactccacgatataagcaatgtggattaagaatccccactaccaacttatgaaataaagaagcttgtgttgcataagtaatgatgggatatgtgctatgtatgaaaatt

SEQ ID NO: 61476 - DNA, 465 bp, Zea Mays
aatcagatcatttttaacataaaaccactcctccatccaggccccaagccatcttttccagtatgttggcaccaggtaacttgcattagagcgggcaatgaacatgtagcaaccgaagttgttctggtattgttctttgccaatagccttcgtctcgtataaaagctcgtgcatactgcagaagcacttcgcgctcggctccagcccctggcttcttacagcccagacaaacatccccatcctaattatagctttgggggtaatctgataaagaaaaatctgaaaatctttaatacctcaaccacaaatttgctcagtgggaaccggagacctgctttcaggaagcttcggtaaataacaacttcgttttcctcaggagcagaggcagtgttgtctcctccaactctgacaatagacatgtcgcgaaaatatctccccctcatggcgtcaatatgactttgtttg

SEQ ID NO: 61477 - DNA, 588 bp, Zea Mays
aatcacggtgagtatgcctctgttgagttggttttgtccacctccacgtgtagacccctactattcggggcttggggcactagggtgtgaggtgtgacacaccgacaatggccaccgccgggcgggactcagcaccgtcgcgttttgccatcgggggaagaagacaaacgcctggccgttgatccgagtgttgatggttgggattagatccaagggtagctacgcgggagccattgatcttgggactgagggcttcaattagaagaggataacgtttcagccgtcttagatcgtggctattagatccgaaatggacgaatgaggttgaaagtgcactccatcaaacatgagccatcgatttgggatccgagggcccctgctttataccggattattggtgtcgagatctaatcctggctggtagtcatcgatcgggcggtcagtagttcgtagtaccctttcgcccgcaccggtttttataaagagcccctggaatttttactaatcaaactgcagtacacctttacacaaagatcattacctccatgtcccagagtttgcaaaatcaaccctaggtccctggttttt

SEQ ID NO: 61478 - DNA, 901 bp, Zea Mays
ctttcacatagaacacttgattcacatccttggctaagatgaatggatcgtctctgtacctaagattattgaggttaactgttgtcattccgtattgatggtcaaccgttaccccgcctcctatcttcttcacccattggcaccaaaacaaagggaccttaaaacggggtccatggtctaattctcatatctcctctatgcggccacaatatgtttccttattcccatttaggtttgtggcatctatgctgacaccactgttatggttggtgctccttttatcttgggctatcatgtaaaatgtattgccatttatcttgtaccctttgaatgtcaggacattccaagatggttccctgcagttgctcatcaataccctcgtcaccctggcatcttttttgcaaccaacagctgaaagtttccatgtgctaacgcgtaatccaggcttcagtcctacccagggattcagatcatataatgtccttatgtatctcgatatacggttccaccaagctagagtttttcagaactatgtagtgcgcttcacagaaataatcgtcctccatgccaatatatgatttcttccctagtgtaccctttccacttagtttcccctcataccttgatttaggaagaccgatagggttgaagtcgggaacaaaatcaacatagaactcaatgacctcctctattcggttgcccttggcgatgcttccttctgtccaagcaaggttgtgaacatatttctttagaactcccatgaacctctcaaagggaacatgttgtgtaggaacacaggatcgagaatactaatctctttgaccaagtgaactaggaggtgtgtcatgatattaaagaaggatggcggcaacaccaactcaaagctgacaagacattggac

SEQ ID NO: 61479 - DNA, 634 bp, Zea Mays
ccgtccgaactcacagtcgataacggcaaacagtttgacagccaagacttcagggatttctgtttctccatcggcaccaagcatgtcttcgcctcggtataccacccacaatccaacggcgtcattgagtgcaccaacggcaagattttcactgccatcaagaaaagacttctcgacgacaaaaagggcaaatgggccgaccaactacctaaagtggtatgggccctaaacacgacagaatgtcgggcaaccggattcacaccttttcgtctattgtatggatccgaggccatgacgccacaaaaagcatggtcgcacagaacaagcacatcagcagtccctgatgtcgatgaaccaatgtccaaagatctcatcgacagagaccacgtcctcgccctacaggccctcaacaaatatcaggctcaaaccaaggcctggcgcaacaacgcggttgtcccaagagaattcaacaaaggagacctcgtactcgtccggaccacccggacagaatcacggggcaagctggagccgaaatgggaaggtccattcatcggcaagtcgaaggcatcccccagcgcgtacatgctggcaacaccttccggcgaagacttagagcactcccttgtaattcagc

SEQ ID NO: 61480 - DNA, 311 bp, Zea Mays
gtctattgaaagaatattctgattgctttgcttggaattacactgagatgtcaggattaagccgagagatagtagagcatcggcctcctattaagtctggtttctgacctttcaagcagaaacctagaacatttcgtccagacctactaccacgaataaaggacgaaattcaccggctgctagaagctaattttattagaccttgcagatacgtagagtgggtctccaatattgtgccggtggagaagaaagaatcaggtaagctcagagtatgcattgattttcacaatttgaatagagcaactcttaaa

SEQ ID NO: 61481 - DNA, 482 bp, Zea Mays
ctatatgagcccagtctattcgaagttgagaccaggaacggaccttcccacttcacttgcaactttcccgttgtatctgggttagctacccttcggagcacgagatgtaccggtgctatgttcttgagtttcaccttcttgcctctccaccttatagtttctacttgatactttcttatgtgctcgattgcttcgagtcttgaatcttctattgtatcattcgaaactttttcattgtcctaatcttgagtcgaagctatgactcttgctgaacccaacttgacttcttcggagtaatggctttgtcccaaagagaagatgtgttgatatagatgtgttgtgattccactcaactttgataagctcttctgtccacctccccttgggcaatccaaccagagactttgtgattcctagcaaaattatgtcgttttctttttcaaccagcccattggactctagatgcctaaccaaagcaaaat

SEQ ID NO: 61482 - DNA, 428 bp, Zea Mays
gaaaatccaaccagtctaagtcactataacttcatttattttaattctccaacttgatttctatttatctgaacttaattcttgcacatacgcacttagaaaacatgctagtccacatagtgttgtgttggtcattaatcactaaaatatttatagaaatggctcaaggcacattttcctttcaatgtgtgttgtcctagttgtatataactttttttcattttctgcactaagaggtagttttcctataaggtatgtcaccggacaacaagcatgagcacacgcaatcgaatgtcgtcatgaacacgccgaggtgaaggaacacttcaagaagaaaatacccaagaaggaagttactaatagacttgttcgctaagtctacaatattaatgttgattttcacgataataataaagtctacataaatt

SEQ ID NO: 61483 - DNA, 448 bp, Zea Mays
cccaagtcggcaaaaccatgtaagaaataggtagagaaaccctatgcgaagacgatggaggtatcacacacctcaaattgtgctgtgccgagccctatcgacgacggatggcggcgcaacggcaatggacaactccggcgagtaacctgtggctacctggggctctattccccacgaagcacgatactaggcgaccagaggaagatggcaacgctaggggagagggtctcaccaggagtgaaggtggggacgaggccggacacggtgtgtggcggaacgctagcatcgaaatcccaccagtgagaaattgtgtagcctcgggtccacaatcccaccaggcgaggccatgattgacattccggtggccatagtcatccgcctggcccgcccatgagggatctccatcggtgagccagagtcaccccacggcggacatctcacacacaac

SEQ ID NO: 61484 - DNA, 838 bp, Zea Mays
gcgtgggccatcggagtgatgggtgtcttcttacatgctaaaagttcccctacctggcacgctaactgtcgtggtttcaaaaaccaggggtagtaatatttgtgtccgatgggggattagcgcgaactcactccaaatggtgagtcgctgggactcgagcgatggatttgagacggtggattatactggttcatgcttgcgccctagcccagtatactgctaatcgtagtattgatctggagcatgttacaacctagtgtgcttgtgtgttccttgaagggtggacttctcccttttatatctcaagagagaagccttacagtgggggcccttctgtgtcgaagagacagagtgaccgagagagtagagagagagggagggagagagagggagccttgtccgtgtgggtcaacgaactgggcccctttcctgtatttctgacatggcttcgttctccacactagctcctgtagtgagtctattgctgacgtctagtggaagtgcatggtgggtcccacgattctgtcactagacatggttataagcggcgtggctccacccaccgcacgctttgtgtctcttcccgtccttcacagtacacctgctcagtatgacgtgttgttccgtcctttccaatgtgcgcgctactgttgggactcatatgctgaggtctcccccgaggcttgtctcatgcagtgtgcgtacattccgcgcgtggcatggtgatgacacgtcttgtcgggcggttgcgggctcgtatcattgggcttaggtttccatcttatgggcgtagggacttggtcgaccactctgtctcgatggcttgcttggcggagac

SEQ ID NO: 61485 - DNA, 594 bp, Zea Mays
tatcgtcattacgcaacaaataaatgaggaagaagggaggcgtcacccagttgctttactgatggggtggagtgcgttaatgggcgggttggcgatggtaatcctcctctatcagcatgatagccaacaacccatgggtttgtaatttggaagccatgttagcttactgacagctgaatatcagttgtaacttgcaagaggatcacactgacaaagaatagagcattgttagcggaagcaagattaaaccaattgcatatagagcacatattaaaattcacagaatactgtccatttccttactctatgtatccatctaataaaactcaagcaagacaaaaaagtgtgaaccgcagtaggaaagtaccttttttcaattggcatacacataggttccataatcagtattgtgcagtatcattttaattatgtacagatgtgataagttgattgggatgtaagaaagaaatcaacgtaagtatcattattatgttagtatgttatacttggtaaaccaaatttagagtagatgtgtcaggtagactattgcaaagtaaagagagataggatggcagcaacaaaaacaagggtggc

SEQ ID NO: 61486 - DNA, 393 bp, Zea Mays
gtagatttgaaaaaacattctaggttaaagggtgtaattatgctcccactaaaaccttccttcagaaaaccaaaaaaattgcctcccatatcggtttaccttccccatgagccacaatcgctgatgccaatgcgagcgccacggcctccaacgacagtgaccctgccactgctatagtctccatcggtggtggcgtcgccgcattgccattagacatcatataggacaatgacaacatattctaccaatgacgtggacgagcagtttgctagatgtgtgctagggtgatctcaatagcagcaatgacgacaagcgtaagaggcgtgagcgatggaagcgaccgtggtgaaagtagagagtaaaaacaaaccctaaccgagcactgccatttat

SEQ ID NO: 61487 - DNA, 645 bp, Zea Mays
caagcatagaggtcctagatagaacgagtaaagtggttcgacgggaacacattatagttttcacaccaacatagtgaaaaatttctcagaataacctctcggtatactcgcaacttcgtgttgctggcgattacatgtccttttatctcatagtttgcttaatgtcatttagcgacaaagagagcaatgtatggctgatatttatagtcttaaatcatttggtaaggccttttgcttactaatagaatcccaaatttgtgatgtcttctatgccaaaaatgctttcatgcattatattatatatcttcgggtaaaactttatgcatgaggagagagcagaaaattaacttatctgtgtttaattgtatttcaatttaatttcccagatttccaagcactatagagcttgatacaactgttatggccacttggcaatagaaataaagatatgatgccacacaacacaatcaaataaaatatatagacaaacaaaactgtttacgaaggttgcgtataatgtgactttagggacttgaataacccaccacaatccacgcgagtacaagttctagcgtatctgacgtcaacgcgtgtgcggccatcagggctacgacaacacaacaagccttcgtaacaagcacaata

SEQ ID NO: 61488 - DNA, 767 bp, Zea Mays
gttaattaaaacaatttaaatagagaaaagaagaagtatttgcttgttatttttggatctgtagctctagtgctccaaatgggttgagattattacagtagactcttggtgtgatgcttggtgacgggtacaaatttcatgaattgttgtgcatgtatgattaggttagtgatttaacttgtttaatgcaccttaagtagttttaaatgatttaaaaataatgtatagatgcaaaaatggaaaatggtgttacactgttcttacatgatattatagtagcctgagaaaacttaatatggtcatgcatccacagaaaataattagttttagatttaacttgctctcacatgctttattgcattaacaaattgttatttttgtagtaaataaaatataaaacctgagcatgtgaaatttatacattagtcatcatttcttattacctatacctcataaaaattccagccccaaattagatagtttcatatggtgctaaaataacaccccttttataattacaagagttagtgaaaaaataggagtaaacaaaatcatgcatgtttcatggaatgcttgagttacaccttaaaaccaattagaggttaaatggttacgtcatgatggtctaaagttaagtattagtacttcatcataattttgagtgatgtcggatatgtgtgccaaaatactttattttggtgcatgtgtttgttaattgtgtggtaactctagcgcacgaaatgactcggatgaaatttgtaagtgac

SEQ ID NO: 61489 - DNA, 596 bp, Zea Mays
cagaaaaggaaaggtacagtttctgtgaaagaaactgcttcagctgctcctagcgagccagcgccgaagagaaaaagggtgaaagttctcacacaccggccacgttacattgaactagccacagtgcctgaattcggtagcgaaacatcttcagcccccgaagctaaggaatcaactccgctgccaggagccaaagagctggccaaagtgccaataacaaaagtattggaggaaccaaagactctgttaccagaaaccaaagagctggccgaagcgccatcgacagaaaagatggaaaaagcaaaagcatcaactgagggagcgaaaatatcagaaattttaagtcctccagaagaaattaaagcagcaaaaattaaaaaggggccaacagtgaccccaaaaagaaaaagaatggttaatgtgttagatgttttggaaacaattaaacttcaaaagaaaactgctgaaacttctgaggcgcttgctgaagtatccgttgttgaagttccgaagcaacaggctggagttgaaaccgagccttcagaaccggccaaggtaatacctttgaaagcagaagaagccgaaattgcagaggc

SEQ ID NO: 61490 - DNA, 597 bp, Zea Mays
acagactgcacacctttcttcatagcatttggtgcggaaagcgtgttgcccttggaactagaatacggctccccgaggactaaatcttacgatgatgtacaagcaactacggacgcacaactcactgtccacctactcaatgaagcacgcgacatagtcatggttcactccgccaagtaccatcaagacttgcaacactaccatgatcgacagatgcgtggtagatcatttaacgtcagagacctggtcctgtgaagggtaattaccacaaatgacaaacataagctctcactgccatgggagagaccttacatcatcgcccagatcgtgcgcccgagagcctatcgattcatggacagtgatggcaatctactgactaacacgtagaacatcgagaacctaagaagattttacccatgagtaagcaaactcaatccccctcatttttacgctcgagtaagcggaacatgtcgacctgactgccacgtctcgcttgggggctagcagagaagcaccccaggatgcgtcaccgtgacttggaggatcgaccacgacaaaacttagcattcgcaaaaagaagcaatttctcaaaaccac

SEQ ID NO: 61491 - DNA, 290 bp, Zea Mays
tacgataaaggcatgatcatcgtgtcgacacgatgcacccaatagacagctggcctatcaatgatccaacaccgactgtccccttaaccctaacacttagtcgctctttgtcggtctctcgctagggttataatatggttcgaaaaatatcatcgtgtcgacatgatagaaggccactcctcggcaaacggtcggtggccaagaacaagccgccgccatagcccatagacacacgagcgccggctgagatcaattcgcggatgcccaagtcctagcgtcggccggtgtgg

SEQ ID NO: 61492 - DNA, 513 bp, Zea Mays
gcttctggacatccttgatgcgggccggaggcctcattgcctcaattgccttgatcttctctgggtttgcttcaatgccccggtgcaaaaccaggaatcccagcaacttccctgcggagacaccaaagacgcactagtccgggttcagcttcgtgcgtgttgcccgcagcttgtcaaagaccagggttaagtcttccactagggtcgaccctctcttagtcttgaccatgatgtcatcaacgtatacctctaccctacccctaatcaggtcaccaaaagtcttactcatcgcccgcacaaatgttggtaaggcgtttttcagaccgtaagacattacaacataatagtaaagcccatctactgttacaaaagcggtatgcttcctatcttgcctagacatctagatctgatggaaaccatagtaagcatctaggaaggacaaaaggtcgcacccggaagtagaatccacgatttgatatattcgtggcagtggatatgggtccttgggacaag

SEQ ID NO: 61493 - DNA, 376 bp, Zea Mays
atctacgatcaaggacctggatcaatgtacgaagcggtatgcataggatctaatactatttgttgattcagggatccacggctaccctgcaccccagccgaaccgctacgtggccatattatcttagtcgcttatttcatgatctgtggcccatgagtcatcctcacccctcccttcaatccagccgagcatcggcggcggcacagggctgccactcatctacagccaagctggtgaccgtcgaaccagcaattcgatgccccctccactccacaaaaggctctacgcgaagaggagaggatgacgaataccatagggcacttcttacaagctgcagcgaccaggcaaggttggttcacggcgccgtgcggatcgg

SEQ ID NO: 61494 - DNA, 330 bp, Zea Mays
gcaaaaagggtgagatcacgagatcggatagtgttttgtcatgagcgatatggcacggggagcaggttgggaagtagcatacggccactacgcagtagaggcatgggccttgccgccccgagaatgaaccatcttttttggctgctgctttggtagataccactttctgctagtttatcttgctgctgctcgcttatttgttccgtgtggaatctggaaagctgtatgctctgttctgttttgccttttatgtgcttggttatgctgcaacgagcttttagtattgttcctctcggttcaactttcttgatttcaccttcctcgtgcttc

SEQ ID NO: 61495 - DNA, 713 bp, Zea Mays
gtgagcgtgcatatggtggtcaagattgagtcagagccctcttaagtccaagtatttcaagactctagggtcactcactcgttatcgtgtgagttatctctaaaagtcctctccagctgaggtcgacccttccttttattgctcaaggaaggagcctcttacaaggaccttccccgtgggggagtatgtagaaaggtaaaagggtcttctgttggtgagggtcctgcaatgtgctggtactatgtttcatacttgcctacgaactttggttgaggtgcttctgcattgcttacatggatacaatgctccgtacccttaaaggtacttgaccttgactggtagcatagtgtcatctgtaatggtgacataagctcctcggatgggcctacgccatggaagtttcattcgtaccatccaattccgttgaccctcataccccgtagtccgcttgcaaggtcttcaattcttcatatgtttctcatatgagagtcgtaggctctatagttggcctatattcaaaggagcatgagtcttgtatggaaaaaggataagtcctaccattgccatactacgccgactggagcagtagttagggtagatatgggacggtagttcgactactccacgcatacctaacttgaccccatgagactttgtccggtttgaccgaccctcctcacatatttctgtcttgtccgacccctagcggtttg

SEQ ID NO: 61496 - DNA, 585 bp, Zea Mays
tgcaccacacacatgggcgacgtcatcatgagcggtcgttgcctcggacagggcacacacgtccaccccattaactctaccacaaatcagtagggccagcccctacatacatcagcataccaggcacactccgtggctggcacgaactagcaaacggggtggagaacacacctagtcagaagatccacacgatggtcgaggacaagatctcattcggccatagcctttactgctccatgttgtatatattttataccacattgtctagtcccacttatcgaggctcagctcccttgtacgtgccccttctactataaaaggaagcgcacacacactacaaggaggatggctcactcatgctcttgagtacttagtcttacactcaatctctcaagcaatacagctcacagtggactatgatattgcactccagtggcctaaaccacactaaaaccttgtgctcttctatctccacaggcaaaccctaggtagccccttcattcttaggattaggtaggtgcatttcgccacccgactagagttaactctctgactgcaatctttttaattagactcctagtgaaa

SEQ ID NO: 61497 - DNA, 295 bp, Zea Mays
cgaagaaccaagctccagcgaacttgtaccggtcaagataagcaatggtcggtgccctaacttggctgaaccctaattcaacacctaacgagcgtttcccctcgatcaatttcacagttcgagctctaaatcactctgtccacggaggtagtgcaaacaacggatgagcacgggtgttcccggcgatctagggcagtctagcttaattgaacgggtcgaggagcatcagtggcatgtaagagtgctgaaacaagagagcagaagacaagattggacctaaatcgagctagccacg

SEQ ID NO: 61498 - DNA, 570 bp, Zea Mays
ggcaggtgtgttgctagctgaagttggactgctgaaagagaggggtctgactgctgaagctgtggttactgattttgttttcaagaatattcagccattgaaagacagggcctacccagcttatctgtatcgagggctagccgactcaactcgagttactaacagaagaattccctctgcagacttggtgagccgactagagatgatccttaggggcaaagtgtcaaatgttggtgctccagtggcatactcggcctggaacctgcctcctcccaaagccttcaccctttttgtgtcgaatccacctgttactgatggcagtttgggccttagagcgtgaccctctgctgaagaagttagtgccttggttgcttcgcttggggagattcctgatgacaaacaacaggtccattttgaggtgcccctgaaccctagtgatgcagatataaacgctatgcttgatttgctagctgaggattcttccgatgctgctcctgctggggcgttggtagtggtgcccctcccagaggttgatacgactttggatgctcagaagcctgtcagtactcg

SEQ ID NO: 61499 - DNA, 834 bp, Zea Mays
ggaagggcctgtaatgtaatgtctacctgcatttctcgagggagatagtgcttctacctgagaaattgagaaggacagggattgcacttattagcaaaattagctacaaatataaaaggaactaagatttgcagcagcaaaacccctctatgcctaactgagtaactattgctaaaacaatgacactctctacacaagttattgattatccagccacatcagttttatttcaacaaggaaaaaagtccccacttttggttttcaaaattgcacactaaaatgaagaacatataatagggcggaaaacactcttggagcaaagatgaagaaaacaaataacaatccaatactaagatttagcttattaacacaaactctgctgatacttgaaccacagatctcccaacgtttcaacaaactgtccaagttgtccataaagagatacagtgtctgcgcatcaaactatgagcttagagaacacagaacacaacaaaattcgtcatttcttccaacagaaaatccagttgtccaaataactcagtaccacagaatggctcgatgagaacgctctcaagattaccatcccaattgtatatatgcagcattgacccaaattcgtactacattttcaaccgctttatgaacccaacagttatccagcaagagcccctctatttctttgataggggcaaatcgctacagaatacgaagagtttggtaatagaaaagaattccggtctttcaaaaagaaaaggagaagaacctccaaaatgcattaaccataggtccaatatccgataaccgagccaatccccactgcgccaacaagaaacc

SEQ ID NO: 61500 - DNA, 673 bp, Zea Mays
tgtgattgatgttgaggaccttgcgccatagtagactatgtacattgtggaaatctatgatgattttggtgtcttcgacaaactagaatgctcccattggaatttttacatcaaatcagtgtaggcgtggttttgctacttccatgtaccagcgatggaacctccttatttctcataggtcctcttctagctagcccaagttagcatgtatttgtcatgcacgtaattcatggggcaatcatctaaaaggggccatccaactggcgttgacatcttgttgggtgacttggtagtgagaaactctttgagcgatacctcatgcacatgtgaaattcaatgcaaaacatcaggtccaatgcaaccttcattaaactagtattcaccaacacaccaaatacacttttaacaactctagtggtgaggcttgagctggtagaagttagctattaatggtgacaatgccatactttgacatacacaagaatgaatcaagtaccttagagtgaaaggaagacaaccataacatgagaatattttatcaaataacaagttccatctgtaccatgggcatttctaggtagattaaatcttaataaaggatatgggggtaatgggccaccatatgtggtcgtccgaccacacctttatggccaactagcctcccaagctacca

SEQ ID NO: 61501 - DNA, 1098 bp, Zea Mays
gacaacagcacattttgtctactctataaatggactagactgccatgagacaacagcacattttaggctctctttaggtctttgggaaaagaaagcgagaccgtaccgaccatggtgaccacgtgagcacagcacctctctttcctcgctaaatttagctatgcatggcttcttcgtcatcgtctacttgccctccatccatcccacggatgtctcgcaaccccacgaatccaagcccatgtttgcaaaagcatttttcactctacctctcctaccaaagcgttcctctcttgtagttttggtccaagccgatcgatctcgcataccaaaattttcttcgatcatgtaggttttgctcagagcaatgtcagagcacataagaccctgccgattcctctgatcatttgctgctgctcaaagcattcatcaagattttactcgtcaggtttgtgtttactgcttggttaccatcgtcttgttgcaatgcgaactattgatgtgtgtgatctctcttgccgttctttcaaaagacttctttttccccttgggatcggaattgatgattttgatgagagtacggttccaaaaccttataatttcaataagaacttgtccatgtattttttatcaggacactgttctctaactctaatataaatatgaaatgatataaatataatataatgatgtaatatgttatgtatagggttagctaaggggaggaggaagatttgtgtcacaatgcaaggccgctgatgctttgccatgtggtgaagtttcagacagatcgattcagctagcttctttccatgattccatccacggagctcagctagctcggcatggacttcagccctcaaagaaagagcgccgaacgcaaccgcggcagcttcgaacacgatgacagtgatgatgacatcagagctgaatccaccgcctctaataagccatctgcgcattcgcacgacagcaccaaatccaagcccaagacgagccatggcggttcaacccgaagtagctccgaaccgacggcgggcaacaataatgctgacgccaccagcttggacagcggcggggcgaggaggagcaacagcatgg

SEQ ID NO: 61502 - DNA, 778 bp, Zea Mays
atacagcccatacttggtaataaatgtcgtcttcgggatgtatggaggtcggatcctaagctggtgataacccgacctaagatctatctttgaaaacacgctggcccctctcagctggttgaacagatcttctattctggacaaggggtacttgttcttgattgtgacttcatccagagctcggtaatcaatgcacatcctcctagtgccatccttcttctccacgaacaggataggggcggcccaaggtgaggtacttggtctgatgtaacctttctctgacagctcatctatttgcttcttgagctcaaccaactctagtccagataccctgtagtctcttttagatatggggcggttctaggaataagctctatggcaaactcaactttacgctcaggtgtcatacctggtaaatctttagggaacacatccggaaactctgacacaaccttgatagtctcaagtggaatagcctccttgctatcaagagccatctggtgacaacctcctttccttagctcgagtgagactagctcagtaaccacttctcctagtataacatctattccatgagtacccatcactatgaggttagcgggaaactctatcccccttatttccacacttacaatcaagcataaactatcagctcgaactttaccaccgactgaatcaatttgaattggtgttgacatgtgtgatggaacctcccaaggtattaggcccacctacatatgtccttgtcctaaggaccttagacagtcatgcaggtgtg

SEQ ID NO: 61503 - DNA, 436 bp, Zea Mays
caaattagagttttggtgaagcacaaatcgctgatagcaagattagtggatggaatttatggatggcaaaaaacgagatgacaaaggttgagcctacaataatctaaactagaaatccgacttgacctaggacacaaactcttaattgtggacttcaaaattaaattgtacaagggctaagcgatggttataggatggaaaacacaaatcgtttgtgagcttcctatgcactatggaatgagtacacaaaatcaatctaaagggctcacgaaaatacctcatggataacttaagctttaatagcacttgatagaaagattaggcatgacatttcgaaagataagtcaattgaggtgaagatctcgatgttgatgatccaaggctttgaacaaatgactcctttaaatcactacaccattgctctattggttttcac

SEQ ID NO: 61504 - DNA, 354 bp, Zea Mays
ttttgactgatgaattattattgttttgattgagccaaactatgatgtattttttgttgatatacataagtagttccacttcacaataaaagcgatagtagcacagtagcgcagtacgtagaaagtttctatataatgtttgtgtggcgatagatatgattgtgtagggggtcctagttttagttttatgccgattagatatgattgtgtggtgatagtaaaatagtttctatataatgtgatggtggatatggatgtcgattaaatgtgattgtcggttatcgtgccgttgatatatgtgtgaatgtcagccatcgtgctgttacttttatttgcaggttttggaaacctccc

SEQ ID NO: 61505 - DNA, 671 bp, Zea Mays
gagtgcttctagtatcattccattggccctttccacctgaccattggctcttgggtgtgctactgacgcatacttgatctggatactccgttgttcgcaggaatcaaagaatttagagctggtgaagttggatcccaggtcggttatgatgctatttggtattccaaacctaaatattatgtcttatatgaactccactgtcttagctgaggttaaagaaacaatgggcttgtactctatccatttggtgaacttgtcaatggcgaccaacacgtgagtatagcctccttgagctttcttgaagggtccaatcatgtccagtccccagcatgcaaatggccatgttatatgtatggtctgcagctgttgtgccggtaagtgttgttgttttgacaagaattggcaagcttcacatctctggactaactcggctacattactctttgctgttggccaatagaaaccaaacctgtaaaccttcccaaccagaactctggatgctgcgtgtattctgcactatccggcatggatctcatctaatagctgcttcccagtagccgaggaaatgcacttcatgaggactcctgctgcaccccttctatacagtgtgcccccctatgagggtgtagtgggtcgacaatctcgcgatgcattatgctgccgttttatca

SEQ ID NO: 61506 - DNA, 456 bp, Zea Mays
cttaatgttggtacaagggattaggccatactcctaactcacttaagcttaaattggtgacttagatcaactcggccatacacaacaacatgacctatataataggttacataacctatccaaccaatctaggggcaaacaacccaaccaatagaatcatgatggattgcataatctgtctatcccgacctaacatcaaacaaacttttgacctacatcatgtagtctatctcacctatatctatcttaaccatataccccaactctgatgatatacactaactctaaatcaatgacagcaagacccgataaagagaaggtcaaccccatcaaggaaggataagcaccaactcaagtcttcaaagaccaagctggatcatcagatgaatcaagacccactatgcatgatggagtctgcccttgccaaattttttcttgtactcatcttgatttttc

SEQ ID NO: 61507 - DNA, 687 bp, Zea Mays
cattcgtcaaaccgaatgacatgaccgtgaactcatacagtccatacttggtgataaatgttgtcttcggtatatctgaaggtcggattctgagctgatggtagcctaacctcagatctatctttgagaacacactggctcctctcaactgatcgaaaaaatcttcaattctgggcaggaggtacttgttgttggtagtaacctcattcaaggatctatagtcaatgcacatcctctttgttccatcctttttctccacaaatagcactggggctgcgcaaggcaaggtactcggtctgatgtagcctttctctaacaactcatcaatctacttcttgagttccaccaactctggtccggacactcgataggctctcttcgatataggggcggtgcctggaataagctctatggcaaattcaaccttcctttcaggtggcatacctggtaactcctcgggaaacacatctgggaaatctgatactacactgatagcctctgatggtttaatctcctcaatatgagcggtgacttggtgacaactccctttccttgatccacacaagaccaattccactaacacttcttctcctgatagggacactaacttcattgttctcttgtcacaactaagactggcttgatacttggttagccaattcatccctaggatgacatctatagttg

SEQ ID NO: 61508 - DNA, 355 bp, Zea Mays
cccacacgtagccgacttgaatagcccgatcagagagctcagacgaccgagacgaataccgatggacacatttctaccgggggtagaacgattcattctaccacgacgcagtaactccttccacgagaagccgcttgtaattgcccctccttggtctagaaatggggagggtcagcaacaaccagaggaggaagaaggcggacaaccaagagaacatgagaccacgatactaaacgacttagttgatagagaacacccgatatgtagaatccttagcgacacaacccatagagaccttggaactcttccctctctagcccgtttgtaaacctactacgagcattgatcaacaaga

SEQ ID NO: 61509 - DNA, 546 bp, Zea Mays
ggttccattgtttttgagccttggaagagtctttggaagtcatgggctcctcccaagtgtaaagtgttaagtgttcctttggctccccatccggaataagtgctggactacaaacaggttagaaaagagacgattgcctcatccagatgtttgtccactctgtgattgagtgagagaatctgtgcaacaccttttgatcagctgtgttttagcccaccaattttggttcagttttctggaaccactagggctcggtcaatggactcctgatggtgatgatctctcctttgccgagtggtggaggatagtctctaatcaagttctgaaggacagaaagagaggacttaatagcgctatcattttaggagcatggtgtctttggttacaaaggaacaaggttgtgttcgaggttgagcgaccgagtctcatgaaggtgccacagttcttcaaggatgaattgccctgctcgatgttggctgggaccaaacatcttcaagagttggttgctaggacgtcccctagcgtttaacatgtaatagagttctc

SEQ ID NO: 61510 - DNA, 518 bp, Zea Mays
gggaaatagagggtgcgcaggggaggagagagggatagggctcacctgtgcctggtaaccgtcgagacgagatgcctgctcctgcacgatttggatctggggagcgagaaaagggttatgcgacgacggggtggatatatagaaaagaacgagggatgtggttgtcaaattcgttgcggatcgtgttctagccgagcgagagagactgttgcgcgacgaattgcgtgagacagtataagacggagacagagtttggcgggtggtagacagggttagataaaattagacgaagatagtcggagctggcccgcgggcccaagatgacgaggtggtcatcgaaggggtagacggggatagacgaggatcgccgacgtgagcagcatgtcgttcacgagaagaagcggttcgttgatcttgcgaaaaaggccacgagatttggaacaggttcgacgagaggaataaatatatatattatcgagtttctaggattttgtagtttttgcaaatactaaatttta

SEQ ID NO: 61511 - DNA, 898 bp, Zea Mays
tttccttttgcatttgttggcttgtctatgctaacttggattctttcaccttgtggacttgtcaacatgattgttccgttggcacattgtatcactccatcatagcttttcaaccagtcgcatcgaagaatcacatcaatacagttggatcctaagaccactaggttgactggaaaatctattccttgaatcttaagattaacatggaggcatgagtgtgtgtccttcatgtcacctcccggtgaactaatgtgtaacatcttcttaagagggtgctttggtaagttatgcttttccacgaatgactcagttataaatgaatgcgatgctccagagtcaaataaaactgatgcaggtatggagttaataagaaacataccatacactacgtgggcatcctcaggaattgattccgctgtgacgtgattgacccttcctctactctagttctgcggagtcttgttctacgcagatccacgagcgggggtgttctggtcaaacctctgattgttgctcttctgaggtgtctgccggttgcgccttgggcagttgttagcataatggccaagctcaccgcacttgaaacatccattgggttggactggtgcattgctgcttctgacctgcgtgttcacggcgcctccttgatgattctgttaactaccaccagacctttggttggtctgagagttgttcctctgcttgttcttttgactttgattactcctctgggccttgctgtctagagcgttgcacttgataattatttccaccctgatttctagaccggaattgagaaccttgcgagttgttcgggcaggtgttcctgctagactgaccttggaacttccttttgtggtcgacagttcccttcttttgctttcaaggctaattgcct

SEQ ID NO: 61512 - DNA, 484 bp, Zea Mays
ttgatgtagagcattctttaccccatgttcacacacagaatggacttgctgagtccttaattaaaagaataaaattcattgccatgccacttttacaagacaccaggttacccaccagttgttagggacacgcagtgctgcatgctgcggccttaatccaatatagaccatctgcttataactctgcttccccccaccagttagcgcgtggtcagcaacctgtgatttcccatctacgaaaattcggctgtgttgtatacatgccgatatcaccacccagcgtacatctatgggacctcaccagaagttgggatatatgttagttatgaatctctgtccacaatcgaatatttagagcctagaactggggatctgttcaaagctcgttacactgatggcatcttcgatgaagagcatttcccgacattagggggaggattgtaccttaataaaaaagaatgccgagaaatagagtggactgcca

SEQ ID NO: 61513 - DNA, 845 bp, Zea Mays
tttgaattaaagcaatcaacaattattttcgtaattattctcattgattagtggagaggggaagattagtgctccccctctgcagggggaacgtttctctcacccccgcgagaggacccccgaaggggagccgtggaaccgagggggagcaaccggggcaccccatgcctgacaggagagggggtcgggcacggttggagagagagcctaacgagctacgactcaaccatgatcgtgcatgccaactgagaagcacaggttgttcgcttcggattaaaactagttatttgaattgtagcagttataatttatagagataaaataccgtagaaataataaaatgggtatggattaaagccaagtgaacaggcacacgctcgcaacactatatgcttctacagactctgcgtatgcagcacgtacacaagcgacacatgggactctagtacaccattttcagtctatatctatcataatgttctagtacatagggctcatttggttgatgcttggcctagagcggataggcagctcaatctagcccaagaatccaaaatcggacgtcttagattgttgtctgggccaaataggttttttagtctgtgaactgctcatagtctttattgtaagtcttacgcacaccaaaacatgtagattgtttggcatggctttggcttcccttcaaaagcagcttctctaatattttttaacaaatcgtttggtaaaacggctcctcttagtgcaagagaagagcaagttggggaatgaggagaggagccgctagaagccactgagctagttttttttactccgacttctctctataaaattagctccgacttata

SEQ ID NO: 61514 - DNA, 941 bp, Zea Mays
cttcgtcttgggatcaataatcccctccatgtatggaggaaggagaggatgtggagacttcttgaccactataatgctgttgctgtcctctcactttcacacgacgctacaaaagactgcaccgacatccatcagcgcaaatcaaggaggagcagtgaactgaaatgcatggatacaatacaacaaacaagagagaaaactaaacagaacaaataattcaataccaaaaccaccgagctctgactggtcgttgcctttaatttcttatatatacatacacgtattcaaagatgatgacgatgatgataatgatccatccatacatacatacacagtacgtatatacaatacaatacatgcatgtatccaacaaacagcccatcatccaacacacgaatccaatgcaattatatatgtcctgtatccagcagagccgatcgatctgaatagaatagtttagtgatggcgaaaggcatcgtagctctatgatgatggtgatgatgagttcgtcacccaccaccgtacgctatcatccatgcatgttcttcttcctccttcctcccctctctgcaagcagcaaattaagatggtcgtcagtcgtcactatataagcatctcttgttcctcccctgcgccttcctctctctctttccttttcctcccgtcccatctctctctctctcccccttctacatgacgttgtcgatgctgtagcggcagccggcagtgtatagagctagccatgctggaccacctcgtgtcgtcctacacgcaccgcagtggcggcgaccagcccgcggcgccctcgccctgcgacctcgcgtccgtggacgacgtcccgggcaacggcggccacaagcctggcaaggccgtgaccgcgtccgtgtaccgcgccaagatcgcggggcactcgcgggtggtgacggtgtcgtggtcccgcg

SEQ ID NO: 61515 - DNA, 513 bp, Zea Mays
gacgtgaagcccttaggaaatagatgggtagctaggtggctatttatataggccataaaggctactactactattaataaggatgctatagcaagcacccgaagagtagttaggtctgagaagacgactagaatgagcatgcgtcatgattgtcgcataataattgtctcttgtgcaccaacctgcttctctcacctttattccaataataaaaacttgtgattaatgtgatgtactgctatgttagaaatgccttaccccgtgtcagattggtaagtcttgttagttcgtgctatgtgtttgtcttgtcttgctagctaggtggtattgtaattgttcaaccctctttgccaataaaaattgttgcctgttttgcccataaaaagacccctccaaacaaccttgagtttagcaagtgaaacctcctaaaaaacaaatcctacttgtgttggtattttctagcccccttgagtgttttacctttgaagttacacctgcacagctatagacccc

SEQ ID NO: 61516 - DNA, 274 bp, Zea Mays
gttgtccccctacagtgactgtcgtatgtcatcgtgcttgcccttatctatgaaacgaactcccgccacacgcagaaaccgtctccgcacgccacgcgcctttctccgcccgttgtcgcaacctcggagcatgtcgtgaggataagtccccgcaaactccgtgccgagcgatgcgaggataggccccgtgaactccgcttcgagtgacccgccacgccgcaacctccgatagcgtgcctgccacgatcatcgttgttataaatttctggcctct

SEQ ID NO: 61517 - DNA, 326 bp, Zea Mays
attaaatcgagctccgccccgaaccggtatgctctgcagaccatcggatcgacgatcaacggcccggattcaaagtgccgaagggatatttgcttcttctaatcttgatcgtggcttgcgaatccaacgacccgagatttaaaacactcagatcaattgtcaagcgcccgatccagatcagacggccagggacggatccgggtgaaacattatctagagcgtccaattgaagatctaatggctagccttctttctcctacctgagtccaagctaggcgacggaaggcctgttcttcgcctgcatctccgcccacacccgcttcact

SEQ ID NO: 61518 - DNA, 381 bp, Zea Mays
ctacaagtggtatcagaggcaaggactccattgattgtggattttatcatcccggcgttggacaaaatggctagttacaacaatgtgcacattgggaagccgccacattttgatgggaacaattatgactattgaaaaataagaatgtcaatgcatcttaaagctatgggaggaaagatttggcctattgttagagatggatttcttgtattaaagcaagatgaaccatcactcaatgatcatgagaatattctaactaatgattaagctatgaatgtattctatgatgcattagacataaatgagttcaaccgcatcaaaaatctcacaaccgttcatgagatttggataaagctaatggaaattcatgaaggaaccaca

SEQ ID NO: 61519 - DNA, 552 bp, Zea Mays
aaattctcttcccataattgttaatgtcaatctatgtgtcatatgatttgcctcaacaggccctttaggtgtaattactatcattggttttctcatatttagcaatggtatctcatttgtgttggcataacgagcagacataaatgaatgtgtagcaccagaatcaaataatatggttgcaggaattgcattaatataaaacataccaagtgcgatgtcagcgccatcaggagtagcatctgcgctgacttgattaactctggcaatagagtatcccttgccaggagtttgttgcttgttcttagctggtgtactagaattcctcaccggacaagcattagcatagtgcccaatctgactgcacttgaagcatgtagggctggtcttctgtcctgtaggcctcgtcggggtgccaatgggagcagcctgacgagtgggaggtgtccgtggtgacccctgtggagcgtactgagctgggcgtggtcctcctcctggactagtaggtgtaccctatagtggaacatagcgaggacgaacactgctgctaccctg

SEQ ID NO: 61520 - DNA, 603 bp, Zea Mays
ctcgcccgctactggcgttcagggatccgtggtgagccacggtgcttcgtgtggattaccggtggatcgccgtagcttgattggggggaatcgaccctgtggcgctggaatttgtcactgtgccagtttgttcgtcgagccgcgtgggtggatcggagtattcctaggatcacggtgagcaacctttttcctgcatcgcatggttatcctctacgcattaccgcgattagttcggagttcgagcaggggggtggcgtttgggcgatgccggccatgccgccgccgtggacgctctgagccgccgtgtgtgtgctcgggtgagagaagacatcgtgggaaccgttggatcattgttggacggtcctgattagatccatagtgtatcctttcgtacgtttattctgggccatcgatctgtgattgtgcggtccagatcaaccttgtagttagtgaatcgcaggattggatctcggacgatgatcccggatccaagggtctaggttgcgtacatgtataggcgctggcagatctaatcatggccctcggagtaagatccaacggccagaaaacatccataccccttcggatagcgcaattgtaaaa

SEQ ID NO: 61521 - DNA, 436 bp, Zea Mays
taatccgggtcagaatctctctgtccatgatgatggcggaaatcgagaacaattcaacgtgttcttggcgatctagggcagtctagttcaattaaacatgtctacgagtagcaggggacttaatggaggctaaaacaagaagcaaggatgcttgaactaacctgtaggcgtctggccacgacgaggtgttcacgggtgcagaaaactgatttgggggaagaaagaaattggagctctctagtggctaatcgaaggcagtagcagattctttggcttcgtgatgacttaacggagctaggggtgtgctcaatttatagtatcccagagcggtggctcccaatttggtcatggcgtgctggcggccggagagagggaagagcactggcgcaatagctgcgtatctttcactgtggcaggattaccagcgacgagccag

SEQ ID NO: 61522 - DNA, 342 bp, Zea Mays
tcttgaccgagttcttttcctcacgtccttatcttctggacacgaaaaaacaggggcgaactggtcctcagctccgtcatatcgccgtcacgttagcgggactggactggggcagcagccacccctacccgggtattgcttgcagcggcagcgaatttcgggcacagaggcgggggagcagctagcgagtttaatactactccccgtcatccctcctccatctgctgcgaattttggccatgccccggaacgcccgcgaaaaagtacgacggggaaagcctgcgaccgcgggtactgcgtctcaactctcaacgagcacccacggcgtggctccggcggcgc

SEQ ID NO: 61523 - DNA, 949 bp, Zea Mays
atgataccaaatgttgtaggcttgcatgttttcacttctatccaaaaggtaatcacaactatatgtatgcttacttacgggggtgctgtggaccggctagatgagtaccttcacatgggtcaaaacaaaattctagagactatgggtgaatttactaggatcattgtggctttgtatggctcaatgtacattaggattccaaattctcaagatattattgttttgttggcaaaggtgaatgagagaggatttatcggtatgattggcattatagattacatgcactaggaatgagaaaagtgtccaactgctttgcagggctagtatagaggccactacaagaagctaactatcattctagaggcggtagctagctacaatatttagatttggcacgctttctttgggatgccgagatctagcattgatataaacatgcttcatcgctcaccagtgtttgatagcctggctagagggattggtccacaatttagctataaagtcaatggcaagaattacagcatgggattctatcttgttggtgagatatatcctccatgagaaactctcaaaggccccatatctagcccacttagaaaaacacaaatacttcactacaaaacaccaggagtatcgaaaggatgtagaacgtgcctctagagtgattcatgctaagtatcaaataataaagaaacatgctcgccaatggaacccattggatcttaagaatatggttgattgcattgttatcttgcacaacatgagcgttgagtaggagcaagggatggatcaactaagaattgaagactatgataacgggacacatccatgtttgaatcagaacctcaacaacctagatgtccagtagctaatttaaaatcacagaagaatacaaagtagagattaccatttcctattcaaggatgacccgatcgagcacatatggaat

SEQ ID NO: 61524 - DNA, 1563 bp, Zea Mays
agtcacttggcgctctatctcgtccttcatggccagtgggtaacgatagggcctgatatgcactggggtagctcctggcaccaagggcatagtgtgatcacaaaaccttgaaggaggcaagccgactggtggagcaaatatctctacaaattcagtcaacaatgacaccaacagaggaggcaacggtaactcttcaaaagaaggaatgaactgatccactgctgttacctccacaacttaacctagcagaagaacaactgataacccatgtagtagcgctaaagaattatggtacgagatcaccatccaattctgtaaccaatgaatcctcatgggactatgcatggccaaccagtccattcccacgatcatgtcataagaggatagatccaatatgcgaaaattagtgagaaagtcacactattgaacagacctagcagcattcaacaattgttgagagcaacgaatgcgaccaccatcggccacctgcaccagaaccggaggtgataaggaagacaaaccagttaactgagaggccactgtggctgataaaaatgagtgcgaactgcccaaatccactaagattagcacttcaactccttgaatgacgcccttaaacttcatggtattgactgaattcacccctttagctgctacaatagaaacagctaagaacaactgctcctccgtgacagtttcagtggtcagtaccggagttgaatcctcatcttccaactggtaaagatcccataactcttgcattgcatgcaactgtactgcctgaggacattgatgatctggtgaccacttttcagtgcaccggtgacataaaccacgggcacaccgataagcacgcagggtcgccaccttgtcatccatcacgcgagggcattgttgctctgtccggtgactgacatcgtccggcatcaccagcttatccccccttggcggtagaggaagaggtaatggcccctttaatggtggtctagccacccacgccaagtctggccaacgagcatccaagcgcttagccggtgtagtcacctcctcctgcaacaatgccaagacacaagcagtacccagcgacgagggacgttgcacaataacaacatcacgaatatcatctctaagcccatgcacgaaacgttggacaaaatacagcggatcaacatgatgcccatatgacaccaaattatccactagagcagaaaattgatctacatattccttaacagccattgtctgactgatacgaaataaacgatgaataaacacctcatgttcatctttgccgaacctccccatcaactgactacaaagccatgcccacgggaaggactgaaactagtcatccattgaggataaccaatgagccgctgaccccacaaaatgcatagaggaaaccttcacccacacaggacgttccactacatacaactcaaaataatcatgactacgcctaatccacaacttgggattatctccatcaaacactagaaaattcagtttcggcagacgacctaaatccatagtacttgctcgtaacatcgcctcaacccctgg

SEQ ID NO: 61525 - DNA, 286 bp, Zea Mays
ttgaagaataatcatccaaaatttgtcaaaccaattttgctagaccttgtgaaatataaactatcaggcaaaaatcataaaacccacagttcatgtaatgttttacagagttttgaattaaataagaaaactgcccaaagttattactaaagggaaaaatagaaatgttagaccagggttgagaaaaatagtggagaccctaacctagtggttatcctgtttaaaattaataaacaccccagtatacaaggttaaggaggatttattcactaaagcttgtttatgc

SEQ ID NO: 61526 - DNA, 2287 bp, Zea Mays
atttaaaatactaacacgccgagctcgaatgcagcatactcctcctcctccctcgagcttcgttcggtcgctcccactgcttgtccgtcgtcgcagcgccctatatcgctccaaatcgtcggctagccggccaacgccaccgagaagctgacccgagtgtccgctcgtccggtgaactagtaagccaactcattttaccgattaatcacactagttgaccaataaatcaggataggtcgcgactaaccgtactgtagacgcactgcccttcgcctaggtgcaccaccggttatcaccggttaatcactttagtgatgtggctacctgatggagaatgctgattaattggcctgatatgttgataagccagtagtcaagtaggagctagggttagaggattttccccttttcaacatgaaatctttttaaatcgccactactaattgcaatatagacttatgatacttgtaatagtagttcatgttattgctatttttggggatgtcggatcagatcaatccggattgggaacacaaggacaacatatatcctagatttacgtgtaagtattgcaagaaagagtcgaagaagcggtgctacacattttaaacaacaccatgcatcacgtgggggaaaagtgcagggttgtagcaacgttctgccggacatttctgattacttttggtggtacattgacaagggccaagataaaaggaaagcaagaatagtggtggaggtatggaggttggcattggtgggttcatctcgtggttttgatggtgacgacaacgacgagttgtaggccgcaatgcgtgtttcgttgtcgtcctctcaaaagcactacacggtattacccgtagtgcgttgtcggtaccaaacatcgacataacctccttttcccatgcgtgcttaccaactaatcatgtgggagtatgttgggagacgcctaggaacgagtccagaccccgccccctatatatatgaagtggtacggctgtggtggatacataccccctcggatcctcatggacactaaaacatatcatgggctgcctgataggtttcctgctgagtcgccatgtgggatgaactagtaggatgtagccaactcaggtgagcccgatccaagctaatgaagaccgacgtccgagttaagcgtcgttgaagcccggatgtgtcggatgatgtagttgcaaacacctgaaaggcttggcattcgacgataactcgggcggctaggcgatgaagactccggatatgtagggacacaatctgcgacaaagaaggagataagcaagtagatagtaatcgcaacttgtaacgggataactctctctggtcgcgtatatgaggccgagggggaccccctaccattccatctcatcacccaccactccagctcatcctcacccacaaccctgagcttgtaatcctcgtacttcggagatcaatatcaaacccaacaggaagtagggtattacgcaattctaagcggcccaaacatgtataaatccgtgagtgatcccagcgtgcctctgcacgaaccatcgagtcgcgatcaacgacgccatcctacccaaaagcatcacgtaggtaacctcgtggtgcgtggttgggtcacaaacgccgacaacgatcgattgagagaatcacatatccaatcaaacaaatctacctacattactttatattatcatgccttaggagtatacgtagtgtagccctagttgtagtttcccaatctcaatcttcacctagcttcgactctgcatcgtctcgaggtgtcttgtgtggcttaccgatcccaaaataaccctagatctttcctccctaaagggatccatcctgaggggcaagatctaggttctagaggagctcatccctatcttcatataaaattatttgcgcacgcggatggtccggtggccaactgcggacgatctggtgacttgtcgtcgacggttcgccgcctcacagaagggttccccaatgtcctcgcccccgcgagcgggatctatgaatagttggtgtttggcccaaaaaaggtgttaagattttttggaattaaaagcatcgatagaaattgatttagcatttacctcattacactctaaattacaaaaggtgaatgtcatataattaggtttatctttatctgttgccctatttggcataacttattttacaatttgttcgtaggtttaaacaaatgttgtatcaaacagtaggcttttgcatcagcttgtcagttcaacttcttcttagaatgaactaaaaataggcaata

SEQ ID NO: 61527 - DNA, 474 bp, Zea Mays
ctaaaaatggattttctatgcattttacaagtttctatatttgtttttgtattaaaaacgaatttctataattaattctctgtttttaatcatctcaggactgggcctcatttttcagaaagtccaggggcccgcgcgcataaatgcctagactcagtgagtagtattacctggacggcgggttgattacttaagactgtggggtctctttagtaaagttgacccgcaaaggggtatccttagatgtgggccattggatctgaaatatgcggtcccgattagatccagagcgtgatggtcggcgatctgtgcggaccgccgatgacgcaatggacggctctgatttaaaaagaccagatctatctacgcccgttggatctagatcaacggcgctggctaatccacccaaccggtatccctttgatctaatcgcaaccgtcgaactatggatcaacggtcacaaccctttctctc

SEQ ID NO: 61528 - DNA, 366 bp, Zea Mays
ggcagggttgcgtaccacgtgaatgcggtaccactcaaagataacaagaataaacaaacatggtaggcttccatatcaaccaattctcctaggtatgctaagaactgcttatgtgctcatgtatgtttttcccgccttcaccgaaaactttggagaagtctaatatcctagtcccttgcggatatggcacgacgtcaaatcagtgactttaaggtttccgatacaactgacctatgcctaacacactaacgtcgagtttgtctctgaacaacccgactaccttgtccctaattttttctaccacgtctggcgaccatccattaagtttgtgggtggaaatctcaggttgcctgtcatcattctgtc

SEQ ID NO: 61529 - DNA, 479 bp, Zea Mays
atatgagctgatgagacggacactgctacccaggatgggatatagagaggccactactcatattctactatggctacttggtgccttggtctcacattcagagtttgatgtggttgacttccttatttgtgagatcgaggatacaatattggatggtccccatgctcgccgtcagctaccatatgcgcattatctctttcacatcttcgcgcagctgatcaggcctcctcagttccaaggcaccctcgaggcctctctcctctagtttggtttgtatcgtctagccccagaggacccagtcccagtgccatatccagtgacagatgttcaggctgaggatgaggtgttcagatagtttgagacccagggtacagttgctgacacctcttcagaggatgatgacgaccttggcatcccgccaccgcctcctgtgccacctctctcacataatcacgaggcgggtagttctagtgctgctc

SEQ ID NO: 61530 - DNA, 658 bp, Zea Mays
cagttctcaacgtccttgaacgcagagcggatgacgtgcagggtcttggacacggcctccgcggcggccaccagcgccttgcctcggtcccttaaaatagtctagatggaggtgaataaaccatatctaaaaaaattcgaagacaaactttaaaattttgtgagaataatctgttccaccggcaaggccaattcaatcgctacgaaggactcgattaagctgcactacaccggttgaactatgaaagtgaattaaagctcgaatctggtaccaacaatcacaatgaaagtgttaaataaactaaatttgtgaaacttaaaatataaaatgaataaagatggatcacaatcataaaagcacactaaacacactatttttaccgaatttcggtcacatcacaaagttgtcctactcctcattgaggtgctcacagagggccgggtctttctcaccccgttcctccgtgccgacctcataggtcaaggcgatcccttactcaagtgctcgccaagagcgggtgatataaaccgttcttgggtcgtccacaacttttggagacttataaggtaaagttacaattcgtcaaggaaccaaacgttccaagaacaataaatttgcaaacaagaacaaccgcacaaactcaagagagagattgaag

SEQ ID NO: 61531 - DNA, 942 bp, Zea Mays
ggcgccgttccatggcatcatcccaagccatcgagcctacccccttgggcggatcccctccccgtcacattcggagatcccgccaacttctgcatcgaacgacagttgttcgaggtagtggacttcccgggatgctacaatgccatccttgggaggtcgtgctacactaagttcatggttgttcccaactacaggtacctgaagttgaagatgtcgaggccacgcgggatcatcacaactaccgcttcattcaagatggcgtacgcctgtgaacttgccagctctgagctggtcctgacgcttgtcaagtcctagggaggcgatagtctaggcaccgccaacgcgactatgaccggccttgatgttgccagacccaaggagcaaggaggaggccaagagatgactcaggcatcgctgacgtccctaaacacgtgagggtcagtggatagagaggcgcgggtgcaaagagcaagggcatcctagcaatagagctaggtaaaatgctaccccacataggcaaggcgcagtaatgtacatccgtcccaaaaaatcaatgaaaagaagagaatgcacattgaaactattgtctacactgtgtacacaccgagggacatagaaaaatagaaagcaagcgtgcttatacatataaatactccacatagaggcacagtacaaaaattctaggagtcatcatctaaacagaggaagatgggccaccagcgagaggctccctggtcagggggtcgatcagaagggacctgacgtcgatccaactcgcaatcgactgggcgaggggacagacttgatcctcgttggcatccaactcctcgtcgcttcggcagatagcaacggggaattccctattggggaatggctccccatcctcgtccccgtggggagaaaaatccccgtccccgcgaacgctcgtgggggagctttttc

SEQ ID NO: 61532 - DNA, 801 bp, Zea Mays
ctgatgtagcctttctctaacaactcatcaatctgcttcttgagttccaccaactctggtccggacacttgataggctctcttggaaaaaagggcggtgcctgggataagctctatggaaaattcagctttgctttcaggtggcatgcccggtaactcttcagggaatacatcgggaaattctgacacaatactaattgcctcaatcggattggactccatatcatctactgataaatggtgacaggctccttcctctagttcaggtaagtacagtttggttactacttcctttccggatggggacaacaacttgactgtcctcttgtcacaactgacaatgacttgatttttgtgtagccaattcatccctaggatgacatctaacccttgagttcccattactactaggctagagggaagtctatcccccttatttcaatccttagattcacacaaatcctatcggactgaacttttcccccaactgaattaactcttaaaggcgggatcattggttctatggggatgttatgtgattctacccaagatatagaaacaaaagaatgtgtggcaccagtatcaaatagtacttttgctgggtaggattcgactggaaacatacctactgccacgtcctgagcatcctggattgcttcggcctccaggtggttcacctttccacggttgtaggcctgaccacggactcctggtgcttgctgtggtgctccttgtcttgctgggacattgactgctggcggctgatgagctgctttcttgggacagttcttcgcccagtgat

SEQ ID NO: 61533 - DNA, 430 bp, Zea Mays
aggaaaaaaatccaggcacactttgattgtggtcaagcacaaaagtaggtggagagtgagaccatgaccacaagtagaactgaagaataatgttcttttctagttttgcacgtgccggatattgaacaaatgaaaaatccagcatttacaatttgtggagcatgacataaattcaggttgcacgactgctgccattaaaaatgaatgtatactatttataccatttacaaattgtgatttgaaaaccttctgcaacataaatagtggaccagcagggtaaatatagtcgactcacacaacttgtttagtttaagtacaaactttgcttacacaaaacaaacagccgaaggtaaaatcttacacaccctagttgcaaagtgagcaggattagcagacaccatccgcagtcgagtaaagctttcttttgttc

SEQ ID NO: 61534 - DNA, 578 bp, Zea Mays
tctccggcaataccctcgggggctgggccgtggcctgcgcttcccacccaagccgaatcatccccgacgacaccctcgggggctgggtaagtgtcaacaccatccttgaggaccaagttctctgcagtagccgcctctaaggctgaaggtccctcagttacttccatgggaacaagacgatccaagtcagttttcctgaccctcgagaccgcgctccaaggtcgatgaggcgtgggacgctgctcgggatgaccccaacccggtgtcgagcacatcagcacaaacatccgtcgcaccaccatccgctggctctgataacagatcctctggaaccatatcttcaagagtctgatcaaagttcaccagggacaattcttgtagaccaatgagggcggacagagcaggagaaggaactccactactttccccactggcgacatattgccgactgttcttccgagtcaaagggacctcatcttcttcctccccgtcgttttcatcagcaacacagacaacaccccaattgggatcaacggcagatggagcacacccattggggtcagcgtcagtaaattcag

SEQ ID NO: 61535 - DNA, 409 bp, Zea Mays
tgattcttggaggaagaggtatgagaatgaccagaaataagagatctaggcaagatcaacatccgatacttgagaacgggttatagcggataaccagataacgaggcagaatcattaagggatctagagattcggatgataaagccacgacatgattcgcaagggaactgattaccagattcagacaaaggagaggtaggaaaacaagatctgctaggatgatcaacagaaatgctatgaagttttaggggcaaggatttatggaaagaaacatagcttccatatggtttgcgcaactagacacattttttttgacacgtcaagtgcacaaggagacttgggttgatctagcggtcaagctatgggtgtctataagttgtgcaggtgcaatttcaagtgtaaaacacac

SEQ ID NO: 61536 - DNA, 524 bp, Zea Mays
cccaagggaagtcctaattatgtgaaggaagggagccaatttgaaaattcaatgtgctagctagaatcttcatcttaccagcactcacaatagggataatgttggattttcaatagtttacttttaagattttgaccatctcataagtatgcaacatagcttttcaaaataaaagctacaattgactggcctccattattatcaaagtgtcatcagcatattgaaggataaggaagtccatcaaggatatcatcagcactagacatgttagaagacctttatttttgttgattcacaattgattgaactaagtctgatgcaataacaaaaagtagaggtgacagaggatccccttgcagtactccacgctgaaagggaaacacaacaggaattcaggtaattcacgttggccaagaactggggaattagccttatcacgatgggaattgctaattctcattggtatatggttaattctcgttggttctaggccatttctacctgttttggtgattaagtgctca

SEQ ID NO: 61537 - DNA, 471 bp, Zea Mays
aaaagatataggacaacatttgtggacctattcagcccatgtttggcccattcaggaacttcatggtactaattgatgcccccaatagatggagccatgtggacttgttgtccataaggtaccatgcctttttaagcttattgcctaaatattcaggttaacaacaagtttctctggtaaccacataaaatccatacagatggacaatgctggtgagtttagttcaaaagtgtttgaaaattattgcttatccatagacattaagttagatcgatcagtatcatccactcacaaaatggtctagttgaatccttgatcaaaaggatcaagtggagttctcacccattgttgtagaattgtaggctagcaaccacctattagggccacatagtgttgcatgttgcaacatttatctaactcaagcaattgtgtatcattacaaatctccctcacacctagtgcgtcgaaaag

SEQ ID NO: 61538 - DNA, 641 bp, Zea Mays
attaatacaaaattattgcaactggaatgggttaaaaaggagtaaaaatggaatttctatgaattaaataagttctggatatatttttatacataaaaaccatttcccaaattatttttctgaatttcctaagcttctggactgggcacactaatacagagaaggtcggggtttaacctgtaaaatctaccagacacagcctactcccgcggggacggcgggttagttttctggaatcctgggggtctcttttgcaaaatgggcaaaccaaggggtacgggacgatctacaccgctcgattcagtttgaacgcgcaagattaggtgagtgggattatgaatcgatacgcagcatcgaccataggatttagatcttatggttgagattagatctcggctcaccgaaccggtatcaaccgagggcccttagattaaaatcgaaccgctagagtttttaagtagtgcagatcacgcgatagccgctcgatcaaggatctatggtccaaactggattgcgtgaagggttctaatctgagcagcccattccctaatccacggccgtgacgctgtcatccctcacccgagcacacgcagggcggagcttcctcacggcggcgccatgccccagagctccggcgagca

SEQ ID NO: 61539 - DNA, 992 bp, Zea Mays
aaagaagtttcgaccgttagtgacaaataagttcttcatgttctctggccaaatcaacgaaaaagcgtgattgggtattgaatccccttgcttcttttatgtttggtcatgattttaggtcacgaatcgtgcaaatgaagatagaggggatctagggttatagtgattgttgtcggttcattatagttagcaagatttctaactccatttgattcatgcatcgaagaaacattctcgaacgcttcctacaaaatcccatcacccactgggatcgccgcttccaatctgactaggtttatggtttaggctccctcgccatcatccatatccatttatgggatctagaagatgcctcggttcaataaggccaacttccattccctaatccctccatccccaatgccactagccctcatccctagggtcattgcacctccaccaggcctatgtgtagataaattttgagcaatatctataaaagattgagctactaggggatgcttaggagcctgcatattttctttgaccgccatatatttcccgatggtagcttgaatatggaacagggatctaagttagcgcacaaaccgaattcttttatatcagatagttttgtgaaagttttgtatttttactagtgtcatcaaaatcaatcatccttaatttacttgcatgtagcaagtgaatcctgagctagtgaggatcatgaaggccattgcgtccctacttgatatcctagaagtcgacgttgcccacatacgacatcttgttatcgaggacttggatataatgcgcatttcgagggtctaaagaaacgaattgcgcattgttggacattgactctctcaccactaacctagatcacctagcaattaagtgttgagccacaataggaatcaaggagagtgaagtggaaggagtcgatcccgatgatattgtgccaaatgattgggaatcgaggactccatgaattgtgattccggtaactcata

SEQ ID NO: 61540 - DNA, 720 bp, Zea Mays
gtcaagaaaacaacatgacaaaatcaagttagactgtaaaaactagtgttgcatagagttcaagttcaatatcaatacatgatataaatttaaagaagaaaaccagatgaacaaaagaagcaaacatacttcttttttcttgctgaccgaatcgaagccatgcgtaccttgtcgaatgttcatcttctcaaagggtaggggcgccaagaaaggggcatggtcaggaaatgtctctagctaagagccagggttcactgtccgctggggacaagtcacatcatcgcaacgggcaagattgggcctgtcgagcgggccagcatcgcgacaacgatgagtgggtgagtgcactaggaaggggcaggggtggtggcattgcacattggtgagggagaggcagcaggtggtggtgggcgacatcaggaacgaggcatcaaggcaaactggcttaagcggcgtcgggaagaatggtgccaaactgatagttgagaggactagaccgaggagtacgatagttaggaggacatgtcgatccgatgaggaggctcagaacagggttattttcgccacccaaaacttcacttttttcattacataagaataaatacacattaggtataactggttataaaaatttgaggggtgacattgctcattttgcgcccccatgggtgcgcccctaggtccacctaaaactccaggagccatccacactaaaataat

SEQ ID NO: 61541 - DNA, 500 bp, Zea Mays
actatatccatgtatgcatcactatatccatgtatgcctcactatgtccatgtatgcctagatgtgtaatgttccctggtccgtcctcttgaaataaagcatggttcctttcttatgtcatgttttcaacactctgtaaaagaataacgatagtattaactgcactcatcaagcaaataacagcacaactccaaccacacatttattcatgaagaaacaaactgcactcaaattttcacacttgcatacaaatgaagttcaacaatcatacaaaagtttaaagtgaatacataaaagtggagaagctgctgaagtttctgactcgttagaaaactcacaacaattcattgtttagggtttaggatacctctacataatttgagctagctttagtgcatagtatgccctaagtatgtgattgcatttgtccaaatccactgccatgatcctctcttcttctttggatcgttcacactttgccaccctctcctctctctttg

SEQ ID NO: 61542 - DNA, 511 bp, Zea Mays
ccgattccggccggtaggctataaattgaccacggacgctgcttcttctccacatcccgtgccgcagcaactaagcacttgactcgagctcaccggaaaacccacgtaattcccaaatctccctctcctctgttcttgctccgccgcgaagaaaccccccgtggccagccatccccgggtgagtacctattcattgttccatgtttttgcttgctgttagcctcctattgcccccagtatcaatcaatcgaactacgaccgaagcctttcaccagaacgtatgcttgctctgaagagcaccgccgcagaccgcctgcacgtcgacccgctactctgtctgaccccttcgacctctcgccctttgttacggtgtcctggtgagtcacttatgcttaccatgccttcaatttgaactctaccgcgttgtcgtgttcggaacaggctcgtcggagtcttggttccgccattcccgtggtcagagggatttccggtgtgtgatcgtttaatcaat

SEQ ID NO: 61543 - DNA, 400 bp, Zea Mays
tttcctttctcgctccgacgtcaccgtcgtgcagcgctgccacatgcgcgtggacgatcggccgcgagatctccttccccgctcaggcgaagctccctttccttttccccgcgctccctttccatcttcgtatcaattctagctaattcctttccttcccttcccatcttctagtctataagtactgccccgagccccaccacagattccatgcctcggtgctcgccctcgtgctctcctgcgccttgcccacgtctcgtcattgctgtcgtgccatcaccgccgtggatgtgcaccctcggagcctccttgtttgttttgaggcaatggacatgatcccttgagctcgccgtagcttctctggccttccccgagctcacttcgtccgacgttcgacctc

SEQ ID NO: 61544 - DNA, 392 bp, Zea Mays
tgacggctgtaaggccacgtcgccggcgcaaatgaccgagggacagcgcggccacaatgtcctggacctatccgcggcgtgatcttttcaccggcgagctcaatccacagacctatagcacgaatcgtggcgatcagcaacaatcacagcggagggtcaccgacggcgagattcatggaatctgttgatatttgtgtgcactgtaccattgcgatttttcttcagaacaactgacaaagcatgtttggggtcaatttgctccatattttatgtggtgacccaaccatcactctgcatcaaagttgaagcttaataaaccagctttaactttgttacattgtgtacccacaaaaagtcacaggatcttactcaaaatcgagccctaagttcac

SEQ ID NO: 61545 - DNA, 577 bp, Zea Mays
gcagtccaactacccgcgcataaaatgagtcatgccacgtccctcccatccattaacccggcatgcatccaccagaggattgttgagagagagagagagccggtcggaacccgttgagaccgagaaggcgggtcgtcgtccccatcatcgtccgtcgcgctcggcacaattggagccttgtgtgcggtcaggaggctccgcccgagttctcggattgcgttggtggcgataactaggataggagtgtgatcgagacacatccaatttaccaccaccgtcacaaatccgcggtgcgccgtgggctgaccaaggcactgcttgaatcgttgtaaggaccctctccccaaattcgccaccttctcaatttcattttgcacctagtgtatttagtgatcgtgtaccgtggagcgccgcaggcattccagccatggcgggccgccgtggcacctctgtgtcatcgccggagtttaaccgggggggaggaagatgcatggtagcggttgagatctggaagaacgaatgtgattagatcttaggatacctctttgcgacattaaatcaggggcgtaagttcggt

SEQ ID NO: 61546 - DNA, 335 bp, Zea Mays
cccggtagaagtcctcaatcactgctgcctcagtgacctcggggatacgatttctcatggtctgaaacctcttgaggtacgaccgaagtgtgtttcatcgccacggtgcctgatggatttgaggtcccacggctacgccggcttgtcagagagggactggaagttggcaatgaagtgccgactgaagtcactctaatcatcgatgcagtgtcgtggcagatgtagtcactgcaatgcatcttgcccgaggacgatgggcaaatatgcggtcatcacgtcttcagtcgccccggcggcccgggcggcggtcgtatagacggccaaccagcctcctg

SEQ ID NO: 61547 - DNA, 375 bp, Zea Mays
ctgagtaggggggtgaacttatctactctgcgagtcttagggatgaagagtcatgacttccacatatggattgaacgaattcttccggcgatggtttgaggctatgtccctgagcatgtccggctagcgcttgcagagttgagctatttcttccaccagctttgtgcaaaagagttagctcggaccgtgattgcagacttggaaaggatggcacccgtgttactatgtaagctggagaagatctttccactcggcttcttcaatccgatgcagcatttgattcttcatctcccgtatgaggcatgaatgggggggcccgtgtagggacgttggtgctatccaatcgagagatgtctaaagactgcccgaaagaaa

SEQ ID NO: 61548 - DNA, 742 bp, Zea Mays
tggtcaccctaagttaagtaagcgtgagcatgtcacaccgccttaagtcatcgccgacttaagtcgattgctccgttagtagggtatagtggtcaccctgagttaagtgagcgtgagcatgtcacatcgccttaagtcatcgccgacttaagtcgattgctctgttagtagggtatagtggtcaccctgagttaagtaagcgtgagcatgtcacaccgccttaagtcatcgccgacttaagttgattgctccgttaatagggtatagtggtcaccctgagttaagtaagcgtgagcatgtcacaccgacttaagtcatcgtcgacttaagtcgattgctccgttagtagggtatagtggtcaccctgagtcgagtgagcatgtagtttgacaataaacggttcgagtgcctttgagaatgaagtctttttattgatggtgtattttccaattacagaatacaatgtcgtcccaatagcttttgaaatctagctaggggtaaaacttcctgagatgctctatattccatgggttccatatttccgtgccatccatttgagtaagacgatatgatccaggtcgagtgacttctgctactatgaatggtccttcccatagtggtgacaatttgttccgtccctcccccgttagaattcggcgaaggacaagatctcccactgcgaaggatcgatgtcgtatggccttatcatgatagcgcctcagagtttgctggtacctggctg

SEQ ID NO: 61549 - DNA, 682 bp, Zea Mays
taacgcactatctgcagcctttgggagccgaaaaaagaagaggctaaatagagtttttgatgctattgggttcatgtaccctgactaccgctacccgtcatggggtcagaaaagaaagagtgcaacttccgggaaggatgatgcttcagctgctccaagcaaacccgcgtcgaagaggaaaaaggtgaaggttcttactcacagaccgctatattgaaccggccacagtgcctgaatttggcggtgagacctcttcggctactgaagccaaagaacctgcgcttacgcagaggattaaagagctggctgcaaagccaaaggcatcctcggtcaaattagttgagccgaaggccgataatattgaagagatagtggtcgaaggaacaaatatattagaagttacaagcccttcggcagaagtgacagtgccgaaggcacaaaaaggtcttacaacaacccctaagaggaaaagaatggtcaatgtactagatgcgctagagacaataaagacaaactctactccaaggaaaattgtcgaagctccaaagacgcagtctgagacaagactaaccgaagccgaagctgcaaagagccaggtcgagaccgaagctgggccttcagagcccaccaaggagaaatccttggaaatcggagaaaaagaaacagaaaaagaagctacaaa

SEQ ID NO: 61550 - DNA, 592 bp, Zea Mays
ttcctcaaccccgggcagaacatgggtacggtagccatgatgctccgatcgatccccgagccaaacaagcccgagcgaaatgtgatgtaccacaacctcgacaacttagtagagagagccacggtacaacaagctgaggcggatcaacagcatcgtgccggcacagagagccgtggcacacacacgacctcgtctagaagcaggggagcataggcctcctaatctacttcgatgtgtgtccacataaaccatcgcatcggagatattcgcgacgctaggcacatccttgacaataggcgataggagcaaggagaggtcgagcaaccacgtgaaagaagatgcacatgcagccccagcccgcctggggtgggaccacacgccttcaggcgagagatccgaaagggacagtttcccccgaaggtacacacgccagccaacgtcaccaagtacgatggctccacaacccctgtcatatggctggaagactactggctcgcgtgccgcatggcgggaatcaaggatggccacttggtcatccagtttcttcctgtccatcttttggaagggcaagggcttggctcgagcacctacc

SEQ ID NO: 61551 - DNA, 673 bp, Zea Mays
tttttcccctttgataaacagagcccaccacgtgcttgatcaaatgccacaaccagctttctagacccaaatccactccatcttctcccaattgctcatgtgatcaacccttaactcatacattcatgttttacagctttggttgaacatttaccatgtgtttcatatagtataccacttcatacccttaaaagtgtttcatgccataagtctcaaccttaatccttgccctaataatattttgcctagcagcccttctttccacctacatatggttatatccataatcacccttgtcaaactcacattcatgtgactcaatatctctcatatatctcatatttctctgtataccaatctccatctcacaccttgtgccacaatgtcaaaaccttgtaacttgtgtgtgtgtgtgtcttagttcacatttcatgtctatatgatgatgtgactaactcgtgctcacctcttctgtcatttcagtgtgacgacatgcttgctcatgtgactcttcccctgcttggcctttctcgagagatgtgtcccagatagctagttcttccattctctattcttatctcttgctttgctacactcgcttatctactctgattcttgtgcagcgtgtcagtgatcagtgggcaatttctatggtcagtatggtgaggaccaa

SEQ ID NO: 61552 - DNA, 840 bp, Zea Mays
aactgaatgaaggacgccatggtacagtatctgagaggatcaggacgccagctcaactcgccgccgacgatccccaccgtgattcgtgccgccgccgtcctgattcgtgcccggtgaggaacggataacgccggggatggataaatcatacgtggcgccatctcccgagtccagccggagttcttcaccggtggccaccatgaccagtaaattttgccgcggtggcactcatgtcgtgatctccctcactgtgtctcctaccgatgtggtcaacatgcgctcgcgatgctatccgtggccatgaggtgatcacccgaccgccgcggctataaatagccctgtgattcccgacgaggcacgaccatcacacacaccgtgggttgaatcgaagccaaattcacgctgtctctgctccctcctctcaaattgattgtgcgcagtaaaactagaacctcttgcgaccgtgtagccccaagctccgtcctcaattccacccgagcacgccgcgacgccattttcccccaaatccgattgccgcgccaccgagaaccgctcacccgtgaccagcccgctctggtaagacgctgtccaattcaagtattgttttcatggctctgcatgctagtgaagcttaccgtggcacccgtttgctcaattcggccatgatttggcgggaacgcgtgctcatgaactcggtttccgccctgatcatgggcagacggttcccagtggggttcatgtcaaattaatggatgttcctagatcgtcctaggtcggtgaagcctccccgatagttagccttatcagtcgtcgccggccatggccggtacgggccgcgtc

SEQ ID NO: 61553 - DNA, 316 bp, Zea Mays
gagaagaagcttgatgaagttactgaaaacttcaacgtcgagcaatcaaaatgtgagatattcgacacagaacggttgagggtttagaaaatgttgagaagcttcacaggcaacggaggagtgctataatgttgctatgcaatgctcaaacaagttgaaaaatgcttttgttagggttggtgcattctcgactgagcaaaatttcatttttggtgatctcgagggtgtaatcaagtggattgagggtgaagtggaaacatttgacgaagtcctaactggcaggggagatttttatgcatgcgtaggggctcggggg

SEQ ID NO: 61554 - DNA, 504 bp, Zea Mays
atcacactgacgatatttacacgagcaggaccccattcttcctcagcaagtgcttgattagctgacagtcgatcaagcaacatgtgatggctctgtccggttgcgaggcaaaatatatcgccgtcacttttgcctctactcagattctttggctggctcaactactaggtaatctctttggtggagacgctaaagcggtggagcttagggtagacaataagtttgtcttgacctaggtgtcacacgatacttatgtaggagaatgatagactatgagtcttacacttatgtgggcagtaattggcacatataacagcacattatcgcttacttttctttagcacctatattagcatcctcgttgacttgagcatttcccatgtacttaaatgtttcttaaaaaaataaacaaacctcccttgacgccctaaattaataaaagagcacaggatgcatgcagtatccaaagtaaccaccaccttttgttccttcaattaatccagc

SEQ ID NO: 61555 - DNA, 371 bp, Zea Mays
gtttcctctaaggctgtgggttttcatatctacaattcaaagtgtattgatcctgcggaattcagagcctttttcaatctttggaatcatggtggccctaactagatgcatgagtacaagaaatttattggtgaagagaatgcttcctggttgactattcggggcaagaagagattatcttacgcagatattgttaagctccctctttctggtgctaatgcggtcccgattcccaacaaaaaggagatctcttgcggtgttgggcatccggatcaggctagaatttctgcgttcagacgcctgggatcttctattcgtaattcaggacttcatggctcgtggtattcgtcttctctgtggaggcttgggcc

SEQ ID NO: 61556 - DNA, 643 bp, Zea Mays
aataacttcaaaactgaaatgaatactcacttttgccattcttttccaccaatcctcaggcatgtcaatatttccattagcatcccatcctaatcctgtttgccgagtcaattgcttccaaatgccataatcaagttttagtcgaccccatttgtttttaaactgttttctattgtacacaataccagtcctatccttgaatttttgtatcacattctgatatccagctttattcaaatgtgtatttgaccgatttcctttgatcacttcatctgcaaaaatctcacaaactatcctagtatattcgtcaccccatgtcgccgtactgtacacgccaatgtggacaaacaatgcataacaattcaagttgcagcaagcataacaatgagtaataaaggattaggaatcaaataatcacctagcatcagtaatttccacatcagtgtccatagaggttgcagcatgagaagggcgtcgagtttcagtactaggagaagggcgtcgcacatcaccagtaggaggacgtcgcacatcagcgggagacggtgctcggtgcatctcagcagaaggtgattgaaggatgtctgtggcagtgccaagaatgccggcaagccacccatcgtcttgtacagctgatgtgtcg

SEQ ID NO: 61557 - DNA, 433 bp, Zea Mays
acaccataaagcctgttgtggactatattattaaacttgctcttagcttgattggtcgcctctagctcgtggttagtctcacctcatggatggggagaagagagatggatagacgactctgcctgcgtgggtggtgacaccgaggtcgacgccgagattcgtggcgccgaggatgctatcatgtgggtgccacctcggcgcgtggatccgagacctcagtgccaactaaattaatgctgagacttgtaacttttgtgtcaatgataacaccatcgagctgagggtctatttactaaaatgaaatcgaaaagaacgtatttatgaaaaactttcacaaaaagggccaaaataaaaaagatagaccctcctccctcccgatagagcaccataagctagtgcttcccaaaattttaagagatagttagtcttcatg

SEQ ID NO: 61558 - DNA, 524 bp, Zea Mays
aaaatgttggcctatcatctctcaggattttcactcgttgtgttagacattctacaactgaagactatgcatgcagagcataaatggatcgtacatcgttctcatccctaaaaaagaggacccagttctggtcaatgactacaaacccattttcctcctcaacacaagtgtaaagatcataacaaaaaggttaataggctccataagttacttcctaaattgatccatgccaatcaatatggtttcattaaaggcagatccatacaagactgccttgcatggacgtttgagtatcttcacatatgcaagtagtccaagaaagagatgatgatcctgaaattagacttccaaaaggcttttgacaaaattgaacacaatgccatcatggagatcatgtcatagaaaggttttggtgctaagtggatgagatggatgcatatgatcttgttgtccaggacctcattcattctccttaatggtgtgccaggcaaggtatttcactgcaaaagaggtgtcagacaggg

SEQ ID NO: 61559 - DNA, 949 bp, Zea Mays
gttggagtgatgccagatcaactaaatttgactcgtaatcccagagaagaagtgctcatgaaacctatgctctaaatcattccagtaattaattgaattatggggcaaggcacaacatactaagtgaatgttgtgctagtaagagataatgaaaacaagcgaacacaaaaggcttccttgtcggccaattctcccaattgttctaggaattggcccatgtgttcgtgagtgcttccactacttttacctgagaatttggagaaatccagcacactagtcccctaagggtatggaatggtgtcccatcaagggtcgtatggcctcaaataggactgtcctggtccggatatactaacacctaatttatcttgaaatagtttggctatttcttcttgaaattcatccatagtggtcgatggtaacccattggtcgttgggacatggggcttaggtggccggttatcctcatgttggccttctacatttgtatgattaaaggtgacattcagtataggcccctaagacatactggttccacacccccattgtcgtgtggtatgaggtgaacctttctggctccctaggggccaaaaatatccaactccatgcatgggtgatggcatgctatgactacagtgtactacaagtggggtggagtaggaaagttatgcctgacgtgcagcactctattccacatatgcatatttggatagtcaagtgtaaggtgtcaaatggtccaggactttgtcgaacggtcttgtgtggtatacggactgtccgaacacgtatgtatagttgtacggtcaaactagagtagtcgtacgatcctgcaagactacggtcggtccgatgtatggtgttggccagtccatgacttggccgagcagtccgaggttagatctagactgtccgatcgtgtggggtattgtccgagtgtcgtgtgtcaggc

SEQ ID NO: 61560 - DNA, 601 bp, Zea Mays
gttaggcagatgggtgattaggctgccccaacagcagcatgcacccaactgttctccaacacacgctccgaggaacaatccacctcaacagcagcagtaccagctccagcaaggaaccgaaaaccgatgctacacatgtggcaacactggccactacgccaaggattgctcgcgcaatcaaccaaggcctatgccagctgtagttccaggaaaggggaagaaacaaaaagtgcaagtcaagcaaggaaggttgaatttcacaaccctggaagaattgaccgagggagcacccgtcatgaccggtaccttcttagttttaaatcaaccagcattaattctatttgactctggtgcatcacatagtttcattagtgcaaaattcggtgtcaaatgccaactaccttctatcatacccaaggggcttttatgatagcaatgtcaggggcaagattgcaaccaatcaattaaatcgtaatgtgactattcagctaggaagtaaaaccttcaaaaccacactcctagtcttgggcttggaaaacatagacatcatcttgtgaactgattggatgaccgaacatcaggtcatactagacatagcagc

SEQ ID NO: 61561 - DNA, 430 bp, Zea Mays
gcaagtacaagtccaagggaggattcaacaaggaggcttaagaagaagtaccttcagaaggcaaagatcaaggagtgtgccttcctcgcctccctcaacgacctcatccacgactccgacgatgtcgtatctttcttgagcgatgaggagactgagacaggtcgaggacaagctgaactggttgtgcttcatcgctaacaccgcgggaggcttctgcaccatggcaattggtgaggacgcggtaggcaccattgacgacaaagacatcgacgacgacactacttctgaggtactaccttccgatgagatagaagagttgaacgctgctttggctagtccagataatttgcttaggcaggatgctcgtgagaggagagagtttagatccaagtatgagagcacgcttagggaacttgagtctgctagagct

SEQ ID NO: 61562 - DNA, 623 bp, Zea Mays
ttttccccgaagcatgtcgaacaatgtagtcaacatcttcggctggagcttcgggggtaggagatttttctttttctgtcatatcttgccctgctgccatgtcggtatctgaagtttgttgatcagctttatcttcaggcgtgatatccttcatctcaaggggcgctaaaagcccagcttccgctttggcctggactttaacagcttcggcaattttctttgtaggagcagggctcaaggcctttgtgctctccataacggcgtctagcacgctggccattctcctcctcttgggagttgcggcaggagccttttgcactttaggcaattctgcctttgctggtggattcaagatttctggcattttcactgtttttccaattttggttcttcgaccgcatcatctttggcttcagctggctcgactgtaagcaccttcgacactacaatcgattcttcagcactctgttcgttgggggccgcttgttttgcttcgtcagttgaagaggtcccttcgccaaattcaggcactacggccggttcaatataccgtggtcggtgggttagaacctttattttcttaccgttcggcacaacagtggtggccgaagcggcagtttttc

SEQ ID NO: 61563 - DNA, 686 bp, Zea Mays
tgagtaagatgcgagtgaaagagagttgtgtccaccaccaatcgcctcctgcttctatatttggtggaagttgaatgccagtggctggtgggcatgtgatgcatggaccagaaggagatgaatagtgaagcctgcgtcgctttcgtggcggtcctcgctgcacatgattggaaccggtcccccttggcatgcttccttggagccatcacagcggccagcgcagcgcatgcatgattccatcaaccaaaggggcgggcaggggacggggggaaagccaaccccggattggaaaatatgcgtggcatctatctatctatgctgatggcggatcgtcccacatttagacatcacttgttcactgagtccaccgccacgacttctcttcgatgctatcacgagaggggttggtttcgcaagataaactgcttcggatccgacaaaatttatcaattggtgcgttcgataaaaaaacaattcgctgccataaatggcatgcattttctattaacctagtcagagtttcaaagaaacggcatgcattttggaatggatggaattctgacctatatgcttagttaccattgttttccccttaacccagtatggatcaaactgttctcaacgacgccctagaaaaaattcaggtgaaaaaaatggaacgctatgtttccaacgcagcctacaag

SEQ ID NO: 61564 - DNA, 674 bp, Zea Mays
attatggaggagacagaggaagatgaggaagagaaactctcactggttcgtcgtgagcggcgatccaaggctcggagtgatacttcgagtctcgctgcctagcgaggatggtgagagtccaggctctagcaatatccgctgtggagtgccaccttgaagaagctgttctagaggcattgctatgcggactacctgagattagcgttgctgattttgatattgttcgttcagatgaggtaccgtctgttggtttattggacgggcgagaggtaagcctgccaatatctcaggaagttactgcattagtcagccgtcttggggatccagccccagcccccgagggtgtagcagttggctcgtctcctgctgtttcgatggaagtccggattgggttgtcagtgcctcgggttgatgatgttgtggcaatgagaactatcctatttatcgagtcaaaacaagatggtccaatcaccttggaagtgagtggcgcggatgtcggtaaagtcatgccgactgaaacagttgtagttgaggatgctatcctagatcagtctcatgaaggtgctatggtaactttagccgacgtcaagattccaatggaggtcgcacttcagttgggagatttgtactcttccgctcttgtcacttcttcccttatggctcttgcaaactct

SEQ ID NO: 61565 - DNA, 829 bp, Zea Mays
aggtccatcctgaatgcttgtcatggcgacaatatctatgtcgcgagaatctttcctactcccttttagatttcgttacctcactctttgtatgtgtatttgcagtcagatacagaggttcacattcattggaaaggggcagcggagctactattagcatcttgcagaagctggctttctactgatggttctattcagcaaatgaattccatcaaggtaaatatgcggccaacttccctttttattcattctgatctctaaagttttattaattttaaagcattcttttcagcataacgaattcaaggaacggattgatgacatggcaatgagttcattgcgttgtgtagcttttgcatattgcccctgggaacccaaaatggtcccaatggaatctctagataagtggaagttgcctgaggatgatctgactcttattgggatggtcgggataaaggtagtttattctgagcctttgtatatttgtatgtctccttggtacttgaatagttatttgacttattaggttgtctccagcatctattctatctcatcgtctatcttatccctatttcaaacttcactaacagtataatctacattagaaatcccctttttacacgatctgtcgcatacaacgttacgtatgtgttatcccccacccaacgtatgtgttatcccccaccccaccccaaaagaaaaagttcaatattttaagttcaacaatccatgctatttaatgtaatacgacttcaactagcactaaacataaggatataacactcaattccatgttgctaacatcaagtttttctcgtcattatcaact

SEQ ID NO: 61566 - DNA, 667 bp, Zea Mays
gtcaaacgacgagaaaacgacgtttgagcgaggaatagtgccataggaggtttgaaattggaattgaggcatgaaatgacttggaattgagtcgatacttcacgagtaggtttatatgggtaaatatgagtgaagtgtgcacttggtttgaatttaggcgaagaaagtggatttgtggtactcgactcagaatcaatggctataaaagaggatttgtgagaaactggtgcctgggatatcggactggcgtgaaatttggtgaaggtgttactagaggtgatatgaaggtgcaggaaaaatatgggatcaatttgagcaattttggctagtttgggcattgcaccgagcagttgatgtgcggggttttgaattaagggtgaaatggtcgtatgaatggaggaaacctcccaaagggagaagattacctgcaggggaactcaagaagtgtactagtaacacacacatgcataggattcatagaatttcacaagaatttgagaagtgtgcaaaggagggtgagtttccacctcactgtccagagaagatgaagagagagggggaaagggacaggggaagctcactagagggagtgggggaagagcagaggggagcagatccatcaatggagcacctcaccggtggtcgccggcggtgaggtgggagggag

SEQ ID NO: 61567 - DNA, 783 bp, Zea Mays
ttctaatcctagccgcccaaagccaatccgacgaccagggggtttccttccccgtccgacggccaagcacggcggcgcgtttagcccacggtggatccccatctgcgcacggccacccaccggaccacccgacctccaaaaccaaattgaaccggtgcaacgcggacctaggcgcatggcgaaacagaaaactgagcattaccgagggttgggtggcggagcgaagctatcctcgacatcaggcgggttcggggcggcgcttaagctacagtgagtgattctgacgtcgttggcccacaatcgcacccggaaagaccacagacggtttccagacgcgcaggcaacttcactcgatcccttcctggtccgagattggcggtaggggaggacaacgtcggcggcggcctcccactctctctgtctcccgctttctccctgagccaatggcggcacgacgcagtcacatattggatggcaccgagggggaagacccggcttggttttaaatccccataccacgcaatactcgcgcacaggtgaacagaactccgcccatggcgagcgcaagacgcggatcgtggctgacgggcgtgcgcaaggtgggggtcaaacctgaccagcagggcccacaaagcagtggcaagggagcgtgagtgtgtgtgcctgcccacgggacccacacgtgggtgacccagccgtgcatggaggtgagcatggtggcgcttaggtgggccacgaggtgcggtgttgatgggctggcgcgactgattaggcccggacgca

SEQ ID NO: 61568 - DNA, 473 bp, Zea Mays
agggaaagaagaggaaaactgctgcttcggccactccagatgagcctgcgccgaagggcaaaaagttgaaggtccttacccaccggccacgctatattgaactggccgtggtacctgagtttggcggggaggcttcttcagctgctgaaccgaaagaacctgctcctcccacgcagaagattgaagagccggctgtaatgccgaaggcaccttcggttgagctaattgaaacgtaggttgacaaagataaggctgaaaggtcaaaaactggagaagtaacaaagatgcccgggattttaagtccttcaacagaatcaacagtgctgaaggcagaaaagagttctgccataacccctagaagaaaaaggatggtaaatgtattagatattttagaaacaacggattccataagccctgtacccataaagaaggttgtcgaagctgacaaagcgcaaaccaaagctgatactaag

SEQ ID NO: 61569 - DNA, 379 bp, Zea Mays
taaaaatctattttcaattcatttattcaattttaaatcagctctggactgggcctcattttctatgaagcgcaggggctctggcgcaaaataatccagacacagagaacagggcccctggatggcaggttgattctttagttcccaggggtctattttataaaacgtgcgaccgaagcggtatcttttaatctgagttgcctgatcagaaatcagtcgccaagattagacctacgttttatacgaaccggtaaacaatctcgatcgtccaatgcctgatcgtcggtgcagatttaatgaaagattcctatactccgagccgtccgatcaatcctacggaccagatcgagtcgcggcgaaagggtacgccacttctaat

SEQ ID NO: 61570 - DNA, 693 bp, Zea Mays
cgtctctgagcaggagcattatgaacaccatgggagggcggtcatgttccttctgctcgactcagaaacctgccgcccatctctctacctcctaaagaaaagcctgatgctcatccctctcacaatagtcacaatggaacctcacctctatgttgggtgaaatctgtttgtgagttttgagctttttgggtggctgaggggctctaggaaggggatcactagaaatgtcgggaattgtatcaagtgtgttcttgaggtggttaggttctggaacccacacttgttttttaggaggagctctcataggctcctcaactacactatctctcacaggggtgagaggcttaggtggggtgattttgatgagcttgggagtggctgaaggtttctcttatggtttcaatccactccactcaccaaccttgctaagctaagcatcactcctagacctagaagcaaagcctattcctagtgcactagttcccctcttgaactaactgatcaccatgcccgactggggctcactgcacaactcccaggtcaagactgacagaaggtattgttttcttccacgattcaggtcttgtcgtgtctgcaagactcgagaaaagtcgacgtgctatatcaacttcaaagcccaggctgccatagttgctttcaatgttgttagcacgcatattggaacaagggacc

SEQ ID NO: 61571 - DNA, 481 bp, Zea Mays
aaccgacaagcctgctgctcctgagttaacaccagatataaatagtgtaagtatttacaccttcatcatattatgctaatattaattataacctatgtttcattacgtttatattaataatgttattggttacaggaaggacaaaaatctgttacgcatgatactcctgtatctggtgcacatcagttcgataaaaccccactgacagatgtaagacatgtcgttttatattctcatatttttcctatatatacactaacaacattaatatttatgcaattgtttactaacatatattcataattaatgcaagcttatatatttatcttttatgcaattgtttactaacatatattcattatatacaatacttcatgcaagcttatatatttatcttttacatacctttttatggcatgtaattgtattgtcatcttccatcccatcgccagcattatttttattcaatcctacttcctgg

SEQ ID NO: 61572 - DNA, 439 bp, Zea Mays
cggggagcggatttggtcgcggagaaagcttatcaccgcgcctgtagccgtgtgtcgtggccggaccgccggtgtcgccgtggaaacttcggtgacctcggttatgccacgtcgtggctcgttattgcgtggtagtaaccgtggcacactcagaattacaatcttcgagccgttgcaccagtgaacgccacgattaagccaccactgttctcccctctctgcagccgccagcgcgccacctcaaattcacgggccaccgccctcgtgtcctataaattgagcgtgccatcagctccgctaggtagtcaagcacccaatacaccaacccgtgcctcagatcgtccaccagagcgccccaatttgagatttcccccaaatcggtcaagaacaccgcgtgtgtgagctcaccgcggtcagcccttcacaagtccgatcaagc

SEQ ID NO: 61573 - DNA, 428 bp, Zea Mays
agagaagtcaaaagaggcattacttggcgaaacaagtacgatgtcaattcgttgtccttcattacaaactgatccatcaaaatacaaagtacatggagtaataatgagatatgacatgtttagtttatgagtatcattaatctgatgttctacgataaaatctgctacgacctggcgtttcatagatattagtgactcacatgccaagtcctattctataagtgcataagcccatttaccaactctaccactcctgattgggttttgcaacatgtatttaatcacatcagttttgatagagctggagtgcccaatctttcggtgaggtggataatttcgattggtggaggaggtgactctcgcgatccgactacgaacgaacaggtcatggcgcttagcaatcgtagaaccaactccaaatggttatt

SEQ ID NO: 61574 - DNA, 786 bp, Zea Mays
gtgaaatgtttcatattgctattcaaaatgtccctagtcttatgtcattacgtgggacaatagcgattttatagactaacacatgtattggttgatgatcatgttcatggatcattgatatagagatatcaaatcaataatgtggaacacattataaagtttatggtgttagattgatccactgtgaaacgttgctagaatggttatgttaaaaatgtgccatcaagtgttctcgagtggtataccagctagatctttagactcgaggtcgccgttgtttctcactatgtgtgttgatgtattttggggctatcaaatgatattttgtaactgggtaattataaaaagaagctttcgggtgtaccatgagacatatgatggaatgtgagcagatcaaggtggaatttatctctgttacataacaggagagatatctctaagccccttgattttcttggattaagaaagtgcatgaccatgctgatatgattaaagagtcaaccataatgtgactaaagagttagtcacaaattgtaatccactacaagatcgggtgaaatgttaagatattgcaatggtggcacaaatctcaccttgagttcgatatatattgtgtcataaaaagatcaatacatgtgtatatcaaggttcaaccaatatgatcttttatatgtgcacaaggttcaatatatgctgataggcaccactatttactgatggcttgaaaacgggttttgatcatggtcatctacatatgaacctaattggtcacacacgcaagggatt

SEQ ID NO: 61575 - DNA, 928 bp, Zea Mays
caacaaacaagttggtcagatcaaggaaatctacaacgcccaacgaatccactaaatatcatctatgtttccaaatcaaacaagcagacaacagaaaggttctctctgtctcatatgctgttgccactccaataccagtctaccaaactgaacctcagaaaaatgaagtcaagacaacagagcaatatctgacccaaaaacaattggagcgaaaagaaaataagacatgatccgagagtagccctttgccaatcagtagtcagacagtgcaaaaatgctgttctgaaaaataataaatgggagagggaaaagagacagaccattcacaggcttgttgctaaggtaatgaggtccatctgattgggagcaccctccttttcctccagcatgagaatctgccttctacgagaagaggtctaccacaccgaatctctgaaaacagagtcaagatcgcagagaaatttctgccccaaaacaattggaatgtagggaaaacaaacatggacagagtagcactttggcaattactcgtcagacattgttgaatacttcacatctaagattgaaacaacaaataatcacatggtcacatgtataccagagacaacaccctttctcaccagcaacatagattactcaatatcagtacccttcataaccataatctgttcgaagctactttggcagccgaatgttgggagaaacgtaattttgaatttttgacatagcaacataaagcaacgtacaagcatatggatgtagtaggacaatcacaatgaaataaatcaaataattaatgagttcctcttgctcaggaatcaaggagtgggattagtaaaaataatggttaaaattccttgtgttctccaaaaatcaattatgtggcctacctacccattaaggtacatcctgccaagtgccaactatt

SEQ ID NO: 61576 - DNA, 563 bp, Zea Mays
ctccaaggggattcaagtttacaaactagcccttgatggggcggaggtgggaatgcaatttcccccatggtgaaccaatggtagccagaattaggagtcaaaccctctctcacgcggtctatgaaggttgaatccaacaaaccgccttagtgtaagaccgtataaatatacaaaattcccacttattaaccctaaccatcatatccttcactcggatgtcgctcgcccatgtgataagtctaatttatatgactataacaatatttatgctcaacaattcatccacatggacttcgcgtggggacaaggacggggatgaaatccaccacattaagtatttctgggtcggatcgaggaatcggtttcggggattgggtcggagacggggaatactcccttggccttgacccactctggtgccatccctagttgcagtacattcctacgttttttatatgtcatataggtataccgtgcttaatgagatattcatataaacactactttgtataacacaaacatgtgtggctcgcaacatttaagatgtctgctttacaacaaac

SEQ ID NO: 61577 - DNA, 713 bp, Zea Mays
aaagtggaagcgggagtggtggtaggtatggctgaagtggtggatggccctggagctactagagctggcgaagtgggaggtggagtggtagctgtggcgggtgtagagggagtggaggagcgaggtcgagaagcgaggcgacgaactctgtaagcaatccggtctgacgagatctgtagctgtccacctcgctctgcctactctgctgttgctgccgttgcaagagctgctcgggctgctctatccaaacaccacttcttgcagccttcttgctgctctaagtacatggtcttgcccttgacctgcctgaaggggcgaggagggtcctcgtcgtctcctccccttggcactaacacattcttcatgcgtaccatcctgtcctgagggctgcataggagagtgaaaaactaagcacgagagaaagcaactgataagattataaaagaaaggataactacctggaaacctcacgagagagagagagagaatccaggcaggacaggagacgggctcacgggaaggcgagatcactgaaatgacaaaagaggtgagcacgtattagtcacatagtaacaagtatataaaaatatgaataaacacttacatagagagttatgacacagaaactgagtgaattaacgatatagaggtcaaatgacgcaaaaacgacgtttgagcgaggaatagtgccatatgaggtttgaaattggaat

SEQ ID NO: 61578 - DNA, 395 bp, Zea Mays
taatcatgtggattacccctcaaaagggttgatcagcaaagtcttcttgctttggtaggggtgggggaggtggtagtggtttgtttggttgttggggtggtggaggtggtagtgctaggatttcttggtgttataggcgttgttgttgcgaaaatatgttgtggttttgctgttgatgattaaaatgttcattttggaattgatgttggttgtattgatggggatggtatgtgtgggcgatgactcgttggttatcggtcggcggggtcctagccatttggtcctttgttgctttcgtcttagggaaatccctggttgggtgtgccgagtcttcaccgtggaaaatacaatagaatcttcgttgctactgacctcggcctctacctctggatgca

SEQ ID NO: 61579 - DNA, 745 bp, Zea Mays
ttaatacaaattttattaccctaatagtaataataataatagatgataagtggataataatggaaatattaaaatctcgattgaaattgaatgacaagttagatttaaagaagaaataagaggagaattgaaaacacggataaggatcttatatgtgcttatttttgcagttagaagcatctttctactaatagaagattaatgaaataaaacttgtatatcatgcttttattataattgtgcatataattttgaaattgaacgtagaactaaattgaatctggaatagaaaacaaaaataaaaaaataaaaaaaaatggtgaaagctgggccgaattgcccaacccattcattcttccctgccgtcaactcagaactcacatccttttcttcctattgtttatttcctaacagcaaagctatctcatccagacaccatgttgttgttaactcatttccaactagtgtcgcttacatgtggggccatgtcgtcagctgcacctcctctgggtccaacagatcgcatttgcctgagttcggcggacgttggatccctttataaccaccgccgcacaacaaacaacgaagatatctggtgaacgttgaaccgcctttcgctgcccgtgatcttcccggattgtcgcccatgatccacgcaactgaagcttgtttctgcgccgcacatctaccaacctccccacggactcgagctgagccatacacccatatctgaaccaccacggcg

SEQ ID NO: 61580 - DNA, 639 bp, Zea Mays
ttgtatttcaatttaatttcctagatttccaagcactatagagcttgatacagctgttatggccacatggcaatatatataaatatatgatgccacacaacacaatcaaataaaatatagagccaaacaaaaaaaattttaggaaggttgtgcataatatgacttcagggccttaaacaactcaccacaatccacgcgagtacaagatctagcgtatttggtgtcaacgcgtgtgcggcaatcagagctacaacaacatagcaagccttcgtaataagcgcaacaggcgcagttgtggctcaatagtcggggtacatgacaagtccatgaaacatgcgcaacaggcgcaattatggctcgatgatcacgatagacaaagaatgcctacagggcgtgcgaaaaatgagtgactcgatgatggcggtccgactcaacgagagtggtccgattaagcgagagtacaacatagcaatcaaatgacgcaaccatgttcgttcgacacaaatactgtgtcgtgttaccagggcacaaccagtgctcaaccaatgccataactcggttgattaataacgtagtctgatcgacgtgtctgagtacccactatacaatttaatcgctcgacgtgagtccaaaagctca

SEQ ID NO: 61581 - DNA, 711 bp, Zea Mays
tttctatcctatcaaaagaacttatacttttccactttttgggtgagcacatccttgatgattcgaactcccttatccctgagttgtgccatattaatctgatcttgcaaagttggctcaactgagatataatcaagagttcccagagaaactacttccatgttcaacttgctcaactcattgcacacaactgtaacatgagaatcaacggtcagatagttgcattgggatttgtggctcaacgcatctgctaccacatttgctttccgagggagatagtgcagttccaggtcataatccttgattagttctaagcatcttatctgtctcatgttgaggtcaacctggctgaaaatgtacttgagactcttgtgagctcccgtcaagtagcgcctccggattttcagggcatgaactacgactgctaacaccaaatcatgtgctggatatttttgctcatgaggtcatagacctcgtgacgcgtaggcaataactcggttgtcttgcattagaacacaaccaagtccactgtcaaaagcatcacaatacacatcaaatgacttgatgttgtcgggttgtgctagcacgtgtgcagttgttagatgcttccttaaggtataaaaggcgtcttcacacttctgtctctacttgaacttgactcctattgggaacctttccatccgggcaggttaattcaacggggaaacggaa

SEQ ID NO: 61582 - DNA, 350 bp, Zea Mays
cttaaccatattcctcaccccgatgatatacactaaccttcaatcaataagaccaagactgaagaagaaaagatcaacctcgtcaaggaaggagagaagtcaaactcaaccttccgatgcattaccacccagcacggagttctttcccaccataaactttcttaccctaggctattcttgccctaacttatccatctcttagatcctacatagtaagtggctgaatacctatgctctcctaatcaacccctattgactgaaaaaaatgagactctggacttttggtacaattataagactaaaagttgaattacaaaccaatccttcagtattcccttttcttacaaatc

SEQ ID NO: 61583 - DNA, 471 bp, Zea Mays
ttacaataatacctagagaagaagtaacttgaaggtaaaaatatagattcgaaggtggtgggtttctggcccaagagatatgtcccctcatacatggaaccatacctctatagtggtgtcttggtgtacaacgtcatataagattacaatcataccctcagttcatatacacataaaccataaatctcgtagggatcatcgttctttttcttcacatacgtattggccaagcttctagattcttctcattcaccattgctcatgtgtcagtattgaagaaccaaagctctctcctttgcccttgtatacgtgttgatctcacggaggtgaagcttcctagcttcgtcttttgttcatgcactgctttggatgaaggtcagcattgttatcatcttggagcacatgaaacacacttgtgaacaactggggacacaatgttttgagggccttcgacaaaggcatccccccaat

SEQ ID NO: 61584 - DNA, 880 bp, Zea Mays
agcatgagcatgtcgcaccgacttaaggcgtttccgacttaagccgattgctccgttagtagggcatagtgatcaccctaagttgtgtaagcgtgagcatgtcacatcgacttaaggcgtttccgacttgagctgattgctccattagtagggcatagtgatctccctaagttgtgtaagcgtgagcatgctgatttcgagttgagcccaatttaagtcagttgtcaatcaagaacttgaacgcctttggaagatgaaagctttattgatgatgaaaccttctgattacagcgtacaactcgccctcgaggcttttgaggtatcactaagggtagaaatttctgaggtgctcgatattccatgagctccccacttctgtgccgtccatctgagtaagccagtaggatcccggccgtgtgacctctgctacgattaatggtccttcccatgttggtgacagcttgtgccatccctcccccgtaagtactcgatggaggaccaagtctcctactgcaaaggaccggtgtcgcacagctttgtcgtggtagcgcctcaaagtttgctggtatctggccgactgaattactgtgtttagtcattcctcctctagcacatcaatgtcctctagcctggttgcttctgcctcatctatgctttcaaaggtcagcctatgcgccccaaagataaagtcggcaggcagcactgcctccgacccatacaccatgaagaacggggtgtttccatgcagagctcggctaggctgtgttcatagactccagaccacgtatggcagctctctgagccacttccgcgcaagcttctcgctcttgtcgaataccttttttctgagtgcatccagtatcattccgttggctctttc

SEQ ID NO: 61585 - DNA, 322 bp, Zea Mays
cacgaccgccgctcgggccgccggggcaacagaagacgtaatgacagcatatttgcccatcgtccttgggcaagatgcactgcagtggctacgacatctgccatgacactgcatcgacgattggagcgacttcagtcggcggttcatcgccaacttctagtccctctctgacaagccagcgcagccatgggacctcaaatccatcaggcgccagcgcgatgaaacacttcggtcatacctcaagaggtttcagaccatgagaaaccgcatccccgaagtcatcgaggcagcgatgattgaagatttctaccgagggtccaat

SEQ ID NO: 61586 - DNA, 1080 bp, Zea Mays
tagtggcaagggtagaagaggctgactcataatgagtcggcttcgagtttgtattacttcccctattatgaatgaaggatgaagtgactccacttaatcgctgttgtttgcttttcatttgtgcgcttgaaagttcgcccgtgcgcttgaaagtaatggcattttagaggcaatgcccgagtgaggattgcggtctttacttttacgagtcatgatctggcactttagaggtaatgcccgacctaatgagtccacttatacacatgttgacgtgccttcttgagttccaaaccctaactctcgcttttacctctaccacttcttcgctttctgaattcttgagcccgctcgttccgcccaagagattgcgatggcccccaagcggaagagacaaggtgtcgtcgctccgatcattccactcatcgatcccaacagccagcttccattcgctggtaatcacatgtccgtaatttctgaattagacctttttcatcttgtggagactggggttttgccgccgtaagaactgtgttcttggcggatctggcacagggtcactattctaacagaggacacccacgagtccgttgtttatgtgtcattcctcatccgcggacttgctcttcctgtttctccctttttccacggtctccttgacttctacgatttaaatcttacacatttgaatcctaactccattcttcaagttgccattttcgtacacctgtgcgaggcctttcttggaattctcccccactttggactctggaagtatctttatcactgtcggcccagcatggctggaggacagcaccagctcatcagtggtgccagtttggaacttcgccgggggaggaaagcggagtaccttgacattccccttaaggacaacatcaagggatggtgcctcgagtggttcaccatggagaatcacaacaaatctctcccccctcgaccaggaaggcagcctgacattcgcacacccagctgggaagagtacccttcttatttagaggtagccaatgccaaagtgctgcttactaaaatttgctcgctgaaggacaaaggcctgactgctga

SEQ ID NO: 61587 - DNA, 274 bp, Zea Mays
gctggcgaccctggtgatccggaaatcgcggcgaccaaagctgagcggactggcttccgttggcgatatccgcggggaagaagcgcctagacgtgggtcccaccggtcggccaagacttccagtgcacaacgggaaaggtagctgacagagcgccctacgtgtcagtgacacagcgaacgcgcggttggtgaggatagctggtttgtgggccgtgcggtgaagggaatagggaactgggccgaaaagcgcggatctgggccatgcgacgatttt

SEQ ID NO: 61588 - DNA, 333 bp, Zea Mays
agttcgcatttctgagttcgtgttctagttgagtttggttgctggattagatttgttttggttcagtttaattctgtccatcctcttccatgctacaaaaccgaccctatccacaaaacagatcctatctctaaaatcgaccttatccacaaaacagatcctatctctaaaactgaccatatccacaaaacaaatcctatctctaaaaccgaccctatccacaaaatagatcatatctctacaaccgaccctatccacaaaaccgaactcccatccttccaacacctcgccagaaatcctgattcagagtccaaacttaaaacagccgtaact

SEQ ID NO: 61589 - DNA, 422 bp, Zea Mays
ataacagatgtaaaagaatatggggggggggaatccaaagcaacaatttagaaattgtagcccaaaacctcaaacaacttctatctagacacaggtgatcctaaaccaaacacgcactatccagttttcatcctcccaaattcacagcattggtaacactactaaagttttaagtttaaatatcaactgcaaataagtggttgatagcatcaatcaacatgtagggatgcaaatgtagtccaaaccagcaaatagaccattttaagcaggctgctcgaacccacttacccatttgcattcttaatcaaccaccactaagagtaagcacaatgctagaaaccccccaatttactcacatgtgtacagtaaatcttctctccgtgtccctcgtaagatgactccgcacagtcctaattccccaa

SEQ ID NO: 61590 - DNA, 481 bp, Zea Mays
cggaggtgagggctggtgctctagcttcataacaacctagtggagctaacggtgcactcaatttatagcgtctaagagcggtggctccgaattttgaagggaaagctggcggccggagagaggggtgagtcaccggcgagtgttatcgtggcatttacatgacaaggacctacggctgtcattggctaaccttcacagattgcgacaacatggtgaaacgtcctagagcatggcataaccgcgagaaacggcgacacggtggtgacggtcgcgcggccacgttgtcgatgcaagtgggtacggcgatagggccaacagtgccccacgttcatccaggcgcacgatcttttcactgtcgaccattatccgcatgccaaggcacacgaatcgcgacatcggcgaggatcgcggcgcggagatcaccggcggtgagatacactaaacctgatcttgtttagtcactgtaccatcgcaattgttc

SEQ ID NO: 61591 - DNA, 438 bp, Zea Mays
gtccacattctctagggtggtttggatctgggtaaccacttagcctgattccgtaccgtaagcctacaacttccaccgccctagaaccaagtaccgatggctaggtaactagggttctatacctagtctagattcaagggctggtcctgaaaataggtttagaaaggttcggatgtatgatccgaaagattgagcacaacaaggtagggatcccatgggaacaccactaagcttcggtcccatgccgtgtttaggaccggctttggtcttgcgtttcccccgaacaattgaaattaactcacgagaaaccaaagcacctgggagacaacagaggaaaagtcctgcccataagccaagctgtgcaggtccctgtccggtaaggcccgcctgtgtaaatctgatctctggtgccatctgtggtccagcccggtaggggcg

SEQ ID NO: 61592 - DNA, 363 bp, Zea Mays
agccgaaccgagcctcattcttgagctcgtgcaatggacgagccaagccgatctcgttcagccatcgagtcacaccgagcggagccgctcagctcgtttccaaccctatatagcatatcattgcataattattgaatcagaggctatatgcctatgacatgacttaagtgtaatgatttacatcattatcctactaccaataattttgtaacactaccaataggaacgtcaccaacagttaatacctattttgtagccaaatacatagcattcaaatctaacatttatggctctttagttagaggatgcatgccatcaaacaaaagtaaaaattagaaagtcagtaagagaaatctaattgag

SEQ ID NO: 61593 - DNA, 508 bp, Zea Mays
atcggaaacttctaggggacgtgcaagcgtccatgcaacctgttttggtttcggaaaccagaggacaatagaatttgtgttcgacaagggatgctagcgcggactcactccgaatggtgaaccaccagggcttcgagcaaagggtttgagatagagagttatactggttcaggctttcgccctagttcattgcaatgttgatcgtagtattgcttgaggactgtattacagttggtgcgtgtgtggaaagaaggaaggggcctatccatttatagctcaagggtaggaccttacagagtagacttgctacttgcttcctactgctaagagtgtgatcagttgacgtagtccctctgacatcatccataggtcgtgtgcagctgtattcccggcatgacgtactgttcttttcgtctggtatacaggtccctatagcgagttcgatgctgatgtccttgtactgacgcctgatgggtcccacgaggtagactcatggtatgtgtgcgag

SEQ ID NO: 61594 - DNA, 331 bp, Zea Mays
tgaattttcaatagattttctgaacaagtcacatccatacagtatacataatgaatgtattgagacagaaggaagatatcgatagagatcaaaggaaagccaaatatagctactgaactgtaagtctagttagcagaagcattgaagcacaaagcgaagtgaagaccagccaagagccatctaccagacgtccaatctgtcgccgatcaaataaatttcaaacctaacaaggcatgggcagaccacgtggtttgaattcgcaaaagcaggagatgaagataaaatgctgatttctaaagcatgagatgaagataaaatgctgatttctaaa

SEQ ID NO: 61595 - DNA, 466 bp, Zea Mays
tatatatcaccggaaagcggaaagcgagttaaacaaaccacccatctgggtagagttagacacatgtataggctttgcgactttgagcaggacatgccccgggccgggccacttgcacgacggcgcccccctgaaccgccgggtggagattgcaaattgtatcatctgtttgtttttatttaatttgcctcctatgtgcccccactgtacctatatgcatgcaagagctccatataactagttgactgtttgctgtctttgtctcatcttctttttctgcatctctgtgactcaatttttttattgttgtctataagaattattttgtattgttatacacggtagactatactgttcgtatagtgaagtctgcatatagatatgtgtatgggtaagccgctcgaaggtaacaaaccaacagtggatcaactggacgctaaatgcactaccagaatcgcgttctttg

SEQ ID NO: 61596 - DNA, 337 bp, Zea Mays
aacggtccaaagtacctaaataacaatttggcatagggtctgtgggcaatggaagattgtccaaatggatgtagtttcaaatatactagatctccaatatgaaattgccgaaatgttatattattatcaacataaaacatcacgttgtgagctcatgccaagttggatttaatgacaaccaaaaagtcctatctttgttgtaatgtgagcacaacccccgaactagcgtcatgattgtttccaagcaacactcctaaatttggatcaaccccatataaggccttaaatgagtgcatttcaatgaggaacggtaacaagtattgtaccataactcagc

SEQ ID NO: 61597 - DNA, 619 bp, Zea Mays
gaaagacataattactcgtctttacttgtataaagcctttgtatagaggagagcatatttttgtaatttcaaacagaaatgtatatcattctgaccttataatcaggtgtacaataccactactgcaggggtgggtcacttgcatgtcatgagtgtgtagcacctttgtctagaagagcgttcgaatcaacttaggagatctttgaaggtataatatttcgaaggcctcttaagccatattgcgatttttatcttagcactgtataacaaatgaatgaaggagattgataaatccttgtgtactagatgtacatttaatatatgctatttcgtctcatgagcaatgagtttcgtgcttgttttttttccctctccccttgcatccttcgatctattcggagatgaaagaagagtgtttcacttttattgtgttaccttccggttctttgcagcaacttccataggtctcattggtggctaggatttttccaccgtctcgtgtctctcaagagttgatatcatcttttgttgtctctcgtgattaaattttgctatcaaacatgtcattagtggttggatctttttctctttgtctctcgtgatcaacatagtagatgaa

SEQ ID NO: 61598 - DNA, 883 bp, Zea Mays
caccagaccatttgcgtagagagtcttttctgggcagccactacttggtgcaccagaccagtccagtttccaacggacggactaccacttacacatagatgatgtgttcgaaaccaagactgatggcgcaccggaccgaggttcaatgagcaccggacctttaggatccaatggtttgattttagacttgaacggtcagatgatgtggctattgacgtggcagggttggtggtgcaccggctggtccggtgccacctgacaactgacagttccgaaggaccggtgtctgatgcacccgaatttagagcagtttttagcatttgatctcaatgactattcgggtagttggaggctataaatacacctcctactagctcattcaatacacaagagctatgcaaactagagcaacactcccaagtgaccaaagccttctaagtgccacaaaagagagaatcaagcaatagagttagttcctttgtgtgaattgtgatagtgccttgagagagtgctagagaaaagagagtgtgttgcgttcttactgtcggggacgataattagggacatctgaattactcccctaacaagcacactcagagaaataaggactaaactccctaatggtgacagccgaggcacctataaaaaactgagacgtcccccaagggtctcccacctcgagcagggctccacctcgcccgaggtcgacaccactcaatccgcctcacccgaggccgcctcagcccagtccatctcacccgagctggcctcaaggagataggacgagggcactcgaaaacaagtaggggacaggcgcatttaatgtgtgtgccaacccgcgccgtggcagcggagcatagtggtggacaagacagcgatcacg

SEQ ID NO: 61599 - DNA, 406 bp, Zea Mays
atcttgatgttgtactctttatctagatttgatttgacggaacattagtacaatacttccaaaatataaattctacataagtttgatagttctcctgcttatatttttattgaaattgcagtttgaaccaaggcaaagtctactgtcactggtgtttgatgttcagttgctgaagatcatgtgattctgcatttctgcaaccatcgttatcatcatccttggtcaatgcaaacagtgcttcaagggaatcacagagttcattgtaaacttacttgttctccctttgaaatcaaggtctataaactaaattagtgaaataattaagcagcagcaatccggcttgtcaaaatatcgttaacttgactcagaacagttctctgaatatcgttaacttgactcagaacag

SEQ ID NO: 61600 - DNA, 316 bp, Zea Mays
tgcaccaacgcgtcagccgcggtcgagcacgtggcacatcgcttctgctcctgttctaacgccgataggcttcatatcttcgtgaatttgggcaaagatcgttgtgtaagatatgtttcctagtgtatgctttgtcgtttatgggtgggagccgaggggttttcggccctgtacagtgagttgtcgtgtcatcaagttgccagtgtctccgcttcccgaggcaaaaccatgccaaatcatgtcaaatggttgagatttgtctccaaatttttctaggacgtgcctaaggtaatttggcgccaatttgttatttgga

SEQ ID NO: 61601 - DNA, 641 bp, Zea Mays
ctgaaagggtgtgctgctggttctaccaggacgctgcgacactttccctcccatgggaaatctagtttacgcgaaacgcggcatttgtttgcagatggatggacatgggcattcgcaaacgcagccttctgtcctccattctggagaacaggaaggaagcatgccctcccttttttttgtccgggtggcacgcagctcctgaggcatggctactgttcaaggatactgtatgtgcagatcatgaagataggtgagtgagttgcgttctggttgggggtagtctgtactctgtaggtagactgcgatctgatagcacgatgcatctcatttgctaggccaaccgaactgacagatgtgcatgcaagaatccacctcacagctatgattttcctcttgattacaattacttgttcacttgtctcactcggaatgatgcatacctaatcaatgttgctggctttcgtaggcctgttaggctgttacactcccattgcatggttcatgtattaatcttcgtagaaggatccatcatctaccaatctcagtcaattctgacttgaatgcaatctccgtgctgacttgacggcgacgcaaaaatactgttctgtttctattggatcatgattttcgttggtttggta

SEQ ID NO: 61602 - DNA, 847 bp, Zea Mays
ggacaagctcagattcgtgaggaggtaaagaggtggtacctctcgcacttcaccgtagatcgtcaccaaagggtcatccaagagagggaagtggagctcgcttccataatggcctcgctgtagcccgccactacaaatgcaatcggctatcgataaagtttgattgaaatttctagacatgcagttgggcaatcaatccttcttggtcaacagtttagaacttgatgggaagaaaattgtggttcgaccataagagaccgataagaacaagtgtgacaatatcgtgatcaataaccctcaggtgatcgatgaaaaagcaaggaccttggctatgaaggtgattgtatagaaaaatttggatggacaagaagccatcaagaccaccatcaagtctaccggtgttggggggcaagacataacaagaatctgacagagctctccaagccggcgtacaccgaacaatttggtgcttagcgctagcagtctggtactatcagcaacaaaacgaagacccacaggataaaagtagaaggccccagaagcaaaaccagcctaaggcttttagcaagttttctaaatcgggtcttacgttcgatcgatttctttcaaaatatatgaataagaaggtcgttccgcataatctgctagcaaaatgatcaaagtcatccgcaagaaagaagtaatatgtacaggggcaaagactgactataccagcccgagaagtgcctcaactagcatcgcctgctcatcagtctccagggatgttgtgttacttttactcgtctactcatcgccgatgttttaaccggctcaagcgtggaaaagtgtgataatgaatctatattac

SEQ ID NO: 61603 - DNA, 464 bp, Zea Mays
cctcctctaaaaggttgtttcccagaacgggtttgctcaggttttggagcttgttgagaagaggtatgggaccatggaagctattgttggcaagacgaaggatacgaaggaaggtcaagtttccaagagaggagctgatttggccagccaagctttggccgttgagattgagctccgtgactcgatatggtcgagtggaactgcagttcacaccatgccaatggcagaagtggatgctggtgttccaattgctcaaggctccgtgcggatcactggtgatgcccttcttgaactctagcagagaatgaaaatcttggctgttgttatgatgcgtcgagcaatggactttgtccactgcatgacatagcagtagcagcagtactacaagcatggcgagtttcgacggctgcttccaatgactcattaaggcacgtaattgacacctgtaaaaaataaagaatgat

SEQ ID NO: 61604 - DNA, 393 bp, Zea Mays
gtgatcgccggtgaggatgccacgattatggccaccaatcatgtgcgccagtgcacctcctcctctccgcccgccgcgcgtccccattaaattcactagccaccgctcaaacacactataaattgagcacaccctcggctccgttaggtaatctagcatccaatccaaccgcttgtgccctcaattactcactagagcccgcgaattgctcttttcccccaaatcggtttccgccaccgtgaaagagccctcaccgtgactagcttgttccaggtctgttcatactctctgctcttgcatttcagcatccttaggatctcctgatgctcctcgacccgtttgattgagctagactatcctagatcaccggggaacacgtttgttcacttgttg

SEQ ID NO: 61605 - DNA, 558 bp, Zea Mays
gtgagcatgtcgcaccgccttaagtcattgccgacttaagtcgattgctccgttagtagggcatagtggtcaccccgggtttagtaagcgtgagcatgtcgcaccgccttaagtcattgccgacttaagttgattgctctgttagtagggcatagtggtcaccccgagtttagtaagcgtgagcatgtcgcaccgccttaagtcattgccgacttaagtcgattgctccattagtagggcatagtggtcaccccgagttgagtaagtatgtcaattgacagcgaacaatttgagtgcctttgaagccctttttattgatgatatatttctcaatttacagaatacatcatcgtcccaatagcttctgggatgtagctagggtaaaacttcgtgaggtgttctatgttccatgagttcccaatttctgtgtcgtccatctgagtgagacgatatgatcccggccgagtgacttctgctactatgaatggtccttcccatagatgtgacaatttatgccgtccctcccccgttagaattcggcgaaggacgagatctccc

SEQ ID NO: 61606 - DNA, 1045 bp, Zea Mays
gaaagatgcttgaagatggtctgtcagactatgatttactctaaagttacacggcagtgctgatcacccaactttggatccatttcgtgcttgctccaactgagcaaatggcttagatcattataacaaagtttaagctcttatattggggaacaaatctcttataaagggttggacaaagtgatgtgcagaacatggagtaatatgtgttcaaagtttctctgccacaccaattgaaaaagggggaattctaattgaagcagtaactgaacaagattgagttcagtgtacccgtcgccgatgtccctacgttgtgattcgaactcgactaaaagaatcgtgttgcggctactgggatagcacaaaagggtaaaagatctaggcgcatggatatgctcgggttgatcacaggtgaatttactgtatccacttgcttgagttgtcgccgccgtggcaatcaccggatgctctggccatccacgtaactagttgggtgcttgaagtgttttaacctatgtaaacatgctcgtggtgagttcgccacgttacgagtcgtaggacaccgcgagagctaacgtggagctcatcgggctatcaccaccgtcgtgctctctcgaccaaattagccatcatcattgtagcttcctctaaattgagcttaccctcagtcttgcctctctgttacgcacccgaaccaccctttattttctttgtttgaccgttggtagccaagtacaccgagtttttccctgtcggtggtcaccagcgtcgtcgagtggtacatcaccgtggccaacacttcctaaggttggtcatgtttgtttagcttgcgtttcgtggtctttatatcatggtggtgctcacacgccttttgatttaaacactaccgccaccggttaaccggaacgccgctgtgtcagcagtgaccgccgcctcggacccccttcacgtggactgaccaaaccatatctttccccagccaaaccttgtaagcaccgtgtccttactggtccacttaaactttctatgccactagattgaacac

SEQ ID NO: 61607 - DNA, 653 bp, Zea Mays
gcgacctgtgcagagtgtaaaactttggagtgcgctcatacactttggagttttggaagagcgcaaaaatgctcatgaggggcgtaaaccctaaaacccctggccccaaggcacatgggtcatgatgaataaagtggctctagagaggcccaagcgaggcccaactaaccacctgagcgcggggtgaaccactaataactatgcaaggtgacatccgcctttggccctaatgcgaagcaagagtgcataggggtcgaacgagacgaaagagggttggacgaacccaatgttgatctaagggttgggcgaatcgcatgatcacaaagaaaacatgaccgttgaactagatacttgggagatcctccttctcttgctcagcttgtaaaccctgctatgagtaatcaggtgtcggtagcgcaagccaccaaagactaaagtagggacatttcgctcgaaccagtataaactcttgcatcctactagcacaccatccaagtccaaaaatgtgcatcacaaatttactcgttgatgcttactcgaaacactgacaatcatcataagaaccaattgaaagataaatcaatgttacagaatgaagaattgttatattttcattagaagcacattgtctatctttaggaattccattttcc

SEQ ID NO: 61608 - DNA, 545 bp, Zea Mays
cttgcttgatcatttgttggcttgttcgagctgcccattcgcgcggtgctgagccacgacagcccaatccatagggatgtggtattcgtcgtagaactctagtaacatgtttccggtgaactacgtaccattgtctgttattatcgagttgggtactccaaaacggtgaatgatgtcggtgacaagtttcacgacctgttaggaggtgatctttgcgagggaccatgctttgatccacttagagaatttgtcgattgcgactaagatgtgggtgtagtccccaagggcccttttgagaggtctgaatagatcaagtctccagacggcaaacgaccaggtgacagagatggtttgtaatgcctacgcaggcagatgggtttgtcgcgcgtagtattgacacccttcgcaggttcttactacctgatgtgcatccaacactgcagtggccaatagaatcctagttgaaaggcattccccacgaggcttcatggggcagcatggtgcccacagaacctgccatggatatcttctaggagctgctttcc

SEQ ID NO: 61609 - DNA, 1179 bp, Zea Mays
tgacgggcttcctgctaagttgccctatgggaggggtcagcaggatgtagccaactcaggtgagcccgatctaagctgatgaagaccgatggtcgagttaagcatcgttgaagcacggatgtgtctggtgaggcaattacaaacacctgaaaggctatggactcgacgataattcgggtggctaggcgatgaagactccggacatgtagggatacaatctttgacaaaggagataagcaagtagatagtaatataatcacaacttgtaacaggataactctctctggtcgtgtatataaggttgatggggaccactaccatttcatctcatcaccaaccactccagctcattttcatccaccaccctcaacttgtaatcctcacattctagagatcaatatcaaaccacaacaggaagtagggtatttcgcaattctaagtggcccgaacctgtataattctgcgagtgattccagcgtgcctctgcacaaatcattgagtcgcgataaactacgtcgtcctacccaaaagcatcacgtgggtaagcccgtggtgcgcagttgggtcacaaacaccgacaattgccgtgccaggtagggggtgcgacgttgatagacgacgaagtcaggttcaacaccatgatcaccttcaatgccagagaagacttccactttagatccaactcctgcatcgcagatcggggaggtatcttgcaccgcatagtggacccgtccgggaataaatcttccctagtggtgccaaaaacggctgcagggttgccacgaacagcgccaatgagaattttgcgagtaggccctgaagcgcggaaacctcgactggtttttactccatgaagatggagccaaaatcgggcaggcccaggggtgttgtgacgcctatggctcggccgaccaagtcctcacctctggcatgatgaactctattgtccacattgcccacccgggcatggacccgaatcactcggcgaagagaagcatgtgcttctaggactggcgcgaccccgaaggcaccgccgacgaccatcctgaccactccgccctcaaaggagatggagggagtgtgtagcaccacacccagctccttcttcctggacatcctctttatccagggaagggtagaggacacactcattttcgactacgagcccaccgtacgggg

SEQ ID NO: 61610 - DNA, 523 bp, Zea Mays
gaattattttgggaccacacgacaaatttcattaggttcaggagactaaaaagtcttatgtcaaaaagttttttaatgaaattttctacccataagaagtttagtcggtattggacttctaatggtaaatatggagaatgcttagtggcatcaagaaagtagatttgtagtggaaagttttgaaatgcggggatgatatgattatttttgtgaatttatcaaaagtcataaagagataggcaactgctcccttggttgacatgaagggatccacaatatcaaaggggtatggtttgtatttgagctacacggacatgagcctgatttgtaaataattgatagccttcgcatgtgcacataatctccttcacatcaaccacgactatttgttagaagaaaccctgcatgtatgctttttccaccatggcctttgttcctatgtggttgctgcatatgccagtgtggatgtcttcaagtagcaccttcctttcatcaattgggatacatctcattagaattcttg

SEQ ID NO: 61611 - DNA, 501 bp, Zea Mays
atagaaaaggagttgtagcattggctgattggctggctgtctctaggcatgtggggccacgttgtggttgcccgccaccactaggggggtagtgtactagtgtgacgcgtatggcccttgcgtggacgagggcattgcaaatggaattgggggagcgcacgtcacatcttatcgtgtgtgctttcttttcctatcctctctctaggcatcaccactcccctttgtttttcacctcatttccaattccaagctaacccgagcacgactccattagcctgcttgcaccaagtcctctaggccttccgcaatcacgatgcaaaagcagcccactgattttagttctcgggggaccggaaaataaaatttaactttttttgtattttagatttttttttaaaaaaggtagccacattccaaaaaaaatatgtgtttatttttttagatttggatatcatcgttgtgacctaccacgttgagacacgacgtctcgacgaagatcat

SEQ ID NO: 61612 - DNA, 425 bp, Zea Mays
tgaccatggcgcacttaagagtacaattgtggagccattgcaccggtgaactccacaaattctttgcgccaatgctcttccctttctccggccgccgcgtgtctccttcaaattagccgccaccgctcatgaatccaataaattgagcatgccattagctccgctaggtattcaagcatccagcgcacccactcgtgtctcggatgttcaccagagagctccaatttaggatttcccccaaatcggccaaagaacaccgtgtgagtgagctcgccgtggccaacgctctataggtccattcaccccctatgtttcctcgtttcagtacccttatgtgcccttgatgcttcgacccggccgattgagctagaactcataggatcaccggtaacgtgtcaagttatccgttgatcgcacgatcaccg

SEQ ID NO: 61613 - DNA, 643 bp, Zea Mays
tagaaataaaccttcgtaaataatttatcttgtcgaggaacttctgcatttcaagcttacatgttggaggtcccacattccgaacggatttaattcggtcagggtctatctctataccatgtttatgaatgatgaatcctaagaacttaccagccgacactctaaaagcacatttatgtgggttcatttttagaccataccgacgcattttatcaaagtttttgtgcaaatcagctatatgagaactaaactcagtcgatttggctacgatatcatcaacgtagacttccaaagtgtttcccaacagctcgtgaaagatcaaattcatagccctctgataagtagcaccaacattttttatatcaaatgtcattgacaacccactcaaataaaaccaataaagcctggacatataaaggtcgttttggacgcatcttctttggccatgaaaatctgattatatctggcattaccatcaagaaagctaataattctatttcctgacgcattattgatcaacgtgtcggctatggacatgggatattcatctttaagagttgctctattcaaattgcgaaaatcaatgcatactctgagcttacctgatcctttcttttccaccggcacaacattggagacccac

SEQ ID NO: 61614 - DNA, 771 bp, Zea Mays
gtgctaacaccctctctttgcgcgataatctccaatgaggggttatcttgtggcagacgtgactccacatttatgtaatgatgtggtgatagcccacctcgtgatctcccattagctgttcgattttttgatgtaacagggagacatggtgctgttgaagacttcatatcactctcatcatcttgatcattagacccactgaaccacttacggacctttcctagattaggaagaagtcccctcttggaatagcttgctttagggttgggaactatttcctcgtccgaaggataagaaaactcatgtgttacttgtggtggtgcccatttggggtcatcactttgttctgagagtgccgaaagagtgccacatagagcaacatcattgtcaacacccttcatattatcagcgtccttcatataatggtcaccatcttcagtattttgcaatatctctttaccctttcgctcaaggtcttgtaatgatgtcacctgttgtgcctttgtttgctcaatcttctttagaggagttaaaacttctgatttttcctttatagaatttttagtatcgacctccattacggctgcctcgggtttaagaaaaccaaccccctgctcgggtgtgattgtttgcgtattctcttgtaatttcttaggcttgggtaccaggcgttccactagatacctatacctttcattctgcttcaaggcaggggagagacgcaacataattttatcatagaacgggtggacttgaccttctggtcgcact

SEQ ID NO: 61615 - DNA, 428 bp, Zea Mays
ttccagcctcttcctctaccacgtgcaacaccttgatttctcctcccatgttcacttgatcttctagaaaaatttctttcaccttcttccccgtcttcatcatggtgtcttgcaccatcagggagtcgtcgacgacctctgatttcagccataagtgtctgaagatcttgtgccaaccgatcttgcttgttttctatgctttgtttgagctcattgaattgtatcatggtgacacattcttcaatctcagcgttgggatccatctttctgtgaaattagtggcgacaaggcaacaaatataggtggaatatgaagctatatagaatctcacaacctcaccactcttaccaaccaaagctcttatgaggtccctgcgggttgcaagaaaaatgtgtggtggtaacaataaagtgatggttaagcgaata

SEQ ID NO: 61616 - DNA, 370 bp, Zea Mays
gcgatgacacctgaccttaactcgcttcgtcgtaccctacgacacatgtaacgagatccctctctcaccttggcctttaaactggaaggaccatagtttagaagacaagcaatcacttgcatacatcaccagaacaagtcattcacaaagcacttgcaaccgcatgagcactcactccagagacttgggagcttgatccctctctagcttgtttgcaaccccctactataaactagtgcagggtaacatgaatcactcaactgaacgtggggacattctgcctgaactagtataaacttttgtgtcaactacacacaccatccactccaaggcatacaaagcatgatagtaactagccaatggttacaaa

SEQ ID NO: 61617 - DNA, 289 bp, Zea Mays
ctgggaggaaggggtatggatgtatgaacgagctacgaagacaaacttcagaatgcatgtttggtaccagtactccatgcatgacttaccggcgtatgggctattctgcgcctggtgtgttcacggtaagttcccatgcccagtttgcaaggaagctctcaggttcatttggttgaaaaagggtggcaaatattcgtgcttcaataaacatcaacaatttctccctcctgaccatccattccgcctagacatcaagaactttacgaaaggtgtcgtagtgacagatcgc

SEQ ID NO: 61618 - DNA, 649 bp, Zea Mays
ttttgctcatcaatttaataaatcatcagtagaagtggggcataagtactagataagctcagttggggctgaagtttttaccaatcatatagtccgaggggcaaccctttggattgaaggaagagactttcgagcccaactgatagttatgtcagaactatccttggatgtgatcattggaatgaattggatgagaacttgggatgtcatccttgaaaccacaaaccaaaccttgtcacttagggaaccatgaggcaccaaaatgtttcgggtaatcttacctcgtcgccttgagttgactagcgtgtattttgcaacccaaaaaacttcaatagaagaaatctcagtagtttgtgaatttactgacgtttttcctgaagatttatcgggacttccacctacgcgagatgtggagtttgctatagacttgaaacccagcaccgcaccaatttctcgaagaccctataagatgccacccaatgaactcgcagaattgaaagtccaattgaaagaattgttggataaagccttgattagacctagtacatcggagtggggtagtccaccattatttgtaaagaagaaggatcaatccttgcaaacatgcaaagattatcgccctctcaatacggaaactatcaaaaacaag

SEQ ID NO: 61619 - DNA, 895 bp, Zea Mays
tggagccacagattcacccctaaagaaggaacttgggacccaaacttttggtggcagttgaataattttagcacataactttgctccagcattaggattgagatgggaaaaaggatatactatctcatcaaagaccacgtcacgtgagacatagatacgtcccaaggcaatatctaaacacttgaaacccttgtggaggacgttatatcctaagaaaacacactgttttgatcggaattggagtttgtgagaattatagggttgtaggtgaggccaacatgcacatccaaaggtgcgcatggatgagtagtcaggtttctggttggagaggcgctctaggggagttgtgaagtgaatgacacgactaggtaggcgattaataagatttatagcaacaatgaaagcatcgtcccagtactttagaggcatggaggcatatgggaggagagaaaggccgacttcaatgatatggcgatgtttacgttctgcgacgccattttgttgatgtgtatgagggcaagacacattatgcatggtgccaatgttagtaaaaaaaagaattaagtctctcacattctcctccccaatcactctacacaacaaggattttcttattgaactgtcgttctaccatggcttgaaaatcttgaaacttatgaaaaaacatcagacttgtgcttaataagatagatccaggtaaatttgctagaatcatcaatgaagcttacataatagtgatatcaccccacagactcaatggcaggaccccatacattagagaagatgagctccaaaggagaactagacttgctatcaaatctagtgtaggggagttgatgacactttgcctgttgacaagcatcacaaactgaagaacaagatgcctcacctaaca

SEQ ID NO: 61620 - DNA, 414 bp, Zea Mays
ggggtgaccactatgccctactaacggagcaatcgacttaagtcggcaatgacttaaggcggtgcgacatgctcacgcttactaaactcggggtgaccactatgccctactaacggagcaatcggcttaagtcggcaatgacttaaggtggtgcgacatgctcacgcttacttaacttggggtggccactatgccctactaaatgagcggtcggtttaagttggcactgacttaaattggcacgacacgcttggcacgtttgcaatcacccatcttagggcaacttctatgccccacaatgaaatttcaaaaccatcacactacatttacttctacaattgtagatactatggaattctaacaatgggaaaacaatagtagcattcagtattcaaaagtgttctctaacaaaac

SEQ ID NO: 61621 - DNA, 287 bp, Zea Mays
ccgtgggcaatgatctacactgcgtaaccgccggtaaatcctggatgaccgtgttcgcctttccctcctctgtcgatcacgctatgcatcagcctgcatgcttcgttgttccgctgggtgggcaatcaccggtgagggcaccgtcgttacccatgtcgcgccgccggtcggtgaacaaggagagtggggaaaagaggggagatatcgggaccatccatctggtcatgggtgactcagattaaactctagcgtacctgttcggggccgcgttgtagccatcggatctt

SEQ ID NO: 61622 - DNA, 529 bp, Zea Mays
ccgtccgaagtggcggtggagacgcatgaacggcgggttgtcgaaaccctagggttggggacgaaggagcccatgtggaatgcgagaagtcacccgacttcgtgaagacgcggccttcggtcgacttctcgcgatttgtggtaaatgggctacggacggaagcgcttccaccaaaagccactcctgaagctgagcgcttggctcagattctagcttctggtagccataagctgcccagaaattgaaccaaacaggggctaggtgtcgttcgcggtagcgcttctaaggcagtggaggagatgaaacaacactagcggtggggttcgaagaaaaaacgattgaagaaacgaaacctcgctaggcaaatcctttattctaggggcatatggccatagggggtgttttgcaaacaaatcagcgctacaggtgggaggaggatttcacaagtttggctgctaccattggatatatgttggcgatgggagaggggagcaccatacctatttaagcagaggcgatgggagagggg

SEQ ID NO: 61623 - DNA, 419 bp, Zea Mays
cagcctcttacgcgtgggccccatgtcatcagcctctcatccagtgcgccacggaatcaagcggtgctcttactggctgacgcgcgggtcccgctgaccaactttcccgggtcacctcctacctcacgctcggactcgctgctggcaaagagatccacggaaaccgtgtgcgttgttggcctggggtcgatctggccaactcgacttcgtccctgggctataaaagtaggacccctaggtccttcttgcccaacaaatcaagaaccgtacccttgtgtcatcgccagggatgaaccaggggcggcgccatgcgagtcatggttgtcgttgccgtcaatccaggttagcgtcatcgacatgtcctcagagccggacctgggcgctttggggagttacactggtggtactcgtggtctttc

SEQ ID NO: 61624 - DNA, 414 bp, Zea Mays
attccataaagcatggacttggcttccatgggggagccaaggacacaaagagccataaggccccaaactttgttaaggagaaggggaaggcgcctatggctagcagctctcattcttcacatgatagaaagaaccatgtgctcttatcttgtgtctggacatcattatcaggacattgtgcaatgaaatgaccaaacttaccatatttgaagcacatgcgctttccccttgatttgttcttattggggtactccttgcatcccttcaaaccggtcttgaagcgcttgatcacaagcatcatctcatctttgttgaggccagccgcctcaatttgtgccaccttgttggagagagcctccttgttgttcgtcgctttgagggcgacaggtttagggatggcaatgggtacatttt

SEQ ID NO: 61625 - DNA, 1079 bp, Zea Mays
attttaccatttttctagaatttcctataaatttccaagtctggcagtaaaaagaaaaagaaaaagaaggaactctagtgaggggttttgtggggggttttgtgcgtgccctccggcgaacttgtaccggttggaatacacaacaactagtgtcctaactcggtctacacctaattccagccctggcggttctaatccatccctcaattgcgcgagtctggcccagagttcttctgctcacgacgccgacaagacccgaggaaaaagcgaggtgttcccgatgactaggtgcagtatagtttaattggcggggtcgacgagtgtcacaagcatgctagagtgctgaaacacgaaccaggagagcgagagcggacctgtagacggctggccacgacgaggtgactcgcggtggcgcggagagtggatttgggggaaacgaaattagggcgctacggtggacgatcggaggcgagggctggtgccctggcttcgtaacaacctagcagagcagactggggcatcaatttatagaagatggtcgtgaggaggttgaatttggacggggaagcgcacgcggtgagaaggggggagagtcaccaaggtcgctaacgtggcactcactggctaactgtctacagcggtcactgctgagtccttgcagcttgtgacgatgtggtgaattgattacggcgtggagcaatcgcggtgaatggcgatctccacggcgaggacgtccagccacgtcgcagcgcaagtgggtacggcgactgggcacaacagtgctccgacttcatctgtatgcaagatcttttcaccggcgaccgttatccgcatgccagagcgcacgaatcgcagcactggcaaggatcgcgacgccaattcaccggcggtgagatacactgaacctgatcttgttcagtcactgtaccatcgaaatcattcatcagagcgcctgacagagcaacttgcaatgctttgttctcaaatttttatgtagtaactcaataatccgtctgtggcaaagttgatcttctacaatccagcttgaattttgttatagtaaccagaaccaaatactc

SEQ ID NO: 61626 - DNA, 371 bp, Zea Mays
gagtgtaggaatagctccccctatatgtgtgcatgatatttctagttgaagatatgacacacataattgatcggagttttgatggagatcttcctacagtcatggttatcgaggcatacaagaagtaatatgtaaaataagcgcagcaaatttaatcactcctcgatcaaccattcatagaataattcgaactaatagaaacataagatttaacagacatagttcaatccacaaaatattacaaacatttgtccacaaacataagacatagttcgccaaatgcataagacataaagttcaaatagtaaacatgcatatgcaaagtctcaatgtccacatgagctccccctgaatatgacaccccaactttt

SEQ ID NO: 61627 - DNA, 409 bp, Zea Mays
ctgaatgatagtgaagctgtatagaatcagtgtaaccgcaactagatgcgccaaaatccgacattctctccaaattgcatgcacgcctttaaggtgaccggatgaattgtgtgtggcgctgataaaaaccgaaactctatgtggaaacattcgtcgtgattggatgcccacctgatcgcgtccaaaaccaccacgtgcattgaccatgtgcgtgtatgtgattggtgggccgagcacagcctgcatgcacgggcgcagcctagttattttcttacatctcggtctgcacgcgcagagatttgggggagaggcttcgctggtcacccaggctcgtaccggcatggctcccacggacacaacatccaatcatgctgattgatattgtagccgtcctaaaaaaaggtacctt

SEQ ID NO: 61628 - DNA, 557 bp, Zea Mays
gacacgagactttagtttatatactaatgtatattaggctcgtcctacatttatcaaatacgaaaaaatatgggttcaatctggataaaaatgggatctcgcaaaaacagacggaataaaccctctcccgtttccgttccgtttccatattttttctgtaaatacaaaaatggttgggtcaaatatagaaacgggtacatgtcggtacaggattttacccgtctattttcatccctagtcggcatgtgcctcggtcgtctaggcttatctggccgcgctctttaagactagctcatcgtgttgcgtgtcgaagagcttcggtaccatcattattgtccttgtgccacgccgacccatggcctttatagcctgggtctgtctcatcatgttgcgggtcatgtagaggaccagtgcaatcaggcctaggatgggtaggtcatgagtggaaggaggaccgactctcccactacagctcgatgtcaggcacaattagtgcagtcagccacttacgggggggcagtcttgggtcaggtgcataatccactatagtggcttcc

SEQ ID NO: 61629 - DNA, 543 bp, Zea Mays
ctgtcgccggcgagcttatctgcccaagccgcaaagcacggggggtacggcggtgagtcaccggagtcatctccaggcgcatagcttttacctggcagccttatcgggtcatcggcggcgtgaatcgcaatggcgatggcgcgaatcgcggcgaagatcggtcatcggcggtgagagctctgcgctggcagcctgatccaattcaggttactgtaccatcgcgagctcccatcagtgtacctaatagtcaatgtttaactcgaattttctccaaatttactgtggtgactgattcaactctctgcattaaagttatagacctatagttcatcttcaactttgccatggagctcaccataaaatagttactgaatccaactcaaaatcaggtttaaagtctacctaatttcactgttactcgaaattcagtcatagggtggtctgacagcctgactttgggtgtgtttttctctaatttcttcataacaaccttgcttacactcttaagcaaaattgttcccctatcatagagctacaaaattg

SEQ ID NO: 61630 - DNA, 568 bp, Zea Mays
agggaaccgatgcgcgctcgctaacgatcgatgagggtatgaggcaggactgttgaagcgtaataccacgccgctggtctcatgtttatatagcgccaaaggccaggcgatcgacatgtacaggatctatctatagctaacaaactagcaactacctgaaggtattcaatggataatcatcgggaatggataatcactaggagcatctatatatcaccataacagacaggaacatcttccatcttcaattccaacaaggacgacgggacaccgggctttatatccatcgtcacgaacaagaatccaactgatgaggagattggttgttcgattcgaacgcgatcaggcattcagttatgcccctctcggtgatcccatcctaggcagtcagattaatgattaatttagatctgcatttgttcaaacctctgtttgctactgtgcagttttcaacactggagattgtctaaaactgaattttaaaaccgactgcaaatgggtagtgcgcgaggctgggttgaagactggcgccgacgagggcagcgacatcgcagaccggagcacacca

SEQ ID NO: 61631 - DNA, 598 bp, Zea Mays
ccgtgatcaatattgggctcggagccctaaagtcccgaggcggttcgtctgaaccctattgagggccgagccttcaaacctctgaatagtatctttccttgcctcttttcctcctgaagcgatatgccaaggtagaatatgacttttttcgatttgctgctctttttccgagggggtttcctgaggcagaagacacttctttccagttcgattgtcgagaggataaagggtagtgaagtcgagggggagggcataccttttgaggtggaatgtggaacaacactcggcgtgttattcctcggaagggacactgtcatttaatgcaacgagacatcctgtctgtcagccgaccgttcacgacacgcgtgcccacgggattcgaaacagccatcgtccagccgttttcgaatcacaccttggtggctccgtccgtcctataaagctgaccaagagggagggctttggaccattacctttgcagccttaatccttttccttcaaacaccgtttccaccttcttacaaaagatcccttcgccttcttctcgccccttcgttcgtttcgatggcagaaaagatcatcgtccttcctccctgtg

SEQ ID NO: 61632 - DNA, 397 bp, Zea Mays
ggagcgtgaggatgatctgatggctaaatatcctgaactctttgctagccaaccttgaatctcgagggcgagattcttttaagggggataggtttgtaatgccccgaattttagagttaaattttttctttctccatcactcaccaaattcgggcgttacctttcctctttctttttcttctcgctatgccttgttctttttcaaagttctagcgagaattagctcgacatcttgtgtaagtaaaaccctagggttaattcttttggttgttgcatcatgtcggaccatgcatctcttttgtttgttgagtgaatttatggatcatgcatttcggtgaaggaatagagctaaaacacaaactagaaaaatagattaaaaggaaaaaacccattttcc

SEQ ID NO: 61633 - DNA, 285 bp, Zea Mays
gagattcctctcaatgggcaaactttcacttggtcaaacatgcaacgacaacctttgcttgaaaagctggactggtgctttgtctcgccagcctggtcttccaacttccccgccacttctgcccttaccttggctagtggtgcctctgatcacgttccctgggtagtcaatatccaaactaacatccctaaaccgcccattttcagatttgaaaattattggcttcagctcgaagactttcattccatattccaaggctcttggtctcatgctttgtttcagcct

SEQ ID NO: 61634 - DNA, 582 bp, Zea Mays
ttcggacgaggacttggattattttgctgcattggatgtggctgcggcggagacttctccacgtgtgatgggtgatgaggatcttccgggtgcgagtattgggcataggcggcgaagggcggtggcgaaacagagagtgagtgagttgtcgcgaagtgataggcgtcatcgtggtgaggtggagggtggtcgtcttcgtgtagacgggactggcaatcgggaattgttggcctcgccggctggggcaagtgtaggtgagggagagctgcgaagtctttttgagggtgatgagttgaggataacactgttcaactacagggagatgggtatcatctctagggttgagccaatgtaatgtgtgatgccctcgctgtatgtatgtaactataatttgtatgataaggttgcgtgccttcgctgatccggccgcgcacgtaggcgacttgtgcacttgatgttgcacatttattgtgttagtccggctgcacccgtaggtgatttttgcacggagggtccggctgcacccttaggcgacttttgcatgggtagtcttttggagaagacttcaattttgtgtacttg

SEQ ID NO: 61635 - DNA, 557 bp, Zea Mays
agcagattggatggtataaaaattgtattgtgagatatggtttatatggatatggatagtatataaactttacggtagtttcaacattgaaagtgtcctaatatgatacttgatgagtcatggcagagttatattttatcgaaaaatgtgatttgaacattgtatcgtttttagttattatcacgatttatggcaaaaaaggacttgtcatcaatttgtgaaaaaatactagtgctagaggacaagaacaaggaggaaaacacatactaaacacattttaagcacaacactaaaaaatagtgagggattctaaccacctcaattatctccattacctttgctaaacaaacttttatcaaatattgaatacacgtgggagaagattcagacgtgggggtgggggtggacatgatgggaatgggtgtagcacaaaattgcttgtttgcatattttgttgtgttgaggataaaaaataaaataaatgatacgctgcgcatagctcgccttcgtatataatcatcaccgctacatccaggtacgacacaattatattttct

SEQ ID NO: 61636 - DNA, 340 bp, Zea Mays
gctagtctgcggctcgcctgccatcgctgtcagtccatcgtctagccgatagcccatcatggtcggcctacctccactcgaccattgtctcgcactagagtgcaagctgccacaacaccataagattaatggtttaatggtgttttcgatgttttttctatatagttttgttcttttacttacattgatgcttactttcaagctatcgattggagtttctattgatgatttggcgtcgctaaaaggattttcgatatccatattatttagtaatagtcatgatattacaacttaactttcatgctattaccaagaaagcacttatagtttagtatttttt

SEQ ID NO: 61637 - DNA, 360 bp, Zea Mays
acttttctttcacaatcttgttcaacacttttctttggtacttttctttcttctcttttttttgatactctttttttatagaactaaacacagagatctgatatgatattgcacactttataatacttaacaaagaactcaaccagcagctataacttaaataggatcaaagttaacgcgaaggaaatgatgagagttttcagatttttctttttgtggatattttcagatatatataagaggctcaaagggaacacaaaggatagagtgaccagcaactaaacaaagactctaaggactgaaacttaacaaaactcactagaataacagattgaaacaaagggctatgacaaaatattt

SEQ ID NO: 61638 - DNA, 508 bp, Zea Mays
tcatgtgtcgtctataattctctatctaaactccaatttagatgattctgtcaccactattctcatgaccatgaactctatcatactaagtcatttgcactccatctataaatacaccctaagggctatccttttcctccccacaaacttaacactctgagctgatccaaacttcaacacacccaattactctgctctatcaactacacttctagtgttggttcaccttcgatatactctttgccctttgtgtaaacatctccagcccatcaacacaaactctactcgaaactctatgtgtacatccatcactattcttgactactataatgattatttgttgatatactcgctggtttgtgtgtttgtctgttagtgccgcataattatcggtgcgttggtgctattccgtgaatgccagttctataagtctatgccagacggttaagtcagaagccagttctgcgagctctcaccctttcatcggttaaagcaacgaaaagctcac

SEQ ID NO: 61639 - DNA, 657 bp, Zea Mays
tccacatttgatcgagcgcgagagcctggatcggaggggacaagacgacgagtagggtatatttctggaggtccggcctgggcgctaatacaacgcacactccatgcatgaattgttagcatttctttcttttttcttttattttgggtccagacgaactgacgaaggatagtccagaggatgcagggcgctagctgattgatagattaattatttgattggctcttgtttgtcagcatcacattatattggttgctaatgtatgtatgtgcagagatccaggacagagaagaagagctagctagtagatccatgcatggttttagcgtgcaacaatgctgatgccgtgcatgtttgtgtgtccccagccatgagggcacttgctaagctctgatctggttgtaataatattgctgagggggacaaacaggcatggagtggcattgacatgctttgttggatcgacgtacgtgcgtgcaataacatgctcgttggatggacgctcaccatgcatgaggacaaagctagcgatccatgtactatacgtctatactgctagtgttcatctcccccggcccggccatctctccatctctcatcgcagcgccgtacatggcttggtgtgcaccgtggaggcatcgaaaatgccgatctttc

SEQ ID NO: 61640 - DNA, 708 bp, Zea Mays
tgccccaacagaatggcattgttggacgcaagaatcagacccttgctgagatggctaggacgatgcttgatgatcataggactcctatgtgtttttgggtcgaagggatcaacactgcttgccatgtgtccaatagcatctttctttgggcttttccaaacaaaactttttatgagctgcgatttggacggccacccaaggttagttatttcagggtgtttggctacagatgctttgtctgaatagggaaatttggataaatttgagtctcggtcttttgatgtggttttcctgggttatgcattacattctcatgcttattgtgttcttaacctggagactaaccgcattatgaagacttgtgaggttacattcgatgaaagtgcaccttattcatcccctttctttgatcctgcaggtccagatcagatgggacataccatctttatcgaggaggagcacgacgatgccgattagggtgattccgagccgactccaccagctaccctagtcgaccctatttccactacctcagctaacagtcctgaccctacttcttccaccagttggggtccgctcgagccagctcctgctgagtctagaggagttgaggctgttgttaagggggaggccacctcttcgaggacggctccatgacatgttcagagagatcaccctcctcaacagatgattggtgatattgatgag

SEQ ID NO: 61641 - DNA, 499 bp, Zea Mays
tggtgattccagccggtaggggcaagtcgcgcacataacagagaaggacgaactaatctcttcagtcatatccgatgtaatctacttcaaccctttattaccagttgatctaatcaaaccgtgcatcaagtagatccatcacatgaacctagatccagacctaaaactacgcagaacctgctccgataccactgttggattacggggaggctatgctagcgcaaaacaaaattttcaaccccataataccaagaactactgcggttataggtcatggaattaccactagacgcgtagagcagcggaagacgtctcgatgtagacgaacgcgtcgagcagtgccgtgcagtcgtcggcgtccttcacatcctcgcatggttcgtcccagtgctccaaatgcagcacctccgaggtatccacacgtacagggaggaagcgccgcgtaccgaactgctaggttcgcgacggtggcttggcgagggcgagaggtgagcggcgg

SEQ ID NO: 61642 - DNA, 573 bp, Zea Mays
caaaaagtagatggcaaatcatataaggagatcaaccttttttataagtcttataatttgggtattacaaatcctacctcgcttacaaagaatctcgtcctcgagattcaggaaggactaggaaaaagatggggaaaatctatgtgaagctcttcttctctctcccaagtagcttcatcctctccatgatgactccattgcactttgcacatcttaataactttatttcttgtaactcgagtcaaagtgtcaagaatcttgataggatattccgtatatgtcagaccatcttgaacagtaagatcctccattggtagttgctcctcaggtaccctgaggcacttctttagttgtgatacgtggaagacatcatgtacatcttcaagatgatcgggtagttctagttgatatgcaacttctcccactcactttaaaatcaagaaaggaccaatgaagcgaggggacagctttccgttaactttaaatctcctcataccccggatcagtgacaccttcagatacacgtgatcaccctccttaaactccagtagtcttcttctattatcagcgtag

SEQ ID NO: 61643 - DNA, 459 bp, Zea Mays
gaaaactgaaactgaactccaaatagaaatggtcagagtgaaatgtgaccggattgcaagcatcatatctttgaatcccctcggttttgacccaaatgtcctgtagaaggtttgaagactgttgaatcaagaacaaactttattaaggaagcttgcccagttattcacaagaatcaagagaattaatggatagaagggggccggttcaggcgactaaagaagatgtgccatggtacagtgttctgggtggatcagaacgccagctcagctcgccgtcgttgatcgccgtccggattcgtgcacggtattggatggataacgccggggaaagggtaactcatacgtggcgccatctcccgagctcagccggagttattcatcggcgaccaccgcatcagtcatttccgccgcggtgtcctttgcatcgtgatcctacctcactgtaccactcctctacgt

SEQ ID NO: 61644 - DNA, 622 bp, Zea Mays
gttttcttcaaaagcttgtgacaatatagcatatttgatgagtgatatgcggtgtttattgcttcggcccaataagaatccgacacattatattccgataacatagacctagccatatcaatgagagtcttattctttctttcaacaataccattttgttctggagtatatttagaagagaattcatgtttaatacccttgtcatcacaatattcatcaattcttgcatttttgaattccgacccattatcacttctaactttcttgatatcaaaatcaaattggttttgagccaatatagaaaatgacttgaatgtttcaaacacattagatttatcccaaagaaagtaaacccaagtgaatctagaataatcatccacaatcacaagacaataggaattgccgccaatactcacaaacgatgttggcccaaataaatccatgtgaagtaattccaaaggtcgatgagtagacatttgacttttatttggatgagtatttgccacttgcttcccggcttgacaagagctacataatttgttcttctcaaatttcacatctttcaagccacggactaagtcatgtttggttaaccgattgagttgcttcattccaacatgac

SEQ ID NO: 61645 - DNA, 477 bp, Zea Mays
gtgtttcacttgtctagtcagtaaacgttgtcataaataattgtgctaaaattggtcatgagaatgcagtggggacacgtatgtgcgtgtgtgccgtggtgtattatagtggtggtggcgtaagatatttgattgaggtgtgcgggaatatgccgtaatgtggttatactcgcggcgaggaaagatgtatgcattgggtaacacgacgcttaggtcgctgttgtataatcgaataaaggatgtattattgagcttgagtcaaaatgtggggtaccagtggtacgctaggcaggcggtgtccaaataaattaactggttgatgtgatggttgtcgtgcgtgatttattgttaatgagtagttggattatgagttatgtaaggagtatgttagaaactagtatgcggcgtgtaattgtgttcgtgtggtgaataataggtcagtaggtattgttggtgtcagtagcaactgtagtctta

SEQ ID NO: 61646 - DNA, 560 bp, Zea Mays
aaaacatttctcgaagcaagcaactcgatccacggttggcacaattcggaaagaaaccgacggctgcaactaactgcggggatagacggaagaacaaacgaaggcaacagtagcctaacctgcaaacggtgctgatacctgtcaggccggtcggagagaaagaagatagggcgagatcaaagagtggaaggagggagctcaccagtagatggagatgagggataaccgctttagctccccggtcctccgctttccataggggatcgaaacagaagaggggaggcatgatttgttttttgtgcctgcatgtgtgtatctttgtgtgtgtcacagtgtcagtacctgccttcactttgcgtgacaagtgttggtaggacaagcgggccatgggtagttgtggccctcgccccccaggatgccaacttttaaaacattttttattaaaattttatatttacatgttgagggaactattatcatactaccttcataagtcgttctaaaggagtagctggaaattagcaaaacaagtcgttatggatgctagtactctatttttg

SEQ ID NO: 61647 - DNA, 1207 bp, Zea Mays
tcaaccatcttctgaagttatcacattcctaccaggctgatgaagactaagaaggaatttctttcactcaaacaaggagggatgtcagtgaacgagtacagggacaagttcatcaagttgtccaagtatgctccaaaagaggttgtagatgatgagaagtagcaggaactatatatttctagagagactgattgggccactgcagtactagcttatgtctaactcattcccatctttccaaagacttctgaacaaggccatacctctttatcacaaacatgttcagttaggaaagatgaagtggaaggccatcacccagtaacaagcaagcaaaagtagtcgccctcactacactcaacctcaaggtagcccaatttgttcaggagggaagcagccatatcaacaccctatttagcagtcaccacaggccacacctcagacaccacgccctcgtcaggctgccctagtaggcaccccagcgagacctactggccagaacaccactataggcaatgcatgtttcaagtgtggtgaggcagcgcattacactaacaactgccataagaggaatgcaaacaccactctagcatgaggtagtaatcctaagtggccaaaccgacttgctactagtgggaatcaggctccatccaaaaatcgtggccagtaggactttgttcttggctgggttaatcagatcaatgctgaagctattgctgatggttctagcatcgtcattggtacattatttattaattccataatagcatttatactattagacttgggagcttcgtattcgttcatctctactcgttacattaatttgcatgatctatcccttataattatgcgtaaatccatggtagttatcacacctaaaagacctattgaagtaacttttatgagccaccagatagacgtaacaatcttggggagaaacttttggttcacacccatagtactagaggaaagtaacataatttgatccttggcatgatctagataaaaaatgcaatgcggttatacatattgccaaggggactatagagctcactagcccgggcgaagatagatttgaggtcacagtcaccttatccccatctactaaaccttctatctatcatctagagggcaaatttgtggacggccatgtccgaataattaaggattacccatatgtctttccaaaagagttacccggtatgcc

SEQ ID NO: 61648 - DNA, 705 bp, Zea Mays
tctgtttctttctcaaccactgcccatgctatgggataaatttggttatttgcatctctaccgagggcacataaaagctcaccattgcatgctcctttgaagaaacaaccatccactccaatgacttccctacacccagataagaatcctcttttgcaagcatcaaagcagacataaaatctttgaaatactggcatatcataaataggggtggatccaagccatttttatggtgtcatgtgacaccaatagattttagtaatctccattaaaatgtatatttgactatttgttagcacttaaatgagttgatgatactataacttaatagagatgacaccaatggttattttgtctagatccgctccttcataattagggtccaaacaaacagcaactgtgctcccaggattgctcctaagaatgtcagcctggcactcaaatatcttggcatattgtcctctgcacgagttatatattcttctcatgacaataccctttgctctcttgatcttcgaaattgacacatcagcacccatgtcaagcagcactgtctgctttatatacgaactttccaagatgggtttgctttgattatgctctcgtatctatcagctatccttgtccctgtcaccaacctgttgtctttccttctcggacaaatgtgcacatcattaaaagtcttcacttgaaaccactcacaat

SEQ ID NO: 61649 - DNA, 308 bp, Zea Mays
caaaagtgaacggctgaagggatatggtcgcggctgagccgttggatcagaatcggatggcacagaaacgatcttgttcttgccaatccggtatgcagtcgaggccataggatataagatcggtggcccgaatttaatgagcgaaggggtacggatgatatgatctcggccgtccatcacagaatcaatggtcacaagaccttcttccccaaggcggtggctaggacgctcgagtccgagacccattcccctcaccagaaagcgacaacttgccggccacacaacgtcacccacaccggagaaacgca

SEQ ID NO: 61650 - DNA, 908 bp, Zea Mays
gcgcgtttgatttcgctgggcctcgggtgattgtttgacacctcgattggtccctactgcagagtttgaattatgtagccatttcatgcgatttcctgtcgctgtcggaactcaaccatcagcacacgctgttggaatggaatataggttgattcgcatcggaagtctgggacaatcgattaacacccgagctcttattctatggaatatagggtggttcacgctttggatgaaatcgagatactggtcagatataaatagctaccaatggatttccatacgcacgacccccctcacgcgatcaccaccagttgttcatgctatatatttcagtttgtaatcctgcctgatccaggccgatttcttttcgccatgcttcagaacacatgggcatgttcgtaagttcgtttatggttggttgatcaccttctttggggtattgcggtggcagaggcaagggagggctattagttcttgttctgcccttgtagttgtgtacatcgtgtgattgcagagcttataaatgtgagaggagccaaccacacataattagcatgatgatgggttctttaagttcgtttcagttttgtctaggtgataaatatgaaaagaaattttacgacgggctaatcctgcgagcttgatatccaggaatcacaaatatgttccagctccaacatcaattcttttgtacgcttcatttttcaacaaccagacttcaagttatatttggcttgatattcgctgggctagtgaaacctcatctgtagtgagggaccagcagctgtatagtgattcctgtatacattggagctatgttcttataaaataaaaagcttcagattttgttctcttatttgacatgccggttcgtttcatcatgataagaaaatgatcctcgactcctg

SEQ ID NO: 61651 - DNA, 545 bp, Zea Mays
gaaatgagcggtcttggtcaatctgtctacaataacccaaattaaatcgtggtgcctggaggtattgggcaatcccacgataaagtccatgcaaatgtcctcccatttccaagatggtatgggaaggggttgcaaagggcctgctgccttcaaatgactggctttgatcctctggcaggtgtcacactcggatatgtacttggcaatttccttcttcatcctggtccaccagtataaggatctgagatcatggtacatcttgttgctacccgggtgcatggagaattttgaaaggtgagcctcatccaatatcttctttctgagctcagggtccttgggaacaaccaatcgatctccaaaccatagaattctcttgctatcctgacggaagcatttgtatttctccgccttctgcttaatcatttccttgataacctgaacacccttgtattcaatctgtgcccggactatttgctcttgtaaggtgggctccaccgagatataatttaattcacctgaaggaacaacttccaggttcagcttgc

SEQ ID NO: 61652 - DNA, 915 bp, Zea Mays
ttcttctacgctggctacagatcgtcttctggatcaactccgcaaggattttgcggtcaaggatcttgggccccttaactatttcttgggcattgaagttcatcacacatccaatggtcttgttctcactcaacgcaaatacattgaagatcttctgttgcgcactagtatggaagccaccaagggtgttgcctctcccatgctacccaccgacaagttgtcccttgatgatggagaccctctttcgcctgaagataccaccaagtatcgaagtgttgtcggcgccctacaatatttgtcattcactaggccggacatctctttctcagtgaacaaagtgtgccaattcttatcaaggccgactacagtgcattggacggccgtgaaacgtatactacgttatctgcggcacacttgtgatctcggcctttccttcaccaagtctggctcactcctcttaagtgcgttctccgatgccgattgggctgggaaccctgatgatcgccgaagcacaggtggctacactatattctatggtggtaacctcatttcatggagctctaggaagcaccccactatttctcgttccagtacggaggccgaatacaaagaaatagctaatgccacagccgaactaatctggatccaagtattacttcgtgaacttcaaatctctcagccacgctcgccggtcttatggtgtgacaacattggggccacatacctcacagctaatctgatctttcatcggtgggccaagcatgtggaagttgactatcactttgtccgagaacgtgtggcgtccaagcaacttgatgtacacattatctcatccaaggaccagttggccgacctcatgaccaagcctctaccagcgcctaccttgaacaagatcattcacaatctgcacttaat

SEQ ID NO: 61653 - DNA, 1439 bp, Zea Mays
ccagtggaaatcttctttccactggcggcaccttaactcagccgcttgtggagaccgtttcatgttgaacagttgtgtcttttcaactatccctgtagccttaactcagccgcttgtggagaccatttcatgttgaacagttgtgtcttttcaactgtccctgtagaattgaaacggcaatcgccgaacacgaagcggtgaattttgacgcctctttgctcctcgaagttcgagtaaacatcgatctagttctcgattttaatgtatttaaatggtcatcggccacatttccattcatcgcaactcagaaaaaactatggcgtctagctttacccatgtcgacatcatcgagtgattcctctgcttcttttgtctcccattcttctagtcgtgaaccaacccagagtgggatcctatagcggcatatgaaaaacaggcacctttgcactgggatgcagatggatgggactttgcagttgcatcggaatccgacggtgacctcaccgacggggacgacttccagttcctcgttgacagggagctagactccgacaccagcactgagtggtcttggacgtacgacggagaatcgtcagatgtggagtccttggacaacgatgatgacccgatgtctggacattggatgggcatggtctcctccttcgacgaagatgacgagaacaacgacagcagcagtgactacgacagcagtgacgaggacatcgacgacagtggcgatgatgacggcgatgatgatggcggggcaagccaatgagatgagatacctcccagcaagcgtcgtcggctacagcatgatagcttattctggtaggaaaagtagtttgtactaggatgaaaacaatcctttctaatgaataaagcaggtcttgtttacaatggcggctggcttaaataaccgctagtgaaaaagtttcactggcggctggcttaaggaaccgccagtgaaaaagtttcactggcggctggctttaggaaccgactgtggaaattgtgaattaatactgatgactggctttaggaaccgactgtgaaaatagtgaattaacactggcggctggctttaggaaccggcggtgtaaatcatttctacgggcggttggctattggaaccgcttgtgaaaatcatttggtggaagcgcttccgtctgcagctgagttaccacagcccactaagtctgctttcgggtgacttctcgcattcgacacggcccgtcctcaaccctaacccgccgttccggtgtctccgccgtcacttcagacgctctagctccaccatcgcccgcatgtcgccaaggtaagactgttctccccctgtactccccctgtacacctccaactgagtcatcggcttattcatccgatttgtattccgtacgaccttgctcttgtgtttagggtttagggttaagggttcatcc

SEQ ID NO: 61654 - DNA, 482 bp, Zea Mays
cccatccgattttagcttggattgctctctgtcccctcctctctggcttacgtctgaagcctagccctaatcccaacagaaagacggcggcaacgcgaccacaaggatcggggaagggagcggctgcacgtggcctacgacaacctgcagctagcgctggacgacgtcgcgacctgcaactagccagctagtgccacgacccacggcgagtcgacaacatgcaagttgtagccaacgtcttaacaacaaccatggatccataccaagattgttgatccccgctgcagcctacaggtcataagaattcaggtgtatgtgtatcagtgtctactattagcatttgtttacatttagatattttatgtgattgcatttttaccatctttttctcatgtgtactgttagcataataacatgtatcaatcactttaatacttacgtctccatatgtaccgttacaaaataaatatttgagtcaacag

SEQ ID NO: 61655 - DNA, 377 bp, Zea Mays
aatcattatcttgtacacgcctttcaagttgttcttgaaatcagtgaagtcctcgaaaatatctccgtagcatttggttgggcccatttattcgatcgacatagcctatatgtcgactaggtctctcttgttctgctttcttaagagtaaagtccttgtcatagttctcacgaccttcgattgaactcgatggttgggtcctattgtcaccaacatgtattcttggagggctgaccctaccatcaaggtcgtcttgtgatgaatcaagtgatgttttagggtgataaaaatataaatgtaggttcttaggagaaggtatgagatatctaaagttgaaatctacctgacacatttagagataaggtataaactttaca

SEQ ID NO: 61656 - DNA, 544 bp, Zea Mays
gtaagatagaatctatcaagatgatatggatatgggtgagatagactgcatgatgtaggtcaaaatcttgtttgatgttaggtggggatagatagattatacaattcatcatgactctattggttgggttaggtcttctgctcatggtttgagttgccttaatgcactaatttaggtttaagtgcatgagggcagaacaaggtttataggagtaggatctagtttatttcactagtgttaacttgttaagtgactcacattagattgaataagatttcgattagtataagttgagggggtcatatcaaattctagttgggtggctttgcgttaggtcggacttggaaaagaaaaattatgtatatcattggaaacatgtaggtcaagctggtagattagaatcacactctctcttttttatagatagattaagaaatttatcaaaatggtgtaggtcgttggtatatggctgagttgatccaagtcaccaatttaggcttaagtgtatggccttatcttttgtatcagcattaagctactcaca

SEQ ID NO: 61657 - DNA, 272 bp, Zea Mays
tccaccctccttagtcgcctcaacccttatgggacgtatctagagccaccacactcaccccgaccacatttggatctcgtgcacttggaacaccaccaccatgtatcatgtccatgacaatacgggtcctacatattgtaagaaaagcaagggcctaattttttagggccaatgtttgagttgagtccaaacaacatgacacccaaaaagtagtagagtagtggagctagtttaggcctattgctataattgatctagggggtgtctaggtc

SEQ ID NO: 61658 - DNA, 426 bp, Zea Mays
gtagtacattggatttgggatgttcctatagatttactgtctatctaccctagatttggttaatgaaatgggtaataatggtgctccactagcccaccactgccttcttggccatgcccatagcctgcatcgctctagtgtaagcaaccaacttaagtatgctttaggcaggttttacttccgccgttggtctctttcagtgcatggtcacaattattgttacattaatagctgacccaaaaaataagttatcttcggctcaaggagtcgatcgtggcaaaccgcacaggccgatccctgcaatccaactggaatttagcattcaacttattactatgcacatgcatagtggtacattgacgtcaaaaccctttcctgcatggttgcatgtcaagctaggtggcatgtcctaaacccccgtacccg

SEQ ID NO: 61659 - DNA, 389 bp, Zea Mays
cgcttgaccccactgcgcttcccaccaaagccaccccgcaacggtctgctaaaagcgggcaaaaccatgctttcgtagaaagcttggctggctgggcatccaaacagctctttgctctcgccactctagggtttctctggtccccacatcctctaaccactctcgtatcgcctcccaggtttctcccgtgcttgccctccatcttcatgtttcctccgtcgcgtcgctttacccatgtgttttgtttgttcctcgtgtagacagagttgggattcttctcaatgacaacgagattccaagttgttctcgacgattcgtgaactggtacgtaagcggaccgatcccttcgaacttcattggtagttaccatttgttatccctgatttgtt

SEQ ID NO: 61660 - DNA, 347 bp, Zea Mays
aaagtgcagaactcctctgtactgggatcagattggtgaacggtagttctttgggcctgagattattcaagaggcagaagaacaagttcgtatgattcgggagaacttgagggtagcacagactcagcagaagagctatgctgataaccagagaagaccactagaattcgaagagggtgaccacgtgtacctcaaggtatcaccaattcgtggaatgagaaggttcaaagttaagggcaagttatcccctcgctttattggacccttcagaatctttaggcgagttggggagatggcctaccagctcgagctaccagatcatctgtctgatgtacatgatgtattcc

SEQ ID NO: 61661 - DNA, 474 bp, Zea Mays
gtcttggtacgctcgtaccattggaatctggcatattcttatttttatatatgcttacctttatatcacagagtctgtttaagacatttaagttaacatgtccctagctacccttgtttcttaatgatctaggagcggtcattttattttgcacatccttggtgatctcgttaattccttgtaacttccttcagtaatgaattcttacttcaactcttctgtcggaacctcacttatctatccttgattgttttctccacctcgtcactttgtgagtcttgccttaactctgtccatgaattatgtttttcatcattagtacctttatccttatcacctctaaatcttaccttgatgtttatcttataccggcctttaaaataccctcttttccatctcaattctatagttttattttacctatttttcccttggtcgtatcctcttccttgtcgcttgcgagtttctaactcc

SEQ ID NO: 61662 - DNA, 457 bp, Zea Mays
cccgattcctttgggtacgaccgagggtgcttcagctttgggaggtgacgctaaggacgacctagcccccgagggttgtgctgagggcgacctagccctcgagggtagtgctgaagacggccaagcccccaatgatgctaggccaggctcctctacagccgcttctatggacgttcacattggatcgccactagttcaatctgaggaatccatggtgacgaatttacttgttgctcttgttggtccggtcaccttagagaccagtgacacggatgctaggaatccactgcctgttgatggagctgaggtctccctgagtgatgctttcaacattgtccctgttgatgccccatcaacaggcagtgcatcaatgcttccagctttaggtcttcctttatttctctctaatctccaggtgagccaaccttgcttcttattattcatgttggcaaatggg

SEQ ID NO: 61663 - DNA, 1077 bp, Zea Mays
gtagaatggtaactagtgtacaactagttgatagataagtgccgactagtcacaacattgggacatgcaattggggtcattttacaaagcctaatttacagttacctggtgaactagtttctattgccttcaaatcttcctgtagtcaattactacgcttccacatagttaaacacatatctgatgatgttaattactaatctggctatgatgcaatgtatctagtttgtgacacgttaatcctacaattacaatgtagaccactggatgtgaaatgcttgatctgaacaaaatcccaaacttcaaacacacattaagagagtatgtagttcactacataagaacttaaacagtcgctaaagagaatccatgcagttagcaaaggtagcatgggaagaataaagaaaatctgacagagagactcaagcttgcactacattgcaggggtagaatgaaaaaaaaaagaacagaaaaaagcatagcaatcgaagtatcatgtaaccagggtgtgttcactcattgctccatgctcctacaaacaaaggacgtgacacgatgcaaattggtaaacctaagtttggcccaccgtggacgagattgccaaaggagagggaggtagtggaaagagggtgaaagagtactctaaaagcaacaaataaattattttgtggttcccctcgtgttgtgtcatgtggacatcataccctcgcatcaaccatgtccatcacaaactcaaggatgagttgtttgacttgggggaagagtaattacgggcataggtccaaacagtgaaacgacaatatgtaagctgcacaacaagttatgacaactcatataaacaattacgacaattcagattccatggttgggaataaattgattggtaagccattttagtaatagcttgccttacttgaaagattcagcttttgctttacttgtttaagaagattagaggctttcagatgggatggggtcgataaatttagcaacctagcacatttatttacttgtccgttaccgagtctgcgcctttcttggagtttggcgtttctgttcctctgtgcccatccgtgc

SEQ ID NO: 61664 - DNA, 331 bp, Zea Mays
attttagaaagaaaaaaaaaactatcccaactaccgtaccggtggctaagaagttattttaatcaactttgtgcacacggatttgatggtggtgcaatcatatctcatggtcttgtcaagtggctaacttcgattattcatgaggtaaagtcttggacgtttacgtctgacaaactagtggacgccttagaagatgtttatgctgaactatatatgtggaccgaaacaaacaaacgtggttttcgttcactgatgaacttggtgaagtgtaaaagctcgaagtgcttactaatggacgccttagaagacgtttctgttttttttttttttt

SEQ ID NO: 61665 - DNA, 425 bp, Zea Mays
actcggtgagataactaaacctagttccgcaatcacctctattacggtttgcacctatcggatcgagatatcagggcgggattcggatagctgtagtggccggcgttgatctccgccgtaggttttgggcgacgccatcgttctggtcgctggaagaaagaagagggattggtgaccgttggatccagttggacggtcacgattagaaacaacataccggttggaccagattaaaccgtgagcattagatcagatctagcggttaggatcgggtgctggcatgggtggttttggtccgttgatccaagatcgtagggcggctatcgcgtgcggtttcatatttggtggcgatctaatcggggcactcggttgccgatcggacgacccacatcaacggataccttttcggcttgcacgtattacaa

SEQ ID NO: 61666 - DNA, 731 bp, Zea Mays
ccagttcacatccaaattctggacaagccttcagaaagctatgggcaccaagctagatttcagcacagcgtaccaccctcagacagatgggcagacagaaagggtcaacaaagtccttgaagatctgttaagagcatgtgttttagcttttggtagaagttgggagtccagtctaccttacgcagagttctcctacaacaatagctatcagtccagcatcaagatgtcaccattcgaagctttgtacggacgaaaatgccagacccctctcatgtggtccaacgtgggggaaaaagcactagaaggacctgcttttgtcaaggaggcagaggagaaagttgcactgatccgtagaaggttgcttgaagctcagagtcgacagaagagttacgcagacaacaggcggagggaactccaatttgaggaaggagacttcgtctaccttaaggtttctccaatgcgtggggtcagaaggttccaagtcaaagggaagctagccccatgttttgtaggtccctatcccatcattggcaaggtaggacccgccgcataccgcctggaactaccagaatccatgtccgacatccacaatgtgttccacgtatcccagctccgcaagtgcctgcaagcaccagaaagtcacctcgaggaagaaacagtgcagattcagaaagatcttcaatatcgtgagaaaccagtgaagattcttgattcagcagtcagaaagaccc

SEQ ID NO: 61667 - DNA, 879 bp, Zea Mays
cattatttgaggatgccaccctttagacagagctcgaggcaattatattcggaactttaaaacaaggatttccattcaaattttattctgatacatttggatcgcgatcagtcaacaagctccagcacacatggagttgacagctagcgctaaaaatcaagccaattttcttgcagcgttactgaagcagcagcatgtgtccaactccgtgttcggtggcgtgttccagcagtttatcacagggttggcgtacccccactgcttgcactggctccggcaacggctgatgttgcaccccggcatatgcgtgcacctctctacacacaaaaaaaaactaagtcaataataatgatcatgccaaaatccaatgcgcatacaatccaatcctttagaaagtaaatagataaaatatggttagagtgggcaggatgcacgtatatatatacataccatcgtctcctccgtgcgcagggcagggtgccaacacgatggccatggccacgaccaccatcgccaacaagaagagagccctattatcttgactcttgagaagcgccatggatgcgagattgatgttgtttgactgctcaacgtatggccatgtttatatatagaggtaggtggcctaagcaaacatggcaaagaattaattctggccattacacctctttactgctgctatatatattgttttcctggtttatataactcgattccaatgcaataaaaacttgcctcttagtaccggatccttaccataacccatacgcctcatcattacgggtcatttatcaactccaaaatctcgaaacttacctttagcagtaattatttgcccctggtctttaccatgagatcaccgattggttggggtttatt

SEQ ID NO: 61668 - DNA, 1094 bp, Zea Mays
gggcgcgtccagctctgtacctctgccaactccggagggtccagagattattcttaggcgaccgctccggtctggcgacaaacctggagcaacgctgactcccctcccttaggtgctggctcgcgctcaccaggccctctaggaaatcgaggcggctatccggcgagagtgggaggcgctcgagaccgagcaccagcgcctcggcgactggtgcacccaactagagaagcgcactaaggcggcgtcctggcaatttgcctcagagcgggccgagcttgagcaggagtgtgagaacttcaaggaggacatccggaaggtgtctgaccgagaggaggaggtgacccggaaggagagaagcttggtcaaaaagaaggaacacttagaccaaaaggaagaggctgttacagtgctccatgataagctgaaagcttataacacagtgctggagaaacagcgggacaagcaggttgcggcagaggcgaagctgcagaagctgcagcaggaacttgccgacaaagacagcgacattgctcgtgccgaggataaccttaaggcgagggaagcttccttggcgaaatgggcaactgacctcacctggcaggaggaggacctcgccttcagggaggagatgtgggcaaggcggaacaagctactggatgagcttgagctcgaggtagaggagaaagggaagcgtttggaggggaaagagcaggcactggaggagcaggtctgccagttccaggcagcgcaagctgtataggcgacacagatggccccgggcccctaggcggtggaggtgatgaggaaaacacttgatgacctccgggctgagcaacgcgccggggctcagcgcatcgccgcctgggccagcgaggcaagcacgacgctagtgccattgaggatgagtcccatctcggcattggtgcggccggcgtccatcttcgacgtgctcccgatactagattccgtcgctgaccgcctccgacgtctagatcagattcttggcgcccgcttggaggccgagggcagcagactctgccggtcggcaatcgagtacatcttgacatgcttccggagccacgacccggctgtct

SEQ ID NO: 61669 - DNA, 818 bp, Zea Mays
cgtgctcgtgttgttggcccatgcattatttgtatgagagtgatatcctcatcctcctcctccacttgaattggagtcttcctcgactcagacagtggccaaggggatgcccaagcaaccctaagatgtacaaggcctttaagcccaaaaacaggtgtcgttgatttctagcagattctagacatcatcttgttatgacgatccccatcaactccgagcatattttgctatgggaccagttggattggaaagcttatctccttatctttccaatggagttcatatgtagcccagacatcctttttcgtgagacccactccttcagtccgaactggatttgcgaataaattggacttcaactccccttgagcttgggacgactctatgattcattgggccttgaccatgtagttgacatccatgtactcatcacctgggccatcctagatcccacaggatctcccgcgccctcgaccgcgtggtctgccgtgtggtcggccgccacgtgtcccagccccgacatcacccacgtatctttgcaacgagacccctgccttcttttcaaatttaatcgcttgttgcctgagtcttgggaaaatcatctgctatccactggccctagaatctatagttaattgcagactagcccctagaacatgtaaaccttgtaaattttgcatagaaactccagtttaagtgatttgaattgcatattgttcttggtaatgttgcctatctgttaatagtacattcattccctgtcttaatgtttcaattaatgaataatccatggttttgattagagagactaagttctt

SEQ ID NO: 61670 - DNA, 273 bp, Zea Mays
ttgctggcacttttcacatgggtgaggagggaatctggttttgggttgctaagctttcccttgatccttgccttagggtgcctatttatagtacatgggtggtcagtttgataaccgacacgattcgttacacaagaaaaacctactcctaacatttgctgctagacaacttcaaatgtctgctgctattatctgtcattcagcatacctagtaagccaaagaaaaacgaaagaatgcctactattcagtaatcagtacaatgcaaggattac

SEQ ID NO: 61671 - DNA, 930 bp, Zea Mays
ctggattctctaaagtgacccgcaagcccgaaaaaacacgacagatacaccatagtggggtgtatgcctacgcacgccaacaggtgatgcaggcccatgacgacagacagagccgcgccacgcacgaccgcaccatgggacccaccgcgcactactataaaggtgtcagcggcgaactagcaacagggggttcgtatgacgaacgagtgagacgatacgccataccaggagtacggctaagcacgaccctacggagaagacacacgacaacccggaggagtcgatctctctctcttgtagaaaacaaatctcctctgtaaggtccaacctttgagctataaaagggtagtctctctttcctctagggacacgagcgcacttgttgtaacacactcgaaagcaatacaacgatcaacattgcactggactagggtctcggccggaaccaatataacccatttgccttaattcaccgctcggatctaggtgatccaccatttagagtgagtccccgcttgtatcctccaccaaacacaaatttattgttccccaattttcggaaccacgacagtaatattctcactgtagtcaaccttagaatttctagagtcgtaattcgtaaaagactaactccaaatattcttgaacatcgcgattaccaatccctatttgtacagtaaacgagaggtgtgcagcagtccctactattgtgaacgtgcacatacatattcgacaccgacggcacaaaacgcagcatcaaacaaaatagactccatctgatctcggctgatggctgacatccaaaggcacggtacgcgacgcgttcatgattgcggctgcgtggattttcttatcgagtggatgaccggtgacgggaacctgatcttggtctcttccctaccaaggcatcttccgttgagagcagagtag

SEQ ID NO: 61672 - DNA, 467 bp, Zea Mays
gctatagtctgtctaacattactaccaagcttatcattattccattttgtttctgaggtttaattgctcatcttctcttttcctacataacagtgttcttgtcacatgtaaatgttttttaatcccacacgtaggatgagcaagggataaaaatgggctgatgtcccatctcttggaatgcgtctgaaggcccttggtatggatccgagctctccaacattgccttgatgtcgtcgtcgtctctggaggaagcgtgctggtagggctctgagctctcctgcatcatctcgatgtcgttgtcgtctctagaggaggcgactattgcgccagcctcgtcacctccttccctctgtcgtctcaggtacattgtaaggtcctcaagagcctggtctgttaagagtcctctatgtttataaacaacctatagttggtctagaattttattggctccactgcttacgaaattg

SEQ ID NO: 61673 - DNA, 711 bp, Zea Mays
gacaaatccgtgcaaaagccgcctaagggtgcagtcggataagcacaacaagtgcacgatacgaagtctttactaaaagacaaatccgagcaaaaagccgcccaagggtgcaaccggatatgcactacaagtgcgccatacgaagtcttcacgacaagccatccgagcaaaggccccctaagggtgcaactggacatgcaaacacgcaaacaccaccctaatggcgcaaagtctgttacaatcaccttaaaggtgtgaagtctctgctatctgacacggtcgaacaaaaactgcctacgaacgcaaccaagtacgtgtcataagcacccacacactgccatggcaagcgaagtccccatctcatttcacaacaagcaatgtcgtcatagtttacatacacacagcgaagggccaccggccacattgcacaaataacacatcgcattttgttgccctccctctccattgcgagccgagggagggcagcattttcgctcactaccgcaacacgagagtgagggcaaacatgctacatcggctcaaccttcgggataaggcctgcctcacgaaaattaaacaacatcatcttcaactcctcaccctcaaaaagattccgcagatccccctccccaatacacgtcccagacgtcgaggacatcaaatctcgttggccaccccgatctacccgaagacgggttcgttccatcccca

SEQ ID NO: 61674 - DNA, 513 bp, Zea Mays
tccgcgcagaagtcgcctaagggtgcagccggactaagcacaacaagtgcgaaaaaaccgaagtctatcgcgaagactatccgcgcagaagtcgcccaagggtgcagccggactaagcacaacaagtgcgaaaaaactgaagtctatcgcgaagactatccgcgcagaagtcgcccaagggtgcagccggactaagcacaacaagtgcgaaaaaaccacagtctatcgcgaagactatccgcgcagaagtcgcccaagggtgcagccggactaagcacaacaagtgcgaaaaaaccgaagtctaccgcgaagactatccgcgcagaagtcgcccaagggtgcagccggactaagcacaacaagtgcgaagaaaaaccgaactctactgcgaagactatccacgcagaagccgcctaagggcgcagccgaactagtacaacaaaagcagaaacgacagcatcaaaccgtccgcgctaagaccgactataatcacaccagtacacaatgccttcg

SEQ ID NO: 61675 - DNA, 566 bp, Zea Mays
gggataggtatcccctaggtcaccttggcctagagacattcatggtccatccgaaaggccactgatgggacacccggaagccgcccgatgggcctcagtcggacgggaaccattggagcccaaaaaggtgcaggcgtgcgtatgtgagaatctagtcgcgtcctgtttgtgctgcttgtgaaaatcgatggacgacccatttgaccgtagcccagtgtgacgagtggcaaaacaagcaaagcatggagattgtgtactcgtgctagtttctctgtaacctcaactcaatcggcaataaggctgatgagaggaccctacgaaaaggagatagacacccaatagaaatcatcgtcttcctctagacactccatgtattttagagaactcaaccgcacacaaacataaaaccacatgacatagggtgttacgccatcgagcagcctgaacttgaacaatcatttgtgtctccagcgtgctctgcacataccattgagttgcgatcatcgtcgccttcctcagaaaagcgttatgtggccaccccatatcgtgttgcggtacttaacacc

SEQ ID NO: 61676 - DNA, 1320 bp, Zea Mays
gtgctgctaaagtagtgattctgaggcctgaattgctgagtaacacactgttactatttcttttattcccttttccaagcatcagatatactcccaccccatccttctcttccaaattcactccatcttgccccccgatcttatgaaaaactagtggatcttattgcctgtgaggcaaaatgcatcccttttgtctgccaaaatattgatttgaattcttgggccgactgcttcggagcctggcctaatccacctgaagcctaggtgatttggtttagaagagtgtcctaaacttactagtcctaatggcaagctactggcatagctgatgcactacctttgtcactatcccctattgtaaaggatgataacctcctcaaaaccatcggttattttggtctgatgctctaaactacttccttttcggccacgggcccttgacctctacgcttatggatgtcgtgatgatcactagtctagatatttagtctgttgtcccctctgctgtcagtatgcctgaagttcctttcaaactttcatctaaaaacagatagcactagttgggggcttacagttcccagcatgccagaatgaaaggtccagtatctgaaaaagagcacatgacttttcttaacctatggcttgagcacttcatgttttgtggcccttcccttgctctgaccaagaattatatctctctggctcatcgcttagccggaggcaaccccgttagttttggaaagcttttcctaggagaagtttactgattcctccacctgaccacctccaacttgcttagtggcaaaaaaactcaggattggtagccaaggtggttcatccagctctgggctcacttgcactttcaacgatgaattcccaacttacgagttttggtcgacaattctttcccagacgagtccggcagatagatcaggtccactagttatggtcaaggcttatacagtctccctggcagcagactgcaccccaaggacgtgactagctggttcaaaatcttttttcaaggtttggacaaccctctcttctttccttattatgatcttgtcaaatttgagaacccaacctctttcaagttagatagctttgccaatgatagtggcactcgacacttgtactcacttatgatccgcccttgcttcctttaagttggcatgaacttctaacaatattatcaagcctagttatgaatcttaccaacctgttgtagtggcccgacaattcggtgttggacaggttcctcccactttcacctccaccagctgaccgaatgtagagccaaccttcctgattctatcactg

SEQ ID NO: 61677 - DNA, 663 bp, Zea Mays
caccatactattattttatacatttccctacaactaactcaactaccatctatattattttttgtttttgtttaaaatggtttgcacgttgcactatttacacgtggcttggggtagagctcccctcgatctggagggagagagaagcaaacgacagcgtagaggtggaggaagggagctacgacgaacgctgggatgggtgtactgtagccgctatagtacaaacagtgataggagagggggaaacaagtagcaaccagtgaagagagtccactggtgtcctctataattttcccctatatctcattattctgccatatcagcaatctctcttcccctatatctccacccctacagttgttccctctaaattctctccctatatcccactacctccataaaatatcactttccatatttattcaccatctattacgcatcagttttttctacactaacaaacacttcgcaagagcatcgacgctaggggctagctatcacacccccacatttggcagtgtactgtgctagaagctatcactgtcacaggttgtggaggaggtaggggtgtcgatgaaccaattggcgtgatgatgtagcctctacaggcgtgaagagggcaggttgcgagaaatattgaagatagttctagcctgtcttcaa

SEQ ID NO: 61678 - DNA, 571 bp, Zea Mays
ggtcattttctcaatatttactcgagctttttcatggaggttcttgattaactcggctcgtttgctagcatcaaagttgacccatttctgcacaggcaatgacaaaagatctatgggagcagtgggtttgaagccatatacaatttcaaatggacaaaatttagtaatcgagtgtacagctctgttgtatgcaaattcgacatgtggtagactttcttcccaaagttttaattttttcttgaggatagctcacagcagcattgataatgttcggtttacaacttcagtctatccatctgtttgtggatgacatgttatagagaacagaagtcgtgttccaagttttccccacaaagttttccaaaagtaactcaaaaatttagtcacgatcagaaacaatggttcgtggaatcccatgtaaacgaacaacttctttgtaaaaacaattcagcaatatgtgaagcgtcatcactcttgtggcatggaataaaatgtgccattttgctaaatcgatcaaccacaacaaaaatggaatcccttccctgctttgttcgtggtaaaccaagaacaa

SEQ ID NO: 61679 - DNA, 1645 bp, Zea Mays
cgggcgtaaagactccagaacacgttgttttccgattgggccgactttggttgtagtttgttgtgcgaaaacggtatccattgacgtcatacccagaatatttcttgaccctataagcaaagccgttggctacttgtctcaactcggcactcatagacggatctctttggccctgcaagtattcgcaagttaaaagacactaaattgagttcatagacggatctctttgacaaactaagcacgtaccttacgtttgaaccaggaaatgaaatcgagcaatccatttctcgcaccctttctaagaagagtatcatattcctgtggagttaggtcccttgatcgacgccagaattcatgaagaaattgttccatgtatggcgtcacctcttcaaggttggtcaatacatatagcatgatataccgccactcttcatgtgtcagggtcttggtggtcgagccacttgcgctttcgagttggcctcgaaatatgctgaggttcgattcattatcaccatcattgtaacgagggggtgggttatgcacgcttggtagtttgtcaccatagtaagttgttgtgaagtttgacacctcctcttgaatgtatgcctctgcaatggaagcctcgattttgcatttatttctacatttcttttgaatagtctttagacatctctcgatttgatagcaccaacgtccctgcacgtgccccccattcgtgcctcataggggagatgaagaatcaaatgctgcattggattgaagaagtcggggtggaaatatattctcaagcttacacagtaacacgggtgccaatctttccaagtctgcaaccatagtccgagataactcttttgcacaaagctgatggaagaaatagctcaactctgaaagcgctagccagacatgctcagggacataacctcgaaccatcacaggaagaatccgttcaatccatatgtggaagtcatgactcttcatccctaagactcgcagagtagataagttcaccccctacccaggttagctacatacccatcaaggaacatcaacatcttgatccactgaagtacttccttcctctgggccctgcttaggacaaaattggccttaggccttctccatgtctttccaccacttggcggcttcatctcttggtttggtctatcacataacgctgccagatccactcttgcctttatgttatcctttgacttatcaggaatgtccataattgttgcccaaagtgcctcggcaacattctttttagtgtgcatcgcgtcaatgttgtgtggaaggagcaggtcgtcataataggggagccgagtcaagcccgacttatgtgtccacatatgctgctcaccatatcccataaaaccaccttctgtattggccacgagcccatctatctgttgatgaattttggcaccagtgatcgttgcaggtgggcggtctgtcactacgacacctttcgtaaagttcttgatgtctaggcggaatggatggtcaggagggagaaattgtcgatgtttatcgaaggacgaatatttgccaccctttttcaaccaaatgaaccttagagcttccttgcaaactgggcatgggaacttaccatgaacacactaggcgcagaatagcccatacgccg

SEQ ID NO: 61680 - DNA, 615 bp, Zea Mays
gttggttgaaatagaagaccctttgttggacaccactcagccatgtactttaatgcttctgttgattggacttgcacttcggtaaccacatttggacatcctcccatttcaaccgatcttctctttttcttgtcgtacattcattgcgtatattttgcaggtttggccacttcagaaaatcttgaagattctgggcggtacaaccaatgggtgtgcccaaagggtgtctactccgcgaaaggtatttatcgcattgtcctaaattagtaatttgatgtgacggagaggtgtaatgatttgcctgagcagttgacttgagtccaaccgatgtcgtgttacgagaaacggcgtcagttccctgactcattttcaggcggtttgaattgcttattgaattcttgcaactgttcggtgagcggggtaggaagtggacgatcaacgcttggcctctttaaatagcccgcttgccttggctgctttcttcactcgcccctgatcacttgctctcttcttcttcctcacttctccccctcctgcacgaccatgggcagaggcaagagaggcaagggatggcctcgccgtgctgattggaagcacaagtgtccttcaagtcca

SEQ ID NO: 61681 - DNA, 1055 bp, Zea Mays
ggttttttggctttaggccgggtttttttcaggttgggtcgggttttcggtcaaaatcatggcccatacacatcctgtgaattattgcaggtcaaaaattatggctcgtacccacgtcattgcattggtcaggtcgggccaggtttttttctggtgggtcaggtcgggtggaccatgatcaggtctaacgccggtgcatatcagaaaatgtacaatgcacatttcccatccagtgtggtatcttgtgaagcatcggacatcttcagtgctattgtagactatccaacttatgtttttcaaatgtttttagtttctttttcttccaaacttctcatggggtttcttgggttacccagcactagtttttcacaagtttgaactatcacaactaactagactcacctaagtcaagctacccatctcatgtcccatttatagtatgactaaaagaaaattgaggtcctatatctacactaagcatccaaccactctagtgacacttagaactaattgatccttaacctttttgaccattccttataaaatttccagttgtccttgtcaacaatgcctatacctattaagcccaaacatcccgcactattatgatcgaacataatgtatctctgtaaaatatatgttagtcataaaaaatttgcattgtgattaattatccaaacctaattgtggcctagatgatttcaactacaactttcaagaaaaaaaggaatttctatgtgtgcaatagtctagatcattttgctagacagttcctagcaagtataagaaatctgctaacatgaataatagtgagactgaagggccatcaaggtacgataatttatttcctatggtccttttagtttgtcattcacctaattagtgggttgacattggttctaatattcatgtttgtgttgatgtttccttgttttctttttattaggccggggacttgctccttgttgatgggaaatggctcacatgtgcatgttattggtgttgatacacttaatatgaagcttactttaggaaagattgtgcagttgaaaaac

SEQ ID NO: 61682 - DNA, 416 bp, Zea Mays
taccagatgaatcatcatctccgacatccaccgttcgttttttcgacgttgatgtctcattccattgcgaggctgcagctatgattttgttccttgaaccaggaggccgtcctcgcttacgtccagataggttagccaatcgaaccctattatcctcgacagttaaacacgtacggctgttgtgaccatcagttatgccacatttctggcatttcctgctcatcttcttagctcctttcacacccaattttaaaacttgttgctcactacttttgattgttcttcccttaggctttgccttatctggtcttgctaagtttacaccttccatatgaaattccagtttctacaaaacaaagatatcaagtcagattttattttcacgtatgtcatcatatattgtagcaatgttttca

SEQ ID NO: 61683 - DNA, 928 bp, Zea Mays
ggacgcagagtcgtcggctggtggagctccagcaaggacgcagtacgacaggcgtgtgacgcagcagcagtcgttcttcggtggcagagaggctgagaggatgatggcgaggtcgctgcgtgagctcggcgtagggctttggcgagctagcagtgttggacgacaacgaacagcgatcgacagtgcggtgttcggtgagcaagacgtggtgcagcgtgttttttgggcgagctccggcgacaaaactcgaccacgctggcctggccgcgcggcacaagtagctcgacgaggagggcgcaacaaggggactaggtgagacaggggaaactccatgacatgctcgccagcggcaaaggaggactcaggtgttccaaattgagtaccggagagtggctacgcagcaggtgcttatggctcttgcgagcaacatggagtgaaggagagcacgggcgcacataaataggccgagatagggagtcagggcgccggagaagggaagaggaagagttgctggaagggagagtaaattacagctaaagatttgatggtcattgaagttgagaaactgaagaatttagaacgccattaatggtcgccttaacttcaacgagaaacggctgggagataatgctgggcagcgcgggcgtgggtggaagaagaaccagcgtggggagaggaagggaggattcatggcagttgagtgccgttcactccgacggggaggcgagcagacgaagagcgctgtgcaggtagcgcgcgcacaaacaacaaagcagagaagaaatgaatcggctggaggaagctgaagggcccgacgtgtgggacccgcacgtcagcgactagagagtgggagtgggagtatgacacgctaggctagtatgcgcaaatgaaaaatagaaggctgggctacggaagacgacgagctggg

SEQ ID NO: 61684 - DNA, 385 bp, Zea Mays
ctcgaagctgcaagcttcgacacaaaaaagctttcggcgcgaagtgacgaagtagacactgagacttgtgcagcaagaaagaaaaagaaaatacaacaatattcatgtatcatctgtaaatcgtgtatgtagactttatgggcaagtttgcaatttccacgaagttgttcgtcttctctataaataggcgaacagtaacctacataaattcacctctcgagggccttagctttgtgctgcttagcattcgaagaaccttcgatcttcctctcatagagaagtcgaaggtatgtttgtaattttgtttaacataaggaagaatgaaataaagatgctaaggcatatgaaatgagttttatatttcattgtgtatcgtcattttatc

SEQ ID NO: 61685 - DNA, 360 bp, Zea Mays
ggaacagcgacgtgcagcagtgaatagtgatgcagagaaacaactgggccggggtcctgtgtgcgcatgtgaaggaaactcatgttgtgcatagtatagtgatgcagatatgccgaaaggtaccgcccaggcgccaaggccgcccgtgtcatcctgctactctgcgagagcggagagcccagcccaccatctcgtaaacagtttgacgtataggggctcgtcatcgcagcgcagcactgccgatagggaatctactattggatggtcgatgttcaaacggcccgtccatcacggtcttcagtgaccgggtccggcatatataacgtgctgtccagaccatgcaaaaatagagtttttctt

SEQ ID NO: 61686 - DNA, 287 bp, Zea Mays
ctagagagtcacctattgtagccccatagagccctttctagccattctttgtaacttttcaggtccaaggggtttccatgtcatttgcatgtcccttggaagttccttataaatatactttcaaggttgggccacccttagatgaatccttctaggaggtacttgagtcaaggccaggctaactatgctaagtgaatagggaggtactggacgattccatgtcatcccctacccctcccatgtggtaggtaacgttgtagtgtttgagccaaacagatgggttagtg

SEQ ID NO: 61687 - DNA, 1966 bp, Zea Mays
tctaaacttcttgtgggctctcttgagttacctaagagtagtttttcatacgtctacaccaccacacctaactggactcaaccaagtcaagttagcaatctcatgcctccctttatagtacaattaaaaaataaaggtcctatcactactaagtgtccaacatctcctttgacacttagactgtcttcagtggatcgtgtaaaataggggacacgacactgtaaatggcactgtctgacactatttgcagagtgaagtttgaaatagaggataagataggggagttgctggagacatccttagaataagttgatccttgaccttcttagatattccttttaaaccgtctattgatctttgttgggacttgggacggaggccgaaccagacctcgatcgacccttcattgatcacgcctctagacaaactaaccacgtcttagcacaagagcaagcgtgaccgaagacctcggcgagtgcacgctaccggtgaagccttcaatccccatggccgacgacaaccgcacgaggacatctacaagggaccaggtgatctcatttgtgctttaacaagagatgcaaaaaatcagatttaccccatagtttgggttgtttagaaataaactaaaggttcttggacttggttcttgggattactacagaaggatctgcaaattcctatatggcaagggatgggttatcataccacaccagcaaaaggtatcaaaatttgcttgatgtatgcttgtccttcattaacatgtccatagctatatgtgtgctttgatgtttactgcaggatcttgtcaatgcagttgtaaatctattccttgacatcaagtataggatgtgtacaagacacatgtgccgactagaggaagaaccatagttgccaagactttcaaaagccctttcgaaaatgtgcaaaggcatcaagtgtgcctttttcaatttctgtagagctaagatagccaagttaacacctgcaggtgcaaaggacattatgaacaccaacccaagtagagcatggttcaacattggcttcaattgtgatagtgtagacaacatgtgtggaaccttcaacaattggattgttgatgtcacggctcttccaattgtttacatgcttgagggcattagaactaaggtctgggtaggatgcaacacaacaggcctaaatctgtcagtttaacttcaaggatttgtccaaacattcttaagaagctccacaactgcatcaatctagcccggaaatgtactgccgtttggaatggaaggctttgaggtgaaagaatgggacaagaggtacaaggttgacacagataagagaacatgttcttataggtaccggcaactagcaggtaacccttgtgctcatgccaccactgccttatatctaagctccaagtctcctgaatatgtagaatgttattctatttagcattagaataagatctatgatcattgcataatgccaatgacggagctgcaccaatggcaaaaggatcaacgcaaaacaaagcctcctgcatatgtgaagatgacaggcaggctaaggaaagagagaagggaacaaggcgaacctgccaaggccaaaaagcaggtgggcatcaaaattacatgcagtaagtgctataaaataggtcacaactcaaggacatgcggcaagagtaatccaaaagcaggcaagtgccaatatactatggaaccgatgtaaactgaaccattgcttatggtgtaaagtgaaaataaattattgtgttacctactaaaacttgcaggtactagatggaagggcacaaaagaagacacaaataattgaagatggtgttgtaggtgtgcgttcccagagcagaactcatggtgatgttgcaactgttcttttccaaagcagcctgatgaccactccagagcaggactcagggtgatgttgctactgttcttctccacagcagcctgataatcac

SEQ ID NO: 61688 - DNA, 389 bp, Zea Mays
agaataaagctccacagccaaacaaaaccagattagcaatcttgtcttttggtttacataaccagttgtcacaaaggctactaatactactcgggatcagtctcaaattcaatgccacttgaatcactctccacatatatctcgcaatgggacaatgaaagaacaaatgatcaatagattcatcaactccacagaaataacattccaaagaaccattccagttcctcttcttcagattgtctttagtaagaattttatttctcacaaccaaccacatgaaaatcttgattttctgtggcagtttggatttccacaaaaacttatatggaatcaaaacttgatctgccattttctttctgtaaatagaattaacagagaagccttttctc

SEQ ID NO: 61689 - DNA, 356 bp, Zea Mays
cagagaggtagagatgcggtcgagtaagaagtcgtggccttaaagcgtggagctgtgcgtgccgcggactctgagtcagccggcggcattcccttgctcacgatcgaggtcagtgcgggggttcggtggagtcatggagacgatagcgccgacaaatgggggtgagcgtgggggagttacgcgtctggatctaatctcgcgcgtccgtttggatcggacggctcacgggagccgataccgcttcgctggccactttgctaaagagccctcggggaaaaggaattaaacccgcagtccgctcgggtgtctccctgagtttgtggaattgttacgccagaacccctgtactttcaaaa

SEQ ID NO: 61690 - DNA, 627 bp, Zea Mays
attgagtcaaggccaaacccagtatggttctgcaagtattgtcaatgctgaaaaggccttcagagcatgttaaatttgttttgcagttttttgttttcataatctagactagtctactctttgaagctgcgatacacttattgccatccatatttacttaagcccaagctattgaagttattaaggttcttctaactaatgcatatgtcattgaatattttagttgtcatcgcatcccagctagcacggtccaaactcatctgtgggcaagttgcacatgcacataactatttggaacagaggacatgtagtaaatgaaacaagaacttgtcgtggtaaaagaaacaagataagaacttgctgtaggtcaatgaatacaaaggcacatttagcaatttctgaaatagaggacatgtagtaaaagaaacaagataagttatgcacataagaacttgctggcagttgttttggtacgcttctggcgtaggttgtaatgagtaggtgcagttgtcttgccacgtaggttgtaatgagtaggtttgtccagggaacaagaatcagtgaatgaaggttccagattgggcaaccttatgtaggaactacgccgaaaaagaagagtgatttaag

SEQ ID NO: 61691 - DNA, 940 bp, Zea Mays
cttgattgtgacctcgtttaaggattggtaatcaatacacattctcatgcttccatcctttttggtgacaaacaatactggggctccccaaggtgatgagctaggacgaatgaaccctttctgctgaagctctgcgatctgagttttcaattctgccaattttgtaggtgccatgtggtacgacttctttgcaatcggtgttgtgcctggaagaaggtcgatgtagaactctacttctctttccggaggcattcctggcaattcttctggaaagacatccatgaattcttctaccacagatactctttctgcttctagactgaatatcattggatcttgggttggtggttgagctttacatgaaactgactctccctggtggtcggtgaggagaactgtcttatttgcacgccattatgtcgggacaaccaatccattcctaagattacatcaattatgtgggatggtagtacggctaagtctgccatgaatactaccccacttaaaagaatttggacttgggagcacttgaggtggcacagaatgtgggggacagatatcccccgggtccactagaaggcgaaagatccttgcacgaggcctcgggccatttaccccgcaaggccatctcatcgtgggccgggcgaagactactagcggaatgggccagaccgaaaaaggtgacggactcgagcccagacggtccatcgaatcatgcactattccaagaaaccgtccgactttcccatgcttggcaccctcgaatgttagggtggattagggatgagtcggcgagattttcgggagattggttaagtcggtttgctattagttaggagatacgtgatcatcatgtatgtaaggagtgccccatggtcgtgtatataaggcccagggggaaccccatcattttcatctatctcattagcctctctccatt

SEQ ID NO: 61692 - DNA, 600 bp, Zea Mays
cgcacagacgtcaaatcaagcacaccaatagcagaaaacaaacaaaacccacgattcatcacccttgagccatcgagtaaccagaccaaacaagaaatcgacaaaaacaacagctagcactactcgtctaaagtcttggcctagaattttgagctaccgcgcgcatgagagaatagtaaacaaaacaaatccacgcgaagaacagcgaccaaatcggtgcgaattagacaccagatgccgcgtaacaacatgaaaaaaacaactcgagcacaagtccagcatctgaaaagaattcccacgcatcactccatgcccacagcctaatccccgaaccgagatctacccgtaccgctagaagaatcagtcaagctgggggctcaccagggggtgtagaactcgacgaccatgatgcgtgggatccgagggcaggggctctgcgggggtatggctagtgctgggttcacgcgtgggcgtgcgcgagatttgggggcgaaggcacgacggccatgcgcgggtgtgggagggagatgtcgcggatgggaatgggaagcagaaccgtgcaccacacatgtggatgtctacactatcttcttaagagta

SEQ ID NO: 61693 - DNA, 688 bp, Zea Mays
tgcactcgtaagagatcctcgactcgcccgagggcccccttcaccgaaaggcaaattccgcccgcccgagctcgtctcggacaggaggacagccccgagcccagcctcagccaaaggtcacgagaaccgtggagatgtgcgaattaaatgcgacaattcagatatctactccattgacaccgcaatcaaacagggaatgatggtaccgcagtcccgtctactttctccgactatgatgatgcacacctgcgaataacagacactgctcccccactctgtccactgttctcgaacaactccggatgagacatgcacacgtctgggtacagcctcaccctcgggagagaactccgtctcgtccaaagacggcttcagcctcgcccgagttcgaccttcggccaaatgccctggtagcagccaccaactccccgcgaaccccgggaggccactctgtgaatcatctaggcccctttgataatgttttggtaattaatgacaactacttgtggactaacgattcttggagaaataagaatgcagggttggaccacatagaaatgaaatgttgaagagtcatacgcattggttgtggatcagatgaaggcaaaggtataatataggttttacttttgccggtcttgaggagtttagagaagatacctgaccggattggtaggctagatagtcg

SEQ ID NO: 61694 - DNA, 464 bp, Zea Mays
cccccaagttctaattctttacgacccgatgtccccgacgtcgcacggcggagaaccaagttccggcgaactcataccggccacaatacttaacgaccggtgctctaattcggctgagacctaatttaacccttaacaagtgttttccctcaatcaatttcactagcgaagcgctaaatcgtccggtccacggaaacagcgcagaccacggaggaacaaaagtgttcccggtgatctagggcagtatagctcaattgaatgagtcgagcagcattaggagaacctaaggacactaaaacaaacgatcagagagtatgaacagacctggaacaagctggccacggcaagggctctttcacggtggcggaaaccgatttgggggaaaagagcaattcgtgggctctggtgaataattgagagcacaagcagttggattggatgctggattacctaacggagtcgag

SEQ ID NO: 61695 - DNA, 410 bp, Zea Mays
gtgaaacctcgtatctggaattctctgagatgcgtcctccgctctttgttaaagccgaagaccctcttgaagctgatgagtggataagggtaatggagcaaaagtttggattagtccgttgcacaaaaacacagaagtcgttgttcgctgctcaacaactgagaggccctgctagtacctagtggggaaattttgtagcagttcaaccagccggacatcaggtcacttgggatgaatttaagctagcattccacgaacactatgttccagagggagtggttcacatgaaacaagtggagttcattcgactaaaacaagggggagatactataatgcagtatctcaataagtttaaccatttatcccaatatgctattgacgaagtaaacactgacctgaagaaaaagaat

SEQ ID NO: 61696 - DNA, 317 bp, Zea Mays
taccagtagcacccatgtatccacctatgagagtaagttcagttggtggaaggacccaaacagatagattttgccctagtgcaaaggttcaaataagggagatagagttccccgctgatctaatagttatgggtaaccaagatacaactatagatgttatcctagggatgaattggttaaccaagtatcaagccagtcttagctatgacaagaaaacaatgaagttagtgtccctattaggagaagaagtgttagtggaattggtcttgtcaaaacccagaaaagggagttgtcaccaagtcactgcccatattgag

SEQ ID NO: 61697 - DNA, 1284 bp, Zea Mays
tctgtccgccgccgccgccgccgccgctaggaaacgacgtctcgtctcgtgccttcaatctctccttttgccgtcgtcctgtgtttatcgcttgatttcctctgttatcccgctttcttcctctgtaagggcaaatgatgatgcaaagtcatgcaccactctgaatgaggggattatcctctctttgggctgacaaacggacttctacccatttttcgtctgagccttgtgattacatccgatttctttattgtctccctggcttttcttttttcttgctgcttactgtgacactgatcttattgcgtttgattaatggagctgtggagtgatctcggagaactagatgatgtgggtctgccgatccaaccatgatgcggactgaattttatttgaggtcaaatgtaatggattctgatggttctcgagtttatctcccttctgacattggcatatttctttcttccctcgaatgggtcatggagcgaaaattagtgcggctttgtttttgatctcttgctttcaattggtttgttggttagaaagctcaaagaaacaggtgatgaagccaatttgcagagcaaaggggccagataagtggcaatctttgcattgaaggttggccacaacgaaactgcagttctccgtgccgctcagatttctctgttttgtgacggcctcgaacaagctgccacattatcatatcttatatgttatccattttgttttggtttttatcttcttcgtatcgtgtctccagttaaaagctacggaaactaacatgaactacataatacatatgtacagtatgtagcgcatatcgcatgacaaccgaacactacatgccacagatgaaagacagatagtgtcagtaaagaaacagacggtaaagccaatttgcagagcaaaggggccagataagtggcgatctttgcattgaaggttggccacaacgaactgcagttctccgtgccgctcagatttctctgttttgtgacggcctcgaacaatctgctacatggtctcttatctgtgatccaatttggtttttggtcttttttccatcctagttaaaatcaaacatgatgaactatactaaacattacgtgtcgcatgacattggctttgaagcggcagttttaacagatgaattactgctcatcattaaagaacgagttaatatcagtaaagaaccgagtggataaatcagagcagatcagtaaagaacggttaactagggcccgttccaatcgcaactgctctttggtgcctagtaccgcagtg

SEQ ID NO: 61698 - DNA, 286 bp, Zea Mays
ccttccctataagagtccttgatgctgcatgcactcctgattgccttgcatgaatttcttccagcaaacgcttcccgacacctgagtcgatgcatttcatgaggactctaacgacccctttcttgtacagtacttctcctatgacaacataatgggctaactgcctcgcaatgcgctcggcagcggccatgtcatccggctcctcctcgtttttgatgtatctaaatgggtactctccagtcatttgggtcacgttctgcctactccactgccttgcattcctccg

SEQ ID NO: 61699 - DNA, 458 bp, Zea Mays
ggggaataggagctagattgctagaatggagctgccgagtccaacttggtttcaccggctaggacaccaaagcaagtcatgcgtgaccacaacaccgtgctcaaaagcattatatgtggcacgacttcaaaagatgctctcatacagacacaacaactagcattctagaaacaacactagacataatagtgataaacatgacctagcagtaaccaccaagtattacttgttgctagcctagctactggtctgggtttaagtgctttacatagtttgtcctttgcttggggttgtgtggacatttcactttgcctcctacttgctaaggaatagcgcaggggaggttaagggtcttctctcactggaacgggaagagatgaaggtgacatcagaacaagacaacaatatattcataagtaaaagatctacgactttgaagttgtccatttcttcacctg

SEQ ID NO: 61700 - DNA, 324 bp, Zea Mays
gcataatctacctaccctagagctgactctgtggctcgttatccacccctagtctaccccacctgacatcaaacaaacttttgacctacatcatgtagtctatctcatccatatctatcttaaccatgttccccaaccctgatgatatacactaacctcgagtcaatgaaaccaagaccggagaagaaaagatcaacatcgacaaggaacgatataacaatcaaagcgaatctcaggatgaatcaagacttaaacatttcggatgaagtcttttccttgccataatctttcttgcctcaacctgtctagcttatatccaacata

SEQ ID NO: 61701 - DNA, 277 bp, Zea Mays
ctcaacacctcaaatattgtggataagtttaatcctacactgtcagtcttcagttataaggcacgcactcttcgacgttgggcgctgtcttttgtttcaaaggttgaggcaacctcaacctcgtttaaaacagagagcaaagctaatttccaaactgatgtaagtcatgtgtccttaattaccaaagtagcaatgatgacattgttatgttgtgtgctaatgagccattacgtgaacatcagttcctgccttgccgcttcgttcagccgggccgggg

SEQ ID NO: 61702 - DNA, 426 bp, Zea Mays
ccgccaccgaatccctatttaggatcgtagcgttagcacgggctatatgctaatcttatagaaagatgacattcggtatttagtgtttttttgggttaaatcttcgatgtcttcgccttcacgctggacatccgtattggtccgatgtaggaaaagacgacagctcctttttgcccacactcgagtttataaggaaatggtaggcaagcagacggagacaagacgacgacaccccaccaccaccaattagccaggcgaacagatggacatgaagatgacagctgctacacgctgaagtcaataagccaagcgtctgattctggaccaccagcgcagggaaaggacagtcaccaccagccaatcgccaatcgaataggcaaaatctggattttttatggctaatgatgaatcatgatgtcacgaaac

SEQ ID NO: 61703 - DNA, 1113 bp, Zea Mays
tagcgacggaggggatttctctagtgcttcatcgaccttcggttcagtagagggtgtttggtcaagcttccacttcttaattgttgcctttggctctggcgctgtttttgttttcttcaaggccttctcatcttcttttactgagcgggcagcttgcctacataggatactaacaaccctttttcttttcacacccccagtccctccgtcaaacctctcgtaatatgggtattcaaagtttaacgcatccattacccggttcagccttcgtttcggtcgggtaccgaaggcagcagtcattagctggtcctccttcttcgtataattgccaagaatctcattgcacatggtttcgatcatttccagccactcattgcatggtttcttgaactgtttcttgaatttgaagcgataggggagccgaacaagctcatacttttccccttcctttttctttggcatcccccagttgctagaagttggaaatgttctatttgctaaatattcttgcactagatccctagtgctaatctcggcagccaccactctaaattcaacttcgaccagctggcacggggagccaagttgcatgtggcacaagggccttctcattccgaagcttaatctcatcggactcatgatcatagtcatcaatgtttccctcttcttctcatcagcttttatatagagccactcattcgtccacccggtcggccacttggtgcggtagccgattaccgaggccttggtatcctttcgatacacaaaattatagcaaccaaagtttttatgaaggccatccgctctagccttcgtctggtaatgcaactcatgcactcgacagagagcttcgacattagcactaataccctggcttcggagagcccatatgtaaacactgagtctaatgatggcattcggtgttaactaatgaagatatatctcgaaattgtttaaaacttctcctttcatgtcatgtaaagggaaccaaagccctgccctgaagaagctaatgaaaacaacaacttcgtcctcttttggctccggatcacctcctccctagcaaagcggacaagcttactttcggcctcccaaaaataaccaaactttttc

SEQ ID NO: 61704 - DNA, 1790 bp, Zea Mays
cacaagaggaatatggtggtcatatggcctgacaggtggcaaagccttgggtgactcaaagatttccttgaactcctcaagcaattcacccaatgggcctctttcaggaaccccctccttccctgccacaggttctaataagacaaacacccacacctcattgcccttcaaccatttttgaaccttcagggctgaaacctggggcacttctgtcaccgcaactgaatctcccttcaaccaaatcctttctccttgatgctgaaatggcaacactttctgatcccagtcacattccattggactttgagctcttaaccaatcaaacccaagtatagcatcatacaccccaatctccaacaccctcatggtagatacaaaagtgtgtcccctgtccaccatctaatattcttcaccctcttgtcacttctcaacacctctccattggccaccttgacagagacaggagaacagggttcagtggctagttttaacttgtccaccataacttggctgatgaaactggtagaactgctagaatttaccaacatcaattgattctgaatcaaggctctaaacctaatacactctgaactattagctccactgatggcatgaagagacaatctgtgattctcctcttcttgtacctcctccttttctatctgccctagctgctcctcagacaataccatctccaaatctttagtggtcaatacattgagttgagggattactctttttggacatttagcctggtgccctggctcaaacttctcaccacaagtatagcagagtccatttatcctcatgtattctttcacttgtctctccttactccatgccccttgatccactaccttctcttcagtcctaactcctgtcactcccctacctccttggtctatcttactattcctaccactattctttaccacaatctcctgctgcaccagcaccaacctaatagccctatcaacagtggaaggaatctgggacattacatgaccttgtatctcattcttcaatactttcataaactgagcaacaaagaatacctcccccagttctggattatgtactgctgtttcatatctagcctccttaaattcttctacatactcttcgacacccctttctgttgcatatgcaaaattcttcccatggcttttggatattcatccacaccaaatttcagcaacactaatctagagaaatttgcagccacctagctgcatttccctccatgttcatcgaagcagtagctaccttcattgcacctgggacctgatacatgttgaagtagtcctcacatcgattcaaccaaattgccggttccttgcctccaaacttggggaaaagcatcttaggtacatgctgttgcaactcccttcctccttgatcctggttcggtaatgcccctcttctacctcctatatccgatgactctggtcccattccaacatcctccatctctcttgccatagcttctaacctcatcctagcaaacgccttcccgttctcctccacacgcatggatagagttgtcctctcatcggcaacctgtttcaccaagtcggtagtcaattctgactgtcccaatagctagtgatgcaccttctccatagcctcaactttccctgtcaacctctccaacatcaccatcatcttttcccaccttgcttccccttgtttagcttctgtcgccatggcttccaacaccagcctcgactgcggcgaaggtttgacaaagggcgtcgtggtgatcacctcctcttcttcctacaaccaac

SEQ ID NO: 61705 - DNA, 838 bp, Zea Mays
tcatcgtattgttgagtttcagtcgtaccgacgtcttattgatttggtacatcaagccaccaaagctgaacaccagctgcatcaagatgctaagaacaacaaacccttgtcatatggtgcatgaaccatgactgcaggaagctcaaggtttactgttgcacccttagcgtcaaaaggttcaactggagacttgtgatccaatattcaaggcaattctagtggaaagaacgatgctgctccaagcataggttatagaccagcagcatccacttcaacataagtgggttcaacagtcaagagtagtggtattcggtgcttcaagtgtggaagtcgtggtcatgtcattaaggagtgtccaaataattgtgtgatccttgtgactaatgatggagaatgtacatcagctagtgaagaggaagctgaagcaggaaatgtagatgacattgataaatctgaagaacatacgagatgtgaatttgagcatggtaccgcttttgtggttacacaaatattgagtgttcaaatgaaagaagctgaaattggacagcgacataatctttttcaaatgagagcaaaagtgcaagacaaagtagtaaaggtgatcattgatggaggaagctgtcataatcttgtaagtcgtgagatggttgaaaagcttggtctgaagttgcagcgacaccctcatccatatcatgtccaatggttgaatgaatcatgagatatcaagattggttataaggtgaatgtttcattcaacattggagagtatgttgacacagtggagtgcgatgttgcacccatgtctgtctgtcacttgctgctaggaagaccttagcaa

SEQ ID NO: 61706 - DNA, 477 bp, Zea Mays
gttggaaccgactcctctgcatcaacatcgatagtgttagattggtttggaactgggttggcatgttgattttggtgacccatgtggttgtccatccatttcggttgatcctttagtatggcccaacaatgaaaaagtggaacgacttcttctcaatagctgcaaatctagacgctgcaagtgaagtctgcaagtaacatatgattagacccggaacatataaaaaataaccaaaactactaaattgtgtttgatagaaattatgtactcgtgtctacggagttagcccactagggttttgtcggaggactgtcatcatgtaaccagcaaaagtagaacactgtgttttgatagtatcccatctactcatcaaagattttgtcgacctttccagcaatgatcctcgtctagagttgtaagcctcagtaattcgactccaaaacccttgacgcttctggcctgtgttaattatgggat

SEQ ID NO: 61707 - DNA, 498 bp, Zea Mays
ttcatcttgccctaataagcatatttacccccacactagtaacaaccatgatttaatccaaagtaattagatattgtttagtctaatctggtgatatcgatctaatctagactccatctaatctactatgatccaatctaaaatgagttacctaacaggatagtcaatcctggtggaatacattagaccctgctcctataaacaagtttgagatcttagatcaactcgaccctacccaacaacttgacctacaggttacacaactaattccatctagcatatagctattgaaccctctacccatcttgtcacaaacccggatgaagacaccaaagctcaaggaagaaaggatcaaccgcgtcaaggaaggataagagtcaagccaaatctggtcttcagccccaactcaagccttcaaagatcaagctagatcatcagatgaatcaagatccacaaatcttggatggagtctttccttaccgcacacttcttacccaa

SEQ ID NO: 61708 - DNA, 462 bp, Zea Mays
gttcgtcattttcatatcaaatgattgcatcggtaagtctgcctttgctatattcttaggtaaagggaggttagtgcattatttgttgaacattttcacagaacatgttacgtgataggcaaggtggatcagtagatagtagcagtggcggactcaggatttgaacctagggtagtttttggacaaaaaaattgatatataataccgtatataattcggtatcacatatatctaatttccatctgctcgatacaagattagaaattaacaaaaaaatgtcatatactacatttaattcaacaaattcggttgcttgttacatagatttatttcttttaacctaaatgctaaggagtagtttgtttttgtatcaaattctagggtagtcggtggtctatccaaaacaccccctaggtccgctcctggatggtaggtgagactgagggcgaaacatggtgaatc

SEQ ID NO: 61709 - DNA, 609 bp, Zea Mays
gagatccattttcttcacaatgtacttgggagctttatacatcgagagcatgtataaagggacattggtaaggctgctattaatcaagactaaccgaccacccaaactaaggaattttccttgccaagcccccattttcttttcaactttctctactgtgggtaaccacaaagacttgcaaagttttttatcatcaatcggaacccccaaatatttcattggaagacaattagaagggcaagtaaaaatgtcagcataccagaattccttatcaacagcttcacctaaacagaaaatttcacttttatgaaaattgatttgagaccagacatctgttcaaataaacagagaataaacttaagatttctggctccctccagatcatcttggagcaaaaaaatggtatcatcagcatactgcaaacaacaacagccattaggaattatatgaggaatgagcccactgataacaccttcatccttggccctttgaaccatacaagcaagcacatcagcagcaatattaaaaagcaagggggagaaagggtcaccttgtctgacacctttgtgagtggtaaaatagggacccactctgtcattggtcttgatg

SEQ ID NO: 61710 - DNA, 277 bp, Zea Mays
cattgatgatctaaggtctcagggttgtaccatgcaatctcctagttatctcttatacttggaaaactgaactggtgtctcaggattgtacatgccttaatgccatcctcaatggaagtttcatcatagttctattctcattaaatgagatgacacatcacacagtatttatgatgggagagatgaagagagttttataggagcaaagagagttttatagacaaaaactgatgtgtcacttttaaaaaaccgtgcaataaaacttacacagggaacg

SEQ ID NO: 61711 - DNA, 435 bp, Zea Mays
gctgatatgtttgagttcatgttagttatctttgtgactatgtttgatttgcttctttgtaatgattgttgttgtattgtgtgacttttgtccacaatgacaacagttagctaggttaaaccttagatagttgggttctctctactctttatagtctgtcttatctcaatcttttcgtcccttctttccttactatatccatatagatgtcagaccttggaatgtcaactacaagtgatgtcactaagtgcaaagaatacattgtgttggcaactcctccagctaagtctcagatggaacacttctagaaggcgcacacacagtttctgcaagcaacctatcaagtggtagctagactccaacaagttgatttagcagaatttatagcacatgagcaggctaccgttacccatatgacatcaaccacaacatcac

SEQ ID NO: 61712 - DNA, 569 bp, Zea Mays
aacccggtgatggcacgacgaccgccgtttaaccggagtccgccaccacagagagttactgccacgtgaccaaggatatttaccgtggcctccagtccatcccgaccgccggggcgtccttatcgccggcgaggtccaagtccttatccaccgcgcgatattttctgaagacggtgaacagtgcactggattcagtaaaaagcttgactgactgaccaagttggagcatgattttctcccaaattcctgtggtaacacgagttaatctttgcagcaaacttgtagagcattatacccactacaaacttgctatggcaaccacaggtagattttcactggatcatgctcagaatttagcttgaagtcgatgttagttcactgctagtctgaaaattcagaccataacagcctgacagtccaactttgggcataattatgttccaatttttcacaagaacatggcttgcactcttaagcaaacttgttctcctataattgggctacaattttgatgtggtgacctaatatgaattctcactattttgaaagctacacagccccaaagttgg

SEQ ID NO: 61713 - DNA, 606 bp, Zea Mays
tgctgttccctgcatgcataactcatctcccagcacccatccggtagaagtactggcggtataaacacatcatgacaaagctttcatgagaagatctttgaccttccgactaaagttgtctatttgaatctgctcacattgagatagttctatttgcagacaacaaaagattgatatggagaaagggctccttgaacttgtagccaatggtttgtgacttataaagacaattatgcatcatggacaaaattttatctagttcttagttttgatcattcctgaatgttcttgtttctaatgagagctatctcactgagtcaccaggtcgtgacttcaaagcaatctctccatatttgcgagggaagacttttttgcctcattctctagacctcactcatgttggagcctccgacattgggtctgtcctgcctcgaatgttcttgtcttagagccttcatagatgaagggtatttattcagtgatacagtagtggggttcattatctacaccactttgatcaataaattaatgttttatattcacatacaagcttcttgttgtgcatgtatctattgtttcttttggtaaaatcaattgcgacacaag

SEQ ID NO: 61714 - DNA, 326 bp, Zea Mays
cacacatacacataaacatacgacacctaagggtaggcataaaggtggatgagaaccaataggttaggactctcattagaaccaagtggaaaagggggagctagaaggtcatggcactcaattgattcttgagcttgtaatcttcttcatctttgtattcgtatatcgatgagtaggaaaagcatgtagagtgttagacacatatgccttgaacctctataaaaccgtaatatgctagttttcgattgtgtccaagttcaacacatcgctcggctatgcccccgctcgggtgtgcgaccgtgatatggaagttggcttgtggtatg

SEQ ID NO: 61715 - DNA, 485 bp, Zea Mays
attttattagccttacctctttaaaaattcaactgaattgataatttctcttgtagatggttcgcactcttcaaaccacccgaatcaacaccaactacgcccctccaccacggcaagttcctgtctacccagtggtagttgaggaaattcctgtggttctccctcgtatttgagtggagcgtggagtcatcttggaggacagctcggaggaacttctgcctatgcccaccccgttggcagagtcactggccttcacagctggatcatcagcttcagcaccgcctgcaccagcagttcaagcccctgctcccagaggcgatgacccggatgactctggagacgatgatgaagatgacgacgaagaagaagatgatgatgagaatgtcaatgaagaagccaacggtgttcagcaggattacttcatggggtttgggcctctcaccgaacattatacatcaatgttcgagacagggcacttccccaac

SEQ ID NO: 61716 - DNA, 474 bp, Zea Mays
gtctgcctccttgaacaattgttcagaggtggcgggtgctttttgaagtatagctcgaacaaaaactggatcattggattcccgatagaagtcttcgatcacagctgcctcaacaacctcaggaatatggttcctcattgtttggaatcttctgaggaatgaacgaagagtttcatcattctgtcgcctgatagatctgagatcccacggccgtgccggtttatcggagagggactagaagttcgcaataaactaacggctgaaatctccccaaacgatgcagtgtcaaggctgatgccggaaccattgtagtgcgtcctgtcctagaataatgggcaagtacgctgtcatgacgtcctccgttgcccctgcagcccgggcggcggttgtgtagatggtcagccaaccccctgggtcctgcttgggttcgtatttgtcgacgttagagactttgaaattgggaggccattggat

SEQ ID NO: 61717 - DNA, 499 bp, Zea Mays
gttgcagtgcagttggatgcccgtcgcgtggcagtccaccctttcgacccctggtttctgcgaggatgggagagcgcttgtaaccgcgggacgattacatgcctcgcgtgcggcggttcgccttcttcgtgcttcggatcagctcgtatgacgtgtgggtcccagtacccgtgtcgtggggggagaaccctggagtatgtcagtggagatttcgcctgaagctaaggggtgcaagtgaggaggtcttcctataaaagggggatcgatcccctgggcagtggccatgccttcgttctcccctcatgcattgtgcccttccgccttttgatcccccggatggggtgctccagcgccgccttgctcttgctgtcgttggaggaacgcggcctcgtggagatcggcacctttcagccatcgcttggcttcaaggattttcgttgtgcagcccggctgcattccctcaccaatgggcagtttggtggggagaagcaagccgggc

SEQ ID NO: 61718 - DNA, 1016 bp, Zea Mays
gctgactcttggaccttgtcgtgcatacctacctggtgtgctcttctgcttcgccatgattaatgtggcatcgatcttgctggctacctaaacatggatggcacctgcatgcaccactgcattgccggcaacaagcaaggagccatgacacttgtggatcgagtgtggcaatctgatctgttacgcggttgaagagatttatttggtaagattttggatggaagaagaccgcgcccctgcgtgcgcccatggatctagggggaaatgaacactagccagaggagaggagttaagttaccagctgcttggccaccaccaccattctcatggatgatggccaaaggcatggcggctagcttctcaaacttgcaaggtcgatactacttttggtttagtgcaatggcggatgaaggaggtggaggaagaagatgcgatggcgtgcgtgatggacacgttgcatggaaacgcaccattgggagatccatgctaggatctttggcataattcaattgttcaacttggtaagccttccttcaaccactagttagctcctaccaattcctttgtttttttttcttgtcataatataatatatatgctactattacaagtctctctctttctctctctctgcctcacacggtacatttggtggagttgttatagtttgctgaccattttgatatggctatctaatgctgccaatattgtaatgggtaaagcgggatatgctcatttgcatgctcctgagaaaattaggtcaagtccctagataaagctgatttgttcgctcccaataatgaagaggatcttgaagttcctgcacacgcctcagtagtggatcgggtccatctttttaaaagtttatcctgaaaaatttcgcttgctcttctatatatcttgctgtttgttgcggttgtttgtattataactaatcgtgctttggcctccactggtaataagttaatgccccatttggttggtcttcttattttactctgcgtaatcatcactct

SEQ ID NO: 61719 - DNA, 960 bp, Zea Mays
caaccatcagccatcgcattcatcgtgacccaaccatctcaggaaggcgtcttactcttccccttccccatcacaggcaacttgaccaccaagcgaagctgactctctcatctcatctatcatgtcagatctccagccagagctctccgcaaaactactcactgtgaaactccaatgttagccttcatccatcaggcactggacactccacatgatcctcactgcagaactccaagtcatgaccatattgaggtacacaacatggtcctggcccggagctgttggtgtctgtattaacctctacttggtcaatgcctatattgtctagctactgcttgttgcactccgctacgttactgcctccgtgctctacctcaaggcccatcactacggcatcatcatcaccctacatatgcctttgctttgtgcttggtatgtcacccactccactccagtgacctattaaatgaaacaccatgccaggttgtgccatggtcgtagagacaagtgaaatgacattatcttgcttcatctttgacgccagtggtctatggaggtcacatgatggttcggatgagaaagtctagttgctttgtgcttggtatgtcacccactccactccagtgacctattcaatggaacaccatgtcaggttgtgccatggtcgtagagacaagtgaaatgaacattattttgctttatttgatcacatggttttggatgtccaaatccaaacagatcatattcatgtacatccaaagcaggcagggttaaattggactttggatttcccaaatccaatcccacatgtacttgataatgcatcatttaaattactgaacacctatagattatacatacaatagcttgaatgtgctttctacattggattactatgcttaaaaccttgaacgacaacaacttatttatatgcattagcccctgtaatgtggttttgga

SEQ ID NO: 61720 - DNA, 294 bp, Zea Mays
tctactttgaatcgtactaaataaagtttgttaatgcatttgactaatggaggtagggcgccgcgaagcgcgcctccttttctagtataatacatatggggattatcgaaaccctaataggtatctaacaacatacacataagtacatgttaaccacacactaacttacaagcgaaatagcgtccacagtccactgacgtacaacggcacaagattaagcagccttcacatgattagctatctcgtgagcgtaattacagctgagggaggcgttacatggttaagcaatctcca

SEQ ID NO: 61721 - DNA, 623 bp, Zea Mays
ataatcgactcaaaggtcccatagagcactttcttcagtagatcgccatggccgtcttcatcgatgctgcagtccattggttgcactgtaggtgcacctaatgggtgcagcccccgagcttcgaactgacttgagaagcaatcgatttgaaggtcccagaaaattcttcttcaatggatcactgtgtttggtgtgttatgagttgattgaggatttgtctagctaagatctgcccacttacaaattgtctagataaacctcattctattgcggctgatcgaatcgttagtactgattgacaaactgagactagttgctgcttgatcgactgaactccattgtggattcaccgactaaacttcactgtatttgtccgaccaagcttcaatatggattgaccgaatgaacttcagtgtagttgtccgaccaagcttcaatgtggattgaccgactgaacttcactatagttgtctgacttaaatttgtctgatatgaaggattttgcaaaaagaaatttcaccgaatatgacatggcgtacctgtctatttttgaaactacgtgacgtagtgcacccacccaatgggtgtgtcgtcttgtccagtcaatatctcttgattcgata

SEQ ID NO: 61722 - DNA, 836 bp, Zea Mays
ccgcagcccaggtagatgccaacaacatcactttacaagaattccacgacagttttcgtgcacaccacattccctctgacatcatgaagctaaaaaaggagttcctgtcacttacctaaggcaatatgaccattagtgagtatagagataaatttacctaacaatcttgctatgctccagaagtagatactgatgagaagcgccaagaacgttttctagaaggcttgattggaccccataactaccaactgtagagtcatagtttccctagtttcaataccttgctcaataaggctattcgtctggagagcaagaggaaagagttgactgaccataagaggaagtcctagactccaggccagtctagcaggaatgtccactactagcaaggcaaccaagattcttattctcgctctgcgggacagagtgggaattaccaaaaccagaaccaatgctcaagacagcaagctcagaggtacaaccaacatgggcaaaggattgatggaagtcagtagactcgtcagggagttgccaccagcacccagcaaaggtcaacaaccctatcgccccagtgcatcccaatgattgtttcaagtgtggagaggttggacattatgccaacgcctatcccaagaggaactttcagacaccacaagccaataacagtgagaggttagcttagaacgcaccatcccacaacttttaagaaaaaggacaacagaaccaaagcaagggcaaagtcaaccatgtgactgcagaatcagttctggaaggagctaagcgcccccttggattatggtcacaacaaacccccagctaggacccggctgacccgc

SEQ ID NO: 61723 - DNA, 415 bp, Zea Mays
gtggtagcagatgccttgagtcggaagttgcaatgcaactgtgttatgatggattttcgcattgacaccttgtgtgatgagttgagcaagatgaagattgaagtgattccttctggtgctttgtctcacatttccgttgagccagctttgcaagaccagatcatcatggcccagctcagtgacaagggagtacagattatgaaggagaacctccatcagaagaccgagaagtataaatgtttccgccaagatggaaagagtatattgtggtttgaaagcagattggtggttcctaaaaacaaggatctcaaaaagaaaatcttggacgaagcccatctctccaaattctctatgcatccagggagcaccaaaatgtaccatgatatgaagcccttgtattggtggaccagaatga

SEQ ID NO: 61724 - DNA, 439 bp, Zea Mays
cacattccgaatagacttaatttggtcagggtctatctctatgccatgttcatggatgataaatcctaaaaacttaccagccgacaccccaaaagcacatttacgtgggtccattttcaaaccataccgacgcattttatcaaaggctttgcgtaaatcagctatatgagaactaaactcagccgatttgactacgatatcatcaatgtagacttccacagtatttcctaacaactcatagaaaatcaaattcatagccctctgataagtattaccagcatttttaagaccaaatgtcatgacaacccattcaaataaaccaataaagcctgtacatatgaaggccgttttagacgcatcctcttcggccataaaaatctgattatatctgacattaccatcaagaaagctaataattctatttcctgatgcattattg

SEQ ID NO: 61725 - DNA, 390 bp, Zea Mays
gaagaatcaaatgctgcattggattgaagaagccgggtggaaatatcttctcaagcttacacagtaacacaggtgccaatctttccaaatctgcaaccacggtccgagataactcttttgtacaaagctgacggaagaaataactcaactctgaaagcgctagccagacatgctcagggatatagcctcgaaccattgcaggaagaatccgttcaatccatatgtggaagtcatgactcttcatccctaagactcgcatagtagataagttcaccccctactcaggttagttgcatacccatcagggaacatcgttgatcttgatccattgaagtacttccttcctctgggccctgcttaggacaaaatcggccttaggccttctccacg

SEQ ID NO: 61726 - DNA, 490 bp, Zea Mays
gcggggttgcggggtggggactccatggagcgtccacaccatgcagatcggtcttccagggagatattgggagcggcagatcggggggagggggagtaaatcgcgcatacgtacagagactccatggaaggcgtccacgcgatgcagagattgggagcgacaaatcgggtacttcatgtaggtgaggcagatcagggaagtggatcacgtggatcgacattccagggagagatttgggagcggcagatcgaatacttccatggaggtgaggcagatcggggggagtggattgcgcggacgtcattggtagaagtggagatcacggcgaggagaggcgggtccacgtgcgggcgaggggggagggacgggcgagatttctgcggcgggacgacagtcggggaagatggggcggcgcgatgtgcgggagcgggggcacgacaactgtggacgccctccttgctgtcttatagagttgtcggggaccataatt

SEQ ID NO: 61727 - DNA, 400 bp, Zea Mays
aactcatacaagtatgttcctcgaaagatgtcctatggaactgctgggaccagctgacacgtggacatgtgggcgcaatcacacgggaacaggagaactcaagtgcacaacaaaacagtaggtagggaactgtagcgtcgcatgtcccatccgtgtacagtgcgggagtatttataagtaaccgggtgggtaagcgggtctccaagtacagttataccccggttacatactacattcctagaatattccccttaccggggtcattatagtagggtgaagtacaatagtttagacatactatgaaatctacccgataagggggcttacaagtgggcctgaatggtgatggggcggagccttggtcccaccgcaatctgacgtggtttttgcctgcatgttg

SEQ ID NO: 61728 - DNA, 587 bp, Zea Mays
aatactctcaatttcatcacaaagagataacaattgaataccaaattaagggttgatttaatacaacaatgcatgcctcaagaggtataacatttactcgcaacctaaacatgcttcatacttgactatcattgcaccacatataccaattgaaaaacaacactatcatgtttataaagcataatgtctaagcacatcataattaagaaggttctttaggtataccagaagaaacaacattttaaagtaaggagcacctaggccaagatactaccaattcagaggcaagaccataactgtgatcacaatcaatggaacttcaagatatttactgaaattgcatagttccattctccatacctttgccttttcctgaattgccatgagagaaccagttgtcactaattgagggctccttttgctcatgcgccttagctcaaaagggtgcattagaggcacaacatggagtttgtattcacacaataccagactagagtaatcatgtgaacataaactaaacaatatgtcatatttgcacacaggttaatcattaaaaccatatagcataactcacaacggaatacagg

SEQ ID NO: 61729 - DNA, 437 bp, Zea Mays
gtacttttgggaagtattaacctaacagtgacagaacttatctacatgctatttgcctttgctgtgtgtgtttgttaccaacttatccttggtacctggcccccctggtatgtaggctcgacatgtcgaggctggatgccagtatacttaagaaaaattcgtgacctggcccccaggaggtagtctcgactgggacccggacctgcacacagccttggctaggaagctttagtagtgcgcccataggacccccactaactggtatcttttatcctttgattcgcgcaataggacctgcgggatttagaccgggaagccaatccatgtgtccggaccccctggatcacagctccaaatactaggacatgcgccgcagagtggtggagcgcgtaggcttagggtatgggaccaggctaagcgaccagacagctctggac

SEQ ID NO: 61730 - DNA, 508 bp, Zea Mays
cgcatctatatgccgttgcaacactccacctcgactttggctacctcagcatacaggggctatcatctacacggagtgcacaccaatctttgtcctagacgcaacactcgcaccatcacgacactgcgattgtgagggaatttgaaccgtcggctcctgctccagtctcatcgtttgcagtgctcccgttgcggctgcgcgagtgttagagtgtgtgttcctatgtgtaggtaggctagcaccactggcccattagggttagagtatcatgtgtctcgatatattttaagctcccgttgcgactgcgcgagtgttagagtgtgtgttcctatgtgtaggtaggctagcaccactggcccattagggttagagtttcatgtgtctcgatatattttaagcctcctatgcaatacatcgaggcactttcatagtcttacagtatcgacatcacttttccagcttttagacagcagacacaatatgcagtgctgatcaggacctaacatgt

SEQ ID NO: 61731 - DNA, 375 bp, Zea Mays
gttgaggtgacttcatggtgtcgtaaattttcagctttgaagaagaaacccgaagcgaaggttgttcaagctttggaagagccaagctttgttgaattacctatttcttgagggaactcccctggcaaagattgcctataagccgaaggaggctccaacttcagagattttttggagcacgtggaggaggatgaacacatagctccagtgatgagcgtgttctttttttatggagaggaggaggacgacgaagatgtatctgagacgtagggctcagagggtgcgatgcgtctttaggggacggtccctttgacaaggaattggaggccaatggtatagagttcaccactcgaccagaaaagaaatgcgcgcaaa

SEQ ID NO: 61732 - DNA, 610 bp, Zea Mays
atgattcaagaactcatgggactaggtatgattggctccaagatggcgtctggagcatctgaattgaaattggaacttgtaccaaatgatgtgaagctagaaggaagcaagaattatttgagttggtctaggagagtgcaagtgctcgtaggacgtaaagaagtggagcactatttggaggagggttgtgttgaacctgttgagaggcacaaccctgaatggaaggtttggtataccaccaactcggttattgtggcatgattgttggcatccatgtctccgtgtgagtaaggtggttgaagccatgtgcactgcagcacaaatttggaagaccttgagcaatatgtactcaagaaagggaaatgtgatggtgatgatggaaattcatagtaaggcagatgcagtgaaatagatggggagaccagcggaacaatatgcgagtgagctccagtacttgtggggagaactagatcactctgctcctctccaaatggcttgtccacaggatgcacagactgctcataagtgggtagaggacaggagagtgacccacttcctaaagaacctggaccctgaatttgagagtaggagagctgctttttgtcaccag

SEQ ID NO: 61733 - DNA, 535 bp, Zea Mays
cgcgatgtaatttttggacggtctgaaccacaattgcctagaacaccgccgcctgtttggtctttcctacttatatgattattcagtccgccgcccgatcaacccacttctaccgtgaacgacgccatgaccagcacgacgcacgcactgtccgggagcgagaagacagggcacgatcgctcacgtaagcgcgctttgcgtaagcgtctatctctggcgatcaggacgggtccctgactcagccacaatattattcactaatgcagaaatgtaaacaaactagctacgacgctgcaactaactaacaatctcccccttagttcagagtcgactgcattttgattacaccaatcctcccccaaaggtcttggaatcgcaccttcgccagagcctttgtaaggatgtctgcaagttggtctgctgtgctaacaactttcaggctgatttctccctgatcaacacactcccggatgaagtggaacttcattttgatgtgcttgcttctcttatgaagaactggattcttgctcagtgc

SEQ ID NO: 61734 - DNA, 890 bp, Zea Mays
ggatgatcacgttgccacacgaaaattggagaactaaggcctttaatctgctctatcaggcacgctgatgaacgattttgatggtacagtaactgaatcaaatcacaggttcagcccccctcaccgccggtgatctcacgctcggatttgcgccggcgtcgcgattcacgctcggttgaacatggataacgatccttggtgaaaaatcgggcgctggggatgagcttggaacactgttccgccctggccaccgtacacacttgcctcacgaccggtcctgatcacctcgccgaagttggccgcctgccgctcgcgttccacgtgcccaagtgctctacctgtttgttcatcaccggtggtcacgccatggtgcgggccacgaatcatttgcaccagtaaccttcttcctctccgaccgccagcgcgccatgctaaattcaagagccaccgctctcaggtcctataaattgagcatgctatcagctcctctaggtagtcgcgcacccaacacaccagcccgtgcctcagatcgtccaccagagcgctccagtttgggatttcccccaaatcagtcaaaactccgcgggagtgagctcaccgtggctagctctctacaggttcgttcatgtcttccttgctctcgtttcaacatccctgtgtgctatagatgcttagcagcctagccaattgaactagactacaatagatcaccgggaacaccacggattgtcctcaatttgcgccatcaccatggacagagtgattgtgagccagaaccttgcaattgagtgaagggaaatggtagttcagggtagaattaggtgttgtgcaacggagaagcatagccgttgcgttttccggctggtatggactcgccagagccgctgctc

SEQ ID NO: 61735 - DNA, 624 bp, Zea Mays
gttatggtcatcatcaaaaacactaactcgccacactccatccttcaatgccactctaagacgtgctttgcaactggttcgggtgagagcaacctccttttgggggctttgttgatttcctgtagtctgcattaattttacaggttccttgacacctttagaaaatcctgccttggagcaaaaccacaatctagatgtgattacccctgatttcgatgttgtatgtgtagcggcacgaatactaaacccttcattgaaggcatatttattatagaatttctttgcttcgttctgtgaagaaaattcttttcccacaaatggagtccactataaatgctcgtgtggatcaattatgccgttgttgccatcaaccgtgctggtcatgttcagtcctattaaaaagaaatatcaaattgatagtctcaagtagtaacaggctcaagtagtaacgctgaaatctgcaaccttacaaaaacaatatatataattatatacgggtgtgggactaaacctagaagaaaattttcgcggaccctacagaggttgcttaaaaacagaggactgaatcaacaactggactaggcttaccttgttgtggatgtgccatattgatatgatcctgtt

SEQ ID NO: 61736 - DNA, 303 bp, Zea Mays
tttgggatcttctgtgattatattctttataatctttcgtgcgtcaaaccttgagccaatagaaatgcgccacgtcgtctaaaccgagtgatggttaattatttgatatatttcgcgttagaaatccattttgtatcattctagtcatgttagttttacaacaaggtcgggtacctgttaaaaatatagttttgtcgtagcacatgtttcaatcaattaattaatcacttgtttgtcctatggttagctgaaatataatttaagttataagttgtgctattataaatgtatgttaacgtgatt

SEQ ID NO: 61737 - DNA, 576 bp, Zea Mays
tcatgtgctcagctattcttaccacgagttgaactttgaatgctggattatagtttctaataataggttattgaatcctatggaacaaaaaaacaatgggaatttgcaataagatatatctacaactatgttaatctttccaagatatctaacacaatgttacattcctatggaatcgaggtcagtagaactgtagaagccatttcttgcaaattgggcatcctcagtcttcttttcgaacaagcaacatgggagaacttccttcctattgaaatcatgtgaacattttttttttgaaaaatcttgcaatccaaaagggccccaagactcatccaaattttaattggtatatattcattgcgaaatgttgaattggagatggagcatttaacttgtcaaactgcatccaatttgtattgtggtttctgttaatttatttttcagggattaaactagattactagaattggtatatatgcatggttggattattaaactgcattgtaattgaacttttggtacaactgtcattctcagatttattggaaggtagccttgagtccctggagcctgatc

SEQ ID NO: 61738 - DNA, 357 bp, Zea Mays
tctgtggaatcggaagagagcatgtcccagagctcctgaacagcatgtaactggactgttgtggcacattgatgacccttactccacttctcggcgcaatattgacacaggccgcgggctcggcgataagcacgaagagatgccactttgctatcagcagaagatgctggcgataaccccattttctgcttaatattgtctcctgaaggtttctcccatcgatgaggaacattagctgcagcttgcacatgagctcgaccttgatagggacgaccaccatgtccagaatccttccgactggaagactctgcctcctcctgcaataatgccaacgcacaagcagtatcgagatctccc

SEQ ID NO: 61739 - DNA, 851 bp, Zea Mays
caccgtaccgagcttgccacggtcgcttcggatgagctcgccggtgacagccgcttcacggccttgcgccacgtacctgggcacattcaccgcatcgccgtgactcacttcggccgtctgatcatcgctagtgagggctgccacggtagatgccacgaataccttgcgccagtgacctcccactcatccggaccgcccgcgcgtcatcgtccgattcaatggccaccactcttgcctactataaattgaggccaccatgagctccgtagggtagtcaagcaccaagccacccaaactgtgccctccatcgatcatcagagagcttcaattttggatttcccccaagaacactcaagaacaccgtgacaaagacctcgtcgtggtcagcccgattcaggtccaatctcgccctcggtttccttgtttcaacacccttgcttgctcttgatgctcaccgacccatccaattgagctagaacctcataaatcaccgggaacgcgttggattgcccgtggtgcttgcggtcaccgtgggcagggcgctgtagggcttcaatccagaaattagttgaggaaaacatttattaaggttcgaattaggttgcagtcatcagggagcaccggtcttggcgtaacccggccagtagtggctcaccggagctcggctccccgccagtcaccatcgtggattgagtgttgtgaagagatagaacttgaggggtgtttgtgtgaggtgtcagtgactgagttaatagtgccgtgaccccactttaggttatttaagaagccagggttgttcttgcaaaagtcgacgagggcgcgtgcgcgcgggcacgtttctgctgttattg

SEQ ID NO: 61740 - DNA, 434 bp, Zea Mays
gttattgaccactgctccggtattagctcaaccggacattgaaaagccttttgatgtgtattgtgatgcatcaggcagtggtttaggttgtgtcttgatgcaagaaggccgagttgtagcatacgcctcaagacagttgcgccggcatgaggaatattatccaactcatgacctggaattagctcctatggttcatgccctgaaaatatggcatcattatctgttgggaaatatctgtcatatctatacagatcataaaagcttaaagtacatttttacccagtcagagctaaatatgagacataggagatggcttgagttgattaaagactatgaattggaaattcactgtcacccaggcaaggctaacatggtggcagatgcactaagtcgcaaagcttcctgccattgtcttacagtgaaaacttctgaca

SEQ ID NO: 61741 - DNA, 529 bp, Zea Mays
gaccttgagtgacttggcggtggttgagttgcagcctggccacaccgtggagttttgtacctcaaggattttctcgggccgcatcctggagatgcagcggcttggttactttggtaacggtgtcgggcaggccccaggtgcagaagaggtcctcgagcctaagggcgagttgatagttttctaggcctttttgctgccagtctttgcctcccgacgcatcgattcgtggtggaggtgttgcgaaggtttgaggtgcaagtccaccagttgacgccgaacgcaatggtggcacttgcgaagtacgtctgggcagtttctacctacggctggcaaccgtctatggaggtcttcgccaaaaattattgactgcattggcagaagaggaagataggggataagatagcccaatttggatcgtgcaccttcacaccgaggactgagaagacttcggctgaggttgtggagatagtcccctgtgctatgaacaagtggggtaactggtgggatttttagttctatgtggctcccg

SEQ ID NO: 61742 - DNA, 668 bp, Zea Mays
tgaacgaccaagtctttgctgagcaagtctgtgagccggagtgaatgaccaagtgcccgccaagcagatccacaagaaaggaacacaggccgacgctatcagcccacggcagccgcaacaagacacaacagtgccaagccacgtccgaaccatacatacagtaccaaatggtctttggcggacgcgacgtgacaccgccgtatgcgcccacgagtataacctcactgactcatggggccaatcaaactaggtcatacgggccttagcaccagagtctctacagtgacacacgcatacccgaaggaacgcaacaggtacaccataccggggtgtatgtctacgcacgctagggggtgacacaagcccatgacaacaggtagaaccacgccacacacgaccactccgtgggagtgactcgaaggaccccgctcactactgtggaggtgttagcaatagactagctacaggggtcgtatgacaattgacaaacgagcgagacaatacgccataccaagagcacgactacgcacgaccctatggagaacacacacgacgactcggagaagcctctctctccctcctctctctctctctctctctctcgtagaagacagatctccattgtaaggtccaacccttgaattataaaagggcctggcccaattttc

SEQ ID NO: 61743 - DNA, 453 bp, Zea Mays
cgcgtgtggagggtgctgaggatcttcctggtacgagtactgggtgtaggcagcgaagggtggtgggaaaacagtgtgttggtgaatttttgcggagcggcaggcgccgtcgcatggggatggagcgtggccgacttcgagtagacggggctggtaaacgataattgttgtcttcgccgaacggggccggcataggcgaaggggatcttcgggagctttttgagggtgaggaattgaggataatgctgtttaattacagggagatgggtatcattccgaaggtttagccgatgtgataggcgatgcccttgtcgtgtgtatgttattgtaatggtgatgtggcctgttggccgtattcgtacacttgtattgttccggtgcgtacgtgggcggctttgtgcggagtgtctttgaaatgatagacttcgattaacgttattccggctgcgccct

SEQ ID NO: 61744 - DNA, 990 bp, Zea Mays
agatgtataaggatgcctcaaaagcacctttcggatcggtgagaagacgttctatccagcatgcatgcattataaaacatgaaaggattagaaattaaaggaaaaatgcatctaagtgtgaatgtagcaaatagggataataataaataacataaggagtagaatctaatctaacccacctccttttaacaacccgggcacatgtattcctttccactaccataacgtttacatctaaccctctttcacagatgacttcacccacccccatcagcggaggagacacttgtttcagttccgactacctttcccatgagggtttcccttccatcttgtgggaggtgctcagctccgccggttaccctacacctcgtctgtacatggtgtagttgtacgaggagcatcgggtgccctattgccgagtctggctgactctggaggctcaccctctacagtcgggttcgcgttcccttgacttcgaggctattggattcagggtggacgacaccaccgaggctgcagctatgaagactttgacgactttctgcggataccatcccttggagatggtaatgcacctagggatggcaatgggtaccaaacccgcgggtattggtttcataaacccgcacccgccaggaaatagcaaacccatacccgtgcccgcaacccgtgtcgggtactgtataacatctgcacctgccacccatgggcgcaacagacccacgggcatacccacgggtgcaatagacccacgagcaaacccgcgtgccctccaagcatctactagcaaacaatccatccagttccatacaataagcaatgattccaaacacatgcaatttccaaatagttccatacaacaagcatacaacagcttcagttccaaacaggaatccttacaaacaaccatattgtttcctaacacatacaatttgcttagaaacaagcagagtatgcgcgggaactggattggggatttgctgagac

SEQ ID NO: 61745 - DNA, 463 bp, Zea Mays
ttcgtataacaatagttatcaagaaagtattaagatggcaccatttgaagcattgtatggacgacggtgccttacccccttgaattggtctgaactaggagaaaggtggtttttcaggcctgatatggtgaaagagatggaagaaaaggttcaacgaatcatacataacttgaaagaggaacaagctcgacaaaagagttatgcagacaaacgacgctgacccttgtactttcaagtcaaagattatgtgtacctgaaagtgtcaccaatgaagggtgtgactcgtttcggtgtaaaaggaaagcttgcaccccgattcattggtctgtttcctattcttgaacaatgtggaccagtggcataccgactccaactacgtgaaacattatctgcggtgcacaatgtgttccatgtatcccaattgaagaagtgtcttcgggttccagatcgaaccattgatgta

SEQ ID NO: 61746 - DNA, 435 bp, Zea Mays
taagaatgcaagtcgatcatgaacagactgagtattcttgaagccttttttattgatgacatatttcccattttatagagtacattgtcgtcccgatagcttttgaaatacttctagggataaaacttcctgaggtgttctatattccaggagttcccaatttctgtgccgtccatttgagtgagacgatatgatcccggccgggtgacttctgctactatgaatggtccttcccataagggtgacaacttgtgtcgtccctcccccgttataattcggcggaggacgagatctcccactgaaaaggatcattgtcgtacggccttgtcgtgatagcgtcttagagtctgctggtatcgtgctgattgaattactgtattcagccgttcttcttcgagtatatcaatgtcctctagcctagtagcttcggcttct

SEQ ID NO: 61747 - DNA, 355 bp, Zea Mays
ctttgtgcgtgccatggctctataagaggggaagattacttagtattgtttaaatatgatgcatgcatgacctacgattatggaaccaactacttgttgatcccatacctcctatatataacctgctatttggcactctttcacccgacttctttaaaagtaagttgttataagaaaggatcaaggtaagaatgaaagaatattcaaaggtaaggaatttaaaatcttttgaagcactaagtaatgtccgtaggaatgggcttcgctccgataccagctaaaaatccccatcaagtgtgaagcaacacctttttcaaaacaaaacattttgttttctatagcatgactaagcatt

SEQ ID NO: 61748 - DNA, 424 bp, Zea Mays
atcagaatcgcctttaatatcattctgtctaagatatttcattgcactcgtgtgggtcatgcgatgtgatgacttaggtgtaccaacttttgagctcctccgccgagtccggtgggtgaagggctgaatagaccctgtgttgctgctgctgcgttttgtaggagacatggttctacatgccattaccgctggtgtcttgaactcatcacagaaacaaaatatttcatccaactcagtttcaaattccacaataagtgtgtacttttctgaggacaactcattttcttctgcaatgaaaggccaaacttagtggttcaaatagaggaatacagcgaaatgttcaaacagagagatacagttaagtggttaagtgagtacatacttgttcaccatagacagttccctcatgtgcaagtgatgcctg

SEQ ID NO: 61749 - DNA, 377 bp, Zea Mays
attagttgccaaccgtattgattttaaacgagttggggttcttagtttattatagacataagcattaggaattaagtgcatttcatacgtaattgtctagttttgaaccttggctctaattctatccaaatttagcacctaactatcatagccatttgactttgacccatcgacctttttaggtgatctttgagttgatatgacaatatgctttcctttatttggtttctagtgtcattgataaattagtggcaccataattgttagcgctcgaagaaagttatacccctagttgttgtcaaaacacatttaagtagtttaatccgagagactaactttgagatcccatcataacaagaccaccgctcctagatcgg

SEQ ID NO: 61750 - DNA, 357 bp, Zea Mays
gttgtcaaatagcacttggaaacctccgatcgaaggttataaccctaagaaatgaagctctcgcaaaagacaagattttgctatcattggtcgagaaactaaaatccagcgaagccaagctgtctgctcaagcggaaacccataaaaccgacatggaagagcttgagaagaaagttgccgaagcaactgagaattttaatgttgaactaacaaaacatgaaatatgtgagatcaaaagatcaagggtacataaaaatgttgatgagcttcgtgctgctaaggaaaaatgctacgatatgggtatggaatgtgctaaaaatctaaaaaacagcttctctaaagttggtgcattttctt

SEQ ID NO: 61751 - DNA, 405 bp, Zea Mays
taaacatggtagttaatactggtgaaatacactaggctctactcctataaacatgatttaacttaattcattttaccttaaattcatggcatagcctagctcggccatgcacaaccacctgacctactaaatgagttgcctaaatccatctatcctaagctaagaccagaagtaaaccttgtttgacctacctcattttttatagccatctacctagctaaaatcttatagacaagatggagacaccaagaccaaagatgatcaacctagtcaatgaaggacgagagtcaaaccgagaccccaagattcaccacccaagatgaagtcttttctcgccataatctttcttaacctaacttatccttacccagatctcattggcctattactagacttgacataaaa

SEQ ID NO: 61752 - DNA, 306 bp, Zea Mays
tacatatatgatatatgcaatgacattctacatatatgcacgaccgtatgagcatctgtctgagtcatggtactcacgaaatcatcacttgtgggacccttaaacttcgacttgacattatatcgtctcgtatctttgatctcgcattcccgttcttccatctgtatgtgtaccacatcacgttccaaggcctaaaaccccaagtccaatcaatctatacaacgctctatcccctttcgttgcgttcatccctgacccatgagggctgaggaccgccattgcatttgtatcctagacacatccaac

SEQ ID NO: 61753 - DNA, 713 bp, Zea Mays
ggaccagtgcttcgtactctgctgcattattggatgccggaaacaaaagctagagtgcatacttaagttgttcacctccgggagcaataaagagaatccctgcacccgctccttgtagcttcagcgagccatcgaagtacattctccatacttcagcaaattttgggctttccgggacctggtgctcagtccattctgatatgaagtcaaccagtgcctgagtctttatcgtcgtgcggggccgaaactctatgtcgtgagctcccagctcgcatgcccacttggctatccttccaatagcttctttgttgtgaagaatatcacctatcaaaaatcatgtgactactatgactttgtggtcatcaaagtagtgccggagcttgcgagcggttagaagtaccgcatacaacagcttttggacttgaggataccttatctttgagggcccaaggacttcgctgatgaaataaactagatgctgcaccgggtatgcgtgtccttcctctgcccactcgactactaacgcggtgctcaccacgtgagtcatgcaggagatatacacgagcaaatcttctgtcagctgaccgggcgtagctcggcgcggtggcttgagtactgacggagtggtcaagaacttcttcagtgcctctagagcttcatgtgcctctatggtccactgaaacttgtccaccttcttgagtaatttataaaat

SEQ ID NO: 61754 - DNA, 1332 bp, Zea Mays
tggaaattgcagagtcaggtctgttgtagggacatgagcactaactggtgttgaaggactgatgtactttttcaattgagaaacatggaatacaggatgaatatttgaatcttctgggagcttcagcttataagcgactggacccacacgctgcaggatctcaaagggaccaaagaacttgaagctgagtttatggcaagcacgaggcgcaaccgatccttgcacatacggctgtagcttgacgaacacgaggtcgcccactgcaaattctcgctctgaacggcccttgtcagcttgatgtttcatgcgttgcttggccctcaacaggttgtgcttgatgacgcgtaggattacctcgcgttgagacagccattcggacaggtcagagctggtgatcgcatctgcaggaagtattcccaggtgacgaggcgcccgcccatacagtacctcaaatggagacatgcccaaggaagaatgagggcaggtattgtaccagaattcagcctgtggtaaccaggcgctccacttgttcggacaggaatgaacaaaactgcggagaaatgtttcaagacattggttgaccctctcggtttgtccatcactttgaggatgatatgctgtgctcatttggagttgtgtgtctgaaaggcgaaacagttcctgccagagagtacttgtaaaaatcctttctctgtctgacacaagcgccttgggcaacccgtgcaatttgtacacgtgagcgatgaagatttgtgccactttaagagctgtgaacggatggagcaagccaataaagtgggcatatttactgaaggtatccaccaccgctagaatacaatcagcattaccagaacgcggaagaccctcaatgaaatccaaggaaactacctgccaggcgtgttccggtactggtaagggttggagaaggccaggatacttggctctatctgacttggcctgctggcaaatggagcatgaggtcacatagtcctttactgttttcttgagaccaggccaggaaaacaactgcttgacgcggcgatatgtgaccggaaaacctgaatgaccgcctagagcactatcgtggagggcagacagggcctgctgctggagagacaaattgttgcccagccagacacgacccttgtagcggatcaatccttgatgcagcgagtagggtccctcagtcgttgggtggagtgacaattcagttagcaaagactgggccttgttgtcctgactgtaaccctgaaccaccttggacagccattgtggactagcagccgacacatggaatacttcgagaccttcttgggggcggcgagacaatgc

SEQ ID NO: 61755 - DNA, 558 bp, Zea Mays
ggcaaaaatttcaaacaaagttgtattgatgggacatgtcatgagtgaaaccctagggtacagaacttaaccctaaactgggcttaaaagagtaaacaaagtctaaataagagaaaacttcaaaacctattagtaatgatcataaaatgtcaccatggatggacttaagtggcatcgaaaccctagtgatgccagaaaaccctaaatagacccctgaaaaaccctggactgaaaccctagggggttatctgtaaaaatgtgcacactttggacctaagtgcaaaaaccatggagttagggtatcttaagtcatatagttcacatgtttgaagatttgcaaaagaaaccatgagttttgggcttatttgcaaaaaggccaccctagtgctccaatggttaagtctgaaaacagttgaacaaggctgactttggagtcctgcatctcaggattcttgaagtttttactcaaagtcaatatagcaaagttgtagagttactataggagaacaactttgctatagggattaagccttggtgccatgaaaaattttgagaaaa

SEQ ID NO: 61756 - DNA, 597 bp, Zea Mays
catgctcagctcaagcccgttgtgcgggcacagccacgagggaagagatggggctagggaaagagggagaggggtagcggcgaggctctaccgaggaaggggcagtgaggagtgtcggtagtgggtgctgcgtggaggagaataggggttgtgggcacgctgccatgtgaagccatggtgagagcacgacgatgaagacccgatgaagagaaataaaaattggggaaaaattaggggtatggtgaaatccgaccctgatgattgtgattagaacatctttcttatgattccggtgagaggaaggggcagaattgggttaccgaacctaagctaccgtacacagagaactggacgatagttacgatcgattcacgatgagacagagaagggtggtggagatttctcaacaagaggaaaggatggacgaccagtggaccattggtggcgaggacatcgatgctttggggatggagaggaagacgatgctcctcctcctcggttgttgtataggtggtaatcgtgtttgtcgaggactcctcgcttcgggaaacatccatgtgcataaccaaggggaaactgacgaggtataatgtgaag

SEQ ID NO: 61757 - DNA, 1673 bp, Zea Mays
gtggctgtggggcttgctcgtggagatccgtgctttagctcttgcgacatcattgcttcggatccgtacgtcaagtggaagggtgtgaacccggttgctccagattctattgtgttcagcgcccatagtacttcaggaaattggtccgcccatttgcctttcttgtcgtcgagtagccttttcttaattgcactgaaaatcttgtcgttggtgcattcaactactctgttggattgcaaatggtagacagaggcgaacactgccttcgtgccaatagagttgcagaattcccggaagtcttggttgtcgaactgtttgccgttatcgactgttagctcggatgggactctgaaccgacatacgatgttctgctagaaaaaattttgcgttgtcttggaggttattgtggatacggctctggcctcgatccacttggtgaagtattcaatagtgacgaaggtgaatttgaggttgccttgggctgtgggcagtggtccgacgatgtctagtccccaccgctgaagtggctaggtatgtgcaatgagctttgtgagttgtgaaggggcgcctgttcgaggcgagaatttctggcaagcttcgcacgatcgggttacacagttgaccgtgcatacgattgctagccaatagaaacactaacgtatgactttagctgcaagggccctcagacctgaatgtgatccgcatgtgcccctatggacatcgtggagaagctctatgccttcagcttcagttatgcatttcaacatgggttggcttattcctttcttgtagagatggccgttgactatagcgaagtatctgcttctgtgttttagccttttggcttcactgtgatcggatgggtggtagtgaccttgaaggtatagggtgattggagcccgccagtctttggccattatcagattgactattcgatgtccattgatgtgctgcgttatttgcagaccctcagggtttcttatggctagtgtgcagactatgtgataaaatacatcgaaaggcaagggttcgcccttcactgctgctttggctattgtgtcagcctcttcgttcttgtttctctcgatatgttgtatggtgaaacctttgaattgtttctcgaggttgtgaatggtggcaagatactacattagcacgggctctttagcagactaatatttttcaatttgcccggtgacgaccttggaatcagttttgatgatgcagatggtcacgctgagggctcgtagtttgtgaagtcctagaattactgcttcgtactcggcaatgttgtttgtgcatttatctgactcgagtgcgaagctgagacgcgcgacatatctgtatttgactccggcagctgatataataattgtcgcgacaccggcgcctgcgtgacaccatgctccatcatagtggattgtccagactgtttctgtgttaccctgctatggttccgaagaccctgtccagtatacgatgaaatcaaccaggtcctatgatttgattgttgtactaggctcgaaaagtgatgttaaaccctgagagttccgccaccccacttttgctattctagcggactcctccggatttctggggcaactccccgagacccctatcggaagtgactcgtactttgtgtgcctcgaagtagtgtcttagcttgcgcgaag

SEQ ID NO: 61758 - DNA, 651 bp, Zea Mays
tgggtgtgttgattttcttttaataaaaataacttttgtttactggatatgtgtgaagcatgcagcagtgcgttcggtgggtgaaggggctactgtagtttgtatggtttcgatttttacacttgtttttgtgcagatttatggtgatggatatataggcatgtggcagatggattgccaagcattcggatgatagatagatagggtgggccggtttgccggctaacatcaatatactcatggtatctgcacttcttttgatgtttcccccatagttcaagtccatatataaccttttttattgaaataattaaagataacttattcaccgctgtgttttcaatgggcgtgttccttcgttgactgaacttttttgagagcaagatcttgagctactcgaatgtatttgagcgaaaagaagtcgatgctttggcgtcaggcgaggtagtgatgtagtgccgttctgtgccgaccactgagcagtacgttgctacagttacgtcgacagtaatcttctcgtgatgccggcattattgcttacagggctgcagactacagcgttactggcttgcaggtcaggtcaaggcaccttggtccaattgaaacagtagctctggttattacccattctcatctctatatttaatccac

SEQ ID NO: 61759 - DNA, 852 bp, Zea Mays
ttttgggttaactaatgcacctagcactttcatgagattgatgaacgaggttttacgtgctttcattggtaaatttgtggtggtatattttgatgatattcttatctatagtaagtctcatgatgatcatattgaacatttacgtgttgtttttgatgttttgcgtgatgcacgtttattttgtaaccttgagaagtgcaccttcagcaccgatcgtgtgtcttttcttggatatgttgtgacatcgcagggcattgagatggatgaggcaaaaattgttgccatcacgagctggccacttccaaccacagtcacgcaggttcgaagttttcttggtcttgtaggattctacaggcgatttgtgcgggatttcagcaccattgcagcacctctccacgagttgacaaagcatggagtgccgtttcgttggggaccatcacaacaacaagcttttgatgccctcaagtcgaagctcacacaagcaccactgctgcaacttcctgattttgacaagacattcgagctcgagtgtgatgcaagcggcattgggattggaggagtgctcattcaaggaggtaaacctgttgctttctttagtgaaaaattgcatggtccaactctgaattattctacatatgacaaagaattatattctttagtacgagttttgcaaacttggcaacattatctatggtctaaagaatttgtcatacattcgaatcatgaatctttgaagtatcttaagggacaatctaatctaaacaaacgacatgctaaatggattgaattcatagaatcatttcctcacactattaagcataaaaaaggaaaggataatatgattgttgatgc

SEQ ID NO: 61760 - DNA, 525 bp, Zea Mays
ctttggagtagtctgaagcttttgtgctacagactgtctgggcctagtggtcggaccatccgtggtcctcaccagggaaggtgatagttctgcacatgtccatgtatgttgtgcggaccatccggtcgtagtcgacggaccgtccacacgtgccaaatatggattgggcaggaattgtgtactttttatgggttttattgtagactatctgaggtttgagcttggatagtactaactcttaggtcacggaccgtctgagcatgataggcgaaccgtgcgcatgtgttaaagcatgtgagcagatctcgggttgttaaacttgtcaggtcgtggagcatctagtcgaggctggtggaccgtccgtgcttacttttttgacagctctaagaggactcaaacaagaaactagtcattacttgtacggtggaccgtccagccagatggcgcgaaccgtccatgagtgcgcagaaagagggtgcataatggctagtattgaatgcacgtgtataaatagaagtggtgctt

SEQ ID NO: 61761 - DNA, 562 bp, Zea Mays
caagtgtgtactttcttcccctttagtaatatttcctttccctctcctcggagcctattcgcattatttagtccttatctactgattctcgaatccgccgtcctcgctgtttcgctctttcgttttgcaagccaccgtcctcatgggagcgtttagtgtgttcctgctacctggcgtgccctagccattgctaccgcctctgtaggcctaggtttgctctgctatatctttttggttcatgtgcatgtgtcgctgttaggatgggttccagatccgtgcattcatgggggcatgttgtctatgcgtgcttgagctttggttagcttccagatctgcgcatttgtgagggacgtgttatctatgcatgttggatatttggttggtgcattttgcttccagacttgggtgccatgtgcgcatagatagcatttgtggtctgctatcgtttttctggttaatcgaatgacagataccagttctgctattgttcaaaagagcttttctgtattgtagtcttgctgaagtttggattacaaataccagttccgctattgttcaaaag

SEQ ID NO: 61762 - DNA, 893 bp, Zea Mays
tgtagaatgcagtgaaaatatattttccatactaagatacataatatatgtgactgttcacacatttgaatatcagtgcctctttctttattttgtcatatgccctttatatctgataaatcagtactgcattagtctagctaacactcaagttaacagtgactcaaatgttataacatatggatgcctataatttatgccaaactatgagcagtattttggaactcattcagctatgtacatttccttctaaatgatatacataattagccctagattggttgtacatggtgacacatgtaccaatatttttgtacttcctagagaccttccactttttccatttttagctgttagtacttagtaagcaatacaaatatgaaaacatattttgcacttaaattacctttttgtatgtgctaatagatataatgatctaaggccagctcatcgagtagctctcacaagctatcctaccatggaaaatctcgtagaggtagcaaagcaaacaaaaatgcagaattaaatacatcatttttagattttcctagaggccggaggctagagtctagcgattcttaacgaagaaaaaaacaaattaccttcccccatccacatcggggagagcacgatgctgagatatgggatgacgtcccagacaaaaaggagaaggaattaaatgacatcaacccaggtaggataaataagagaaggtggggacgtgaattcagaggaggttaggctgggagaggagcactcgctttccctcgacatagagctacctcaagcatggacatctcgcacggataagtcgaaaagatggcgggctcgtaccttctactgaagcacctagtcgaaggagcaacgattggggaagcgcgttggcgttcgca

SEQ ID NO: 61763 - DNA, 286 bp, Zea Mays
actgaactgccttgatggaggagtcaaactgcgtgcgaacatacgagaaaaagttagaaatgacactgaaagtttcggacttaaggcgtaaaggaaaggtccaggtgtagtgagtgcagtcatcgagaatgactaaataatatttatagccagacacactaaccactggagatgtccaaagatcacaatgtattaggtcgaaaggattaacagcacgagagttggagacactaaatggtaggcgcacatggcgacctagctgacaagcatgacaaatgtgatcatc

SEQ ID NO: 61764 - DNA, 419 bp, Zea Mays
gctgatttttttttggttaattgcttttcaagacatgtctgattgccactcacttcttcagtggttttcttttacatgataggatagtttcttttgagcttcttacatggttgaaagattcccattggcctcgatattattttgatcactaaaactgtgtttatcacagaattgaaaggtttccacctgaacactgtcgccactattctcaagtttagtttcttgtcgaacttgcggggaatgaagaaataagcttgcacgacacattctttttatcactttgtgaactctatagtgcatcttgtcggtagatatgggcacatggacctgagacggtagtgaaatccaaaataccttggtgaagtggatatatgtacaatgtgattcgatagaatcattttgtgggcatctggaagcac

SEQ ID NO: 61765 - DNA, 519 bp, Zea Mays
attcgggactgcccaaacaagcgtaccttgcttatacgtgacaatggtgagtactcttcagccagtgattccgaggaaactagtcatgctatgattgccactaaccatgcagaaaaatgaggaagtccacattgatcccatcgacgccgataggtatgagagtcttgttgtgcagcgtgttctcagcacacaggttgcccaggccgaaaaaaaatcagcgacacactctattccataccaaaggcgttgtgcatgaacggtcgattcgcatcatcatcgatagtgatagctgcaacaatttggcaagtatagctttgctagagaaattatccttgcccactcgcgcacacccacatccgtatcacattcaatggcttaatgatggtggtaaaataaaggtaacacgttcggtatgtgtccccttttcgctgggttcttattctgattatgatgattacaatgttattcctatggaagcatgctctttgttattgggtcgaccttggcaatatgatactg

SEQ ID NO: 61766 - DNA, 437 bp, Zea Mays
ctagagcatactacaggggtccattgagttcttcaataaaatgctcatgtttcctctcatcttcagcaacttcatcaggtgcatatctagatagctggataaacttgtcgcagtactcactgactgacatgattccctgcttcagcgacaaaaattctttcttcttaatcttcatcaatccagctggtatatgatggttcctgaactgcgtcgtgaactctgcccatgtgatagtgttagcagcatcgtgtgcagctgtgtatgaatcccaccaatcagcagcaagacatgtttagacgtccagaagcatataaaaccttctcccggtcagtgcactgagcaatgttcaacatcttctctatggacttcagccaatcatctgcgtccagtggatcaggagaactagcaaatgttggtggcttatggctcatgaactc

SEQ ID NO: 61767 - DNA, 497 bp, Zea Mays
aagggatcgatctcacctcttctggatggagatgagctgaaacccgctggttcggtatggtgtggaggagcttccgtggagtagagggagctgggctcttcttctccttccctttatgtaaccgcctgcagggggtgaagcctccgattagcactggacaagcattgcgccccaattcacgttcggccgttcatagaactggatgtgggcagggaaccgcttgatttcggagagagaaacatgcagccgcgcgccggcgctggtaataaactaataaccagccgatacatccggccgggaagcgccagacggtagccatccggtcgggttccgaaaatctagacagcgtggaagtgtaacaaaaaaatcagttagtctctctctgggtacaaacaaattatacgtacggacgctgcacaagtatgtacagcaacccgtacatgatagtagttctcttattatcttctttcgagcagaaaaccgttaccgctagccag

SEQ ID NO: 61768 - DNA, 767 bp, Zea Mays
aaaatatttatctttgctactataaagcactagtttcgacggtcaccctatatcacgcacaaactgcgtaggtctattttcctcccctatcagtgggacgttaccccatagataaaaccgtaaaaaccactcaaaccaccattagtggaccgttgccccatagataggttgtgagaaaccctgcaagcctaacatgacataaatccaacaagacatagtagtaaaacatttatttttatgtgccatcgcaatatacgagcattgcactagtttcaatttatgcttcaattttaaaaaatcggattcacagtttataaagcttcctagattttcagtcgcagtgtaccatactgagaatcggtatatagtcattgacatctgtgctccaccggctctatatctacgcttggacccatgtgtgatctcatctcatatcttattactttaaaatagtatttccaatatatgaaagccggttcaaaaccagctttctcacggtgtccacgtcatacagaaagttttcagccgttagattgcatctcaacggttctgtgaaatctccgcaccaaccggcctctctatttcacgacgcaccgagaagcttctagacatccacccccgtcggctaaacgtcgccgcccgctaccccctcccgctccacgtagcgtcgcgatgctggctcaaacggccaccaggattccctccccctgccaccaggattcactccctccgctggggtgccatccctggccaggaacccccatgcc

SEQ ID NO: 61769 - DNA, 720 bp, Zea Mays
tttcatcttactgttgcaacggttgtgcttagtttttgcatctcgtagagggttcgtgcttagtttttgcatcactctgtcattgttgctagcaccctcaagttttcatcaaggcaagtggctgtacatggttcccctgcatctagtctgcagagcacgttaggtgaagttgatctgttaaagtctactcattagttgtgtttcttggcatctaagattcgtgtatggggttacttaatctgttaggtgttatataattgatgagaaaaagagaccgcactcacatcaagctacggtctttctttgaatatattaagcaatttattgtttgatagagaagttctgttcgttagagaggaagtggttgaatggggaggtaagtaacagtgtttggaatctaaaaaagaaataggaaaaatacaagtgggagctgttgcatgatgttgcaacaacttctagttccaactaactgctactccctccattctcttatataaggcgtagtttggtacgacagggtcacctgtattacaactttaaccatttatttattttgtatcatatcgtttatacttatacacttatacagattggatagcgcgtttaattgcaaatgtgaccttatcaagtttgaattgtaatcactaaattttattagtcaaattattggacaacggttttaaagtttgaatcttgatatgtgtgtgccttataaaagag

SEQ ID NO: 61770 - DNA, 350 bp, Zea Mays
gagattcctgatgacgaacggcaggtccattttgaggtgcccctgaaccctagtgatgcagagataagcgctatgcttgatttgctggctgaggattcttccgacgctgctcctgctggggcgttggtagtggcgcccctcccggatgatgatacaactttggatactcagaagcccgtcagtactcgcccgaggcgcccttgccgagccaatcagcctgatccttctgctgatgagcagaagaagaaaagaagacgcctccggcgagtatccagttttgatcaggacgctggtacctcggttcctgctactgaagaagtgcctgcgactggatttgctgacgctgaccc

SEQ ID NO: 61771 - DNA, 467 bp, Zea Mays
gctgcatccaaattcgatggtgcgaaatcgtagtgttgattgcatctatgacttgctttgagcttcattgcatgttgtttcatgctggatatcaggttgtgtagtttccttagacaattagttagaggtagaagttcttgtgttaattaagaccaataatggacccatattttgaatggtggtgctatatggggtaccttggatgctttgcttggagtggtcgaattcgaggacgaattctttttaaggggggtagagtgtgatatcccaattttctgaaaagaagttaaatttatttttctcttttctttcatgttctgtggcattggggtttggagtttcaggaggcattccttagggaaacagtagatcttttggcattttttccgctagggtcgggagctcagatgggagagcgtgtttgggcctttgatctcgatccgatggatgggagccccacccctccc

SEQ ID NO: 61772 - DNA, 641 bp, Zea Mays
gctctcacccataccaccagccataccatctacagggtctcggcctcgcctcctcaccatacgcgaccaaccccggcgctcccggcagccctccttgaggctataaataggggatccacgacttcaaggcggagggataacacttcacgattttcacctccaccatgacattgacacttgcctcaatcaaccatagagacttgggatccttccctctctctatcagcttgtactccctactgcaagcacttaggtgcacataatataagtttcatcctcactctgctggaagtagggctttcttacgctcgaaccaggataaacgacttgtgtcaacttgcatcacacatctgggccagggcatgtaacatcatttcactggttggtgagaccctcggatcaagacactgacagttggctcaccaggtaaggggtcgctgcgtgtaaaacatcacgttcccatcaaggctccagatggccaacctccagccccctttgaggctcgacactgtgattgtttcaggagtctggagttcatgtcgttcggcatcgagtacgacatggtgctcctcccacctagacaccaggctgacgctcaggagcaaccagacatccgtccccgtcctcctcgccgcacgagg

SEQ ID NO: 61773 - DNA, 521 bp, Zea Mays
atttaacttaatatttccaaatcgatacatattcagtaaattcaataaaattcatacctgttagcataactcgcggaccttcacagcctatgcatgttttgaatgcattaaaagcccattcgaatgtatctacggtctcatcccgagtaacacaaaaccaaacaatgtgcaatgaagatgatggttagctccaacaaacattcctagtggtttgtcatatagatttgttttatgtgttgtatcaaaagttacagcatcaccaaaatcaacatattctgtctgcatgctagcatgtgaccaaaaatgctttttatcttcccttcgacatcaagctgaaagtcacaaaaactaagggttctgttttttgcacatagaaaaaattccaaaagcttagatacgtcattagcacaactctctcgtttcctagccgctttcctgttcattgtacaaaacaaattactcaattgcatcacaatctattatcaaaatgacgatgtcattcgtaaatgaaaattaaactc

SEQ ID NO: 61774 - DNA, 372 bp, Zea Mays
cgacgttttgaataacttgaagcggggtcacagtactattcctggagtcactgacactttacaaaaacatcgccctagttctatttcttcacagcccgacgtccacgacggcgaatagcgcagggccaagctccggtgagcctacaccggccgattcacgcaacgaccggtgctctacttcggcgcaaacctaattcaagccctaataagcgtttcccctcaaccaatttcactattggagctcgaacacgcactgtccacggtgaccgtatgatcaacagacattctaacgcattcccggtgatctaaggtagcttagctcaattgagttggtcgaggagtatcaggggcacacaagaacactaaaacaaa

SEQ ID NO: 61775 - DNA, 283 bp, Zea Mays
ggtggtcatggaatttctcgccggaacgcgagattcgtcccgcctccgctccatcccgtgaactgcgttcgtcggcactccaatccccggtattgagtcacctataatgttcaccaccattagaattacgtgtattccggttcggatcgaagttttcggctcgggatcgggtattggtgattgcctaccatgggcgccgccgtgagtttctggggatggcctcagtgttggcgttggggagggagaaggcgtctctgccgtttgatctgagcggacggtggag

SEQ ID NO: 61776 - DNA, 480 bp, Zea Mays
tgataattatgaagtttgtttgtgggatatggagatcatcccttgaactgcataagcgtgagtatgctataccggtttaaaccatcaattacttttagccggtaacttccgttagtagggcatagtggtcacccctgagctaaataagcgtgagcatgttgcaccgccttaagtcgttgccgaattaagccgatcgctccgtttgcagggcatagtggtcaccccgagttaagtaagcgtgagcatgttgcaccgccttaagtcgttgccgacttaagccgattgctccgtttgtagggcatagtggtcaccccgagttaagtaagcgtgagcatgttgcaccgccttaagtcgtttgccgacttaagccgattgctccgtttgtagggcatagtggtcaccccgagttaagtaagcgtgcaagtcaatcataaatgaatcaagtatctttgaaatttctctttattgatgacatatttc

SEQ ID NO: 61777 - DNA, 564 bp, Zea Mays
cacaaaccactcacaaagatccatcgctccggggtaacattgcctcagaaaccgggcgagagattgtgcattttgcaagaaaccaatcgcctcggacggatcgccaagagaacacggagtggtaagggtgcgataatgggtagggaggttagccacccaatcacgccacctgcgggtgatattgcgaacgggttgtttcacgtcccatatcgggctgccacaccaagtggcataatgatgactccatattttaccatgcgccatgacaattactaatgagtacatggacgttaactatatggtcaagtaccaatcaatcatatagtcccaaactcaacgggagttgaagtcaagtttattcgtgaatccagttcggactgcaggagtgggtctcatgaaaatgaacgctcaggctacatactgactccgttttgacgttctagataccgttggaaatctaaggagataagatttccaacccaatcggtaccacgtcaaaatatgctcagagctgatgataatcgtcaaaacaatatgacatctagaatctgccataaatcagca

SEQ ID NO: 61778 - DNA, 424 bp, Zea Mays
cagggtcacacccattgggttcagcatcgtcaaggttacacccattagggtcagcattggtaggatcacacccattgggttcagcatcgtcaaggttacacccattggggtcagcatcagcagggtcacacccattggggtcagctccagtaaaaagttccactggtacttcttcatcagcaggagcagaagggccagcatcctggtccaaacacgacactcgccgaagccgcctctttttcttcttcttcccctcggtaggagcagatggatgactggccgggcgaaggcgctttgggcgagtactattagatttttgagcattcaaggtttttccaggctctgggatagttgcaacagctatggtttcagcagggaccgagtcagaagaatcctcagccaacatgtccagcatagcacttat

SEQ ID NO: 61779 - DNA, 455 bp, Zea Mays
ctttggtaccctgaatgcaagccatgagttcagcatgcatatcatttatagaatgctcaattctgccggctccaactcggacaataacatccccatcttcaattcttcatcatgaatcacgtttcacgtacctcagctccttttatttgtcatgggataaaagcctccatcaacattgtttttgagaaagtttgacggttttgctgttttggatttacagctacttgttatggtgttctttgattttcatccatagatgtaattttctaagcttgcctgctatacagaaaagctagattcgaagcatttttttttctttttcttatccagttgctcagcctgtcagccataaccaatggtacttcggctactctcttagactcttaccactgttacacatttccactgcagccgtccctctttcccctttcctcccgccgcctctacaactcatt

SEQ ID NO: 61780 - DNA, 403 bp, Zea Mays
tgtaatgttgtacctatattacgttagatttagtcgctattgaatcgtaaatgttaaatttctgtgcacaaccggacaataatgatataagattgatacctaaagttggtatgacatttagtaacgtggacgaggcgtataatttttatagtcaatatgcatacgaggttggatttccgttgaagaaatatagggagcggaagaattgtaaatggttgaattgttcaatggaaggaaagaatgctgaaagggtagttggaaatccaaggatacgtaacacatgttcaaaacgaacacagtgcaaggctgggatgaaacttaaaaaaatctacgatgatgctaaagagaatgttatttccatccgaattgatctggtaaactatgagcataatcatgaattctt

SEQ ID NO: 61781 - DNA, 272 bp, Zea Mays
ctcaaatctctactatttattaaggttgtaagggtagcctgtcattccgtgttctaccatcatttctgttctgctattctcattctcccctcccagcacagctcattcccatgttctaccaccattctcattccttgttatgccttcctcattttcccctccccgcaaagaccattctcattctcctgtagcccacgcctagctaaaaatttaaaaatacaaatgaccctagaggggatttaaacccatgacccctcagacaaatacgagca

SEQ ID NO: 61782 - DNA, 618 bp, Zea Mays
ctttttgaataatcagatggtgctgagtcccgccttcgccatcgaactgcgtggtgaagattgttggaaaatattcaacaaggacaaagatgacgaggagataggacattcgaggttcgaatgtcaagttgaatcgtgtgtttgagctgaacatcctttgctatgatctatatcttgagggttctactgacgttggggatgccgaggagcagaaaaaaggtgggttgaagcatggtggggttgatgtaggttgttctaagagtaaatctactttggtgttggtaagaaaaaggaggaaagttgaggcgaaggcaaaggaaccagcgagggcggctggggtgacggacgcttcaaacaagttctttgacaagctagctgagatgtgtgccaagccgggagaggatatggcttcacatgtcctacgggaagcgtatgctagaatgtttaaagcgactaggggtgagtggtggagggacgtccccattcctgtggcttctggcgaggacgattcaacgtctttctggcttggtatttcaaaaaatttccttatgggtggaatgttgatgttgttgtgataactgtgatggataaggatcgccaagagtcttcggagaaaag

SEQ ID NO: 61783 - DNA, 400 bp, Zea Mays
attcaactgagttgataattactattgtagatggttcgtactattcaaaccactcggatcaagttcctgtctacccagtggtagtcaaggaaatccctgtggatctccctcgcattcgtgtggagaacggagtcattctgcaggacatctcggaggagtttctgcctacgcccacctcgttggcagaatcactagccttcgcaactggatcatcagcttcagcactgccagcaccagcagtccaagcccctgctcctagaggcgatgacccgaacgactctagtgacgatgatgaagatgacgaagaagaagaagacgatgaggaaaacatcaacgatgaagccaacgatgaacagtaggaccactacgtggggttatggcctgtcactgaacattacac

SEQ ID NO: 61784 - DNA, 336 bp, Zea Mays
ctctgttccttcacctctccttcgccgccgcttccctcctcctcctcctccacctccgccctcgatccgaccgcgggccctaaaggtaaacccaactccttactatccacctgcttgcttgctactggtgtagtcggcggccgatttagaacaggcaaacactctgcggtacggtgcagaaataaatgggttcctgatttgtggcttcctaagctcttgcagcacttttcgcctttttcggaggccacgggtcaccaccgacctccattccattcatttgccgattcacctacacagacacacacaggtatgtcgtctctctactcctgtcctgcc

SEQ ID NO: 61785 - DNA, 744 bp, Zea Mays
gcgacggcgctacttggatttggatgatgtgaaggatcgctgcctcgtgatgaccgagttgccctgatcacacaatcgcttgcgtgggtagccgtagcctgcagggcgcgttggggttcggcgacaagccacgtctagctagttggattggaaagtgcatgtccatgccaataatctactattcgatccagtgaatggttaagctgtaacaaggatgacaggtatcttgcctcgagcttgactgatatcgtgcaacaaagggattagtacgtgagtgtattaaggttcgactgatatgatatttatgtgcattcaggaattagtatgcccctctaggtatcgctactgacttgtggtttggaaagattccactcattgtcgtctgcacatgaatctaacgggtcacacacttaagaggatggaacattggaacttgcctatatgattgtctgtagtgcaagtgggagattgacagagatattctcgagaggcgatcatacacaattcgtattagagttcaactaggattagaggtttaatgggctgtagcccattaacacgctctataaatacatggaaagggggcttgggttatgtcatcccaccacatgtgcaagccctaaacgtcacttttctcatacctagtcacgagaccttcgatgcgcatgtggtgttagcacaccggcacacgacgttcctccccctatgtgtggactatgtggaggcgcggttgcgactgctacg

SEQ ID NO: 61786 - DNA, 733 bp, Zea Mays
tcgaggactgccccatcggtcatgccgacatccgtcatcttcgtcacctagtcctagctagccttgccaagtgacgacaggacaccagccgctgcagttggcaccacaagcgaaggcatcaaaatggtcgtgactacacccttcatggctccagactttgaccctccaaccgtgccagcgcgaagggcgttcgtctcgcgatgagggtcgaccagtcgtagcggagccttcctcttcttcttcaaagactcttaacggtttttgtccatcatagttgtcacaacagcgccatattccacccgtaaagaaaaactttaaagaacatagacagaaaagatgtaaaatcgtcctcgccataagccataggaatggggtcatccttatgccactcacccctagtcattttcaatatccaagtagatgcctcccggagggcaggcgaagtcataacctcctcggctcagcacacatctcagccatctcttcagtaaaactgttagacaccttcaccccctttgccaggtctctcgccctagtctcaactttctttaatttcttcaatgacgaagccacgacctttccctttgagaatccttcgtctgcagcaccatgcttgcccctacttttcttcctgccttcggcggcatctccaacgtctgtggagccctcctccggataaggcccgtagggcataccattcaactcaaacacacaattcaaccgaacatttggc

SEQ ID NO: 61787 - DNA, 887 bp, Zea Mays
ttacctagtagtattgacttgttattagaacgttcccgttgacttcccgtctcccgcttgttctgcctaaccctaggcttattaaatccccttgtctgtagctgggcaaacgttgtctttttgttcatctcctgttttctatccgtatgcttcggtgcgtgcatggagggcttgcctggtgggttggtgggaaattacccactgtttgttcaggaggagaattcctgagaagtcgatttattgccattaatctctacctggcatggagtttagactttggatggtctagcatttgtacagatgatgtagagttgtagttgaacagcatcatagtcggttacctggtccacgttcgatctctgggcacgtcactttcagtgtagctgataaatttgatatttcaccggtgaagttttcttgtattataggaaatttgcgtaaccattatgatcaagttgaacatgtcacactctttggacggcaacgggccaaagtcatgcaaaagagatgtcccaatttcctgtcccgccagttcactcctttgtaggtcataccagattacctatatagtcacccaaaaacagtagactgtaatgttcgtagagtgaaatttgaaacatatgatgtggttagggatatgatggaaagctgctaaagatagtcagacccgtttaaaacgcagtaatttcacagctaaaaaaagcagaaatagacaaagaaaagttcccacattccaaacggggcattttttctctggaaccccattggccattgcggagcataagagttgcatatctgacagggttatcttcttcattaacagtacactgataagttatcctcatcttaccaccttacagaaaaaggacaattattagcaggaaaaa

SEQ ID NO: 61788 - DNA, 468 bp, Zea Mays
cttcaaagcatgagtattttcaaatacgtgctgcaataatatggaccatatctgattatcgaggcctagggtacattgcatcatgtactacatcaggtgaagtagcatgtgttgaatgccactcatatacatgttctctacgattgaaacaaggtacaaaaaattgttatatgggacaccgtagattcctggacccaaaccatccatatagatttgatacagattcatttgatggtaaagttgaggataggccagcgcctagaccactttcgggagaggaagttttatcgcaaacagagaatatgcacacagtgcatgggaaaggttgccaacataaaaagaaagcaaaaaagaaggaaggggagcctactatcatttggaaaaggaggtctattttttaggcttccatattggaaggatttaatgttacaacataatttagatgtcatgcatatcgagaagaatgtg

SEQ ID NO: 61789 - DNA, 511 bp, Zea Mays
aactccaaacagggagggggcgcaaaagccctatgcgcgatggggaagaaggtcggcaactcggtgaggtgaaccacagtggcttagcaacaaagagggcaaggagatcgatgcgtccatgggaactccctgcgtgaggtggaccagagaaaaaccttgcgctagggtgtcatgacccagggtgcatgataggcttatggcagacttagaagattactagaagaagtattgggcagttaagtgtggtgatttgaatttgttgggccatatacgaccatgtaactagtgattgtcccaatattgcgttgtataaatgttgagctgaaaactagaagtcgttatgagttgaatatagaaaacattcaccgcctacctttgtatctcttgtgtcttctccccgcttcttcttcttcttcctcacgctacctcccttctcttcttctgtcttgttccagagatcgccagagcctcgtcgcctcgggcataaaaatttggtattagagctttgtcg

SEQ ID NO: 61790 - DNA, 1537 bp, Zea Mays
ctggagcgggcgaccaatcatactcagaagaaacttcctccgagtactccgagtcaccaaagtcctccgagggtggactcgaaggacgcttgcgcttgccgtcagcgtgatgaggccatcacttgcctctcttgcctctgcccatggtcgtgcagaagggggagaagtgaggaagaagaagagagcaagtgatcaagggcgagggaagaaagcagccagggcaagcaggctacttaaataggccaaggggtgaccgtccacttcctaccccgctcaccgaacagtcgcaagaattcaataagcaattcaagccgcctgaaaatgagtgaggcaactggcgctgtttcgcgtaacatggcaccggttggactcaagtcaactgctcaggaaaatgattacacccctccgtcacatcaaattactacttcaggacaacgcgataaacaccttttgcggggcagacaccctttaggcacacccattgggtgtatctcacggaatcttcaagattttctgaaatgaggatacctgcaaaatatacacaatgaatgtaccgcgacaaaaagagaagaccggctgaaacgggaggaagtccaaatgtggttactgaagcgcaagtccaatcaatagaggtattaaagtatagggttgagtggtgtccagccgggggtcctctgtttcaaccagccagatgtccaacttgtcaccgatcaaattgattcaagacctaacaaggcatggacagatagtgtcaccaggctattctgaaaattattctgacaacaacacaagatgaagacctttgaatggattacctctaaaatccactcaaagctcgggggctacacccaactagttcacaatgctctgaagccaaatgctaatttcaaaagtaaaaggatgaagacctttgaatgcattacttctaaaatccactcaaagctcgggggctacacccaatagcaatacaaaagatcaagtcatgctacgaacccataggcaggaccaggaacctttgagtcgattatttcgaaatcaactcaaagattgggggcttgtggaggacatatattccccggatccactagaaggcgaaaacccttgcgtggggccacaagccagtcgccccgcaaggttgtctcatcatgggctgggaaaagactacaattgaaatgggccagcccaagaaggcaatgggctcgcgcccggatcgtccgtggattatgcgtaatcttgagagaggcgtccgtctttcccacgcacgacaccctcaaacatcagggatagatcgggatgaagccatcgggttttccttaagataagcaaagttagttcactatttgctaggagataagccggaagagcgtgatcagcgtgtgcgtagggagtgccccacggtcgtgtatataaggcctaggggagaaccccatcattttcatctcattagcacctctccattcaggaaacaccacttgtaaacacaccacacaaagccaccccaggaagtagggtattacgcctctcaaagcggcccgaa

SEQ ID NO: 61791 - DNA, 644 bp, Zea Mays
taacaactaaggttcttgctaatagattggccttaaaactgcagaagatggtctcacctcgacaagtgctttcatccaaggccgattcatacaagataaattcatgcttgtgcaacaaactgtcaaatttcttcatcaccaaaagaaagcaaggatccttttgaaacttgacatcaccaaggcatttgactctatttcttgggttgtcctactagtagttctctagaaacatggatttgggaagatttggagagacatcattagtggtcttttggcaacctcctcctcacaaattctcttgaatggagttctagggagaactattaagcataggagaggattgagataaagggatcctctgtcaccaatgttgtgcttggctttctagattccaaagcagaggaaatggggttgttgcaacctctatcgtctaggccactgcgacatagattatctctatatgctgatggtgtggtattatttctacaaccaaaagaacatgatatccagattgtcctcaacattttgaagcttttttgggaagcatcgggtctgcaaatcaatgttcagaaaagttgtgtttatcccatatgctgtggtgaaggggaaatgacagtcctgcagcagcacctgtcgtgccaaat

SEQ ID NO: 61792 - DNA, 491 bp, Zea Mays
ttgttgctggtgattattgcgccacattttcgttaggtaacaatgtggtttctactcttgatgttcttgaattcgctgtggcggcggaaaatagtgctttgcgttcttacaaacaggcgagtgcagccgtcgattgtgctaaggagacagtggccaaatattctgaggtttgtattcttaaacttatactgtgccctgtgattgaattgtgaagtgagaaatgtgaagtgaggaaatgcttagccctgtgatgaattctttgaaaatactcagctgaatactacacttgttgtttttatgcgatgaaatttgtgagggctatggctgtttcagcctgtttgatgttgtttcattgaataatttgacctgaggcttgtgctaatttgagattatcaggttgcttagccctgtgatgttttctttgaaaatagtgaactgtatactacacttgttctttttatgttcaaaaaatactgagggctatggctgtt

SEQ ID NO: 61793 - DNA, 1950 bp, Zea Mays
ggccactacgggcccaaccacacatggagtagttttgctgcgatacataattaaaccaaaagaagacaagcactgcaacatctcagacccaagctgagacaaaagagacggctacgcattacagccccgccgagggatgcgactccgcgtcagcatccatatcagaagcgtccctttgctctgcagacggagaactcggctcatttgtggagcaagacgaggaacacgacctctgaatggcaacattggaggacctggagttgcttaaggagttgagacttagtttttgggggtccaccttgcagaagtcaacgcccaattccttgatagtcctatgggagagcgatggtggtgaaggagacccagcacaacacgagcaattatttttactgccaaaacaaggcttaaagcctttggccttctctctgagcctagcacttcttctcacttcagtgacgaccaaggctgcacgtttcttcctgttcacagctgcagaagtcacaggagattgagcctccacaagcgaatcctggctgggagggagcaagcattttgggggtatcttaaatggtatggtttccatgttgggctccatgaaagcagaaagagcccctaacaacagaaattttctggcccactcaaaagagtccggcctcataagcaggcccattaagaaagctgcccataactttggaacggagatgaggtccacgctgggggggcaaagctcagcccaggaggagaagcgctttctggccaagaaatcatcgtaggcagggtcctgagagggctgattcaggtgagtcatgaagcccacaatgatgttatcatcagcattcagattcaaattttgcacgccctggtcgttctgatcgttatttccctccaaaaatgggtccgctggggggaggggtggaagagcaagcacaacaacttcttgatcaagggcatcctcctgagggaagttgacagcttgcgggataacgatatcgttgaaaagacccacagattcatctgaaggaaggtcctcaagaccggagaattggtaactgaattgttcctcttcattgttgactaaaggaacaggagcaggcggttgttcttgctggacctgttcaaccggccaaggatcccaaccatcatcagcattattggcattggcatcctctaattcaatttcaccattggggggatgttgaggtcaaaatggaaattgggcacaggttgccccaatccaaaaaattccaccggaagttgatgcccattatgagggtacggaggtacaggttcttcatcctcaggcatgttaccaagcatgaactgctgcactacgtcgcactaaacagtccaggaaaccccatgaaaacctttagctactgaaaacacaataaactgtggaacctcctgcagagaagtcacccgtgctctaacaagcaatctagtagcattagaaatatctggatcccacatgagcacccgaccaaaagaaccaatagcattctgaatgtgctcgtgtgaccagaaatccaagggaaacccaaggagcagcaaccaacattcatgattaaaaaataatgctcgttgattccaagccgcattgtgcctaatcacagtgaaagtaaagcccaaagcttgctgcggacccatggccacgagattgtccctatcaaaaatgaatcggaacctcaccaaagcctgacccaagtgggagcgctaaacactcctaatctgaacatgtctaatctccaaaaggtactctcggacaatgtcagcaaaaaattggaaattgacctcatgctcaggtagtggttggaccaggacaattccccaatcatcatgagcggacggttgcgggcgagtgacagtacgtaccataatctcccgatgatcaatgggttgcgccgtgaagccatgagggagaaaagggcccggatcaacacgatggaaagc

SEQ ID NO: 61794 - DNA, 464 bp, Zea Mays
tggagactgagcacaccatgagtttgtgcggtggccgacgatggtcaacacacacgctgagggaccaggacacagaccaacacaacagactgcgctagccttactccttacccatggggcctaccaatggattccagcgagatcatgttaacgaatgtgtagcctttgttattatggcttcctgaaacacattggtaggtaaaagaagtcaccccccgtgagtgggggagatgactccacctactatggagcatagcggccgatagctggcggtggccttgctcgggcatggctatcgaatggcaatcaccacctcaaataccactgtgctctgccgctagggatagcaattttacccgtgggttcggatatccaacccgtcgggttcgggtacgaatttgtactcgtggtcttgcccataaccgactcgtgataaaatcgggtcaggtacagatattttttat

SEQ ID NO: 61795 - DNA, 1139 bp, Zea Mays
caattacttctcttgtttgtgtatttgttgtgcttcctgttaattatcatgggaaagagatgaatcacaatcatattccggaagagtcactgaatgtttttactatagccaatatcgtcgaagaatctcgaaagtaagatctgcatcttcattccatttacctgataacccacttttggcctgtaccctgttgttataattttttaaagatggtaacattgtaagattatttaattatatgaaagattatgtcactgcatcaaatacaaagggtaaaagacttgacaagtgaccattggcaaatctttggaagaagagaaaaaaaaaatcaatcatggtccttggtcttgggtgaagaatgaataatatttggcccagttattttgtttttccttctctaggccaaacaatattaactattcagcagtatgttgtattatgaggttccttactttcctttctcatgtaaaactttccttactttccttttattaaagctactaggaatcattatatgttgtatggctgaagtaaaacctaacacatctcccaaattggacgagtaactgaattgcaagttggaattatcatacatatcattctttaatactttcgtcatagcaagctaatgacatccctgtcgtttattgttgtgatatattatacgtttcatgcaattacgccctccaactatttttgaagagacttgtggttctttgtcggctttttctttgtgcaggctttgggtgcactgctctgctttatatgtcataacaatctcagcctgcattcttcttttccacgtatgatccgtacgcgttgctcctgtactaatggtttttaccttagagttcctgtgttataaacgtcagtgcagttgattttaagaaagtcatcacgtcgttacaggaatacaagtatatttcgaggaagagactagcacatgttactggatatcctccaaatcctgggctttttaccgtgcttgtccgttcgattccgaggtttgacaatgagctgcttgatgacacaatcagaaatttctttgttaactatcacggatcaagttatctgtcgcatcaaatgatctttcgcaagggacattttcagaagtttgtggtacgtaagaattcatttca

SEQ ID NO: 61796 - DNA, 415 bp, Zea Mays
cgggggcacccacaaaaaaggtctactctaaggctagcacccgttccccatcgacaaaggggggagagggcaacatttcacttttatttttgtcgatcggagagaaccgccaacactgccagactacattattagtacaaaccgctctcagcgttgacaaagtcatcattacatattcatgaggtcccacaatcaaggactcgggggctcctccttctgtataagaccagcctccctatattcacggaacatgatctcaagctcccggacctcgctaaatatccgaaagaaaaaacatcaaaagcacagctattgctatcagcccccaccaaaactcaacggggacctaaatcaacatcgccaagttcgttgaccttaatacacacatcttttctcgataaggaatcaattgaga

SEQ ID NO: 61797 - DNA, 617 bp, Zea Mays
actctaggggttcttttacaaaatagcacggcgaaggggtatcggtgacccctagctgcctgattataactccacggcgtggattaggctctagttcacttgaatcggtacgtgacctggggcgctcggatcactgatctaaggctggaattaaatcgactctatatgtgaaccggtgtctgatctcatccgcaagattaatgatctttggttcagattcaattatggcgcatcatgacccgcctccacccgatcaccatccgatggcactgattcactgggcgaaggtgcatctcctaatttaatgccaaccgtccataggtagatctatggtatgcgccccctgtctccgtcctggctaaagccccggtggcactgcactgtcgacggcggcgccatcgccggtgtgcgaggacacggctcaacgaggattagcacgatgccctaagagatgctacacgcaaagaacgaagatgcaaagccatgtgaataattctcaccaagagtcgcgcagtggagctggctgcccacggcggagggcggatccatgacggtagcgcgacgacagcgagaaattcaccaggacccgatgcaccaccacccttgcctaggccacg

SEQ ID NO: 61798 - DNA, 278 bp, Zea Mays
cgagtaagggaagataaataattccctcgccatacggactagtgcgacatcctcgcaaccacatgccaaggttgtatccctcaccacccaccattcgtgctatccaatccaaccctcattggaatcaaatctctccccaactcacctccggtaactatctcggcaaagtcctccacgacttaggccatcgcgtcgctcgccgattgcgacggttcactcatagctacgggatccacaacaaaggcctcagaggcagcacccacattgtaatacccaaa

SEQ ID NO: 61799 - DNA, 669 bp, Zea Mays
gagagatcctagggtttgtcttgtgattgataggccacccaagacatccgccaagcgtcgtagagtcggagagaggataggtttagaaggagaaaaaatgttactgtctactcctaggacaaaatgtaaagaacagaagatatattgattgtttgatcaaattttcatgattgcaattggtcatgccccttaatatatataggggaggtatggacctgttcctaagtgtctcataatagtaaccgcggatttagagggataaactcgtgtggaaaagggattagttgcgcctgattcgatctattcgcggatcgtccgctcctaacggcggaccgtccgcgagctagaccttccggtcctcagggtcagactgtccggccgtgcccagtgccacaaatggtgctcaacacattgctaactcaccatctccaccatatgactccatcattcttcacatggatgtctctagaaatccgaggctcgggagcgaaccacatttaggggccctaaagtttcaaaaattatgtccaatataactaagcatactttctctcagtcatataacttcaatatgtgttattacatacaatgtttggaaatatgtcaaatataaatgcgagaaaagtaaatgttgtattgaccttatgctctactaaaaagtatcatccg

SEQ ID NO: 61800 - DNA, 651 bp, Zea Mays
tgtttggtatggaaataactaagtgttcaaatttaatatagatttcatgctaaaacagagtcattaggtgataaacaatattaatacaaaattattacaactggaattactcaatttggagctagaatagattttctatgaattaaataagttcctgcaattaaacgtgtactaaaaattaatttctataattacatatttattttctctgctccctagactgagcgcatgaattctggaaagtgtaggggcctctgtgcgaacaaatccaagactcaaagtgctacagcttggactgttggttgattctcattaaatccggggactcttatgcaattctgacccgcgaaggggtattgtgagccatgggtcgttggatccgaaaacaatggcacagattagatcttctctttagattaaccggtatgcgtttatgaccacaggatctaggatctgtggtccaaaatcgtccacgacagcttctcatccacaaccctcgattccccgatccacgatccagattccatgggctgaaatgggatcactacgctcaatccgagccgtctaaccgagagtcaatggcccaaaacacgagctaatcctatccatccatcatgaaacgagcgaacgacgtgtaatccttcatctccc

SEQ ID NO: 61801 - DNA, 489 bp, Zea Mays
aactaacatgtgttaaacatatacttccactccttcaaaataataatcaacatgtataacatgctcgaacaacatcctcaacatatgtaaatagtagaacatgaataacttcaagcaacaattctcgaaatggaatacgaggatgaacacatttgacatggatataatcaagtataggacacataaatcaaccaacggtataaaccatcactattttacttgccttcaccggggaatttgtacaaagccctaagatacgatccagaagtccaccacctgttttttgacacacatcttagtgcacaaatccacaaaacaaaagctcataaacaatgccgcacatacgcacaatttcaaagccgtcgcgagcgacatctctccccatcacccaccaaactgtagaggcgctgcttgacaatttcatatctttaaaattatgacagcagtggtaacaaacaaaaactccagaagcatctacataaaattccc

SEQ ID NO: 61802 - DNA, 703 bp, Zea Mays
gaagatttggattattttgttgcgttaaatgtggccacggcggagtcttcgtcgcggctggagatgggcgaaacgttggatcttcggctggggcgaggatcgagtgccgtcaacgaaaagtggtggcaaagcatagtgttggcgagagttcgcgaagtggtaggcaccgtcggatggggctggagcaaactcgtcttcgtgtagatcagggtagccaacgtgacttgctatcctcgtcgtttgggatgagtattggtgagggggatctatggaatttttttgagggtgaggaattgagaatgatgttgtttaactatcgggaggcgggcattatcccaaaggttgagccgatgtagtatgtgtgatgcccttacttgtcgtgcggtagtaaagggaggacgcaattgtatttatttgtgcggtgggtctggtgacccttcgctgtgtgtatgtaatctgcgacttgtattgtaatgtggcctgttgcccttcgcttgccagtgtgatgttgtaactgtctggtggcacccttgggcgacttttgtatggagttgtcttgtggaaaagacttcgtatcgcgcattactgtgcttgtccggctgcacactaaggtgacttttgcacagagttgtcttttagtaaaagacttcgtatcgcgcacttgttggtgcttgtccggctgcacccttaggcgactttttgc

SEQ ID NO: 61803 - DNA, 321 bp, Zea Mays
tagcaacatatacctggcaacgtatagttatatgtgttggaagtgattaggtccaacgcttgttatgcgttgcaacctacatccgttgaattacaatgatactgacaacgtttaacatgcgttgcaaaccgtatgcgtagagtaaatatgatcatatcaacatttaccatgtgttgcaatcgtatgcgtatagtaactagaatgcttgtaacgtttacctacattgcaaaccgtatctgtagattaattttggtacttaagcaattttgcaattgtgttttttatttttaactaaagcatagtagttgggatgataaatta

SEQ ID NO: 61804 - DNA, 884 bp, Zea Mays
gaaaatcttcacccaaatgagtgcggaagattgctcaagttatgatagtatcacatttggagataatcggaaaggaaaggttaaaggtttgggtaagattgctattttgaatgatcattccatatcaaatgtgctcttggttgagtctttgaattttaatttactatccgtagctcaattatgtgatttaggatttagttgcaatttcaccgttgatgatgttattatctctagtgttgatggtaacaatcttaagtttaaaggctttagacatgaaaatctttatcttgttgatttctcatccagtgaggcaaagctcacaacttgtttattctcaaaggcttcactaggttggttatggcatagaagacttggtcatgttggaatgaagcaactcaaccgtttaaccaaacatgacttagttcgtggcttgaaagatgtgaaatttgagaagaacaaattgtgtagctcttgtcaagccgggaagcaagtggcaaatacgcatccaaataaaagtcaaatgtctactcatcggcctttggaattacttcacatggatttatttgggccaacatcttttgtgagtattggcggaaattcctattgccttgtgattgtggatgattattctagattcacttgggtttactttctttgggataaatctaatgtgtttgaaacattcaagtcatttgctatattggctcaaaaccaatttgattttgatatcaagaaagttagaagtgataatgggtcggaattcaaaaatgctagaattgataaatattatgatgacaagggtattaaacatgaattttcttccaaatatactctggaacaaaatggtattgttgaaaggaagaataggactctcattgatatgg

SEQ ID NO: 61805 - DNA, 668 bp, Zea Mays
gtctaacacaaaatatcagcaaatgcagaagcttgcttcaacaccctaagcatctttgatatgctaatccatcaggaactagccacaagaacgcttgaaaatctcattaaccagtcttttgatttggtggcttcctgcctccacacctccttaccatctccatttgcaaaatagcccacgtttccagccaaaagcaacaaagaaacataacataagtagaatctttacacactttatgttcaaaacatactatgtttctatttctccataaagcccacaacaccgcaccacacccccggcaagaccaacttcttatcaaatttatcaaacttcttgatccaatcaccaaacatatcatcaacactcttcggagtgctatgtaattgcaaaaccagttcgatcaccctccaaatgtaaatcgctaccagatattcaaagaagttttggtttgaggtttcggctagaccgtaaacagagcactcaagcccctcgtaccagcacgttaacttgaggttctctttagagaggattttatttttttaacgtgagccacaagaataccttaattttctaaggggtttgattttccaaagaaacttgtaaggaactttagacaaattacacctgcatttactgtacaaagatttaacagtgaaacccttcggact

SEQ ID NO: 61806 - DNA, 342 bp, Zea Mays
ccaatgcacgcatcctggccatccaatcgggacggtctctctgaaagggcgaaaagaatctgagcggggtgtcggccacttcttcttcatagatctgacacagagccctcaatgccttgtgagcgacgacttagtaggtgtctttgaatctgtgcccagtagcagtgacactccattccacatggtgtggactggatccaatgtatacagtcacgacacacttctctgtgccatgctcgacgaattcatgaccatcatactctagctggctcctgattccgaggcaaactatgcatgctctcagcaacttggggaaaccatcttcattctggcaaaagctgg

SEQ ID NO: 61807 - DNA, 624 bp, Zea Mays
ggaaggcttgcaatcgtatcctgaacctccctttcggaaaaaggagactctaaagcgcttagatcaactggatctctgtggcaatttggcaaattaagagtgaaaggtctctgaatttcagcccccaatagatctgaaaagaacccatccaacaactcctgcatctgatcatggttagtaacagtcctgccctcatcctccaaatgagaaataaaatgtctcttctttctaaaacaagcatgcatatggaaaaatcttgtattcgtatctccttccttcaaataatggatccgagaccttaatcgagcgattgtcctttctaaagaagtgaggaaaagacaatgttgtttcagttttcttagtaaccaaacctcttcttcagccagaatcctaatatcctgagcaatctccagtctgtgtaacacctcacgaggcaagcccaattgggtcccaacattacccaccattttgtgcccccaagactacaatcttttggaaagcctcttaagcttcatggacactttctcaagaggacaataacaacgagctggctgattccaagaggcatcaacctcctctaggaacaagggaagcttaagccaaaaactttcaaaatgaaatctg

SEQ ID NO: 61808 - DNA, 600 bp, Zea Mays
caggtccgctggatggcatcgatgcagggaagggcaacaatgatggaaagggcaaagaagtgatgaaggatgagcacaacaatgatcagcaaagagcagggaagccaccgttgaaggaaggcaagcaaccttactgctttcgttgtttaacgaaggggcacgttatgcaggtttgtttggctatgctctactgcgagatatgccggtctaaggcgcataatactgacaggtgtctgcagttttggggggacaaaacaaatgcattgacgtgtggttacacagtagatggcttggggtttttctacataccacatgtaccctagcagaagcaaaaggtacagtcgtagactgctgttgtgaaggtttctagaggaaatctttcagagacacaaatttttgcaaagctcgaaggctagtctcgaacaaatggaagtgggaaattgtgaggacatgccccaatctttttaggacccattttccatctcgggaggagttatcccacatgattgagtggggagtagtgcaaacaaaattcaatgctgcgatgaaaattgaggaggcaacagtcaaatcatttgccaaagctgagctcaaaaagtg

SEQ ID NO: 61809 - DNA, 487 bp, Zea Mays
gccgggcctaggtctgagaacaaaaagacatcctcccagagttcagaattcaaagacaaatttgaatttcaaatttattgaaactcaaatacataaagctacaaagataaacttcaacttccaaaatttcatagatcgttgtcttgtgcttgaatctgatcagaggggggaaggggcaggggaggtgctatcgcaccacaccgctcgggcctcggccataccgtcgtagccccatacgttgtcgtgtcgtgctcggatctggccagagggggaggggaaggggcaacatcgccccgctcggtccctaggtgtgtcattgtcgtgccttgctcatatttgatcggagggggaggggaagggcagggaggctcaccgaccgtccacctgagattcaagggggagtgagttagggtttaggaggtgagggagagccggagagggcatccgacttgagaggggagtagagagtggagtgacgagtgagtta

SEQ ID NO: 61810 - DNA, 733 bp, Zea Mays
cttcaagacaggcgtccgtgggagggcttccttgggggaaagggctgctacacgccgccggaaggaaaagggagaagagaaggcttacctgcgtcgctggtaaccgaaggggcatgctcgtttgatctgggtctcgggaaatcagaggcggtttggcgattggaaacaagaggagggatgtctgcgtacctggtaagcgctgcccttcacgcctgcgatctggggaaacgatatggatctgggggaagacaggaggttttgcgatgactagagcggtatttatagaaaagagtgaatgtggaaggcagttgtaaaatttgtcgcaggttgcgtcctagccgagccaaagcgacgatcgtgcgatgagttgcacgatacagtaaacgacgaagaccgagttaggcagaggtaggcgatggtagatgaaataaaggggtaacaggtgtgcgagcagcaaacgttcacgaggaggaaatgcggtttgacgacctcacgaaaatgacacaaatcatagaacgagttcgacgaaaggaacacacacatatataatcgagttttaccaagattttgtagttttcgcaaatactgaattttaggtatttaattattattagaaaaactaaaattcatattttagtacttgaagaaacgttttgaaggttctcgaaaaaaaatccgaaaacatggtcaagataattcgatacagttcgaaaaacttttcactcataaacac

SEQ ID NO: 61811 - DNA, 725 bp, Zea Mays
gttggggaatacattagcttaggtcattagcagtgtgagcactagtcttctttagcttgcatgatgagggagttgccctttggctagctaagacaatccctgatccaatggccatatcttttttgtagcgcttgcactagtcttacttggggtaatgtccaccattggattggcccttatagtcatcatgcaatctggagccaaagctcacaccttttccctacctgtggccttgcccacgttcatttgtttcttgctgatggtgctagtggatctactcatgtcgcccctctcagacttgtgaagcttgagcttggtgagaccgtcttaataacatagaagcaatagatcctagttatcatggacgtgtgtcaccatgcgtcgctactcgacgatgcgcaacctaccgatcacctcattgacagagatgttgttgatgtcaagcaagtactcgatagaaatcatcacctaggctagaaactttggtacaacctgcaacatctttcgtactacctcgacattgaccatgttgtcactaaggagacggagatcagaagcaagctcggtgatgcagttcatgaaatcttatgtgttctctgtttccttcaacaccaaggcatcaaactcatgatagagctacttcatgttggcctcgcgtaccctctggagcccaatgcagatctgcttaatcaacacccatgctattgacgttgttctgagttggt

SEQ ID NO: 61812 - DNA, 410 bp, Zea Mays
gagggaggctagaacaccaattaaggaagcttgaactgacatgcagaaggctggccacggtgaggcgttcacggtggcgcggaaagcacatttgggggaagaaagaaattagggcgctatggtggctaatcggaggcaggggcgggtgctctggcttcatgacgacctggcggagttctctgaggcttcaatttatagagctcaacggcggtggtgcccaatttgaaagaagtgtgctggcggccgaagagagggacaaagtcaccgtggtgttctaccgtggcattcactggttgaggagctacaacggtcactagtgagctattacgactagcagtgacgtggtaaactggtcatgacgtggcgcggtcacggcgaacgacatacacctcgacgacggccgctcggcc

SEQ ID NO: 61813 - DNA, 733 bp, Zea Mays
tgcgcgttctgggttgtagatggtgtgcccagtgggcgtgaggtttatactagtttgggcagaatgtcccttcatccagtctttggtggcttgcactaccgacacagttgttgctcaatgctcatagtagtggctacaagcgagggagagagggaagaagggctccaaagtctcttatgcatggctagacctaagggctacaagactagagctctctgcgctaagccttggatgtcgtggtggttcactcctcaactccggcctccgtggtcctccgagtcttctggtccgtctatgtctctcgtgtgtcctccttcatgtctgtctctgaccctccccttttgtagaccaaggtagggatcggttatcgactccttgtcttagaaggagttatcgagccatggtaaagcgagatgttctacccaagtaaatcgttcttgtggccttgtgtcccgatcgtctaggcttccctagatgcgttctttatgtcaagcggtatgggcagcgtggagccctagcgccatcattactgtctttacaccatgtcgaccgttggcctctgtagcctgggtctcgacatggctcgccttattgcacgtcctgtagatgtccaacgtactcagacctaggctcaataggtcatgagtgcgccgcatgctgaggagctcgtaggttatgagcgcgccataggtcgacgggcttgcaagtcatgagtgggaggaggatcagctct

SEQ ID NO: 61814 - DNA, 626 bp, Zea Mays
gaagacaagggtgttcaggttatcaaagaaatgatcaagcgaaaggcggagaaatacaagtgcttccgtcaggactgcaagggaattctatggtttggagatcgattggttgttcccaaggaccctgctcagaaagaagatattggatgaagctcacctttccaaattctccatgcaccctggtagcaacaaaatgtatcatgatctcagatctttatattggtggaccagaatgaagagggaaattgccaagtacatatccgagtgtgacacctgccagaggattaaagctagtcatttgaaggcagcaggccctttgcaaccacttcccataccatcttggaaatgggaggacatttgcatggactttatcgtaggattgcccaatacctccaggcaccatgattccatttgggttattgtggacagattgaccaagactgctcatttcttaccagtgcataccacccacaagacagagaagtatgcaaaaatttatgttgatcaaatagtgcgattgcatggtattccaaagaccattgtatctgacagaggagcactgtttgtggcacgcttttgggagcagctgcaagaatcacttgggacccaggtaatgcgaagctcag

SEQ ID NO: 61815 - DNA, 550 bp, Zea Mays
ctctaagtcgttgcaagtgaaagaacaagccggtcgtcatcaactcttggattagtttagccgctcgtcatcaactcttgcctgattcgccttgcccaaacaacagcctttcaaatataacaaacacgcttcagatactgaggagctctaagaacctgaccacgcttcttcttggcatcaatttctttgaagaaaccgtaccggataccgattgcttttcctaaaattctaaatctaagcagcaacatattcacagttctgattctcccagagattggtcagttaaaaggcctcctttcacttgatatcagctccaacagcttaaccggaccgatccccacatctatctgcaatctcacaaacctgctggatgctagatttatccagcaatgatctcacgggtaaaattccagttgcattcgagaatctgcacttcctttccacattcaacgtttctaacaatgacctagaggggcctattccaaccggtggtcaatttggtacatttcagaactccagctttctagggaatccaaagctgtgcggcttt

SEQ ID NO: 61816 - DNA, 515 bp, Zea Mays
tgtacctttaatgtctggccctgatcatgatgtttcttctattgatgtcccttcttctaggagtgccccaattcctccatccttggaattcccctctttcttgtcccatcttcatgtatgtatatctcttctttaccatgcttttgtcaatgggtgctctctttgctgacttctgaacacacagggagtcctggacttggtgtcagcttagctaagatcatgtgatgctcctgttcctgagcagatttcttctctgtcacagtggaacccccttacccttcaaaaacggatagatgatcttaagtctgcaaatgacggtgagccggttgataatgcatcttgttgacctgtcttcccgcttatattacagttcgttgtggttatctttctagctttgactcgatgatgctctaatgctgaggagaggtgtgcctagggtcaagcagaccttgatcaggtgactatgttccttgacagcgctcgtgccatgaatttctctctacatgtgaaagttg

SEQ ID NO: 61817 - DNA, 476 bp, Zea Mays
gtcaacacgccccaccggcttttgaaccgattattgtgaagcattatcgcctccgcccgccggttctagtaaaccggccggtggtgaaaaaaaaaaccgtgtcacaaaaatgaaatctgtagtagtgcaatatgcttgcttgctagctacaactacaattatattggttaaccaaagagatataaaaagagagaattctgtcttgtagtttcctggtgaaattgttttcctgctaactgcgtacagaataatatcagcacactaatgcagattttgactgggatgcagttaagttcaaatcccatagatttggtatctgggatgcagtcacatccgatatacattatcccttcccgctacggattccagccatcacaatccgatcttcacactgcagctataccactcttcaattcacttgccatttgccaaatgagaagatatctgaggtatcaaaaacccagggtatcaatttc

SEQ ID NO: 61818 - DNA, 389 bp, Zea Mays
ggcatgatgatgtatcgctggtcagcttcaacgataatagagttcaacacctccataacaacaacgaacaacatcggggagatggggtcaccctgccgaagcccacgagcgtgcttgatccttctccccgacctaccctttacaagagtcttcattctggctagagacaaaatgattgagatactaaccgaattataacaccctgttgattagattcaccccatgctacataacaaactaacaaaatcctagctcatagttcaaaacactctctacatttcaagttatgtttcgattagagatggcaatgggcaattcctccattaggggacgggaatgtaaacggggaaatttcttcccccgacgggtaaacagggatggggatggga

SEQ ID NO: 61819 - DNA, 352 bp, Zea Mays
gagagggatggatcactcgacaagatgcctcttatgtgaccaggaagaagaaaccctggaccatctccttgtctcttgtgtgtttacaagagagttttggtttcatcttctgagaccttttggcttggaaagcctggctccacaaccagggatgccttcgttcatgaattggtgggagcagatctcaggagtcacggctggtttacttggaaaaggcctcaactctttaattgccttgggagcctggacaatttggaagcttcgaaacagatgtgtattcgatggatggactctaagtttggccttatctcttaggttagcagggaaggagagattgttttgggaggtggca

SEQ ID NO: 61820 - DNA, 516 bp, Zea Mays
cgaaaaaacaagcaacttgaacgcccatcgactcgtcgtttaatttccagttggactgatcccaaattaaacatggctgccgcaacaattggcattttccattagaaaaagctcacaacatccgacggcaatacattggttaaaccagtgattcaacacatggcttacacaaacaacttatgctcccaaaatatgtagctcccagatgaaccgatgagtgacacctcaactgaatttatgcaccttatgttcttaattaaagtactaacgaattgatgcctgtgatgatagaggacttcgaacatagcttacaaaattaagatgctagcaaccctgccaacccagcacgaacactagaaaccatcgcttcacaagaatttgcgctctctgcttgtagagaactgcatagtttcatttgtgacgggatgttctacaggagctagctgaggttcaagagaacatctgcacaaacaaggttgggactatttagcgccatagaatatagtttgcatgcaa

SEQ ID NO: 61821 - DNA, 360 bp, Zea Mays
gtgagtccgtggaccagaaggagtacatgagcaacttgattgtgacgaggccagatatacattttgtagtgtgtctgtgcgctcgtttctgggcttccccacacacttctaaaagacatgttgcgaaaaatattaggtagtacctgagcttcactcctgagtttgttttgtggtactcttcttctgttcagtatttgtgcagttattctgatgctgattttacgggttgtcgcttggagcgcaagtctacttctgggacttgtcagttttttggtacttcgttggtttcctggtcttcgcgcaaatagtctagcgttgctcagtctaccatagaggccaagtatgtcgctgccgctagct

SEQ ID NO: 61822 - DNA, 472 bp, Zea Mays
cacaaatacgcaactcaaagtttgagtatctgttttttaaaaacattgtatgcttcaacacctttccaaagctccttcaactcttcaatcaagggttttaacatgacattgaggttctttccatgatagtttgggctaggaatgattaagcaaagaaatataaattcatatttcatacaaagagaagggaaggttgtatggaataacgaagacgggccaacatgagtatgatgatgccatttgaccaaaaggtgtgaagccatcgatcgtgaggtcgatttgaacattcctcggatcagctgcaaagtcgggatcaaacatgtcgagagccttccatgcatccccatctaaaggatgcacgattaggtcatcattatcacggacaccttctttgtgccatcacatgtgcatagcggttttttagatagaaacatttgtttcactcgaggagttaggggcaagtagcggagct

SEQ ID NO: 61823 - DNA, 867 bp, Zea Mays
ctaccggcaccttgttgctcaatgctcgtagtaggggttacaagcgagcgagagagggaggaggctctcaagtttcttatgcgtggtgtggcctaaggactacgaatctggtgctcgctacctagctaagccttggttgtcgtggcggtgtgctccttggcttcgacctccgtagtcattcgtgtgctttggcgtggtcgtctgtggtctgcatgagtgttctccttgttctcggccgatcctctcctttttataggctaaggtgggtgtcggttaccggtagcttctcaggaaaggagctactgcgtcgtggcaaaacgagtcgttctaccttggtaaagtcgtacttgtcggcattcgtctcggtcgtcttctctggccttgctctttaagactagctgcgcgtgaatggcgaagagctccagcaccatcattactatctctgcgacacgccgaccctagcctttgttgcatgggtctcaacgtagctcattttgttgcgggtcctgtagatgactagtgcattcaggcctaggcttgataggcaattctgaaccacaagcggatcaggtcctttggatctatggtagctagggtttgatgaaggcaaaggcgttggcttcttgtcgacccctagacatagttaatatgatggttctctcgtgaccgtggccttaaccataagttcgtttgcgtcttcaatcatggcatgggccttaccgtaaaagaggaaaagataagctctaactcagccgtgcaaggcttaaaaatttgcttattccactcctaaacttttttttggccttgttgcgtcttagagcttgaggcggtcaatgggtagccaccagggtaaaacttctcgctcgg

SEQ ID NO: 61824 - DNA, 675 bp, Zea Mays
tcatcaccatgctcatgggtttctcccttttcttcttgttagctttcatgtaaaaccactcgttcgtccacccggtcggccatttgctgtggtagcctatcacggaagcctttatgtccttccagtatgtgaagttgtagcatccaaagttcttgtgtaggccgtaagctcttgccttcgtctgataatgaagctcgtgtacccggtagaacccttcagcgttggcactctttccttgacttcaaagagccaagatatacacgctgagcctgataatggcattcgtggtcagctgatgtaggtagatttcaaactttttcaaaacttcacctatcatctcataaagggggaaccgaagtcccgccctgaagaaactcttaaagactacaacttcatcttcttttggctctagaattgtctcctctccaacaaagcgaaccagttcatcatcattttctccaaaatatcctagcttcttcattagaactagatcttcagctttaactgtagatctcccaaattcaacttggctaggcttagtcaaacatagaatgctatcgtcatcctcacttccattatcactttcagcttcagccacagcctgttcaactttagcattagaagtaccttcggcaataatttcttcctgcacaaccagcctggagcgcctcatca

SEQ ID NO: 61825 - DNA, 727 bp, Zea Mays
caggaacacccgcccgaacaacgctcaaggttcacagttccgctctggaaatcagggtggaaacaattatcagatgcaacgctctagatagcaaggccagagaaataatcaaagtcagaaccagcaaaggagcaactctcagaccaaccagaggtctggtgggagttcacagaatcgtcaaggtggcgtcgttaacacgcaggccagaagcaacaacgcaccagtccaacccaatggctatttcaagtgcagtgagctgggccactatgctaacaactgcccaaggcgcaaccagtagacaccttagaggagcaatactcagaggaatgaccagaacacccccgctcgtggatctgcacagaacaagactccgcagaaccagagtagaggaagggtcaatcacgtcaccgcagaatcagtgcctgaggatgccgacatggtgtatggtatgttccttgttaactccatacctgcatcagttttatttgactctagagcatcgcattcgtttataactgagtcatttgtggaaaaacataacataccaaagtaccctcttaagaagatgttacacattagttcaccgggaggtaacatgaaggccacacactcatgcccccatgttaatctcaagattcaaggaatagatttttcagtcaacctagtggtcctaggatccaatggtattgatgtcattcttggatgcaactggttgaaaagttgtgat

SEQ ID NO: 61826 - DNA, 475 bp, Zea Mays
cgtatccatattctcatgaaaacttttccaaaatctagaggtaaattgtgatcctctatccaaaatgatcttcttcggtacagcgtgtagagactcaatccgaggcatatataactctaccaattgagatcacttacaagtagtcttgaccggaatgaaatgagccactttggtcagtctatccacaatcactcatatagaatcatatcctttcgagatgcgaggcaatccagtaatgaagtccataccaatcacttcccacttccattcgggtatctttaatgggtataatagtccagttggtctttggtgttcagccttaactctttgacacgcatcgcacataaccacatgtgcagccacatctctcttcaatccataccactagtatttctatttcaaatcctgatacatcttagtgctaccagggtggatagagtagtcataatcatgggtctctttcaatatagtctcc

SEQ ID NO: 61827 - DNA, 443 bp, Zea Mays
tttgatgtagagagttggtcaggtcactacataaaatctgaagcaaatcggctgcaaaatgctctgtcagaacaactaaagcaaccactgatggtacagtaccgaaaatatcccagggttcagtccccctcgccaccggttatccgcgcacccggattcgcaccggtcgccgtgatttgtgtttggcacacagtggatattcacggggatgtaaaaagatcacgcaggggcgtggatttggtcgcggcagaggcttatcaccgcgcctgtagccattgcgacgtggccggaccgccggtgtcaccgtggaaactccggtgacctcggttgtgccatgtcgtggtttgttactgtgcggtagtgactgtggcgcacttaagagtacaatcgtggagccattacgccggtgaacgccacaaattctttgcgccagtgctcttccc

SEQ ID NO: 61828 - DNA, 447 bp, Zea Mays
agggaataggttctgagggagaagcgggttctcacgccggagcctggcgtcctgctcattttgctctcgttcatgttcatgggcgtggcgacgatcacgatgatcatcttgctgtcgttgggggtttcccctacttcagaggcttcgtccagggagacgggttgcgctggatcctgttccccggcttcatggtgacgccatatgttacggcgcttgttctggcgtcagcgcgtgtcccattggggggctcttccgcagtatggtgggctcgtcatcggaaactggtgtgtcctccacccttccctagatgaagaggatgtccgaaaaggagcttggtgtgatgcttcgtgcaccctccatcttctttgaagggcagagtggtcgggatggtcgttagttgtgcccccacggttgcgccaatcctaggggtgcatgcttctcttcgcc

SEQ ID NO: 61829 - DNA, 588 bp, Zea Mays
agcaatctcccattttgccctttcctcatccacggctctaagactcatagtaacactagggctgcagccatcaaagacacatttgtttctatgttttcacaagatccaagctcccagaatgataagggaatcaagtccttttttggtgagtccattaacaatattccccaccaattcccaccagcccagatatgagccaacatccagttgaggagccaaagaatgcagaccaaatttcctaagcaacaaataccagaattccctggataatgaacaggtaacaaggagatgatcaatagtttcatcctcttgatcacatacggggcacttctcaggatgagtcagccctcttttagcaagcctatctgctgtccagactcttttttgagctaccagccaaatgaagaagcgacattttgggcaaggcccaagttttccaaattctcttgtgatgagggaaaaccacagaccccaaaaagaacccttcataagcagtctttgctgaataggtgccagtaggagtaatactgaaaacatgtctatcctcaacctcaggcatgggttcttgttacagtaccccaaaattaa

SEQ ID NO: 61830 - DNA, 366 bp, Zea Mays
ggatacatttttgagcttaggacaatttttcctaacatgtcccttcttgtgacacttgtgacacactttgtcacattctttcacaaacaatgtcttttgctttataaaaagcattctttcctttcttgggaacatatccaagaccctcacgattaagtgagcactgttgacttcccaatatgaaatccaatttagcctttccaccatatgccttttctaggtcatgagttagagtatttactctatctactaacactttattctcaacaatgttttttgattcatcaagagcaatatcatcattgagacaaattttgcatttatcacaaatagagttagtaggtagtggctcacttgtaagactat

SEQ ID NO: 61831 - DNA, 499 bp, Zea Mays
ggagtttccaagcctgtagtttgcttgtgtcgttggaatttctcatccgagccgagcctccgtatcacctccgcacattgccatgggtagcggctccatcgctacgtcatcgagtacgagagcgctcatcaagttccccatcacctacactatgttttgcacccaaccaaatttagaatagtgcaccggtaagccgtagtgcggtgcgccggtgatggcgccgccgtgagcatcctgcgttaccactccgtccggtcacgtgcgaggagaaggtctcctggccgtctgatcatgacgaatggacaagatttgctccgcgtaccagggttcgtttaggtcatcgatcgtctgattgagggtcagattggatttagcccttaccggtgtggagcgtggatctaagccgttgatcgtgaatccaatggattgggtcaagtaaccctttggccattatatcgggaccatcggatctggatccaatagccccggatgcgcccgc

SEQ ID NO: 61832 - DNA, 989 bp, Zea Mays
catccaaccgacaacaacgaggccaagcgcctcaaacgccgaagccaggacttcgcactggtcgaaggccaactttacaagaagggggtcagtcagctgatgcttaagtgcgtcaccgagaccgaaggcgtccaaattctgcacgaagtccacagcgggacttgcggctcccacgcagggcctagggccctagcggcaaaggtgattcgccaatgtttctactggcccaccatgatttgcgccgcaaatctggtcgtgaggtcctatgaagcctgtcagaaattttctccacgctcgggacgcccttcgcaattcacgaagctaatcgcccacatgtggcctcttcagcgctagggcctagacattgtcgggcccctgcccacggctcaggggaacctcaacttcaccttcgtcgccgttgaatatttcaccaaatggattgaggcgaaggcagtatccaccataacatcgaggacagcccagaaattcttctagcaaaacattgtttgccgcttcggagtcccgtccgaactcacagtcgacaacgacaagcaattcgacagccaagacttcaaggatttctgtttctccatcggcaccaagcttgccttcgcctcagtataccacccccaatccaacggagtcgtggaacgcgccaacggaaaaattttcacagccgtcaagaaaatgctcctcgacgacagaaaaggcaagtggcccgacctgttacccgaagtggtctgggcgctgaacacgactgagtgcagggcgactgggttcacccctttccgccttctatacggatcggaggctatgactccgcaagaaataaaacacgggtcaccacggacggtcgcgtcggtcgcccccgacgtagacgagtctacttcgaaggacctcatcgacggagaccgtgtcttcgccctacaggctctaaacaaataccaagctcagacaaaagcatggcacgaccacacagtcatcccgag

SEQ ID NO: 61833 - DNA, 572 bp, Zea Mays
gtgaggatagccacaatttcggtggctgccttttctaatccctccaagactttcctcagcctcttgagtgtgcccacggtgagtaaaattctttcacagtcttacccacgacaccagcatgtttaacggatttgacaaacttatgcttcagtttagcagaagaggagccccagtcactgaccttatgatcctttgccttctctctaagctcatcgtagtgaagctcatctataacatcctctgcctcctcaactgcatccctgaactgccacagccaaagatcaagggcagagctttgttccttgatgtattcagggtcaacgatatcaaatacaacctggaccttcttcactgactgcagcaccctacccttgacatcttccaagccatcagccttccagtagtcagtcaggcaggtgaaagctttgttgatccaaaaggagatggttgcatttgccaccgagctcccggccaacttcccagcgaacatgattgtggcggcggcggccatgactttgtgcttttgtgagggaagatatctgaggagagatcaaagcatctgaaagttttgc

SEQ ID NO: 61834 - DNA, 415 bp, Zea Mays
gtcgttacctctgcgcacgcatggatcgtccggctcggcgcagagaacttcgctcctgccacaggtcgtggaccatccggccctaggtcgtggactgtccgagcctccgtagagagcactaccgcagatacacctcgtagtgattggtgtccatatcagctgcaatacaatttttggtgactccgcggggacttcgcgtgaagatctatcaaatcaacctccaatggccggttcaaagggtaattcctatgtttctcccagcaacgtcatagagccgactatggagactttgtcggctgatgatcagcaggagttcgaggaacacaaggagcagctgatcacagaagcacatgtgaaattcctggccaactttaaggcggacaggaatcacaagatcgtccgacgacggataact

SEQ ID NO: 61835 - DNA, 506 bp, Zea Mays
gcgtaagcttcacttggggaccctagggcattcacctcagcgtgccattcgtgcgaggcgtgattctaggagggaagggaaaccagggctagctgaattgctcgtcgtaatcactatggctgcgggtccgctacgctccatggccggcggaggttccaacttcaatatgggtatgatgcttgccatactatttgcccgcacttgcgcattttagcaccgattgggtttgagtttgggccactatagcattgtgccactgtgtgccgacaatggtgccgccacgagcctttgctcctccgaactgggcggtgaaataggggaggtgtgcgggtgtcgtcagatcgtatgcgtgcggtcaggattgggtcaaggcgtacctcttcggtctgttaaaatatgaccgttgctgggtgatcggatgggttgaacgaaaccatgatgtgggcgattcatcgagcgtagatcgatgatccgagggctatacgcgtgtaccaattcattacaag

SEQ ID NO: 61836 - DNA, 830 bp, Zea Mays
cagaagtaaactggcgtacataaattaggttcttgatgagacttggtgagacaagaacgttattttgacgaagggagtcagacagaatggtggaaccagtggaggtaacgggaatggagttcctgttaccgacaataattgaagaaggaaagggatgatgtgaaggaaataaatgggagagagtaccagcatcagaggacatatgtgtggtggcgccggagtcaaagaaccactcgttttggcgtggtggttgaagtatcatggtgctgaagttggagaggagcgcctgctgatcccaggatagagtggtggtagtcggaaatcctagcggcggtggtgtagaccatggttgttgtggcgcccctggctagggaccttcaatgccagcgatcaaggattgagacagggagtggccgactgttgatgtggcgccgagggagcagccgacatcctgggtccgggccacatctaaatagacccggtccaaggattgtagaagctaggccaggtgttggtcgatgtagaccccgacccatgttgtttggtgggaggaccagagtgatgcccgcctttcttgccgccacgcgtcccgcgcttggggttgctggggggatgatgtggaggcggtggctccggcttgttggtcgggggcttgtcggtggtagtggcgagaagagcagaagctgggactgtggagtgatgcgcaaaagtgagctcctcaagcagcagatcatttcgtacctccaggaaggtggggagacgtcgcccgcgtcgaagatgaagaccaatgctggtgaaacgctcattgagaccgcggatgacgttgagga

SEQ ID NO: 61837 - DNA, 951 bp, Zea Mays
gccagagggtgaaagcggaacatcaaagaccagctggtttactacacccgcttaagatacctgagtggaaatgggaagagattggcatggacttcattgtgggattaccccgcacatctgctgggtatgactctatatgggtgattgtggacaggctaactaaagtagcctactttattccattgaagaccacgtattcaggagccaagctaacagagttgtacatggcatagattgtttgcttacatggtgtgccaaagaagattgtgtcagaccggggatcacagtttacttctcggtactggaagaagttgcacaagtgcttggatacaagattgaattttagttcggcttaacatcctcaaactgatgggcacgccaagaggatcaaccaagtactagaagatatgttaagagcttgtgctcttaaacatggtggtagttgggataagagtttactgtatgcagagttctcctacaataacaactaccaggccagtttgaagatgtcccgtttgaggctttgtatggcagaaagtgcaggactccactgtattgggatcaaactagtgaaaggcagttctttggacctgaaattatacaagaggcagaggaacaagtccatcaaataagggaaaaatttgagaactgcacagtcaaggcagaaaagctatgctgatacccgaagaagactgctagagtttaaggagggtgatcatgtatatttgaaggtgtcaccaatctggggtatgagaagattcaaagttaaacggaagttgtcccctcgcttcattggacccttcttaatcctaaagcgagtgggagaggtggcatatcaactggagctaccggatcatcttgcggatgtacatgatatcttccatgtatcacaattgaagaagtgtctccgggtacctgaagagcagctaccattggaggatcttagtgttc

SEQ ID NO: 61838 - DNA, 309 bp, Zea Mays
tcctcgatacgatcttggcgatgcagagtcagcaattagatgctgtgtggtacttctaaaaaacgataaaagcaaggcaccgtagcatgttggtttagtcaattagattagactgcacggccgctgtccatgggacaagaggaaatgtctctcacgggagaacgacaagttttaagtcgatgaattggacttgtggtagatgaccaagtaggcaaagccgcaaaggaggtggaaccggtggcaaagtaagttcagcaataacaagtttcaggccttacgcatggtctaaaaactagaaattaccatagc

SEQ ID NO: 61839 - DNA, 458 bp, Zea Mays
aattttcaaaaataaaactttgcttagaaaccagtgttggatcgtcgggactggaacgctagatctaggaagaaaggccttgagaataatggggtagataggtggctatataaataggccataaaggttgacactaggatagtagggatgccctaggagcacccctctgatcgatgagaggacgttcattcaaacatgcatgcattataaaacatgaataattaaaagttaaagaaaatgcattgaatctgacccctagcaacattagttaaaaatgggtaccatgaaaatgagttggaatagataaatctaagttgatccacctcctttaaaattaagcacaattatctccttaccgctaccttaacacttacacttaaccctcttccacagatgtcttcacccacccccgccaatggaggagacacccacttcagctttgactacctttcccacga

SEQ ID NO: 61840 - DNA, 1467 bp, Zea Mays
cccgatcccaagcaaacctagtccatgccctaattaagctagtccaacctagaatcccctttgcccacgacgacggcgaacatcaagggcgggccgaggtgttcccgacgatccagcgcagtctagttcaattaatcgagcctacgaacaacatgagaccctaaggatgctagaacacgaattagagaagcacgaatcaacctgtggatggctggccacggcgagatgccaacggcggtgaatttgaccgatttaggggaagtaccgaattcgcgggctatggcggctaatcggaggcggaagttagtgttctagcttcgtaacaagctaacggagcaggccgcacactcaatttatagcatccgcaagcggtggctccaaattcgggaaaggtaagctggcggtcagagaggagatgagtcactggagtttgctaatgtggcatttacttggtaaaagcttacgaccgtcacgggctatccttcccaatccatgacgatgtggtaagacggtttaaggcgtgtcgtgaccgaaggaaacgacggcacgatggcggtggtcgcatggccacgtctccaatgcaagtggttacgacgactggacaatatagtgccctaagttcagcctcgcgcaagatcttttcactcgccacgattatccacttcacataggcacgaatcacggcggtcgacgtgaatcgtggcacagagatgaccagtggtgacaggttcactaaatcagtgatctgatttaggttattgtaccatgggagctccattcagtgcgcctaaccgagcaagttgaaaagccccgttctctaatttccatgtaacaaccccctattttatctgtagcaaaatggttcttctacaaaccatcttgaattttgttatagcaacctcgatcaaacatccactggatcctattccaaatcgatctcaaagtccatccgagcacactgttagtcgagttttagtttcagtggtgactgacaacacaactttaggtccaatttgctccactttccatacagctccaaggcttggtcacttaatcaaacttaaactactaacatagctctataattttgttacaatgacatagggaaaaatcttcatggattaagagatacaaggtcataaacttggcctaatgtcactgattttcagagtttaagccacatagtgacttgagactttttacaattaactccactttgttccacatcacatgaaaatcttccaatgtaaaagttgtttagttttttatactctaccactttgatatagacactttggtccaaaagtgtatagaaattgaaatcaccttatagggtacaaattagggtttccaaggctcttattagggttttgaatactctagggtttgtgtgccactcaaatccatcaagtttagtgttttatgaatatttccactaacttttgagataatactcaatttggtatc

SEQ ID NO: 61841 - DNA, 487 bp, Zea Mays
taggaggtggcagattccaagcagagtaggcaacaggagcaccaacatttgatactttgcctctcaagatcatgtctagccggctcaccaaatccttagcaggaattctcctattggtaacccgagtggagtcagtaacaccactgtacaagtaagccgggtatgctctatcctttaggggttggatgttcttaaaaacaaaatcagcaaccacagcttcggcggtcagacctctttcattcagcagacatacttcagcaagcagaaccttagcctctgttacttccagggcagtgagagactcaatccaacttggagtgcgcacatctggctgtcttcccgatcggggagggagggacttgccgtggttttccacaataaaccattcaagatgccaccccttaatgttgtccttaagcggaatatcaagatatttcgttgtccttccacgccgcatttccagactcgcaccacccacgagttggtg

SEQ ID NO: 61842 - DNA, 366 bp, Zea Mays
gtgtgctggttctggttcagctggatttcagcgtaaaacgtgagctaaaacaacgtaaatgagtatgaaatttagcgtaaaccatatatctgttttgtaacagcaaacagggcccaaaattacggcgtgaaaatcgcgtgcaaccgatcgtgcgcgggttctggctcgggcagattccagcgtaaaacgtgagctaaaacagcgcaaatgagtacgaaatttagcgtaaattctatatatgttttgtaacagcaaacggggcccgaaattacggcgtgaaaatcgcgtgcgtccgatcgtacgcgggttctggctcgaatggattttagcgtaaaacgtgagctaaaacagcgtaaatgattacaa

SEQ ID NO: 61843 - DNA, 1785 bp, Zea Mays
caaaatgtcgttccctcatttcaatggtgagaaccctaaactatggcgatcccgttgtgagtcgtactttgagatgtactccgtagactctaccatttgggttaaggtcgccaaaatgtacttacaaggtcccgctgctcgctggttccaatccattgagcggaaactcatccatctctcctggtccagattttgtgccctccttgacgatcgttttggccgcgatgagcatgccattatgatccgcaaactattccacattcgccaaacccaatcagtagcggagtacatagctgaattttctgaactggttgataacctccatgcttatgagtcggccccagatcccctatattacaccactcgtttcattgacggccttaagggtccgatccgctctgctgttcttcttcagcgccctcccgatttcgatactgcctgcgtgcttgcttctctgcaggaagaggagacggaaactgaagcagctcgaaaatcggagttcaaacgcccatattattcagcagctcgactagaatcccccaatgcaatgaagccagcattccgaggtgcctttccattgccggcaccaccccaagcaacagatgacaagactcccttgccgatcaacaaatacaatcaatcagctgctgataaaatggaggctgtccgaaattaccgtatggccaaggggctgtgtaaagtctgcgcagaaaaatggcacaaggggcataaatgttcaactgcagttcagttacacgccgtgcaagagctttgggatatctaccagcatgaggacacaaattcaccccaagtggacgaggactcttcttctcaactttatatgacactatcctcagcagcttacacaggatcagttgctccgaagactgtgaaatttctgggcccagtgcagtctcagcaggccttaatattggttgacagtggcagtactcactccttcatcagttctgccctcgccgagtcattgcagggactatccccactaaccactacactcaaggttgctgttgctaacggcaattctctacattgttccactcagttggctggctgcaattggtccacacagggcgtcaccttccaaacagacttcaaagttatcccccttcaatattatgacatcatcgtgggtatggattggcttgaaaatttcagccccatggagatacactggaagaacaagtggatgctgctaccttataacaataccaaggttttgctgcagggcaatcttccagagcaccctccgcatacagtagtccaactccttccactcacagttgcttgttttgctgttgatttttcacaatttcctgaagacctgcaagcagttctatcagaattcagtgatctgtttcaacaacccgaagggctaccccccagtcgagcctgcgaccatgccattccacttattccgggagccagaccagtgtctattcggccataccgttacccgcctacactgaaaactgagattgaaacacaagtgcaagccatgctgtcttctggcatcattcagcacagtacaagcgagttcaactcacccgtcttaatggtcaagaagaaagataattcctggcgattctgtgttgatttttgtcacctcaacgcaatgacggtcaagaggcaatttccaatcccggttatcgaggatatctttcaagaattagcaggcgccagttggttcacaaaactagatttatggtctgggttccaccagatcatgcttcaactgggggaagaacacaagacagcattctctac

SEQ ID NO: 61844 - DNA, 285 bp, Zea Mays
cgtgaccaaacctcaggggaaacactgagtggggcggcttcgcccccgccttcactagaaacagacccatgaggcaggcaacatgaatggagggacctgccggggaagctagtcatgtcaaagaacaactactcctcgaaggctacggtaatggtcaccagtggaaccgagggccccaaaaactcacggactcctgtcacgacggaacgactactagcaaagacaaacgaaaagtgcaatgccaaagaccctgacgatgtttattgaacatatcccagtttttac

SEQ ID NO: 61845 - DNA, 382 bp, Zea Mays
tgagtgtgtcgtcagctacgctaggtagtcaagcacccagtccatcaactcgtgcctcaaatcatccaccagagctcgccaatttgaaacttcccccaaatcagttttccgccgccgtgaaaaggctctcaccgtggccagtgcgcttcaggtccgttcatgccctctattcactcgtttcagtacactgatgtgctcttgatactccctgacctggccgattaacctagaacccataggatcaccgggaacacgtcgaattgtccgttaatcgcacggtcaccgtgggcagagagaatgaggcctcgaaccttgaaattagttgaggggaaatgattgttaggggttaaaataagtgtcagccatgctagagccctagccg

SEQ ID NO: 61846 - DNA, 574 bp, Zea Mays
ggcactgttagctacaactagagaatacagaagatatcaggattggggaaggagacaacaggaagaagaaggtagaggcagcatgaagacaagagttcttaagtagtgttcacaacgttcaggtttgatacccttacacaacacccgcacagagaacttaactccgcccacacacagagagtggtgcgcggttacacgcattctgggccttggagtcgagggttggcgcgacgctggcgacgtggatgctcatctgccacttgggccacttgctcctgtgcatcgggctggattttgacctcctgttgctgggcttctgactgaagactgtctggtaggatcatattcctggtcccttgaaggcctgcttgaacccaagcaggcgtgcctggaaagcactgctgaagtgcatccttgtcctcccaatgcaagtggtgagttctcgaggaaggccaaaccattccacaagtacctgctgcacaagatggttacctttggttaagcccctagtctgtagaatcctgtatggaacgctgtgttctggcagggaggttgacaatgttgatgatgcggc

SEQ ID NO: 61847 - DNA, 1078 bp, Zea Mays
tttggctcatcaaattggcttctgtaccgaaaggtatacttgagataaaccaaggcactctggctggagccagcggcggcttccttcggcatttcccattcatttgcaagaggccatactttataagcaatgtgctcttgaactaaatctctcgtgccaatgtaggtgcatatggtgttgaaagcaatttggcacgcctgcacttcattcccaaatgtgatggatggccttctaatgccaaagcgtgaccatataggacgttggataacgcctctcacatcctccctctgattcaggtcattcttcacgtaaaaccattccttcatccaagaacctggccacttctttcgaagtgtaggcatagggtaattctccttagagcgaggcacgacgccatagtagccaaagttgttatgtattgttcttttcctgtcgccttcgtctcgtaagatagctcatgaatattgcagaagcatctcacatccggctccagtccttggctcctgagggcccatataaaccccccactctgataagagcttcgggggtaagctgatgaaggtatatctcgaatgtattcaaaacttcgaccagcattttgtggagcggaaaatgaagcccagctttcatgaagctcctgaagaccaccacttcatcaatttcagggaggggaacgatgtcttctcccccaaccctcactatggacacatcatgaaaatatttgcctttcatcgcttcaatttgcccttgtttgatagttgacttgccaaaaacaacgtggcttggcctccacggtcgatcttcggtatcttcgttctcactctcaacatcgaaactctcgctgtcgcttgaatcaccagatagcccaactaacatttcattggtgattttttctacgttggtcctttccctggcttcatagaagccagcgagtgtgggatccacacttttcttatcctcagccatttcggtgatgatcactacagaaagccgaagctcaaaaacaattgcactcacagaacaggaaagcaaaaatgacaaccgtagcaagaaagctatatggcataaaaaatatctg

SEQ ID NO: 61848 - DNA, 646 bp, Zea Mays
agaaccagctacaaatgccgaagatacatatagttgagccaaccgaagacaaggctgaaaagactgaagagccagagatttacaagataacaaaaatgccaaagattctgagccttccgatagaggcagatctgccgaagatacaaaagacttctgctgccactcctaagaggagaaggatggcaaacatgctggatgttgtgctggaaacgacgaaaatcttaagtcctgttctcgtgaagaaagtcgttctagccgaaactaaatcgcaggccgaaacagaaagtagacaagccgaagctgtgcaaattcaagctgaagccgaagctgggccttcagtgcccactaggacagagcctgtcgtagttgaagaaaaggcgacagagcaaattgcatctgaaaaggtcgaaactcctgctcccgaagcttcgaaagaaagcactgagtacatcattcgtcatgctttgggaaaggaactatctcaagaagatatgctagaagcacgacactatgcccaaaaattgaaatatatgaatggggcattagtgtttaatggaagcaatgaatatgatttcctatactgtctcccagacaacaaagaaatatccgtccgccgggagataggtaaaagcatgggattcccaaa

SEQ ID NO: 61849 - DNA, 780 bp, Zea Mays
gagaaagcagacgcggacgtcgtaacatggttgaagaggacgccgccacaaggattcgagactggggaggaggcattgatgaccaattatgctatatgttgttactatttatgctagtcatcgaaaggttttatgtattttccttaccatcttcaacacattttcatggaatgttggttatgagcgaatcaacatttacgatttatctagcactattttatgcttaaacttgaggatttttacgttcatgaatacaacgttttagagttattaacgtctctcatgttagctcattatttacgatcaaaactaaggttttacactcaacactaaatatttttatgctcgaacttgtcgtgcatccgtcggtgtacctcatgccgtatttttcgcatgcacactagaaagagaatcccttgatttatggtgtacatgactgccataaaaatcaaattctctaatcaattcacctaattaaatccttctaatcaaaccccttgatttatggttacagtatggacgggggcctttttggtttggagtgaatcaacatttacgctttcatctaacactatttatgctcaaacttgaggatttttatcatcatgaatacaatgtatcaggtttatcaacatccctcacgttagatcagtatttaagctcataactgagggtttttacgctcaaaactgaagatttttatgctcggatctagagatgcgtacaacaatgaaccgcatgccagattttttacctagtgtaccacattacataaatatc

SEQ ID NO: 61850 - DNA, 273 bp, Zea Mays
caggggggcagccaagaaggagagccctttggctccagcaatttcccagcttctttcctcatctacatgctccataatcagaggaaggctgggagaccctccatcaaaaggatgctctcgcaagggacaagtttttggttgggtaactccatggatagtctctgggcctttcccacacgtaagtgggtctctgagatggcatctcatagactggtccttgtcgtcttcattatcgagcttctggccaaaccatcgcgagcttcgttctctcat

SEQ ID NO: 61851 - DNA, 298 bp, Zea Mays
gcccacccggtcagtttcttccttgccgcgcatgtagcatccagtgactgacttgtgggccagcactgtcagtcatccacagctgcttcttcctcctggatttggtgtgcaatagaaatcgcgtcgcgtggattgacgggagggcctgcgccgcggatcacaggatgaatccgggtcgtcgcaaccttgtgttcctttccccctgttgtcatacgctcggaccggtgggcgacttccgcgtggcggccgccaatgtcgcgggatccgcccgaaaatctcgctaacgattgcccttaat

SEQ ID NO: 61852 - DNA, 510 bp, Zea Mays
tgattagtcataaattgaaggtcaataatgtggtaccttgtagaagttatatccggtgtggcagaataggacgcagcagtgccgcacgaggctggcagcgtggctgtgctgtggagggatggtggtagtagcaccgacacgagcttgtgtcgtgggcacgcaagtcgatgttgcttctataatgagggcagatctgagcaagacggcgacctctgggtggagctgtgagggaggcttcaccactgcaggctgccgcccaaattggcaccaccgcaatcacctgcgagtgcgagggcacagacgaggtagcacagtcaccctcaatggcgcccaaattggtaccaccggcgatggcatgagagagggaggttgctgcctcttgattcaattgtggcggcgtgaagaaatttgttgcgtgaggtacagggcgctggatggaaacgtgaagttgaggccacacaaaagtcaattatacgttcatattatgtattgtgtcaaagtatcaaacac

SEQ ID NO: 61853 - DNA, 579 bp, Zea Mays
catccatccatttacaccaattctattatccatggtaccacgagtctatgtttatatcctagctatcatcaccttccgcattcccctggagagatccatccctgttggtagcagcaccatcatttaggtgctcgatcatctcgatatgggtaccatcttcgtcatcgttgtcacgcggtagatcgagatgccctcatgtgctcgtctttgggtttgatgcatccgctcccccattggttcttcttcgtccaacacaaccatgtcgtcaaccatattatccccatttactttgtctacttcaacaatcagatgttgtgttgccaccttctactcgtcattctatgcaccgtaaccgccaccgagatcttctttgctaatcctcaaatgctgatatatggttggggtcctcgaccttccacgtacagtattgacagcatcgacacatgctcgtgttattgggtcttgcaaacccatcccatgcctccgttaagatggcttgattgcatcaacttcagtatcaacactcatgttcctgctccatctgcctcgatcgtatggtcacctttgatcaacaatggc

SEQ ID NO: 61854 - DNA, 606 bp, Zea Mays
ccaggtgttgcttctatccgaagcgagaggcttcgggttagggctagcaacactatatcttctgggtggcgtatctcctcttggtcatcgtgctggctcctgacatcctatcctcctgtcccgtctattcagaacgcatgtgtagtccttggtgtaggttgcggtgtagcctaatacactatcatgcgtagggttgcatggacggtatggtcccgtctcctcctacctgtctcctcatgcctcggtaacgcatgaggaatagtaaagttcacaatgaagggtgcccaagcgacacattgagtcaatgggcttacctcgataatgcgtgagccacagtgtatcccacacattgcagactgggagcaccgcacatttaatgtgagggatacaccacctgcccctagtgtgggttggtgtgcatcccccttgtagctaatgccgatggccccgatgtcagaggtatacgtcaggcgccgcccagatgcactagccacgtgtcagcaccagacctctgcctgggcagggggccggcgtgggaacatgtgatgatgtggcaccttgggccacttctgaccagggatctagaacatgttcgagggggttcgg

SEQ ID NO: 61855 - DNA, 344 bp, Zea Mays
cgccgccaccggaacgccagcccttgaaacgtctgtcccaagaggaacaagctgagcggagacgcctcggcctttgcttcaattgcaatgagccctacaaccggggacacaaccgggtctgccgccgcatcttcttcatggacggcattgaaattgagggcgccgacgacgaccaaacatctcctaatcagggggaggacgcccttgtgttctctcttcaagccattgccggggtacccatttacaagttgctgcaggtgcaggcatcgttgggcgctgccactatcgtcgcgctccttgatacgggctccatgcacaacttcatcgccgaagccgcaactcgc

SEQ ID NO: 61856 - DNA, 391 bp, Zea Mays
cgctgacgcaccccataagcagggcttttacccataccgaatccttgttacaacaactacggtatgggcaacccctcccctgggggctcgggcgtacgaccaacccctcagcctcggcctcggctctcagcaggaaatcagcgagcacaagtcaacaacgcagtgcaccgtcatgtcactcacaggacgccaagatatatcccctgggaatacgacggcccccggctcaacagcatacatctcctaggtgtataaatagggcagtggtagttcctccaagacgcagacgaacactcagtagtttccctccaagtctttcggtattggcacttacctcaatcagttttagggacttgggaacttcccctctcccgttgtgcttgtaattccc

SEQ ID NO: 61857 - DNA, 480 bp, Zea Mays
caactcggggacaatggagtccaaatcatcaaggatatgcttacctagaaagtagaaaaatataagtgttttcgtcaggacgactagggtacattatggttcgaggaccggcttgttgttcccaaggatcaaaacctaaggaagaagattttggttgaggctcatctctccaaattctccatgcaccctggaagcaacaagatgtatcatgaccttcgatccctatattggtggactaggatgaaaagggaaattgctaagtatgtgtctgaatgtgacacttgccaaaggatcaaggcaagtcacttcaagacaccaggcaccttgaggccactccctataccatcctgaaaatgggaagatatcatcatggattttattgttggattgcccaatacctcccgacactatgattttataagggtgattgtggacaggctaagcaagacagctcattttctgccagtgcatacaacctac

SEQ ID NO: 61858 - DNA, 676 bp, Zea Mays
tggagactatgtgttgccgtcatgacctcaacgtttaccaaccacggctgacgttgcgatccagcgaccagcggcctcggttccacttccacccagtatttgctcgctgtcctcggtcctccagttttccatcaatttctagtggaaataactaggcatgctcaacgggaaaaaagaaaagaaaatggaaggaactgggcgtacagttagtcatataattatgtactgtttcatgactccatggggtaggtaacggattgcaaaagatactttaaataaccagcagcaaagatgtcaatacgcaggacttccaaggccgccggctatggactgcgatgacacggcgaccattaggtatttatattattcgtatctaactctaagaaaatatgtatttatattatctgtattcggcggatatacccgacctacctgttttcacctggcgaccacctctagttttcgcatggttccgaaaagaccaacgcgttaaagatttcaaaattttttttttttttgcaatgcaattgataaaaaataaaataaaaacatgctaaggtctcgagaataaccgcgcacacctgacacaatcatttacaaatcataagccatgcgtcatttcacccaaagcttccttcctaatcttgcgcctactgagtgaagtggagggcgacag

SEQ ID NO: 61859 - DNA, 731 bp, Zea Mays
atttagatgagtgaggttcagagagtaaaaatcaagaagaccgcgaaagaagggagaaactggcagggcagtccccggatgagaataagcatgaagataaccgcctcatgagtatcctcagttgggacagtaactccgcgctagatccgccaagaacataattccttcggcggtagaacaccaatctcaacaagatgcagaaggtcagccttagaaacaacagaaacatggttaccagcgaaagggagttagctgttgggatcgattgcagggatgtataggatagtggcactctgttttcttttcctcgccatcgtgatttttcaaacgacgcgaacggaatcaggaactcaaaaagctagagagcggtggaggaaaaaacaagaactagggttcagagctcaagaagacgtcaacagaagtgtgggttggcatgttaagtcgggcgcaaagtggcaggacgatagctcgggagaagtcttggtcgcagcaaagcaagcatcactcgggcattacctctaaaatgctagtgaaccgtcagatacaagagcacaatacgtagcaacagattggcacaaaagcagggttttcattcacaggggggagatcattacaaaattgagaccgactcatcattagtcggcctcccacccctcgatcattgcattacattacattactacttagactacactacactactagctaaactacattattctactactaac

SEQ ID NO: 61860 - DNA, 823 bp, Zea Mays
gaagattccgtatgtggtgttgctttaggagtgacgtttgtgttggtcggcatgttcttgccaccgtcaccatttttaccctgaaaaaatgtaatggttatatgctatttaaagaaaacgatgaatacaacccttcaatgaaaaatacaagtaataagaaaaacattaccactggggttgtaggtgttttgatctgtttcgttacatttgtttgaaccagtggatgaatatcagcttcatcggggcaactttctaatagtacacgaatatgttgttgccttaacagtaattcatgtacctgagtgtctgtcaactgcgtatcctgctgggatgctagagtagacatatcgggtatagtttggggggccggacaggtacatccttctttacgtatcatgtaaacaaaaaacattgtttaaaataatggcatcaaaacgatatcgacaaatgattacataacttttttatattgacgtaaagaccataaaactgactaacctgccgcctggggaagaatatcatctgattttgtagttgttttctgcacatcataaccatcttcattgtcccccgactcagcacggaggacctcatcaattaactcaccaaaaatatcagatatattgtattgtttctcaacaatctgctgaagagtctgtttaataactgaacacgccttaccaacctccgtatcataatgtgacaacttctctatgaaacccaggcggtggcgggagttcaatgtgaattgtgtgctgtccagatgggtcaggacgaggtacatcaaaagtgtttgtcctagtattatgctgttgtaaattga

SEQ ID NO: 61861 - DNA, 911 bp, Zea Mays
tttggccatgattactatagcaagattatagctggagtatcgagtaaaaactttgttataggtggattagtgggttgccacataaaaattggtgatctaggctctgcatatagctctgtcaggcacctgatcagaaccccgatagtacagtggactgcacaagatcactgatgcagtgtatcttgccaccggcgaacccgcacgtagattcacgccggtgaggtgattcgtgctcaccggcgctcagataacgctccaaggtgaaaagatcttctcccccccgaatgagcttaaggcactgttgtccgcccatcgtgtccgctcaatcccgatcaccttgaatcaaccctcgctggagttagacatctcacggtctgatgccatgtgcctcagcactttaaccacgccgctgtgactcgtgctgacctatccagcgatcgccggtgaggttgccacggttacatccactaatcccgtgcgccagtgacctcctttttctctgaccgccgcgcgtctcaatccaaattcaccggccaccgctcttgcctactataaattgagctcgccgtgagctccgtagggtaatcacccatccacagcacccatgcttgcctccaatcattcaccagagatcgtgaattgctcattgcccccaatctcggtttccaccaccgtaaaaacacctcgccatggccagcttgctctaggttagttcaagctctctggtgggttgttctagtctccttaagacctcctaatgctgttcaacccctctgattgaactaaaccgccctggatcaccgagaacgcccatgttcatcctttgtccgcgcccgtctccgtggataggatgatttagagtctcattagtgaaattgagtgaggggaaacagttaggagggatacaattt

SEQ ID NO: 61862 - DNA, 821 bp, Zea Mays
gtgacagcgggcacaacagacatcatgaagtgttcctggtgatctaaggggtcctagcctaattagcggggtcggggagcatcagggacacacaaggacactgaaacaaaagagcagagggcatgaacggacctagagtaggatgaccacgacgaggttgtaatttgcgggacttcggaccgaattgggggaaactacaattggggcttgctggtgagtaattgggggcacgacttggtggatcagtgcttgattatcctacggacccgtcggtgtgctcaatttatagtgtgcttgagcggtggtgcttaatttggacgaattgcgctggcggccgagaggggaatgagtcacggtggcgatctaccgtgccaattgcagagcaactgaactacgacggtcactagatggtcactacggctcataccgacgcgttaaacttcctaaggcatgtcaccctcacagtgaatggcgaacacgccggtgttagccgctcggccacgtcgccagtgcgaatgaccgagggacaacgcggccatagtgtcccggacctatctgtggcgtgatcttttcaccggcgagctcaatccacagaccaaaagcacgaatcgtggcgagcagcaccaatcacggcgaagggtcaccggcggcgagatactctgagctggcgatctgatcagtatactgtaccatcgcgcaaccaattcagttagtctgacagagcatacttggggtcaatttgcttcagattttatgtagtgactggatcaactctctgtttcaaagatatatcctaataaaccagctctaactttgttaca

SEQ ID NO: 61863 - DNA, 443 bp, Zea Mays
cgatgaatctaagtcgtccgcagtcgatcggacggccaggaggctttcttcaacctccagacacggacgacggtggaggaacgccccctatggcggcgcaagtcgctagtgaagagtgccccaggggtcggatgcccaatcctatgagagtacaggtgcaaaacatggtacagacgctggcgaactaaatgggatttagttaccatcgaatcagtagtgtaatcctcccgccatggcaccatgcggcctcgagatggtagatccgccacaacgagcaatcgccgcagcaccgagccatcaccgcgcttgacgaggtgccacgaaggtctaccgtgttcctgcgaagcgccacgtccctctatcctctctacttgttctctctgctacccttctcggctacgcagtctaccaggtagatggaggtggtctaggaggcttttgtc

SEQ ID NO: 61864 - DNA, 384 bp, Zea Mays
gttcctctctaacccttcacttgctatttttgcttttgtgacaccccaggtattcatttcgtgttatgccgtgagattggtcctaaagctcagatcgtcagtggaaattttgatttcttgatcgcgtctatcctcgtttattaagattgtttatggaagtttcaccggattcaaaattatgtgatctcgagaaaagccaaatctggagcctgttaaaacttttattaagtgctcggtcgtctgtcatctggacgcatgttttcttcgtttgtcacaccagttctagttcctcacagatgaatcatcgaccaaatccacgttatttttggtttccttagcttagaaggaatcccgtcctactactctatgcaaaccagcccaaac

SEQ ID NO: 61865 - DNA, 285 bp, Zea Mays
cttagggcaattgttggcataatgaccaatttctctgcacttaaaacatccactgggttggactagagtagttgtattgttattcttagccggtgtgttcacggtgctcccttgacgattctactgataaccactagacctttgaccggtctcagagttgttcctctgttggttctggtattggttgcttatttgtccttgttgtctagagctctgtatttgataattgttatttccactctgatttctagagaaaaactgagaaccttgagagttgcgttgtcc

SEQ ID NO: 61866 - DNA, 549 bp, Zea Mays
gctatctctactacttattaaggctctaagagtagtctgccattcccatgttctgccatttccgtgttctgccattttcgtcatgaaacccattcccatctgcacactcaacacacgccctgcacatgtgggcccacgtgacagcctctgtctcttttttcccgtcgcggctaggctaaacccattcccatcgtgcaaacccatcccacgtgacagttattccattcccatgttctgcacaccgcatgccctaccatatgggcacacgtgacagttattttttcgttgcagctccgtgtcctctcgcgcaaaaaatgttagaagtagagaccgtcaagtgcacttaagcagaattactttctctgaagcagcacagcttataagccggtaccacaattgttggctggccagtatggtactaaaatttgcaagtcatggtcacgtgttatttggtgcagcttggtcggcgtgggctatgttatttggtgcggcccgtgtcgaatgcccagcacgcctctggccctggcccagcctagagttcgagtcttt

SEQ ID NO: 61867 - DNA, 607 bp, Zea Mays
ggttcttggagaaataagaatgcagggttggaccacatagaacaggaaatcttggagatttataagcattggttgtggatcaagtgaaggcaaaggtataacataggttttgtttttgccggtcttcagaagtttagagaagatacttgaccggattagtaggttagatagtcgtactattaagaggggccaatgactttgatttgtgtaaagcttagtgcctcatagagcatctagtggttgcatttgcatgaggactaacaacgcttcaaattcatgagttaaaaatcctttcaaaagcttgtttgaaaagtgcaaagtcttgggatgcgcggaccgtccggaccttgagggcggaccgtccgcgatcctccagtggggtctgaagtctatcaacttcggacaggtcctgttcatttgcactgcagaccgtccgggccttggggccggaccgtccgcagtcctgaccagaggaggctgctctcggcacagtccctgaattatagtgcggaccgtccgaccttgatggacggaccgtccgtaggtgccaaatttggtttgggcagggactgtgtggtttttgggatttgtactatggactgtccgg

SEQ ID NO: 61868 - DNA, 637 bp, Zea Mays
ccagcatgttcagaaaacacatagtcgacatatgtttagtggagcatctatgattctaaatttgaaggtcataaatacaaccaactctccatgaataagttctcttctttgagatagaaatgtgtgttatagtcattgtgttcagtagcatatggctagacacaataacaccttggtcatggtgtagtaatctattaaggacaagaaattttaagttgacaaattagaagttatatgttaagtgtaaacaagtaagtatgagatcaagggggagaattctacgttgatcttatctgatttagtccagagatcaagtcaaacgccaccatagtgccctaatcaagggcgcaacaacctattgatcgtggccccttccgcaccgtgtataaaaatagggaaaagtggtggcacactaaccaatattcaccgtaccctcttgcacctagcacacatgagatccaatatatctctacatggttagtgaagggaacactaccaccatcatcctcatcatcactaacactagagtctatctctgaccactctaataacatcctctcataaccctaaaggtataatttctttgttctaccatatataatggctacagttatgagctaaggtcattagaatctaa

SEQ ID NO: 61869 - DNA, 296 bp, Zea Mays
tgcccgggctactaggggcaacgaaagacgtcatgatgtcatacctgcccattgtcttggggcagcatgcactacaatggcttcgacatctacatcgacattgcatcgacgattgtggagatttcagccgccggtttgtcacaaatttccagtccgtctccaacaaactggcgcagccgtgggatctcaaatccatcaagcgccaaaatgatgaaactctctgctcatatccccaaggttgctgaggcagctgtgatcgaagacttctatcgtggatccaacgatctggttttcgg

SEQ ID NO: 61870 - DNA, 415 bp, Zea Mays
gtctccttggtgctcgctgtgtaggagctacaaaatagaattcacatttattgaataatgaaattgttttgtttcatgcaaatcagcaaaagagatgccatatttgactgaaaaaactataacttgccttcagtttcttcatctctagctacattgccttcagcatcacctgtactgtcatgagcagtgaatgccatgtcttcctctgcagctctgctgaaatgatcagcaagtccaggtgtagtagggctgtttggtatgtcatcattagcatctgttggttcctatacattgtggccatctgtctctatagagtgaagcctttttgaaggttgctcctctagttgtggacctgccctcactctcttgctgaacctaattcctagagccatgttggggtttgtcttcttctttg

SEQ ID NO: 61871 - DNA, 797 bp, Zea Mays
aattacattgtacaaatcaaaacaggacagcatactactgcttgacccttgatccaatgaaaagtgctacattaaccctccagctgatgtaaaccactattagtggagtcacgtaactacaaatgttagtctgttgttgctgttgatcctaaaataacgagggagtttgagtcatttttttcctactgctgggctacaagactgggatgaaaatacagcccttggggactgttggcgttcagtgaggagccgcagctggccgcttgggcgaaggggcagagagggatcgttggggcatggtggggtcgagtcgaagcatgagcgtgagagagggagagggatgggaccttgatgtgccgcatcatcgacgaccctctccacggtgatcctcaatagtggttgctccccgtcgccaccgcctctgccaggctgcaccatgggcacgacgcatgagaatcagttggagcaccacacctacaatcaccggacgcggagcgggttaaaacgacatagtttcacaagcaattcctgatagattcccacatcttaggcagaaactaagagattcctaaagatatagacgtctgaattacgtattaaactccaacttattggcctatcacgaatgtagctagaccgactccctaacagtaatgggtatccaaagtctctccctcaaccttgttgagtacactcggattaggatggaagccacctgattagagcagcagaacaagagcaaaaagcagacggacaaaggagaaaaacaaagaaaacaagagagacgtcattttctg

SEQ ID NO: 61872 - DNA, 564 bp, Zea Mays
atagtttgagctcaggcctcaccatttagtacctggcacaactatttattttccttcttaggacccttaggttttgtcactgttggtgcttgatgccaaagaggaagaggggagtatgtgttagggggagaggtccaagagagggtagtatgtagataggaagaatgctattgatagggcgaatgagagatacacatgagtttgatttgtcatgtgctttatgtgtgatactctcatatgcactctctttcacatgctcatgcattgtattatacaccttataatgttgcacatgcatgatatgtgtgtgtgatgatgtgacataacttgtttctactccatcttaaaatatgtcacatatgcttgtttatgtttcttcatttcagatatatttcaaacaagcttactccttcatgtacatgagtttagctttattattacatgttacatgcttatggactttaactatgtgaacttacaactaacattgttgggacgaaggccaaaccagaccccggtcatccccttaggtaagcacacccgaacccaaactaatcgtctgtg

SEQ ID NO: 61873 - DNA, 656 bp, Zea Mays
cttgagtattttctctataattctgatctctaaagtgggaaatgaagccagtattttctctataattctgatctctaaagtgggaaatgaagccaatactaagttctggaaagatagatggctgcatggagaaagacatgcatatcttgtttctagactttttgatgcaatcccaaagtggttggtcaatacaaggattgttcgggatgccatcttgagtaagaaatgggtctatggtattaagggagttctctcagttagtgtactcatatattatctttatctttaggatatgctttcagattttgagctgcagcttggtatagatggtaaacaccttttcagcttagcttcagatgacaaatattcggtcaaatctacttacaaaggcctttttcttggctcaagctcctttgcatattataagatggtgtggaaatcatgggccctgcccaaatgctggtttttcatttgacttgttactcaaaaaaagatgctggacaacagatagacttgtaaaaaggggcttggattaccctgagaaatatcttctatgtgaccaagaggctgaaactatggaccacctctttgtgacatgtgtctttgcaaaagaattctagtatcttttgctaagacagtttgggttgcactctctc

SEQ ID NO: 61874 - DNA, 1014 bp, Zea Mays
cgtttgaaggtttttatggcttcgagcccatgcaccaacagtatcgaatgaaattttcattgaaggcatgatcaaggggcttcggctgggattagcaacagtattttctaggaaacctccttagactctagagaagctcctccaaaaaatgaatgaatacatcagggctgacaatgatttttgacaaaggagagaagaagcctttagatgctccgagatgacaaggggtttcgactgaagattcaatctaaggcatgtcagaacaattcacaacccaaaccaaagtgaagacaaaaacaaccatacccaagggcaacagaatcactcccaatcaacagggactcagcagagttccttcagaccaccagctccaagaggtgaaagggaggaagaagctttggagggagatacaacactcaaccgagaagattgttctgcttattttgtggagaagataaggggcacacaacaagaacctaccaagtcacaattcaaaagcagaaggaaattgccgaagctgaggcaagacataatcaaccgaagcaggtcctccatactgttgcgtattattctccatacatcccagagtatgtccacaaataacagccaatccagcagctttcagctttagttgcttcggcaagccactgtccggccagatgggtcctgcctcaaccacccacatcagcaccaacttcgtcatacaaccagcaacatccaagtcaaatccaggatcagccacaacgcgatgcaagggagcagtccgaaggtcgatcagtcaacagtactgttccggaatccaaacatatctactgaagcacatgaggggctagagcaagtatctgaagctacctaaaaactctattgtaatttcagtttcctttcctttacatttgcccaaagatactttaagaaggtatatccttccacatcttgtaataaatttgaggttacaccatcgagtgtaacaaaaagtaccaaagaagctccaaagttgttcctacgaggatgtag

SEQ ID NO: 61875 - DNA, 503 bp, Zea Mays
gatagattaatctaacctaacaaaggctaaccttaagttgagttaatcgaatgtggcttacttaaataggttagttaatgctggagaaatggattagaccctacccctataaacatgtgttaacctaaaccagtaacctagatcaactcagccatacacaaacaacttgacctacataatgggttacataacctatccaaccaatatagaagcaaacaaccaaaccagattctgactaatctcatttaactcataaccgcctactaccctactttgggtacctacgaatctgccttagctacatgtccttaatttagagaacaaacctcaagaacgaagatcgaagatgattgccatcgtccaatcaaggaaggataagattcaagccagatcttcaaaggaatcaggatccacaatcttggatggagtctttccttaccatactctttcttacataaacctctctatgctttaaagacatcttttaccatacacaataaaat

SEQ ID NO: 61876 - DNA, 374 bp, Zea Mays
gggggagaaggtggtttgccgcttgggtgatcacctgtcgatagccttctgcatcggggatgcacggtaggccattggcaatctgagccagtacccctccgaccttgcttggtgtatttagtgctcaagcaaagtcagggaataagttctgagtgagaagtggattctcacgttggatcatggtgtcctgctcggcttgtttctgctcgcgctcttgggcgtggcgacgatcacggcggcgggagttgtggcgctctcgaagcactcttccattgggggttcccctgcttcagaagcctcatcccgggagacgggttgacctagatcatgttccccggcttcatggtaacggcgcacattgtggcgcctattct

SEQ ID NO: 61877 - DNA, 1422 bp, Zea Mays
ggaggaggggggattcatttaatatctcaagggtaggaccttacagtgggacttgtattctactggagagagaaagagagagggagcgagagagatcttctccccgagttggcatggtggtctttcgtatggtcgtgcgtagccgtactcctggtatggtgtcgtcctttcccgctgctcaggctcttgtagcgagtccatcgttgatatcttcgtaatgggttccacagatcagtctcaaagtgtggtcatgcggggcatggcttctcctgtcgtatgggcccttcgtcacatgtcagcgtgcacaggcacacgctcggtatggggtgttgtttcgtccttctgatgtacaggtcattgtagagaccctagtgcccattcaatgtgttgtgcgcatatccagatgtggcttgatggtgacgcgtcccatcgtagctaacatggattagtagtgcttgacttagatctcttcctcgcctagttgctcgatagagaatcggtccgccaaagttgattggtggatagttggtcgtcagagttggtcatgagagggttggtcatcatcgaagagttgctcatcactggagagttggtcatcatcgaagatttggtcatcatcgaagatttggtcatcaccgaagagttggtcatcatccgagagttggtcatcatcagagagatggtcatccggtccgtctcacaaagttgatcggcggagttggtcatcggggagttggtcatcattcgagagttggtcatcatccgagagttgttcatcatcggagagttggtcatcatatgagagttgttcattatcggagagttggtcatcgagttcgtctcgtagagttggtcggtggagctggttctcgagtactcgaaaagcaggctagcgttcgaggcccccatcatgtaattatacatatttcttgaggagtacttcttgcctccctaggcatacttccattggtcatgttcttcaagaagatattggttgttcaatgcatcaaataggagttggaactgttgatatgcttccaccgacacatgtgtcacaaacatgtccatggggctggagagtgtcttagcttgtaatagggtgatgtctttatttcatgtgtaagagtataattctaggaagagttgactttggataccagtgccccatgcgtcttgccacatcttgaccgagcaactgttcccatcttgtggagtagtgacatctctctacgtctataacaattttagcatattcttccaccaaaagacgctttttcctggaaaccaaggggagcgtacccaatcgatagtggttgtctcaaactaggttcacctagcggagattgtgcctgttgaagaacttcttcatgtttttcatcaggagctctccattttgtactgtgaggttgaggtcccttaacc

SEQ ID NO: 61878 - DNA, 483 bp, Zea Mays
caatttctcctgccctcggcccattagtccccaaacgccgcacaccgccagcccaactcgatgagtggtgccgacaggtgggcctgtccggccagtcttttctctcgggttgcctttgtgggtgctgaacactcgagccccgccagtcgggatcttccccaacctcaccgtaggcagctccacgttgttcgcacgtccggttcctggctccacctccgcgtcgttggccgcattttgtggcactagcgggtggatccctctggacagaagatcctttttcctgtccctcgtaacagaacacgcgaaatccccgtaacaaacccccacagaaccgcggcttcggttgtgatccgagcgcctgggatattcgtccggggctgaacctcctcctccccttggtagtataaaatcgatgctcacctcctcctggtcgtccaaactcgtggaccaacccttatccgtgagacaatcaccacgaatctc

SEQ ID NO: 61879 - DNA, 608 bp, Zea Mays
gtggcataaacctactaaccctaaaaatcaaacatctagatttggttgtgattatatgagccatgctagcataattcatctctgatctttcactgatttgtcgtctgctcatcactgtcgctgtcgaggttggagggttggacattgtgatccctagagcccaccatgaaaacaaatcaatctccctaataacaaaaggctaagtctaagttagggctagaatccgagtcagatcaagactcaacatcggatctaagtcaagagtgaacctaggtcaaagtgtaaactgaatctgcataaacttcgttgaaggacatcattgttatgagggtttctaggatgagctcgggattccccaactcgtccatgacaaacttatgggtgctaaataaaacttattctccttatgtaaagctcatgttagccattagatctactatgatcaacatgatagctcctacctgacatgccaactgtcgaggattattcaacagtgaattttatggggtagatcgcaagatggagaactaaagttaaatgcataggatacatgaatatttagataggttcaagctctcattgagagataataccttacgtcatatatg

SEQ ID NO: 61880 - DNA, 489 bp, Zea Mays
gttgctctggtgtttagaaacaaaacaaaacaaaaaagaaaaagaacggtagatgcttgagactattgcatggttaaccttttttttagtatttggatgtgcagaaagaatcctctcattttggcgtgtaataaaggcgtattccttgggacaacctagcagctttcgaggaattctttgggaaatttcctttctttgcctaccccgtgtacccgcgcgcatttctggtaaccgtggccttgtctttgcctactgctctgttcatatgtactacaggacagatagagcgtttgtcgtctggtgccatcgaccggcatcgtgaacgggacgcaagaacagaaagaggagtagagagtccgtgccatgccggagagcggagaacgtgccagattttcgcggtcggcgttttttcgtcagagtccgcgcgcagtgctgccggagaaaacgcgtcgacgcgtgtgtcggtgccctagcttatggttccacttg

SEQ ID NO: 61881 - DNA, 534 bp, Zea Mays
ctcgggctacaagttgtgagggttgggtggatggtcttgaggaggccgtgaatggcaccatgccaactcacgaccacgttcctaagccgctcgggaattcctttgtagacagaactcccacccctcgggagtttcatcatcctcggatgccaggtcccgggaaatacgctgagttggatccaattccccaccgatgtggtgttgtcggatattgcgtcgacagtttcggtggcgacgggcttcacgttgcggggactcctccctagcaaggtcggctcgtcgtcggacacgaggtcaatttctattcttccattgatgaaaaggaggttggggtagcagcatgtggcctccagcatcgcaggtgcaaccgcagccttcgaggtccgactgatcctagcggtggctcgccgtgtgctatcggacttagagatgttgagggccccagttgcgcctttcctcagacttatttgggtccatgcctgggtcagcaatgtagacaacagggtccttcaaaccagggacgccatgttgttc

SEQ ID NO: 61882 - DNA, 672 bp, Zea Mays
acgagcatcacgagcacatgagaacacttaaacgagggagaagagggtatgagctgacctgaatctagctggccgcggtgagggtgttcttgcggtggcgaaaaccgaattgggggaagtatcaaattggaggtctctagtgattgactgggggcaatactgggcggctaggtgtgtgatgaccttgcggagctcacggcgggctcaatttataggcctagtgagtggtggccgagaattcaagcgatgacgcacggcggtcggaggagagggagtttacaggtgcgcgtgaattcgtgtcctacgtcgtggcagtcactccgacaatcaacggggagctaaagtaagtcacggcgatgcggtagagatgcttagacacgcggcgcaaagctggaaggcggtggtcaccgccgtgcttatcggattacgccgcggtgagcttggtacagcagtcagatttgtttaccggccggacttatccacggcgaggacccttacccaatcccaagcgctatccacatgttctgagcacgaatccagacgccggtgacatgaatcgcggcggaggtcgtcggcggtgagatgcgctggcgttctgatccaatcctggtagtgtaccattgcacagcttcatcagtcggtctgacagagcaggtttggcgttgatttact

SEQ ID NO: 61883 - DNA, 478 bp, Zea Mays
ttgcccttctagggacccacatgtatgtgggttattttatttttccatcctctccaccttcattgagcatatcctttgcatcctagttcattgtcggccacccctcatcagcctcgccttccttaccctgctaaatgcacctctccctagagccctccatggaaacccttgacatcgatcacccgacacaactcaagtagagagcacaatccccctccccaattttggccaacaacagagatcacaacattggttcaagtggtgcataatctcattggatgagggcagcttaccggtgtttgattcggtagctcaggatgtcttggccaccattgcttttggttgtggtcacatggctaaagttggattgacgatggccatctctttcttatctatccctgttgcgggtccatctaactcgtccttggttcagcacaaacacagatcatcggagttaggtgggaggtggagccgtgga

SEQ ID NO: 61884 - DNA, 373 bp, Zea Mays
aaaaagagatgacggttgttacgaacctggagatgtgatctgcgtgtgtctagctaaatgtttggaatatgatttgtactaattcttctctctctctgtgtttaatcaagtgttcatttagttttagattggagttctgagggtctagggacttcaggatctatttgtttgtaaaccggatcaaagaaaatcatggatttcgtttctttgtggttccttaagtttttctttatcctaaatttagtaattaaatgcattgttataactggctggtgagtctggtaatgtcttctatttttcatcaattcatgttaaaaaccatcaagctgcaactgcaaaaattgcctcaaggcctaccatcactcttcttttg

SEQ ID NO: 61885 - DNA, 768 bp, Zea Mays
aggcagcattggaggcgacaccaaaaccatcaaagccaaagagatggagccgcagcacggctcgcttcccaccctaaaaattggggggctcataggatggagccgtaccacagcccgctgtccaccttcacgaggctggtgatcgtccttccctccgaattttggaggaagaagcggggaggagcgtcgcctccacggacatcccatggaggtaggcgacgatggtcgcctgaaggttgaagcaggacacctcgggtagaggctgggggccaagcccctccaacagctgcgcgaagagagatgggatcggtagagccaacccgctggggagtttggaaacaagcaacacgaactcttcggcggaaaggtcatcgagaagagagaccccagcacaaatccttccgccaagcaccggcgcattccatctaagagggcggtgtaccatttcgagcagtcactcagtttgggtgtgctcgacatgaagttacaaggtcatggtaaactatggcgacacaaagcggaaaccttgaaggcaaaggggcacagagagctcagaggcgaaaggacaccgcaagtgggaaagaagcaagacatggctgctactcgaagggtagacccctttttaaaggcagatttccctgctcgcgccccgaagcatcacgagcaaggtctcccccaatgcgcaccagggttcccatcctatgacatgggggccaggcctcacatgtcatacaagctggcccgaagcacgaagaaggcgaatcgtcg

SEQ ID NO: 61886 - DNA, 914 bp, Zea Mays
gcgacactacgttgtagttgcttggtgcactagcactagggtgcataaagaattcctttataaattgagtaatattcatcatacatcctaagaaaatttacaagttccttaagtagtgtaccacctttattgttgtgctagcttcgcctctgggtgatgtgtatggtggtgtgtacggggatcctcccatggccagcaagaggtagcgctctagcttccagcatcgatgctcctcctgcaggttacaaaggtcctggactaggtagtggtgcttctgccttgtcagctctagagctcctatgtgcatttagggcagaagtatagggttttgttgctatagtgggttgatattcggctagctaggagttgttaagctggaattaagctagaccgatggggcataacacatagggtgcttaggattttggaacaccacccttgaccccatagaatcgactcgagatcattgacccattagacctgggttcacgtactaaactcacgattcatgtcccatagatgtatacccccttgtaacatattgttttcaagtgtcgacccacaacctatgaccctgttgcttgacccaattgactcaggaacattatgactatggtcatgacaagatttagtgctagcatgtgaagaatgagcataaaaaaacattatggctagcatatgaaattctagcatgtaaagtacaagcatgaacatgcatatgagtagaaatattagaaacatgcttctttcccatttgttttacaaatttaggaaacccttgcccattaacattaattctagtgttttgcttcccatctctttggaagccaacaccatccttgattctaggtcatctcccatttaaataagcatttataggataacttaatttttcattttggggaagagagaag

SEQ ID NO: 61887 - DNA, 723 bp, Zea Mays
gtttatagattttatttttattgttgtgttctcatatatttctattattagggtttgatcctaagtaaagctttgagagcccaaaaagaagcgaagatgagagctgccaaatagctcttgggaatatttgggcggaggtcatttccctaaggaacgaagcccttgaaaaggataagatattgctttccttagtggataggctgaaggccagtgaagctaggctcgatgcacaaactaaagctcacaaggtcgaaattgaaaacttaaagaagcaactcacagaaacaagtgagaaatttgaagtcgcaatggtaaaacatgaaataagcgaaattgagaaatccaaggcgcaaaagaatgccgaagagctccagaattctaaagagaaatgctatgaaatattcttagggtgcactaagactctaaaggacagttttgcaaaagtgggagcgtactcttcagagccgaaattcatccgcggtgaccctgatggtgtcgtgcagtggatcagcgaagaagtcgaagcctttgaggaaattttaagcgatcgaggagacttctgcgtgtttgctggcgcccgaggggtcgctgcgatcttggagaaggctgattgtgagcatgttcaggttgcagctaggccgggacttgttttcttggtggaagatattaagaacccttcggctgaagcctctaccttgggtgataagttctactccgatgtgt

SEQ ID NO: 61888 - DNA, 496 bp, Zea Mays
ctcggaggaggacgcggtgaagattttggcaattccaattcggctagctaggacaggaagatgcgactgcctaccatttcaacacaaaatggagttttcattgtgagatctgcgtaccatgtgctagaactagaagatggaatggagagaggatactaaggctctcatgtgcgccaaaattaagactcttcatatggagagtgacacacgatatagtcttcctctatagatgaagatcaaaagctgcaagattgatttaggcacaagatgtcccttatgcaaccagttcgatgaagatgttggtccttgtttgttgaaatgtaaatatgttcaccattgttggagatatctacagatggaggaaatcacacataagtccgttgaagatgagagctcatccaagaccttttgtgcaggctaccatgactctgcatatgaaatttgtgtctcaaatctgttcttctttctttgaaagtggtgggatacttgaaatgga

SEQ ID NO: 61889 - DNA, 380 bp, Zea Mays
gtcgttagagaggaaagtgaaacccacctccccgcacctccacccctacccttagacctagcccaagttctagccaatcagacctgactcatcgaggtcctcactcgaaatctggaaaatcaacggccaaatggtggaagaccgcaagacagaatgggggacttcctgagactcaaacctcccacgttcgccggatcaagcaaccccctcgatgcagacgattggatgcgaacgatcaaaaggaagctggaagccattggttgcccagaaaatcagtgtgttcaactggctgcccatcaactctctgggatggccttagcctggtgggacaccttcaacgtcaccatcagagatgctacctgggcggaatttgaggcagc

SEQ ID NO: 61890 - DNA, 388 bp, Zea Mays
gaggaagtcagttaaaactccaattgtcttctctagaggaaactccggaaagggcttctagtgtggtagtcaaagagttagtcaatattctggtggtgcgagaatttccgggtgtgtttcctgaagagttgccaggtttgccaccagagcgtgatgtggaattctctattgaacttaagcctgacacaactcctatttctcggagatcatacagaatgcctccaaatgaactggcagaattgaagactcaattacaagatttgctagataagagttttatttgacccagttcctcaccgtggggctgtcctgcattttttgtgaaaaagaaggatcaaaccttaaggatgtgtgtcgactatagacccttaaatgaagtaattatcaa

SEQ ID NO: 61891 - DNA, 651 bp, Zea Mays
taaaaatgtaaaaagatacaaccaaaatggtttataggtacatcatatgtcaggcacccaagaacgaggtgcccaatggaagcccaaaaaactctttaaaatgacccgctagtctatcggatggctctctgccgagcaactctgcgaggcggaacgaacgaccagctctctgtcgagcaaccctaggaggcggagcgggcgaccaactctctaccgagcaaccccgcgaggaggagcgcacaactaactcactgtcgagcaacctgagatggagcgggcgaccaaccctccgacgagtaagcgtgcaagaggtgagggcctgagccactaagccacatcgcaacaagacgcatcaacatcaaaccatgtcttggacgtgggtacatagccgaaaggactccgtgatacatgacgacacgcccccgcgcatatccttaagtatgccctcgctgacttgtggggcccagtaaaccctagtcgtagggacctcagcacaggagtctatacaacgacccacatactaggaggggcgtgatggtacaccatacatccataccgggtgtatgccaacgcatgttggaaagtgacgtaatgacacgacgaaagatggagccgcaccaaccacgaccctgaaccccaccataagtctac

SEQ ID NO: 61892 - DNA, 600 bp, Zea Mays
cagcaagatcatccttcgacaagaccgaaaggccttcttcaagcttaggaaatcccatactcttagctatctcccggcacacggatatttctttgctatccgggagacagtacaggaaatcatcttcgttggtaccattgaacactaaggcccccttcggatattttagtctttgggcatagtgtttggcctcaaagttttcttcttcatataattttttccccgaagcatgtcacacaatgtaatcaatatcttcagctaaggcttcggggacaggagattttgctttttctgccatatcttgctctgtcattttgtcggtatttgaaatttgctgacccaccttatcttcaggctcggtggccttcgtctcagtaggcgctgaaggcccagctttggcttcgacttggattttggcagcttcggcagttttcttggtaggagcaggagttaaggccttcatggtctctataacagggtctagcacactggccatcctcgtcttgggagttgcagcaggagctttttgcatcttcggcaaatccgcctctgccgatgggctcatgatttctggcacttttatcactttttccacctgtg

SEQ ID NO: 61893 - DNA, 635 bp, Zea Mays
ataaagtcgcatttaattggtgtgcatcctagtctttgggagattgtcaatataggtatgtataagcccacccaaggagaagagatgactccggaaatgatgcaagaagttcaccgcaatgctcaagcggtgagcataataaaaggaagtctttgtccagaagaataccggaaagtccaaggaagagaagatgctcgtgacatttggaacattcttaaaatgtcacatgaaggagaccccgaagctaagagacatagaattgaagctttggagagtgagcttgctagatatgattggactaagggtgagtcacttcaatcactctttgatcggttaatggtgttggtaaacaaaataagagtgcttggaagtgaagattggagtgactccaaggtcactagactattcatgagagaatacaaagaaaaggacaagagtctagcaaggatgataagagaccatgacgactatgaggaaatgacgcctcaccaactatttgcaaagattcaacaacatgaatctgaagaagcctcaatcaagacaagagactctcatgccttgatctcaaatgaacaagacaaccccaagaagaacaaagaccacaaggcaacgaaagtggtcgagacatcaagtga

SEQ ID NO: 61894 - DNA, 497 bp, Zea Mays
aatgagtaggtgattatgaaggcatgggtatatatgtacaaccaccaaatgtgtaaaacaatgtctttaaagcatggatatgcttgggtaggacatagtagggtaaggaaggactccataatgcatagtggatcttgattcctttggaagtatggcttgattcttattattcctcaacgagtttgatctccttcttctcgagtcttgatgtcttcatccgggtttgggacaagaggttaagatagatctataggcaactgatggatagagggtttagtaggtagctatatgctagatggaattagttatgtaacctgttttgtaggtcaagttgttgggtgtggccgaattgatctaagtcaccaatttaggcttatgtgaattaggagtatgtccttatcttttgtaacaacattaagtaactcaatctagcttagaccattatagattagatagaatccagattaggttggtatgactagattaaactagttaag

SEQ ID NO: 61895 - DNA, 279 bp, Zea Mays
ttattttttcgccgctgaaggtgggttgcaatcccccaccttatccacatgtgggccactctgagtcactgacagtgtgccagggtggaaaatcttgtgccactcacccccgcaaagaggcaaatggtgagggtttgaaaatgagtgcatacatttacactttgaagaatgtagtgtgtgttttgctggtgccatgttatttgctggtcttccactatgttttgtcaattgctgaagtttgttcaacctccaggcttgcataactgcattatgggtcac

SEQ ID NO: 61896 - DNA, 328 bp, Zea Mays
cattagtgtacttaaccagttgttgttcactgatgtgctcaatgagaagcaccaaatatgaacttcacggtgaatggtcacgagtacaaaggatactatcttgctgatggcatctacctttggtgtccaatgtttgtgaagatcattcccctctcatatactctgaagcagtggatatttgttgcatgctagaagggtgtatggaatgacgtagagagagcatttagggtcctcaaggctcgcttctattttctcactaggtcatattcatgatgtttgcttagctgaaagctactgtagctgtggcatttccagaccaagctatatt

SEQ ID NO: 61897 - DNA, 358 bp, Zea Mays
cgccagctttcttctccaaaattcggagccaccgctctcggaggctataaattcagtgcaccgttagctccgctaggttgttacgaagctagagcactagccctcgcctccgattagccaccgtagcgccccaattccgttcttcccccaaatcggccaaaatcgccgccgttagcatcacgccgtggccagccatccacaggttgattcataattctctgctccatgttctagcttcctttgagtcttgtgttgcttgtaggcccgattgattgaactagaccatgctgaatcatcgaaaacacctcggttttctctcgggtgtcgccatcgtcgtgggcaaaagaacttgggccgg

SEQ ID NO: 61898 - DNA, 802 bp, Zea Mays
attaaatacttaatactggcgtacagttgtagaagagagacattatattacaatacggatataaagtgcttcgatgattatgggcattatataatatattatggctacataaaagactgagttgcaaacaatatgtttctggtagcatttcagtctacatatatcaggatgcatagacaaaaagacatgaggatcctgttttccagataaggcattagttatatacatctggcattgttttcaaggattaactttgaaatcagaacgtctttcctgcagtttaaggtaaataagttactttaaagttcaacaaaatgttgttgtaattgaagtaaggaattgcaatagattgtatggacgggaaagtagagtgaattagatcatacatttgtatttgtcggagtcatttttgtcagaattgaattttaaggacctgtacttagatctgatccgaaaaagaatagtaaaatggtgaatgtgtgggaagtaaggaggttgccatgttatgtatctgagtttagtacctttttgtggtgattcaaaagtttccaggtcctggtcttcaattctaagattgacttgttgcttgtatgtataattatgcgttagaacagaacatataaatgtaaataaattggtaaacaaaatgaactcgaaatagtaaatacattgaagttgacttacatttggagaaatgtttattgacagtttgcacattgttgtagaaggtgaaacggattggtttgtaaatatattgaagttgacatacatttggagaaaccttagagtgacctgataatag

SEQ ID NO: 61899 - DNA, 527 bp, Zea Mays
catcgaagatttgcagctggtcttcaacagcctgaggcgataccggtggaagctcaatccagagaagtgtgtcttcggagtaccggcaggaaagttactcggattcatcgtcagccatcggggaatcgaagcaaacctagagaaaatcgaagccatcatgagaatggaagcgccgcgatcacagaaaaaggtacagaggcttactggatgcatggcagccctgagtagattcataacaaggctaggcgagaaaggcgtgccattctacaagttgctcaaaaaggtggacaagtttcagtggaccatagaggcacaagaagctctagaggcgctgaaaaagttcctgaccacaccaccagtgctcaagccaccacgccgaaccacaccaaatcagccagcagaagatctgttactatacatttcctgcacgactcacgtggtaagcatagcgttagtagtcgagcgggtgggagaaggacatgcgcacctgatacaacatccagtctacttcatcagtgaagtcctcg

SEQ ID NO: 61900 - DNA, 862 bp, Zea Mays
ctacaaaagcttcatgacaaccaattatatgcaaagttctcgaattgtgatttttggctgaaggaagttgctttcctaggacatattgttagtgatggaggaattaaagtagatccaagaaagataagtgaaatacaaaattggaagcaaccaaaggatgcgtccaagattagaagttttcttggattggcaggatactacagaagatttattgaaggtttttccaagttagtgaaacctcttacctcactactggagaaaggtaaagagtttaagtgggatgaagcatgccagaattgttttgaagaactcaagaaaaggttaaccactacaccaatattggtaatgctagacattcataagggattttatgtgtattgcgatgcatcacatcttggacttggatgtgggctaatgcaagaaggaaaagtaatagcctatgcttcaatacaattgaggaagcatgagaagaattatcctacgcatgatttggaattagctgccgtagtgcatgctttgatgatttttagacactatatgattggaaacaagtgcaaaatcttcacggataacaaaagcttgaaatacatattcacttagaaagaactcaatcaaagacagagaagatggcttgagttgatcaaagactacgttttggaaatacaatatcacccaggaaaagcaaatgtagtggctgatgctttgagtcgtaaaggtcaagtgaacaacatcactactcatttgatgtcacatgaattgtgctaggagatggaacaactcaaccttggaatgctcaataatatagaagcaacggttatggaagttgaatctactttggaagaagagattcgtaaaggacaag

SEQ ID NO: 61901 - DNA, 543 bp, Zea Mays
gttagatggaaagagtagtttgctataaagacattggatccctgaccattatgctcgaggcagttgcctcatataatttatggatttggcattcctttttttaggatagcagcgtcgaacaaccacatcaacatgctaaatcaatcgacattgttcactaacgtgttcaagggagaaacaccaaatgtgaacttccgatgaatagatatgagtataaccaagggtactacctcgccaatggcatctactcctagtggtctgtatttatgaaggccatttctctctcatgtactctgaagcagcaaacgtttgttgtgtgccaggagggcgtgcagaaggatgtagagagcatttggtgtcttaaggctcacttctatattcttgctagtctaggttgtcactcttttcccaccaagcactcggtgagatcatgtgtgcatgtatcattctacataacatgatcattgaggatgagcacatatgatgtgaacgactacgacatagttaagtcctttgttgtagcaccaaccatcactctggaag

SEQ ID NO: 61902 - DNA, 543 bp, Zea Mays
aatgtggcgtcaaattaccttgaacatactctagcaaagttttaaatcaaacaaaaactgtttgacacgatttgactcgaccttggtctcggattccagctgagcgacaaacccaactttgccccctcgtatctcgcaaatccgagatccaatccactcaagtgatgtaagagaaacaaagagtaaatgaaatcgtgcgcaacctcgccgaacttcggccgcccgccaccgcacgtagaccgggctaccaggtgaaccatttttcaattccttgcgcctacgacttccctgacatccagttaagctccccaactcactggattgagctatcccgccgtgattagaccggaatcctcgcagccgacgagctcccttgcctgcgcgcgaagaccaaccaactccgaccatctccaacaccgacccgcacaccgatgtgaccgccgtgacctccccaacgtcgatgaccactttgccggagctatttcaccgccggtgagtctcgccgccgtaatctttgccacgggtactgctccgagaacctag

SEQ ID NO: 61903 - DNA, 296 bp, Zea Mays
gggtggccgatctgggcaggtgacccgattaggacacctgatcgccctggtcgttcgagtcgccgactagctatgattagtcgctcgatcaagagatcatgactgaccagggtccggcgcgcctcaaattttcatgggcttttttctggcgggcggcccagctgcaaggaggtgaaacgccccatagaaccttccctgacgcctgacagaatgtttccaaaacatctcgattcccgtcgtctcaatctcttcccttttgcttctcgttgttctcattccacctctccacggcaaac

SEQ ID NO: 61904 - DNA, 353 bp, Zea Mays
tatggatatggcataggttaagggggtggaggtgtccatgtaggtatgttaggtctcaattggacagtatgaccttccatttcttccgattgatggggtggtccaatcggtcttacctgatattgctcacgaatgggcgagcgaggtcgctttgctggccggtcactggggccggccttctttttcacatatttggacaataattgatcgaaagtcgggccgaatttgactagccgaccagctgctttaaatgtatttgttttccacgtacctatctctggccgtcgtggtttgaaggtgcgcggtcgttgtgggttttgagtatgatcggaccgtttgctggaattctccgg

SEQ ID NO: 61905 - DNA, 421 bp, Zea Mays
aagatttcttgcacccaatcctggatagagcatctgcagccacattgtccttgcctcttttgcaaacaattttgaaatgaagccccatcaatttagccatagccttcctctgcatatcagattgcaaaatctgagcatccaaaaagctcaaagcctaatgattaatcttaataaaaaattcagccctctgcaaatattgcctccacctatccactgtaatgattagagccaaaaactctttttcataaatggagagcatcttattcttagcacccaatgctttacttagatatgccactggtctatcacattgcatcaaaacagcacgtatcctatcatcacaagcattagtctccacaacaaatagctcatcaaacctgggtagggccaacacaggagtagtaagcatagccttcttcag

SEQ ID NO: 61906 - DNA, 348 bp, Zea Mays
aaataaccacctcattttcttcaggagcaggggtagtgctgtctcctccaaccctcacaatagacatgtcacgaaagtatcttcccctcatagcgtcaacatgactttgcttaatagtcgactttccgaagatggtatggcttggtcgccagggccggtcctcagaatcttcatctccactttccacatcaaagtcatcactgtcattagaatcttcagataaatccgccattatctcttttgtggttttctctgtatttgtttttgccatggattcgtaaaacccagcaataaaagggtccacaaccttcttctcctcatacatcttctcctcctcggatatcttct

SEQ ID NO: 61907 - DNA, 698 bp, Zea Mays
gacgctggttcttttgaagtgattgacgcctccaaaaaggcatcaacagtcctcttgggtttcagttgcccccaggaggcgatcctcatggcaacccgatgcattagggcactgcaacacctccaagcactaaagagtcaggccgtgacatatttggtggccctcgctcagacaactcactagatccttagtgagaggcaagttcacatcatcaatctttgtacatacatggtccgaccgaaagctacaaattgaggcgatgggagttcaggttcatgagcttcaggagcaggtaggtgtgcaggccatgactattgcagacttggaagatcacctccatgaccttaaccttgagctggaggaggctaatgatcacattgagatgcaccactaggaacatgtcgagatggaggctgaccttgaagatgctgatatggatgaggaggaggaagacccagaggagattgagggtgtttctgagttaaccaccgagagtggagcaccactgccaccagtcgactgagcacacccctcggtagggagtgttatgtcagttaataattaggatagattagttagcaacgaatgatgggtatgctcctcggagtagaaaaaatttggtttttggggtgtaactggctaacctagactagagcattccttgcatgttggtaccctatgttgtaaggcaaattttg

SEQ ID NO: 61908 - DNA, 382 bp, Zea Mays
ctcatgccctaatcccagggttaagtaccctaccctagggttgatcacacatcaagtcacctcatcacaacttcttttgaaatttttacctagtgaatgcattctaggtgtgacaaacaacatgaaatgtcaatgcacatgatgttttgctcaaattttagtgccaataacaccaggggtgttacatccttccccccataaaagaatctcgtcccgagatttaaggtcctagggtaagtaatggaaaaggaaacgcgtcacatctttatttccttacttgtcttacagatcaaggggtggtatggggtctattccacctttacaatcaaatgtacacatcttacagattatatgaggctaaaaacctaggaaaattcttttc

SEQ ID NO: 61909 - DNA, 617 bp, Zea Mays
attcagagctcggtaatcgatgcacatcctcctagtgccgtctttcttctcaacgaacaggaccggggcggcccaaggtgaggtactcggtctgatgtaacctttctctgacagctcatctatttgcttcttgagctcaaccaattctggtctagatactctataggctcttttataaataggggtggtgccacgaataagctctatggcaaactcaactttccggttaagtggcatacctggtagatctttagggaacacatcagaaaattctgacacaaccttgatagcctcgagtgggtcgacctctgtgctaccaatagccatctggtgacaacctcctttccttggctcgggtgagactagctcggtcaccacttcctctcctagtgggaacaccaacttcactgtcctcttatcacagctcataactgcttggtacttacctagccaatttatccctaggataacatctattctctgagtacccatcactatgaggttagcgggaaactctatcccccttatttctacacttacattcaagcatatactatcggctcggacttttccaccggctgaatcaatttgaattggtgttgacatggtggttattg

SEQ ID NO: 61910 - DNA, 730 bp, Zea Mays
ataagtatgaaatgtgactacctgataggtatgtacacattgccatccctgggtgtattgtattatttgatgattaaagggtgttttgtttgtgtgatttttgtaaaatttgaacaaaatagacttgaaatgaaacattgataaaataaaccaagtaccattccataattcacatatactagtacatgactatcacaatatatacatagaaaccatcatcactaactcatcataaaaagagtccatagtaggtgcagtctctgtagcgctggctaactctaccgcaccggcagcttggctgcccaaaacctccatgacatccatgtcgcgccctcgcctgaaccatgcacctcactagtcagccgccatgctgccatgcccacaccctcatagctgaggaagaccgacgcgcggtgtcggtgccgccaccccaaatcaggtggtcatgacctctaccgtcgaggaatccatcacaaactctatcgaatcgggtcaaacaagttggggattaggataggggtacaagggacgattttttgcaatgaaccatcattgagcacccttagagagtgctccatggcggtggctagagtttgggtggggaggaattatgttggctaggaagggggcgtgacaaaaaggaggcatgaggggaaggaataaagcgttttttcataaccagtggcatggtgggtgattaccccaaaatcgacgaggatgtacaaaagta

SEQ ID NO: 61911 - DNA, 623 bp, Zea Mays
tatttccatgcagagctcgactgggttgggttctaaggctccaaacgacataaggcaactcccttatccattttcctgcgaacttttcatttttatcgaagacttttttcctgagggcctccaatatcatcctgttagctctttcaaccttcccgttggctcttggatgtgccaccgaagcatatttgatctgaatgctcttctgctcacagaaatcaaagaactctgaacttgtgaagttggatcccagatcagttatgatgctattcggtattccgaatctgaatattatgtcttgtatgaactccactgccttagctgaagttagggaagcaatgggtttgaactctatccatttagtgaatttgtcgatagccaccagtacatgagtgtatcctccttgagcttttttgaaaggcccgatcatatccaatccccagcacgagaacgaccaagttatgggtatagtctacagctgctgtgctggcagatgctgctgttttgacaggtactggcaggcctcgcacctctggactaactcggctgcgtcactcttcgctgttggccaatagaaacctaacctgaagaccttcccaaccagggtcctggatgctgcgtgtact

SEQ ID NO: 61912 - DNA, 470 bp, Zea Mays
ctgcggcagaggagttgaatttctgctacaagatcgacgggccgtccgctgaccatttcatcttctccgagcaaggaatccgctgtaaaggatctgccaataaagtctgagaagagcgaatcccatctccgattctagaatccgcaggcgacttagcagatctggagacatcgattcccagtaggccccccagagaagacgataaaccatccccacaaatctgaatatcttgacaagatttgcgaattgccggcttggagtggtgcggatggcaaggaacagacccccaaaaacttaccgccgttggagagtgctgccagagcggccctaccggatcttcaaaataaccattgtcttgcttcacgggaagacgaacgcggaaggcaggagacgaaggcggcaccagacgagtaaggccagccccaccagatctgaggagaccgaaaagctggcggcgccgggagaaggag

SEQ ID NO: 61913 - DNA, 944 bp, Zea Mays
agcaagtgcaagtttgtggactataaaatactataaggtctgcatgtgtttgctttccttattttccattgctcggtcttgtcaattatatgggaattcattgaggatgcatgcattcttatgttgttatgttaaatcgtttaaatgggtcattcttggtacaggggttggagacaagcacaaccaaagaagggtggaagtactttgaagatattaccgatcaaaaaaaggattttgtctaggtagatgaccaagatggcagtcatactgagttagcatttagcaagaaacgaattgctgataggaaatagtggcttacaaatttctaggttaactctcactttctccgtcccaaattataaggcattttgtcatttatggattcatgatgtttactatgtatctaggcataacatatatacatggcaaaatcaatgaatctaggaaaactaaaatatcttataatttagaatggagggagtacatcttttcccaatttgtcatggtttgtttatgtgggatcaacactaaatatgcaaattgatattcagcatggaacatacatggaccaacgtgagaagcaagtcaagtatagtgatcttatcaacacagagttgatgctcttctcaatggcagtccagcatcgagcaataccttgaatgcttgatggccttaaaccaggctagaggaagattctgttttgttcattcaaaaggaattttttaaggaagctaaggtgtgtctttttacctatctttacattacagattatctggggtctatttatttattttttctgttgattttttgacaacaggtggctcacttctcttgttatgtgttagaacactcagcataccactaggtgcgataacagtgcaaacttatgagatgcttgttatgatcattgttaacatggatccgttctcatagccagctgctat

SEQ ID NO: 61914 - DNA, 641 bp, Zea Mays
cgtcgatccaacataaatgagaggttccggcaccctcggtccccaatcgcacccggcaaggtcacatgtacgtccaacgtgatcatctgaatccccttgaccaccggatggagtttctacagcggtatatgcatgggtcgacgtcggcggccacccgtgaccccgacgtgaaatccactgagccctggtcaccaatcctacttggcaacacaccacgtacatcaatgtgcgacccggtgacaccctcgaacccctaatgtagcttgggtgacgacgtgcacgagtagaaatggcggcggcacaccgaccctcccttggcggcaacacactcccctcaacacacggcgcggggttccccggtgctagcgtcaatggatgagatgggagttagcggtcagtttatatggcccgcagatgagggaatctcggctaggtaactcacagctgtccgcaacaaccttgcgaaggatacgactgcgagtttctttagatccagagggaggagaagctcctgttccgagggtccacttgtcggcagtcgtaggaaccagagtgtggcgcgttggtcagtgacccaagcggctgatggtgcgggcccgagtgccagtggcagtgaggacacggcgcggcatgtgtgccga

SEQ ID NO: 61915 - DNA, 949 bp, Zea Mays
gtcgtgtatcccttgatggctgtggggaaggtggatcccttgctggtagcgtagacagtgggtcaccaagaggatgaggaggagaaggtggtgtagccctgaatggcgatgatcgtggcagagatggggaaggtggtggatgtacaataggaactgcagtttgagcaggcgaagagggttgggcagaggacgacgacggcggtggtagatcaaccaattcgacatccctttgagaccaaaggatgaaattcttgatatcttgtccaaatgtctcaatacctttggtccagggatgtctagcatgttgtcattggatccttgaagaccgccgtcacttctaccctgcaatagtcttctggaatgtcgcttccatggaacttgcgtcatgggatcgcaaggcatgtggctactttcttcatacgattgttattaataccatattttataattagtgtgcacgccacaagccttgtgatgtcatctagtagatagcggaccttatttcccgttgacgcgacatagcttggaacagtcgtatgatcagtggaagacgacggttgagctgctggaattatttgcatatgtggagtggtcatctgttgaataaacatcacactcgccaatttctacatcaattctggaggaggattcaatagcatttgagacatcaggtctttgaactctttcttagcttcctcctaaaaataatctgccatatgttccttgtatcgatcatgtttcttttacagaccttcccgctgtggtccgaagccttccttccatccatccttagacgagattcctcgtgcacaaccaggatgctcatggttgccgagaccagccgttaggatgtctctctccctttgtggcttaaatgttccttggctctgctttactgccattacatatatgttttttgccgcttcttcgacaatgggatcatcaaaag

SEQ ID NO: 61916 - DNA, 464 bp, Zea Mays
gtgaacaatacccccaggacggcgggttgattctcgcatagtccagggacgtatctgcaaacccgcctcgacgaaggggtattccaggatctcaaccgccagatcataaacctacgatcaggataatattggattcctaagaactcggccacaacccacaaccgcacgatctagtacctactgttttacattgtaatggatcacgaagggttgttatgcgtacgatgcgtatccaacggtgtggatactagtgctggattgcccacgcgagattagttcgcacgcgttcatcgatagatcgacgactagttcaaggctcccgtccccggttcatccccaatctcgacggcaagctcaccgcggcagagcgccatgccgtgaacgcctgccccgacccccatggtacaattcctaggtgcactaggccctaaatgaaatcgcggcgtttgcgaagcaaagggtgg

SEQ ID NO: 61917 - DNA, 921 bp, Zea Mays
attcttcctccagcacatcaatgtcttccagcctggttgcttctacctcagctatgttttcaaaagtcagtatcggtgccctgaagattagatcggcagggagcactgcttccgacccataaaccatgaagaatggggtatttccatgcagagctcgactgggttgagttcgcaggctccagaccacgtatggcagttctctgatccattttcctgcaagcttttcgctcttgtcgaataccttttttctgagtgcatccagtatcatttcgttggctctttccacctggccattggctcttggatgtgccactgatgcgtacttgatctagatgcttctttgctcgtagaaatcgaagtactcagagctggtgaagttagatccgaggtcagtgatgatgctattcggtatcccgaacctgaatattatatcctggataaactccactgcttttgctgaggtcaaggaggcaattggcttgtattttatccattttgtgaatttgtcgatggcaaccagtatatgagtattgcctccctgagccttcttgaaaggtctgatcttgtccagcccccatcatgcgaacgaccaggttacaggaatggtctgcaactgctacacgaacaagtgttgttgctttgacaaggattggaacgcttcacacttttggactaactcggcagcatcgctcttcgcagtggcccagtagaaaccggatctgaaagcctttcccaccagagtccttgatgcagcatgcaccccacacttcccgacatggatttcatctaacaattgtctcccagtggccgagtggatgcatttcatgaagactcctcctacgcctctcctgtacagtaaaccccctatgatggtatagtgggctgactgccttgcgatgcgttctaccgcggccttgtcat

SEQ ID NO: 61918 - DNA, 672 bp, Zea Mays
gacccatcaagcgatgggtaccaaaatatgcttgacaagctttgcaggaaaaggagatggtatgaagctttgaggtgcttgagaaagtcaattcaatttttatttactcaagctatcaatcttcaatgatctatatccaagattgacccaaagttattgtgaattgttatatctaaaactcatatcatctcggggaagatattgatgttgtaggaattaaagaattaatcctatgccgaaaagtcgaggcctacaacatggaggaaagccaaaggatggtaacaattatgcttttaagtgcaagtatcttaaattatcatttcttatgtgtcttgtgtagtcacattgaaaagcacttcaaatgtttttaattatgtcaccattctttgaagaaattcctctcatatggtagattgcgtattcatcatttccattctatggcaatctacatgctttaatttattgcaagatcctcatggcatgcttttctctaatcatcctattattgccatgttctagatatagaaagatattccatgttcttaaaagaataaggtgtcaagtaaggaattcaattccttaggacacttataaagggaatctctctttatccaaaaatcgtgagactaatgtttttgtaacctaagtagtctcacatatagagaatgagtt

SEQ ID NO: 61919 - DNA, 770 bp, Zea Mays
tgaagatgcatgaaggctcttaaaagatgaacacacaatagacctgaaaacatgaaaacgaaccattatttcaaagatatacattaatttgtactacaatcctcaaattctttagtatgcaaattttttatgctaatcaacataatacgtacaaacctgtatgtattcactgtttgcactcacatgtatactccccagcttctatgtctgctgttatcttgaattgatgttgtccccacacaattttattagaccgttttgtatgctgtacgatccattcattatcacattcgtctgggtcctttaatattttgtatgcagtggcgtatttcattgattcctcaaatctattcataacagctctggtgtatgctctagagactctcacttcgaacctatataatgtatctgttgtccttggtgcctataacacattattatcataattaaacaaattatttacataaatgtatgcaaaacgttattgctaacaagcacgacataccttgctcaccaatgcctcctttgattctttcattttcctgctgtgcaacattttcatcatttgtttagcgaactcatgcagtggggtgttcgcatctacatgtgattgcttcactaatctgttcatgctctcacttcgttgtgtagataccattaccccacagtagtcattttaaaaaaatgcaggtatccattcttttcttatttcatataatttgcgtagagtcatatcttcatgaagattgaactcatttagcatcatttcc

SEQ ID NO: 61920 - DNA, 361 bp, Zea Mays
ttgaccaggtggataccgacttgaagaataagaattgttttatgaggggattgaacgacaggctccagcaaaaaatggcaacatgtctggaccttaattatagcagggatgtcagtacagcactagcatttgaagctaaaaacacaggacacggaaaatcaaagtgatatgcgggtgagcgatcaaatcaaggacctgaaaagagaacaaggttggtaatccgacctttcaatcaaaatcgttcttcgcctcgcccaccttcatatccattcaagcagcttgtctttattcgtcccactactgcccccgctcctaccaatcagccgagtgcccctggtactcatttccctgctcttcccag

SEQ ID NO: 61921 - DNA, 407 bp, Zea Mays
ttctccctgggccattttacctcaatgatgttctcgtagctccccacatcactcacaatcttctttctgtccgtcgattcaccactgacaactattgttccattgagtttgacccctctggtttttctgtgaaggatctggccaccaggacccctctcgcccactgtgacagctcgggaccgctctacacgctccggccctccgctgccggcgtgtctccacctcccatcctggtctccaccacctcctccaccacttggcatcgtcgtctcggctatcctggacccgatgtcatgaccaagattaccagtagtctagatccttcatgtagtaggggacattttgagggtttctgtcatgcttgttagttaggccgacatactcgtctcccattcattacttcttct

SEQ ID NO: 61922 - DNA, 1000 bp, Zea Mays
aaccaagatggatggtgcagcacaaaaacaagaaactcgggaggggaatatgtgggacgggtggttatttttttgtttatatatatgcaacaagcaatgacgagcagatcaaggatgggatagaacaaagataacagctagaactatgagtggaaaaaaatcagcaactagacaaatcttaaaggattaaaactcgataaagcaaactacaaaatcagtaacacgtacgaatttgggctgtaggttttctttttggctattagtggaaagtaggtatataaaatctatcctactaaggaaacggaggctttagtaccagatgatatgcacacgcctaggcagcatgtgtagcaagttgttgtggcccgatcttctcgtaggatctgcgaacttgataaattgtcgttgcgtgacctaatgaagaggcagcgcactgcgaggctgtccacgcgacgaactaccgagacaatcacccttccacgtatcgacaaaatagcccacgcaatcacgccctatagacatgaaggcacaaactaggtgaaccgcagttcagcgttctacaactccctcaggaatcgaaagaacaaatgttgcaagcctctcaagactcatgcataaacaaaactccacgagtttgtgtattttgaattcaaaaacataagatatgtcctttcattgcctagtacaaggtatatatagagataggggcgttcagctttgattaaatggttgcatgcgcatgctctagtggatttagtggctggttcgcgcgtcttttcaacttctggtagcagttactaaaatgagcataactccttattgggacgtccaaataatgaaccgtttgatgggctgaaaagtagacttgaagacgcttccatccacttatagaacaccgtctaactccttgtattctgtctgcagtgatgcttggaattcgtaccacgtgtcagtcatctagcttctggttgcattcccatgctaaggtgatgaaccacca

SEQ ID NO: 61923 - DNA, 917 bp, Zea Mays
agaaaccattgtgattgattgtgtcggttggaagtgtgaagtagggggtgtttacccaacctctccaatatgtgaaagaatatgctcctccacatgttgtaccttcgacaaaaatagagcgatgagtagacagatgtgtcgttgaagtagtcttgcatcaaccaattgtaggtggatacacagtcatagttgatgtacctccaatgttgtgttcaatactctctcgatgttgaatactcaaaggaaatctccatcacctattggctgctgctgcaactcgaacacctcttctttagtcatgtcgatgtccgagatggatgaagacattgcaacaacacttgatcgaatgaaaccgagtgagatgagtacgagaaggcagaagagaaattctaagtgcgagtgagctcaaacatccccctctacatttataaggtggctttagttttttatttttttatttcttaaggtttttaaaactaaatcggagaaaatagcactaatgaatcagttagtgccacatcagcaacatacaggtgtcggtgtttcttacctcgctttgataactaaatttattgtgcgcattacaagctctagagggcgaagggcgcaagatttatactggttcaggcagagcgttcctacatctagtcatcagtggcttgcgctaccgacaccattgatgatcaaacttgtagtaggggtaacaagcagtggagagagggaggagaggcacccagatctcttatcgaggtggaagtagagcttagaagatgtgaggtggagtcctggctaagtcttggattggcggggctctgaacttctggtccttgtccacgctcctccttctgttcgtccttgtgggcttgtctccgtctattgatccatttgtcaacctctcttgccttgaggccagcccc

SEQ ID NO: 61924 - DNA, 548 bp, Zea Mays
aatggaagcctcgattttgcatttatttctacatttcttttgaatagtctttagacatctctcgattggatagcaccaacgtccctgcacgggcccccccattcgtgcctcataggggagatgaagaatcaaatgttgcattagattgaagaagccgggtggaaatatcttctcaagctttgactcttcatccctaagactcgcatagtagataagttcaccccctactcaggttagctgcatacccatcagggaacatcaacatcttgatccactgaagtacttccttcctctgggtcctgcttaggacgaaatcggccttaggccttctccatgtctttccaccacttggcggcttcatctcttggtttggtctatcacataacgctgccagatccactcttgcctttacattatcctttgacttatcaggaatgtccataattgttgcccacaatgcctcgacaacattgttttcagtgtgtgtcacgtcaatgttgtgtggaaggagcaggtcatcataataggggagccgagtcaagccagac

SEQ ID NO: 61925 - DNA, 308 bp, Zea Mays
gcacacgtgagtatgaaaatccccacaccacgggatgcttccgcacaagactgcaaggttcccagtcaaaagcaaaacagtgatccgctggccacaccacgagacgcttccagataaagctgccaggttccagtccaaaggaaaaaacggtgggccgctagcttctccgtgggcgcttgggcggagatctagatagcgctgcacgccgctgcttctccttctccgcgagtgtccgctccgtacgccggcgactacgatcctgtttctggtgcgtaccttacagtccatccttcttcacgtgtctacgc

SEQ ID NO: 61926 - DNA, 418 bp, Zea Mays
cacatctaactgatggatgggccagtcgtgagagagagccagagagagaacaacgtgaattgtcgctggcttgacaaccaggctgaatgtctcatcataatcaagaccaggtcattatgtaaacccccaaagaacccaacgagccttgtagcgatcgagagacccatctgcatgaagtttgtgccggaaaatccacttgccagtaaccagattgacgccacgaggacgtggtaccaaactccaggtgtcattagccatgagggcatcatattcaacttgcatacctgagcgccaatttggatccgcaagggcatcccgaacggagcgagacaattgcgacattggcacagcgtggaggttgagacgatccacaggctgtgtaatgccggatttgccacgggtgcacatggagtgctcg

SEQ ID NO: 61927 - DNA, 444 bp, Zea Mays
atcggtctcaagcttcgggaaaccaatactcttcgacagagtactgacgaccttcgctccagtccggtctcgaagacaacctaagctttcatcgtcgatatcgctgaagagatttgcccctggctgatacccgcaggatatgacatactccctcaactcttctttctcagcctttgtcaattcttgtccagttaagttttgaaagttgaagttttattcttctgaaatatcttcggctatttccttctctttcctagacactgtggccatggtctcttcggcggctgcaacaacttcttctgcggccatgtccagaagtattttatcaatattagagagtgtgctttctaaatttgtatcttcagcagttgcagcttcagtaggtgcagcttcggcagctgtagcgctctcgacagctggtgtctttgacgctgatgctgccgg

SEQ ID NO: 61928 - DNA, 846 bp, Zea Mays
acttaacttacttcatatatcctcgtgctgccagcctaaacatgacttgtgagatcagcgcttacttaccttttttctacctcgctccatcttttccttcttacctctacatcgtcttttataattactcttcttcctctccatccatctatggccggcaaaaacttatacaaaaactaggggctttatggccctggatccgcccccgtgtgagaatgtggcactgcaattctatgtgtgacacaacatgggcctagaggtcaactagagccaagaggatataatcttgggatgagaattccagtatggcgcatggcatgtcactaccggaatccggctctttatcgagtgtccactcggcaaaaaactcagttccggtagtgtgtatatatgatggtatcatttcactaaccatcaaagctgtgctagaatcaagcaaatgaagaagattcaaaacattctccacacatgtcgaccacctattattatataggtaggacaacaattttactacttccaataaaatggtcaaacatggagtcatacaattaatttgaatccatgtaaagggctcaaataaaacaaattccactcaactagtaactttcaggtactattccaacaagtgacatacgtatcttgttaacatcattatcacaacgatacactctgtacttgtcatttctaggcgggaacagccaacatatatccacattattcttattatagaaaatttcgtgaaactcatttttttaaatgtcacggtagaacttctgatgataaaatgtagtacacagtaatgtgtgaaatcatcagccctccagcctgttcgctgtggtttgttaa

SEQ ID NO: 61929 - DNA, 336 bp, Zea Mays
catatacattcaaacacacgaagatgatcatatcgtggagaagtcccaaaaagaacttcacccggtgatttgccagaaagtttaggtgatgattgtctattaatgagatacacgatagtggaaacaacttcactccaaaagtgtgaaggaacaaaagaagatatcaaaagagtacgagcactctcaatagtcaataatatgatgatgttttcgttcagcaacaccatttttggcatgagcaccaggacaagaaagttgagctagagtaccctctatggtcaatatctggcgaaaattatcagataaaaattcaccaccagaatcggaacaaaaaat

SEQ ID NO: 61930 - DNA, 937 bp, Zea Mays
atggtagtcggcgtgaccataggcgggccggcagtaattgcatcaacaagcgcgcaggagcagcaggccaatcgccaatcagactctggccccacctgcaggctcgtatcctccactaaggcaggctcgggggccattgtcagtaccctgaatcaggggtaccccctactacagtataaagacgctgtacacgtacggcgtctcctggccgcacggagaacgacacccaaccccatcacatgggcaggtctaggggcaccacgtggcaaggaaagatgatacaccccagggtgcatcattggctccggacctccacggaggaacaccggacctctgtacgcacaacccggatcctcgattacagatccagacttccaagaaggcatgtcgggtccctcggatgggccccaggtccctccgagaaaggtctggaccacagcaaggtctcgagacagggggaaccccggtatgagtaggggtccgatgctggcacgtgtccaggccttgccctgcgctccccactcaggcggagacccgctgctgccgcgtggcttgtggcccgtgacataagccgacgagcggagcctgacgtaaggcctctaaagctgcgtggtctctgcatttattgcggagaggacgcgccgcctgccaccatactgacagacgatgtgctctctcaacatttaatgcgtcctgtccactccgctggcagacggcgtcagggtcaccctgcagacggtgcacctgtccagtctgttgtcaaacagtgcgcccatgccgtgcgacgcactgtgctcaccatcccttatacgagaaggttcccttgcacgctgaggatacacagatctcggatgttagggcgcgagaagattgctccagcggcgaacatttgtaactacaagtgttatatctgttatgtccctaggcccatatgtcg

SEQ ID NO: 61931 - DNA, 492 bp, Zea Mays
taccagtaggagcagcgtcggaggaatcctcagctagcagatcaagcatggcatttatatccgcatcactagggttcaggggcacctcaaaatgaacctgtcgttcgttatcaggaatctccccaagcgaagcaaccaaagtactaacttcttcagcagagggtcgcactctaaggcccaaattgccatcagtcacaggcggatttgacacaaaaagggtgaaagctttgggaggaggcaggttccaggccgagtatgctactggagcaccaacatttgaaaccttacccctgaggatcatttcaagtcggcctaccaagtctacagaaggaattctcctattggtaacccgagttgagtcggctagccctcgatacagatatgctggataggccctgtctttcagtggctgaatgttcttgaaaacaaagtcagcaaccacagcttcagcagttagacctctctctttcagcagtcccacctcagttagca

SEQ ID NO: 61932 - DNA, 523 bp, Zea Mays
gtcgtgtcccgccatggttagtcgcgttggcatcaccggcgttcactgttatccgacctggctacgtgcctcaacatttcaccacatcgtagtgaatcactgtaagccactagttcgtcaccggtgaggccgccacggtgaaggccacgaatcaccacactagtgactcattccttcttcgaccgccaccgtgcccaatccaaattcactagccaccgctcatgcctgctataaattgagcatgccgtgagctccgtaggataattacgcatccaaagcaccagcaattgcctccaatcgttcaccagagaccgcgaattgctcatctcccccgattctgtttccgccgccgtggtagaaccctcaccgtggtcagcaaatcccaggtctgttcatcctccttgctgtcttgtttcaacatccgtgggtcctcctgatgttccccgacctagctaattggactaggaccccatagatcaactggaacgcgcttgattgcctatagtgccagctgtcaccgtgg

SEQ ID NO: 61933 - DNA, 450 bp, Zea Mays
ctcgtcttttagtttttcgcactttaggggtagtaacatttaaaacaatccaatggaacttttaatttttcgcactttaggggtagtaacatttaaaacaatcaatggaactgtggcagatagagaaaaagaatcaaacgttcgacaacaattactcacaatagaggagaaacactcagcacacatcgcttgccgctcaggtggtcgctgccaattggccagggaggcgctccgccctcgcctatgaataagaaaagaaaaggaatcaggttgaggaagttgtatagtttgggagaaggtgtaatggcaggggtagatttgggcggtggcgcggcgccagtgcaggccgcgtgcgtcattgctacagggacgctagaggcgaattggtggaggtggaggccggactggcggtggcggatgcctgagttagagctcacccggccgcctcgg

SEQ ID NO: 61934 - DNA, 448 bp, Zea Mays
gttgcattgaagtccgtggaaggaggatgatctatgtaatactgaatttcgaaggtacatgccatcaatgaagtagtacccttggttatactcatttttatttaatgtgaagttcatattttgtcctcccttgagcacgtaagtgaacaacagcgattggttgagcacaacagcgattggttgagcacgctgatgtcgttgtttgacccagctactcaaaaagttataccaatttcgcaagtcacatgaggcaactgcttcgagcatgatggttagggattcaatgtcccaccctgtatattgtcctctccattcaatgggatctaatgtcccaccttgtaaattgtcctctccattcaatgggacagttaatccacttttagtgcatgcaatctatacttcctgccataccgggaaatctcctcgttatctaaaagccatgtaagat

SEQ ID NO: 61935 - DNA, 361 bp, Zea Mays
cgatcaagcggacgaccgacgccggcgtcgttgtgtgccgtaacctgagggccgagactgagatcgtcaatcgtagaacgtagaagcgcagatcgcaaaaagcagaagcagaacagccatgcaaatcacagaatggcggttgagaacaccttaacagaacgacagatgggaacaggtactacgctaacgattctgttctgattaggcccaactgaccaacttatgcactctaacgttctttatttataagaacaagcgagtagttagtggtaacactgattcgaagcaaggcgcaggtctctggttcgaagctccacgggagcaattttttgccaaataaatcttagcacatgcgtcgccg

SEQ ID NO: 61936 - DNA, 376 bp, Zea Mays
tcatatcctttcggtatgcaagattatagccaccaaagttgttgtgcagattatccgaaggccttgcctatgttcaatagtatagctcatgcatcgtgtagagaccttcgacactcgcactgataacttggttgcacacgacccatatgtatatactaagtataacaattgcatttggtgtaagttgatgcataaaaatcccatatttctttaggacctcagtaatcatcataaacatagagagccaaagctcggtccggaagaagcttctgaacacaactatctcatcatcctttggctttagggctcatcagaatccccttaaatacctctctacacttactatcagccttcacataaaatcatacccttgtcc

SEQ ID NO: 61937 - DNA, 1083 bp, Zea Mays
aaagtctgaagtcagcctaacagtgggatttcatgaacttagagctcaattctaagcatgatccagtaggaatcttactagtgatgctataacaaaggtgaagagggtttataggtatacaactttggtgcagaaggatgatgaagttgtcatgcaaaacttggagaaaatctgccttgaataggttctgtcaggcactctgaagatgattcccatggtacagtaacctgatcgggtcaggttcagtgaacttcgctgccgacgaccgtcgcgccgcgattcacgtcggtcaccgtgattcgtgcgctgtgacttgtggataacagtgagcaggtaaagatcttggcgtctggatcaacttgggtccggtcacggctaagctccccgtaccacttgctcatcgatcgatcgggataagacctcaccgccgttggccgattaccgccgtgcgcgacgtgctaaagcgttagaccacgtcgctgtgaatcgcgtctcgcatgcacggtgatcgtcggggtactgccacggtgaaagccactaacacgagcaccaatgacctcccacccctccgaccgtcgcgcgtctcaaacccaaattcactggccaccgcttagcgatcctataaattgatggccgagtctgttgcaccatgttatcacgaagccaacgcacccacacttgactccaatcgttcacaagagaccgcgaatttcgtacttcccccaatcctgtttccgccaccgcagagacatcctcgttgtggccagcttgctccaggttagttcaagctcttttgtcgtttgttctagcgtccttaagttctcctcaagctcctcgacccctctggttaaactagactgccatggatcaccggaaacacgttgttcctttgattatccgcgctgtcaccgtggccagaacaaattgggtagccgttcgtgaaattgagtgaggggaaacgctcattagatcttgaattcggtctcggctaagatagggcaccagtctttgagtgtattggctggttcacgagctcgtcggagctctgcgcgacaccacccgccgtcagggactcgattcgtg

SEQ ID NO: 61938 - DNA, 571 bp, Zea Mays
gccgatttacctgattataaacgaactattgtttgcgattgaacgatgtcttcctcctttgctcggcggtcgcgcccgcggttcgcggcggcgaagcagaggtgagcaaccaaggcgacatgagaattaaggtgagtgcagaacagggtcgagacgagcacgaagattagaagaggtgagtggctgtccttagaggtgtggaggcgaagcgagcgagcgatagccgacgatagagaagcgagcaattgtacctacctatgcgaacatcaacgcagccaagaagccaaacgggtgacggagaagcaagcaactgtgtctatctgcgagcgacgacgcaacaaagaagctaggcggatgtcagatgcgaagaaagatcaagggtcttcgatctagtgatgctaatgggtcgagctaaggtatggcgtgggccatacctcgccatattaggtcctccgcccctgttgctggacaagtgctcgagagtggtgttctggacaagtgccgtgtgtggagaactggagagtagcacttcatttatcgtctgttttaattcatatcatttatcgtttat

SEQ ID NO: 61939 - DNA, 621 bp, Zea Mays
gactcaactaccttggatgaaggtatcttcagcattatagtcgaatcttcagccttctgcgtaggaggaatgggctcctttggttcaatagatgaagaagtctccccgccaaactcaggcaccacgaccagctcaatataacgtggccagtgggtaaggaccttcaacttctttctcttcggcgcaggctcatctggagtggccgaagcagcagtcttggtcgaagcagcagttttccttttctttccccgtccccgtagcgggtagcagtagtcggggtaaacaaaaccaatggcatcaaaaactctatttaatttctttttcctcggccaccaaaggatgcagataatgcattatcttctgctttggaatacggcccaagcagttcatcacttgtagcttcgatacattttagccagtcatcattcggttcatcaaatttatcttcgtacctaaaggtgtatttcaatcgaaccagctcaccttcgccagacttggtgacagtttccttcggcatttcccagttctctacaagtggccatactctgaaggctatatgctcctggattaaatctcttgtaccaataaaaaagcagacagtaccaaaagctttttggcatg

SEQ ID NO: 61940 - DNA, 382 bp, Zea Mays
gtttacgggatatagaagtcacccctatatgagtattcgtaagcatgcgaaatcgccttaagtcgttgctgacttaaatcgattgcttttgttagtagggcatagtggtcaccctgagtcaagtaagcgcgagcatgttgcaccgtctcaagtcgttgccgacttaagccgattgctccgttagtagggcatagtggtcaccccgagttaagtaagcgcgagcatgttgcaccgtcttaagtcgttgccgacttaagccaattgctccgttagcagggcatagtggtcaccccgagttaagtaagcgcgagcatgttgcaccgtcttaagtcgttgccgacttatgccgattgctccgttagcagggcatagtggtcacccc

SEQ ID NO: 61941 - DNA, 280 bp, Zea Mays
aaaggaagcaaggtacgtcgacgacattgccaacggacctcttcctcactacaaaccacaacctgttgctctcaaagctacgaccaacaaggatgcgctccccgacaaggtggcgcaagttgaggcggtcgaccttaatgaggacgagatggcgcttgtgatcaagtgcttcaagaccgctttgaagggacgcagagactaccctagcaagacaaatcaagggaaaagcgttcatgctttaagtgcggtaagtccggtcattttattgctcaatgtctag

SEQ ID NO: 61942 - DNA, 986 bp, Zea Mays
accgcactcacaatcaccgttgagtcatctcaatgccaatcaccaagagtgcgaagtactagactctcacttctatgacaaccctaatgtgagtggtggatgcacacaagtctctctctatgcactaacgagattgccaaaccaaaagattatcacttctccaatctcgtcactatgcaaagggtctttctttctctcaagggattgcttcaactattataagggcaagacatctcaacaagctaagttggggtataaattgcccaagggcttaaaacaggcatcagaaatccacttagcattttttgggggcaacgggtgtgtctagtgccaactttccgattgcatcggacatgatggtaccctagcaattactatacttcacatctggtgtcagcaccagtgctatattagatacatttgtgagtgtaaaccgaaaataaacaaaaaaatgctctaggtgcctatccagcgagtactcaacctcttctccatagtttacatgctccataagtgtcttgtctagtgtcacgttcggtggcacacttgacacactggtaagtgtaaactgtccttgaacacttttgcaagctttctgagtaccttgtttggtacaccatacccagtacacaatggacacattggtgcaagtgtaaaaatgtgcagggcataactccatcctatttagtgcataactcatattcggtgcaagttgattgtcaatcctctactgctttgtggcaagctattgctactatatcatatgctcaataagtgaggctagttgatcatctctagtgcttgttattagaggtggaggggctatgctagatccatcagactcaaaatcgtgtaatctgaatggaggtgacagtggtgtcactctgtagtccttgtcggagtaccgttggtggcatatctctgtttaaagagttgtattgtgagagagtattgatgtaaggttaagagcgataaaagattagcta

SEQ ID NO: 61943 - DNA, 402 bp, Zea Mays
tggtccgagtgctaggcgtaggcggcgaagggcggtggctaagcgtagagtgagtgaggtggagggtgctcgtcttcgtgtggatagggttggcaaacgggagttgttgtcctcgccggttggggtaggtgagggggagttgagaagtctttttgagggtgaagagttgaggataatgctgtttaactatagggagatgggtagcattccaaaggttgaaccgatgtaaggtgtgatgccctcgctgtacgtatgtaactatgatttggacaatgatgctgcgtgccctcgctgatccggtcgtgtctgtgggggacgtatgcacttgatctagcacgtttatgatgtcggttcagctgcacctgtagtcggtctttgcccagatagtctttttaggaagac

SEQ ID NO: 61944 - DNA, 658 bp, Zea Mays
cggtcgaggcgtacgtatttttttactacgagttcgatcggtctgctcttcaccagtcacgctgcagtagtgttttatacgctgtacatacgtactagtatgcgtacgtgcgcaccgtcatctcctacgtatagtcgcgactcacgacatgacaaaagcacggttgcgcaaaggccgggaggggccttaaacaattgcatgatcattgctacggccgggtatggcgtacctgtacttgttgccactggacagtgcttctggcctatgcatatatatagctcgcatctcgaccgaccgactacagcttaccgtcactggcttcaaaaccgaacgctatggactttctgatcggcggttaggaacaaaccggttttctaatctgaaccacgaatttaggacaaaagggttaagaatacgaattctggttagactaaaggtcgtttttccccctaatttgtaccgtgtatttaagattaaatgtttgagactatcgatttaagttaggagaattgagactaaaggtgttttgacgcataaaaagaagtcattttggacaatgtttgtgtcgaacacataaacagaagcattgccttagagcaaatctaaaaggatgttaaaaattttacctcaaaaattgattattaagagcaggttaaaa

SEQ ID NO: 61945 - DNA, 621 bp, Zea Mays
gccacgtggcgatatatataaatatacgatgccacacaacacaatcaaacaaaatatagagctaaacaaaattgtttacgaaggttgcgcataatgtgactttaggggctcagataacccaccacattctacgcgagtacaagctccagcgtaactggtgtcaatgcgtgtgcggccatcagggctacgacaacacagtaagccctcataacaagcacaacaggcgcatatatggcttgatagtcggggtacacgaaatgtccacacaacgtgcgcaacaggcgcatttgtgtctcagtgatcacgatagacgaatagtgccaacagggcatgcaaaaaatacgcgacccagcgataacggtccgacccaacgggagcggtccgattaaacgagactgcgacatagcaatcacatgacgcagccaagttcgtacgacacaaatactgcgtcgtgttgccagggcgcagccaatgctcagccaatgtcataacacaaccaatgaataatgtagcctcatcggcacgtccgagtacccactatatcatttaatcgctcaagatgaatccaaaggctcaacgtaatataaatatttagagcgatttaagtatacacaatacaac

SEQ ID NO: 61946 - DNA, 415 bp, Zea Mays
cggacaggggtcaaaatatgtgtcatacggtccatacccacactcatgctgaagccagtaaaacagatagtgaaaatcacggcccatacccacactcatgctgaagccagtaaaacacatagtgaaaatctagcaaaaggcagagaaatcgagctagtattgcgcgtgctccatttggtctctagcaaatatattgcacgtgtagttcgttgtacggtgcctctattaacttttcttttccacgtttacctcagttcctttctttaggcatggggtgcaaccgagctgtgaccttgcaaacgcaaaaggagtgcgtttaaaccgaactgacagcatgttacatacaccaaaattggagttcccagacaagaggaacgacagtataaaaacctttgccccctccgacagacttctt

SEQ ID NO: 61947 - DNA, 639 bp, Zea Mays
tagcttgacgaatagagctgcttgtttgctcttgtgaagttttttaatcaccttctggacgtagaggaagttatcatgaattgatcgcttttgaatgaaagcattttgggtagtggagacaatttcattcatacgcggcgccagccttgttgccattattttggttataatcttcatacaactactgataaggctgactggtctagacagatctattttgtcaggattctcagaagaacgatgtttgcctcattgaccagatgcagacttttgcatttatgatgataaaaatcattggtcgccttggaaaggtcttctctaatcacctcaaaacaacccttgtagaaaatccttataaaaccattaggtccaggcgctttctctgaatgcatgcccataaccgcattcttgatctcatcatcattgatcatggtgtccaaatcggataacacaaaaggcgagtagcccagattttcccaacgaacaacactgatcctcccacctctactgccaagaatctcaaggaaatgccgatgagcctcttgtagcttgtcttcctgactagttaacatgcaatctccacgattctaaggacaaatatattttttcctaaaactgcttaaagtactgatgtactag

SEQ ID NO: 61948 - DNA, 988 bp, Zea Mays
ataggtacagcaccagcaggtaacagaacaacatcccatgtacttgtgcgatgaagggcttttaattcatcagtcatagcaagctgccactcaggtataccagaagcctctttataagatgatggttcagcaatgacaacactggcacgggaaaacccataacgttctggagctgcaatagtgccacgatcacgaagatgatacccctgattaaaaacaacatgagagtcatcattgttagtacaagtatcagcaacaggatcatcatcaggactggccgtgggagtagagcgaggacgacgaatgtaagtctgagtaacaggtggtttggaagagtaagaaggagatggtgtggaagcggaaggtggtgtgatgggaataagaacatctggagtagaaacagtaggtggtgatactgatgaagtttcagaaatgggaggaaggctcatgaatgaggtagactctgtggaattaaaagaagaatgagtggaagagttgtaaaagaagggtcggttttcattaaagctcacatctcgagaaatatgcatgcgacgagaagatgaatcataacaccgatagcctttatgttcagggctgtatccaagaaaaacacactcaacagattgagcaatcaatttagtacgttcacgaggtgataatagtacataacacatacatccaaaaactcgaaggtggtcatatcgtggaggagttccgaaaagaacttcaccaggtgttttgccagagtttggatgactgttgtctattgatgaggtaaaccacagtagaaactgcttcaccccaaaaatgtgaagggacaaaagaagatatcaacaaagtgcgagcagtttctataatgtgacggtgtttgcgttcagccacaccattctgtgcatgagcaccagggcacctgtgcatgagcaccagagcaagaaagttgagcaagagtaccctctgaagtcaaaaattggcgaaaattatcagataa

SEQ ID NO: 61949 - DNA, 447 bp, Zea Mays
gtaaaaggtagaattaatatggtttagtctcttttagttatctattgaaggattagaaactaaaacaatttagttcctgttttagttaaaccgtttagctatttagacactaaaaatgaatagattaatctttagtcaataaaaccaaacgggccttaataacccagcacaattcgagaaatttgctattatgaaagtccgccggtgcggcttcgacgaaatggaggcttaagaaagggattcgctattatgaaaaactagagaaaagcctacactttaaaatagaagtgacgattgtattaccaggtaacgtcgatgattaatcaatgatactcacaccgtctcatacatccgttaccctctgttctcgctaccagaaactgacgctcaagtcgccgccgctcgcacccgtcgctcgccctcgtcctcgtcggcgacgcgcgcagc

SEQ ID NO: 61950 - DNA, 485 bp, Zea Mays
cgatcatgaaggtgaagccgaggcaaatggcccagaagataaatttgtcgtgacaactctagtgatgaaggatagttgggtgcatgctacagctatagctacagctacaacagacgtggcaactgcggagctccccatagtgtctctagtaccattattcagaggagctaaaattgtagtagcccatgtaccagctgaagtgactggggagaaggattgaattgcaaagcctgtgccagcagatgagaagggcaaaaggtgccatggaaactaaggagacaaagaaagttataaaagattacatgacattgggagaaggtccttttgagtcataaattgggggtagacgatacggagttcaccactcgaccggaaaatcaatgactgcaaaagaaatagttgaagccctttggttcactgaacaactaggatacccttcgggatcaatgatttttggaggaggtccaaatgattatttgtattgc

SEQ ID NO: 61951 - DNA, 567 bp, Zea Mays
ttgcggagcgccgtcaagaactatcccatcatcgaccggagaaccccgttttcccaagctattttgcgcgggcaccaaggttcaggtaaaccagtgatactctccacgcgtttgattaaggctctactgtatggcggcctcgatatcgcgcttgccgagccgatgcttcacttatgtcgtggccagcgaaggcaggtgttcggctcgagcagcgaaaggttgtagtctattactactagctatgggcacgtgtagtagtggtcggtaagcgctgagggtcagtgtcgacgcggtcgtgggcgctaggtcaccggactagcacgacgggcatcgggtccgagttcttgtgaaagagacgaagctgaggggcttaaatgagtgtgtcagtgactcagcccaacagtgacgagggctcgggtggaatccatctgagcatagggttttttttacaaaatctcaggtgcgggctcctcagcgtgggccggccgtgcttggaatttgggtcgtgtcaatggtttaggtccaggactttttaggattttgccttttcttttattagagatcttg

SEQ ID NO: 61952 - DNA, 344 bp, Zea Mays
ccaaagagctagagctaggggaaaaggtagagctgccaaaaatcttgagcccaccagcagagtcagaattgccgaagataacaagagctcctgcaacaactcctaagaggaggagaatggctagcgtgctagacactgtcatggagacaacaagggcattaactcctgcccctgcaaagaaaattgtcgaagctgctataagtcgcgctgaaactgaagatgggccctcagtgcctgctgagacggagcctaccgcaactgagatagggctaagcaagaatctctagatgttggcatggctatggagaaggatgtggccgaaaaagctaaatctcctgctcctg

SEQ ID NO: 61953 - DNA, 486 bp, Zea Mays
acgagctgcactatcagacgaaggctagggaagatggccttcacgagaattttggctgttataattttgcgtattgaaaggatacaaaggcaccagtcctcagctaccgtacgaagtggccaaccggttggaaaaatgaatggttctatatgaaggctaatgagaaaaagagggagaaatctgatgaccatggtcatgagtccactgagtttgagcttcagaatgacccgacctttatgcaatatgcaactggggtcaccctgccagctgaccgaagtagaatttagagtgatagctgagcagatcagtaccagggacttagtgcaagaatacttggcgaatagaacatatccgacgtcaagtggctggggaatgccgaagaagaaagaagcggggaagaagcatgaacttgttcgtcttgcttaccgtttcaaatttgaaaagcaatttaagaagccttgcaaagaatggctagacatgattgag

SEQ ID NO: 61954 - DNA, 1334 bp, Zea Mays
cacccctggtgttactgttactaaaacttgagcataacatcataagcatgggcaagtgtttgtcacacctagagtgcattcactaggccaaaaaatttaaacaagttgtattgatatgacattttgtagataaaaccctagagtagggtaccaaccctagattgggcctaatagagcaaacaaagcttgaataggagaaaactccaaaactcaattgaagtattcataaaatgtcaccatgaatagacatacatgatattcaaaccctagaagcaccgaaaaccctaaaaagaaccctggaaaatcctggactaaaaccctagggggttatttgcaaaatgtgcacacttttggactaaagtgcaaaaaccatgagattagagcatcttagctcatgtggttcacaagtatgtggatttgcaacttaaaccctaagtcttgggcttatttgcaaaaagccacatttgtgctccaagtctttaagtctgaaatcagtggcattggctcaactttgaagcctcatatcttccaaattatgaagattttgccctaggtcaccacatcaagtttgtcaagctatgtaaggagaacaactttgtttaagaaattaaacattgttgttatgaaaaacttggagaaaaatgtgcccaaagttgggctgtcagtcagcctaaccctgaattttggtattcagggacatccaatgaactttgggagtcttttcgtggaagatccagtaagtgtttgactatggttgctataacaaaattatagctggatcatcgaacaacaactttgctactggccgatcaataggttgccatgtaaaaacttaagctctaagccctgcaaaatgctctgtcaggtgtctgaatgaagaactgatggtacagtaacctgaacatgatcccaggttcagcccccctcgtcgccgatgaatccacgccgtgatcgtcgccgccgttacgattcatgctcaccaatgaccggataacgattcggggcaaaagatcttcgcctggggataactccgatagccgactgccgtaccccattgccttgcggccagcgcagatcagttcaccggcgttggttgtccgtcgatcggctaccacgtgctaaagcgttagaccacgtcgctgtgaatcgcgcctcgcatgcacggtgatcgccggtgtactaccatggtgaaagccactcatctcgagcgctagtaccctttttcccctccggccgccacgcgtcttcgtgcaattcatcggccgccgctcacgaactctataaattgagcgtgtcgtgagctccgtaggataattacgcatccaaagcactag

SEQ ID NO: 61955 - DNA, 590 bp, Zea Mays
caggtagcaagacccaactgattaaggactttaaaccagaaaacccgggagaagacagtgctgcatatccttctcttcctggtcgcacaatacacaactttcagggtggtcaggacctctcttactaaggcgatctgctgtccagcatctattgcgaatggctagccaaataaaaaccttgcacttagacggagcccaagatttccaaagacgacgccaaggcttgaaagtgatggaaccataaaagaaggctctataggctgatttagaagaataagcccctgagggtgacaggttccaaatatgtttgtcactgctatcagataaaaccacctcttggagtgaatcccaaagctgaaaaaactcaaagagaccaataagggaaaggttgccttgaatatcagccacccacttattatcctgcacaccctccactactgttctcttgatccggatcctttcattcttggaacacgaattgtctgctaagacccgagtgcagattgatcttcaaggttgcactaactccagaaattgtgtgatatgctgtctaaacattcaagcttctcgtatcttctgttgtttgcatg

SEQ ID NO: 61956 - DNA, 589 bp, Zea Mays
tcgagaggtagctgtgggagaagcagacatgactagggcctcaccaaggagattggagcagtgagggtggctggcgacaaagtacgacaacgcgtcgagctccggcattgtcgaggcgttgctgtggggttgggtcgagccggtgaaggctcaggatagctgcaacaggtttcagggatcaaaactatggccttggcgtggttggagaagcaccaaggtccccggccacgggctacagcggcacgacagcgaccacaacgacgagcgtgggcaaggatcaagagagcataagagagggtgccggtgcgtgggttcggtagtggggctcgggtcgatacttaaagaccgagagagggaaaataaagggaagggattggccgggattgatctgattggatccttccatccatggcggtcacgacgacagcgtccacgcggaaggaaggagagcgggggagaaatggaaggagaccttggggaaaaggaaagatgcttcaccctaatatggaagggggtcacgtggtcagcttttccgcacacacgatagtgagacacggcgacaacgacaaccaggctgagtagaaaagga

SEQ ID NO: 61957 - DNA, 425 bp, Zea Mays
cgagggcggacctggaagcagctagccgcgatgaggtggttcatggcggcgcagtcgaccaaattgggggaagaaggaaattctccggctatggtggctaattgaaggcgggaatgggtgctctggcctagtgataacatgacacaacagactaggccatcaatttataggagtgctaagcggtggtgtccaattttgaaaaggaagaccggcggccgagaggagaggtgagtcaccggtgtaaactatcgtggcgctcctcggggtaatgcctccgtcgacgaactgacctcctatggatatctaatgcgacatggtagatcttctaagcacgtggggtggctacaatcgacggcgaactccgacgaggacaccactgtccactgcgcggcaagtgtcacggtgaacagtccggcgaaaagtct

SEQ ID NO: 61958 - DNA, 513 bp, Zea Mays
aggtttagatcattagttgaccctgaacacggtggtgactttgagtaagtttgtgtgggccacgactacttttggcagaggcctatatgttgaggtgttcgcaaagcattattatttgcattggcagaagaggactaccagagggttggttgaccggtttgggagttgcatttttacctcgaagacgaggaagattaaagagagggttgttgagctatccccctttttcaaaaacaagtgaggaaggtggatagatcattggttttatgtgcgctgcctagaaggcgaagactagcctcgaccgaacgcgatgtctccatttgagtttgagaccttcccttgctttgctgttgctgagaaggatcattgtgatcgtgccttcggctgtgctgcggttacttggagtggcagggatatggttgaagagttcttggtgtgcggagtctagccacttggccgcgggtggtctgttggagctatcgcccgcagagacttcgatgggtttgacaaata

SEQ ID NO: 61959 - DNA, 436 bp, Zea Mays
cctcaaaaaaagagatcattgtgctcaagctggacttcgaaaaggcttttgacactgttgaccatgaactgattattcaggttttgtctcacaaaggcttcggtcctagatggatcaactgggttcggagcatccttctttctggcacgtcttcggtgttactcaatggtgttcctggtaagccctttcattgcaagagaggtgttagacagggtgatcctctttcgcctctgttgtttgtcttggcagctgaccttcttcagagcattattaataaagctaggctgtggaatcttcttaagctccctttaccggatattggtgaccaggatttcccgattgtttagtatgctgatgacactcttttaattttggaggcctgccctaagcaacttttcttcctcaaggcaatcctcaactcttttgcttcttctac

SEQ ID NO: 61960 - DNA, 1150 bp, Zea Mays
tagctctccaactttactgcagagcatggagtatgttaccatagggatttgtgagcaaatcgagcctaaatattgattgccaggccaactgaatgagttagcctatggtacagtaacctgcttgggttcagaacacttcaccgtcgtcgatcactcctccgccgcgattcgtgtcgccggcgttaggattcgcgctcggggtgggtggataacgtcacgagatgaaagatctttgtcgtcggtgagatggaggtcactccggtgactcaccatcaccttctcctttctgttttgcggctgagcagataagctcgctggggaaccaccgtcgcacgaccttgcaccacgtatccgagtacctccaccacatcaccgtgattcgttttagcttcccgtcgatcaccggagtagtcgccacgacggttgccacgagttcacttgcaccagtaacctttcccctctccggccgccaccgcgccatcatcaattcaagcgccactgcccctggaatctataaattgagcccaccgttagctccgcaacctcatcacgcaccacaccgtctagtatcgctcccaatcttgcaaccgtgagctccaatttcaagttttccccaattctgttctgaaacaccacagggtcgagctcaccgtggccagtcctccacaggtttaatcataccatccttgttcttgttttagcatctctgtgtgctggtgatgctcaccaactcacccaattaagctaagatcctatgaatcaccgggaacgtgtagattgttagttcatccgcgcgctcaccgtggccagagacattggtgtagttgtttatgaaattaacttggggaaaaccttcactcggccctgaatttggtttagaccaacgtagagcgccagtacttgccccaatcggccgacctacgtgctcgccggagctcgaccgcgcgcgatgccgtcgtggatcaagcagtgtaaagaaatagaaacttagggtcctttctgcagttgtcagtgacgtgctaaatagtgcttcggtcccgcttccgattattcattaagcctagggcccttctgctagattgccatgcaggcgcgcgcacgagcgcacttctgctgtggttgggccgtcctggactaaatcaggcccagt

SEQ ID NO: 61961 - DNA, 390 bp, Zea Mays
ggaacttaaacttatctgtatgttatttgtccttactgtgtgtagcgtcattaacttccccttggtacttggcccctctgggaggtaggctcgacgtgtcaaggctggataccagtataccaaagataaaattgatggtccggcccccaggacctggacctgcacacagctccggctttgaagtgttaggagcacacccatagtacccatcatctggtatcagccatcctttgattcatgcaacaggacctgtaggacttagactgggaagccaagccgtatgctcagacccacaggatcacagttccaaatactagggtgcccgttggagagtggtggagcgtgcaggcttagggtatggaaccatgctaagcagttaaacaacttcgg

SEQ ID NO: 61962 - DNA, 442 bp, Zea Mays
ctcgacttagggtgaccactataccctactaacggagcaatcggcttaagtcggcgacgacttaagacggtgaaacatgctcacgctcaagcgacttagggtgaccactataccctactaacggagcaatcggcttaagtcggcgacgacttaagacagtgaaacatgctcacgctcactcgacttagggtgaccactataccctactaacggagcaatcggttaagtcagcgacgacttaagtcggtgcaacatgctcgcactgactcggcttaggggaaccactataccctactaacggggcaattgactcaagtcggcaatgacttaagtcaacacgatacgatcacatctacctatcttagggcgaccactataccttaccagccaggagattggcttaagtcaggaaaagttttaaaaccagcacgccacatttact

SEQ ID NO: 61963 - DNA, 344 bp, Zea Mays
cagccggcgctacatagccagcggggagagtagtggtgttccttctccagctttgtctgctctcgttggtctgcaagaattgtctatgacaaactttgattagactctcgaagacatggtcccagaagatctgttgtcagagccggcagatggtggaatgatggaagtttgcgctgatgtgcctgatgccgggttagagttatcccgagcagcatctcatgcttcgtcgaccttggagcgcggtcttaagagccgagaggctgatctggattgctccgttcccatggaagttgttgaaggtccttcagccttagaggtggctgccacagagagctcggtcctca

SEQ ID NO: 61964 - DNA, 593 bp, Zea Mays
tgtgtggagcatgtggatgcatggttgaggcacttgtcatgagctttggctttcttctcttgatgtttgatcatgcctttcttggggagcttagcattcttttgaagggggtttatgcatgctacggttgtccccttctcaagcttcttcaccatgttatcacggttatcgtgaaaaggttgagcatgacaatttcccttcaaaagagttaagctccttcttatcctttcaacttcttccttgatctctttattttcttgtctgatagaaatatcactaattcctaaaatttctagctcaatggaagattggcttgcttgataacaacaattgttagcacatggtaatatagtttcaatttcaacacatgtgcacatgtgaggttggtatgatttcaaattagtaaacataatctcatgagccatttctaacatgatatgtgaatccataaatttattatgagagcacacaagcatatcgtgtttttcttgcaaagatagattttcaatatttagcttttctatcgtgttcttgagcatagtattttctttttctaattgagcaacacatgataaagcatttgaagtactagt

SEQ ID NO: 61965 - DNA, 339 bp, Zea Mays
agagcgatagctgaccactggtgtcttcatgtctttgcgataagcaaaattatagcagccgaagttctcatgcagtccgtcttccctagccttcgtctgataatgaagttcaagtactcggtagaaggcttcggtgagaggctccaccccttgacttctaagagcccagatatatacgttgagcctaacaatggcgttaggggtcagctgatgaaggtaaatctcaaaattttccaagacatctgcaatcatcctgtgcagaggaaatctcaaccctgctttgaagaagctcttaaaaaccaccacttcatcattttctggtttcgggatagtctcttc

SEQ ID NO: 61966 - DNA, 4461 bp, Zea Mays
ggcgggagcagctgcggtgaactccgtggtcccagaggtcgccgccgtggggctgcacaattacgtcgcgggccacgacgaccccaccaacctggacaacggcgaggtggaggcaatcgcgaagaagtgagtagctctcgtgtcttgttgcagcattgagtttattggtgaaatggttcgagctactgctgtgttgcctcctggtagtcttgttgcagcattgacgttattcttatatttggtagtgagctacctggatccaatgaagtgccccttagttgaggtttttattttgctcatgaactaaatattagtacttgcagacataatatagtactgtgattagctcagccttttattgtgatacgcacttgtctccccactccatttccaataattcttgcacgcttgtttatttggttcccccatagtcccattgattgttggaatgcaagtaaattttggtttagctagttacatgtatgttaaaagaagttatatacaatttccatatttgtaagtttttttttggtttcttgggaatctaaattgcataatcagttcccgttatctcttttggaggctaattattgatgttgctgttgctcctcttcatatattcttataatgtgcaattttaattttagatatggagttagcacacaggatgacgccttcaaagcagagctctgtgacttgtatgccaggtgtgcttctcggtgctcttgttttttccccagctggcacatgtgcttgtgtgcattaagttttcttaaattcttaaggtgtcacctcacctcacgctttagtcgcttataagcgtaaggtggtagtaaatctcaatcgccccgcttcgtcctaccaacttgataaccatgggcataactagtgttgtgctactcactactcactacctgttgccccctgcatactacactagttggaggcacgaaggtttctgcaaacaattgcaggaaaaaggaataaccataatcctctagatgtaatcatactattgactatatattaagaagcaattggtctctgtttttttaatctatattaagggacccaggcaagcaaataaattattgctattaggcgcagtcagccggccactcagtttatttggtgttttgggtttgtatatttggtgagcaaaatttcagttttctgaatagaaaacccagagtttttgcctcaaaccagaacatacactttgttgttcggtgtcttcttgtgtttactgaagaaacggcatggtaaccagggacagatcgcaaggggtaggaacagtggctagtttggcggacttcatcaccacggctggcagcttgccgagccacgatgaccgaggtagtcctgccgaactccagggagacttcattcctcgatgatctcctaatacaaactagggtctgcctttatagtatgaggcagccacaaaaataggaactgaataacttattttggaagtaaactaatgcatatctccctagaataaaactttccaactaactcgatttctagccacgttgttggtcactttcctgttttccgcctgctgccccttgattactttcctgtcttgcgcctgctacttcttgggctggatcctggcgccgacgcttttgatattggcagcccacaaaagcgtcagtaacagcttgtcattgtcagtgcactacaatgttatcaagtcatctagttgatcttagtcgccatgggaccaaccaggtgactagttggtcctagtcgtcctatatatatcaggactaaactaatataccaaatatgtactgatgtactatatgtctggagtataaatcaagcaggaagataactctagggtggtggctgcatgtaggcctgcaaattgggttaaacaatacgggccttagtgaattatgctatcccagttgcagcctatgtcctaagctgtttggcaattccattatgtttctggtcatccacctcttagtcagatgactaatcggatgacaagaaaactacttgacctaaatgagtcgtagcccctagtcaagtccaggatactgattgggatgactaatcggatgggttgataacactggtgcactagctgaggctagcataccagtgagtggtggttgtcaagtcatgcgctcgtcacggccacctgcatgtccatgtgccatcatgcccatgttgtggcagctagctttcttgtttgcctgggtcagttaggggaaggagcggggagggataagtggatagtaacacaatgtggggtcagctggtccggttagggaacaaactgttgttctctgtacagggcaattcacatgcctagtgagctacctactaacgaaccatcaatccaacatattcctcataaattgccttctgtggccagagctaatatgcacaacacaagcaaataccaagcttgtttggtggtgttggttgtggaatttgtatttgtgcatttgggtggtgtctccaacttttaatgacagcctttcagtttcgtggatggatgtcaacaatcttgcctgggtacaactgaactcatgtatacaatactcatgtagtcatgtattagcatctagatcagatgggcagttatttggtcatccttttcctgaccatgcttttatgcaggtatctttactcagtacttcctccaggagatgaagatctcaaaggtacagaggttcaggcaattataaaatttaaaagtgctcttgggcttgatgatgtagatgctgctaacatgcacatggaggtattgcctcccgatctatctcctatgctcttattgttttcgtctttgtttcccacattctctatgttttatgccaataaggtacattttcctctttgattgttgtactagattggtagacgcatatacagagagaggttggaaacgagtgatcgtgatgctgacatggaacaaagacgggcaagtgtctatgctttgatatatgaatgagatgtttggaacttcctgttggcccatgttataaccatgtcgaattttttgcaggcatttcagaagttaatttatgtgtccaatcttgtctttggagatgcatctgtattcctacttccttggaaacgtctgtttggggtgactgattctcaggtaattaattataaaaatgcttgttaattttttgcatgccttctctcagttttatgctttgatctcacagagttatttgttctgtattttgaagttcagttcgttttttctggcaacgttgctctttgcatagttgttatgctgcttttgatgcagttgatatttcgaagagtttggacaaatgttcatcaagtgttaatgccactactcacagtccaaataagaatgtctttctttacttaccatggtattaagtatcatttgacattatgtttctagattgacattgctatgagggaaaatgccaagaatttatactcggtgcagctcaagtctattggaagaggtaatgctagaacacagttttgtttaggtgttagttcaattataaagtcatagtgtcatattattcataagttttgctttatcaagtaaatcatatagtgtgctgtaaagacagcaatatcaattttgttgttgttatatttattgtttgatatatctcttattgcatctcaagaacattctgaaatcacaaaatgctctcggtttaggtcttgacataggcacactcattgaagtaaggagagcacaacttgcatataaactttctgatgaggtaactcttttctcaactctgttgctgcttatttgttttttcttcatttgggatgaaatctacatcagtacttatagaacaatgtcattttatatccatgctatgatgcatatacactagctgagagtttagacaaaaataaaaggtcaattatcattggtgcttggaaaagataatagagtcaatgtaagcatgtttttgtttttaagtgacattctaaatttcttgcagattgctgctgagatgttccgtgagcacgcgaagcagctagttcaagaaaacatttcatcagcattagacatcttgaagtcacgtattccgtatggaacctacttaccctttgagaagcatgctaccagatttaattattagatgttgtgcatagaaacctgagtgatgttctaagctagatagcctgtggttcgaaggaaataacatagccagttttctaaatccggatatattggcttgcaattttgtagatatttcgttatataatggagaaaaatatatcttataagtagcaatgggtaataatccatcttttacccatgtttaaaacacgagacgatccatcattcatctatgtgccaacctttctcacacatggccctgccatattacgttcgcagcattgtcttgtctatcataagcaacaccataacattatcaaatctgaattttaggtctgctcatataaactatcaggtag

SEQ ID NO: 61967 - DNA, 606 bp, Zea Mays
ggtacatgcaaactgccaaggaaggatacacggtatacaacagagtcacgagagggagccaagtagggatggcaaaatttggaaattcatatatgctctcccaaaagtgatcaatggaatatatgctctcccaagagtattctctatcgctccccatgaaatccgacctaatcaacttggaaagttcagtagaccaatttttttctccagatttccaaaccaattcgttttctcgtcgcttttttatgcggggaacttaaaaaacatgtttgagttatatactactagcccctctatatgttttagagagatcacgatcgatcgatatatccaacattcaacagatcaaaaatacatctgttagctttttttaatccttttctctctctatcttgctgttcgtcacgtctaccacatcaaaatttggcgtacggtgttctagatgatgttgtcgatcctataactacctccgtaccggtctctctatatcaatttgagctacggtctttattgtatttaggatcatgtgtcgaccaagagtgtattagctacgtacacgcgtgatccgacatgcatcaacgggtatcaagctgacgtaaggcttca

SEQ ID NO: 61968 - DNA, 284 bp, Zea Mays
acgcaccatcaataagggcacactccatcaattcaaggattgctctttttattaccaaaaaggagacatctccatcgccgaatacattagcaagatgcactccttgtgtgacgagctagcatccaccagcaagctaatcgacgatgacgaattgatctccaacatccccatcgacctcgactacaagtgcaacctagtcgtcaccacacttgcaaaggatcatctcaccatcaacgaggtgtattcacaactagtcagctttgagaaatgcatggaacccccac

SEQ ID NO: 61969 - DNA, 703 bp, Zea Mays
cttacattttgcctcagggaccaacctaaaaagggaacaattcaatcaataaagatgaatcaaggggagaaaactcactgcctatctgtccctgaaattgaattcagagaacaaccatacacctaaacctgatattttcagtacaattttctcacaactttcacacaatgactcaacatacttccttactaggaactattccactgccttcattcccaatctttcctttaatgattgctaactaaagctccacaaactctgtgttagcaagctccaaagtcgaccaacagagtactgaaactgggtttcagctaactgcaccaaatttagcacacatttgtctgacagagagttttgcagtatcattatccccccaattctacataacagcaataccaatgcttcacataaatcttgttcactacaccgtgttgtctaactttgctacaacaaatttagtccagcaccacatggattgatcacacaagtaccccaaactgaggattattcaggcggctggttggccgtctatacgaatgccgcctgggccgccggcgcaacggagcacgtcatgacaacgtacctacccatcattctcgagcaggatgcactacagtggctccgacatattcctcgccattgcatcgacaattgggctgacttctgccaccggtttgtcgctaatttccaatccctttccgac

SEQ ID NO: 61970 - DNA, 602 bp, Zea Mays
attccggtgatcaacagagagtcacaatgggtcacggcgatgcggtggaggtgctcaggcacgtggcacaaggccggaaggtggcagtcaccagcgaggttatccggagtgaccgtggtgagtgcggtacggtggccagatttgtttactagccggagttatccacgacgaggacccttactcgatcccaagcgctatccacatgatccgagcacgaatcgcggcgacaacggcacgaatcgcgcgtggctcgtcggcggcgagggttgagctgtcgatctgatcttattcagatcactgtaccatgacattcttcttcagtcgacctgacaaagcgatttgaagctaaattttctcccgattttacttggcaacctatccaaggctctacagcaaagcatagtccaacataccatcttcatctttgttatagtatcccaagacaaatgcttactgaatcatgcttagaatcaagctcaaagtttgcttgaacccactgtcagaccaaattcaggcttcaaacagcctgaaaacctaactttgggtgtatttatctccaaattcctcataacaaccatgcttactcccttaagcaaagttat

SEQ ID NO: 61971 - DNA, 683 bp, Zea Mays
gcggaacgtctttgcagcctgcaggaggcaaagtgatcgagcaggaccatggaatcacagtgaacaaagacgactgccggatcggagtggtcctctcgtctgatctcccgcggttttttgcaccacaaagcaatgtgagtatgtgggtttcggaataaagtgaaaggtggatagataggatagtacccttcgatgaaagctggaatggggaagactgagagagcatgtgtaaaaccgggtttgctcaaatcaaatgttaatataggtacaagtcatttgaatcactggacttggcaatgctgtctcatttaggccctaaatttggcatgttatgtcacttgggtctccaaactttgattagtgtgctctaacgtgacacgtcatgtcggtatccggtttgaacaaactcgttttttgacggctcgttttgttggttttctgagttcggtgagtggtatgatgtgccaggtttaaggaccactaccgattacaaattacgcacattgcattctgagttcagggagtggcacgtctatacatattgttcttcattgtcattcacacattgcatacataaataaccgttattattacccatgttggtttcataaggaggacatagcttgatgtagaccaacataagcaatgcctttgtcaggtttgagaactatcagatgtttgct

SEQ ID NO: 61972 - DNA, 345 bp, Zea Mays
agaacttcggctgctacaactttgcttatcgcaaagacatgaagacaccggtggtcagctatcgcactaaatggccgaccgattggaaatctgaatggttttatgttaaaattgatgagaaaaaggagaagctagtgcagagcccgctggagttaaccttcgggctgactagacctcagtgcaacatgacgccgggggcaccatgcccagatgctgtgtatgagtttagagttgtatctgaacacattggaactagggatttagttcaagaatacctggccaaccgagtatttccaacgctgagggaatggggtatgccaaagcttgaaggaaagaaaaagaaac

SEQ ID NO: 61973 - DNA, 1028 bp, Zea Mays
catacgtcagggattctattggcccgcaatcatatgcacgaccaaccaagtaacccgagtgtgcaaagcatgccagaaattctcgccccgaacaagcgctccttcgcaattcaccaagctcatcgcccacacctggccacctcagcggtgggggctcgatgttgtcgggccacttcccatagcccaaggcaacctcaaattcaccttcatcactgttgaatacttcaccaagtggatcgagactagggtcgtatccacaataacatccaagacgacacaaaattttttctggcattatatcatatgtcggttcggagtcccatccgaattaacagtcgataacggcaagccgttcgacaaccaagacttccgagaattttgcaactccatcggcacgaaggcagtgttcgtctccgtctaacacccacaatccaacagagtagttgagcgcgccaacgacaagattttcagcgcaatcaagaaaaggctacaagacgacaaaaagggcaaatgggcggaccaactacccgaagtcatatgggcattaaacacaacagaatccagagcgactaggttcacacctttccgcttgatgtacggatccgaagcaatgacatcgcaagagctaaagcacggatccccacgagaagccccatagccacccctgacatcgacgaaccaacctctaaagacctcatagacggagactgtgtccttgctttagaggcactgagcaaataccaagcacagactaaggcatggggcaacagcactgtcatcccaagagagttcaaagaaggagacttagtactcaccagaaccaaaagaatagagtctcggggcaagcttgaacccaagtggaagcggccaaaacatccccgaatgcttacaggctcacctcaccatccggcaaagacttagagcattcgtggaacgtggataacctacgcaaattatttgtctagtcccaaggcctgagcgcctttgtaattcttataaaaaatgtcaatcaggcccacactcttttc

SEQ ID NO: 61974 - DNA, 765 bp, Zea Mays
tgcgcccatatcgcgttttaaaaaaaggcctccagcccgcagccgagccagaggctcatcttcagccaccgtctctgccagctctctctgctctctgtttcctggcgattccctctcctccccgccggcgatctccagccaccggcggccaccgtcttcctgtgctccggcgacctggtgctcttcttccccctcggtgaggagcctcgttttctcccctgcctctctatctctctgtctcttagacagtcttttaaattcttgtcgaatccagtgaatcccaacggtggaatgtgttcaattgtctccattatgaatccctgcaggatcctagctccttcgggagggttttcccacctcaaatagccgtttcaccgaaaccctaattccccgcacgccacatgctcggtgaaatgcccaaaccagccaaaaatgctccaattgaacccaaatttttcaggcaccttcacaacacttccagtaacctacttgccaaatttcacgccaatccgagattccaggcttaaatttcaccaaatttcccgtttagagcgatcgtttccaagccgagtgcccaaattcctttttcttcgcctaaattcaaaccaagcacacacttcactcatattcacctatataaacctattcgtgaagtatcggctcaattccatatcgtctcgtgcctcaattcgaattccaaacatcctatgacactatttatccgtcaaacgtcgttttcacgtcatttgtcttcctgatcgtctc

SEQ ID NO: 61975 - DNA, 429 bp, Zea Mays
gtcgataccgacttgtctaattctaatagtggttggttcggctagtcggttggtgggtctatcaactggtcagttaagtcggtaccgatcatgttatagccagattgatcggtaccgaccgatgtattggatggtcgcggtgaatgctgtgtgaaccagatggccaatcagtgccacatgcagcggagggtgccaccccacacgaccacagaagctcaacttgtggttaggctaggtttaacgctggtcgataacgactgttaacacgattcgattggtggttggtaacgactactgatagagcccgacggacaatcgacaccgattgtgccaaccccaacgtcgtccacttcgatcgatcggtcgataggcatatcgactagtcggtaccaatccatgtgctagacaatctggtcggtaccgacctgg

SEQ ID NO: 61976 - DNA, 319 bp, Zea Mays
ctaagatcatgatacattttgttgctaccagggtgcagggagaatttggaaaggtgagcttcatccagtatcttctttctgagctcagggtccttgggaacaaccaatcaatctccaaaccatagaattcccttgctgtcctgacggaagcacgtgtatttctctgccttctgtttgatcatttctttgataacctgaacacccttatcctcaatctgtgccctaactatttgctcttgcaatgtgggctctaccgagatataacttaaggcacctaaagaaacgacttccaggttcaacttgcacaactcatcacaca

SEQ ID NO: 61977 - DNA, 501 bp, Zea Mays
tgcgtctaggaagcccctcatgctcggtagcagcaacgacatgggatcatcgagaggggagtggggagctaggtgaacgtgtggtggaggcgtgcgctcgaccgcggcgacggtatgggatcatctggaggggagtgggaagctaggtgagcgcctatgggaggcgtggttttctcggccttcgaagaaccggagaaggttgggaggcaacatggacaggcgtgcgctcaacagcggcgaaggtatggggtcgtctggaggggagtggggagctaggtgagcatgtgagagaggcatggttttctcggcctttggagagtcgaagaaggttgggaggcggcgtgagcagttgggatcgagaaaaaaatcgagggacagaggaggcttcgagcggagatgtgggcaataggatggacgatgtagattaacggtagacagattttaaaatgggcatatcatataactttgattccttttgaataatttattttataaaacaac

SEQ ID NO: 61978 - DNA, 534 bp, Zea Mays
aattaaataagttcttagtattatttttatacataataatcaattttcggattaaatctagatttataccagattagtggaccgcggccataaatttagaagagtgcagggtgtaaactgtaaattccagggaccccagtacaagagctttcccacggctaggatggcgggttgatttgagcaaaggccaggggttcttttacaattaggctacaacgaaggggtatcgttgatctctgaccgcacgattttaaatcgacggtcccgattaaaagaaccattcaccgaaccggtacactacaggggcccttagatgccgatccaacgtttcctattttaaataccaatgctccagccacagccgttggatagcagatcgatggtcaagcccgagctagtatgggatgatcacatcacacacgttgatgggttgatcaacggcttggatcgacacgaggcgaaacggtatcgttggacctaatcgggactgtccgtcaacgatccgacggccaggggccatcacctacctccgac

SEQ ID NO: 61979 - DNA, 785 bp, Zea Mays
gcggagcagtggctccgacgagcctgtactggccggataacacaacgatcagcgctcaggtatgatcgacacctaattcaacccctaacgaccattacccctcaattaattgcaaagttctagctcctaatctctcggtccacggtgatggcgcgaactacagatgaaccgaggcgttcctggcaatctaagggagtttagttaaattggctaggtcaatgagcatccttagcacaccagggtgcagtaacaagagcgatgagggtgtgaacggacctgtagagagctggccacagcgagctcacacacggcggggttcttgactgatttgggggaaatcccaaattggggagctatgggggacaattggaggtgagggctggttcactgggtgcacgattacttagcggagcaggctggggcaccaatttatagtgtccaagggcggtggctcctaattttggcatggtgtgctagcggctggagagaaagaaggtcactggtggctcagtcgtggcgttcaccggtgcagcggttctgagatggtaagcctaggcttgccacagttactactgcgcagtaaagagccacggcgtggcataattggggtcgccggagttccacgacgacaccgacggtccggccacgtcgcacggctacaggcgcggttgataagcttcaccccgcgaccaaatccgctccccctccgatcttttcaccccccggtactatcctgcccgagtcctacacaaatcaccgcgatcagcgcgaatccttgcgcagag

SEQ ID NO: 61980 - DNA, 546 bp, Zea Mays
atgtagctaaattaaaatttagggcccaactatggggctcatggtgggagttgctctaagtgaggtgttttgcgctcaaatattaatctccccagcttgtgcccattgcagtggtggagctcaagtccgaccagtctgggcacgtaggagtagtacgccaatcagaaggtgtacaagtttatgtgtttgttgcgccacaagaattgatgacagcatgagttgtatacggctattgcgacgggaggcaaagtgctgaacagagaaggcacgccagtaagatagaacgctcaggcaagtcaaacaatttatgctgtagcttgatcagagttgtgtcagccacccatgacccaccctcaccgccgctgctcatacatatcgtgtgtgtgggctctctaaactttctcggcccatccacggccccaatgccatcataagcatcatttgcatgcatttcgtttgaatgagcacttgcaagtttgaatcatgttttaatagcatattgtaaaataaccttaagttttataatgtgttgtgctatgttttgtt

SEQ ID NO: 61981 - DNA, 520 bp, Zea Mays
agtggcgcatgtgtaatcatgttgttgcgcccggacgtgaccactgtcttgttgccactatgctcttgtgcctctacgtggggtaggtatgcgcattaaatgcgagtgtccccgctggccttcgggtgcgccttgtcctcttcgcttgagatgggctcgggcgagacagatatggtcgattgtagagcgaggtgacctcgggcgaggcaaaaacaggagatatgagttgcgagaggctcgagcgagacgaagacttgccttaggcggtgattttggagggcctggaaccggggctcggttaggatggcacttttatgggaagacccctacggtgggcctcagatgaggaggtgacttggcctcttaccttcgaggattatgtctgggaaagtaacctttcataagcgcatttttagagttgtaatctaggtacccctaattatcacacccaacagtagcccccgagccttccaaggaattactttggtacttgcatggaggctctgccactttctgtgtg

SEQ ID NO: 61982 - DNA, 372 bp, Zea Mays
tccaagagcaataagagaccataattgtgctaaaacaaggagcaattggggaaattactaacccgagaatgctgaccacggaagagttccttacggcggagcaagaacagaggagagagggatttgtgggttcgtcggtgaaattgagccgagtgctcgatcgcggaggtgcgggatgtgataaagaagtgcaacccgggcgcaatttataggccaacgaccggaattggatgaggaccgcggaccttagattgtgcaggcgagctcaccgcgcggcggaacccggtgatggcacggtggccgccgtttaaccggagcctgccacctcagtgatttgctgccacgttgccgaggatatttaccgcggccgcc

SEQ ID NO: 61983 - DNA, 751 bp, Zea Mays
attttataagcttttatactgggaactctattttatagaagctcggggtctaaattgccaaaattagggcccgattgtaatttttgttgaaccgaagtggactgcgagttggttctctgaaaccccagggacttctagccaaaatttacatgacgaaggggtacctttcaatgctagccgcccgatgaacgatcgaggacaaatattagaccgaggttgtattcgaaccggtacacgccttatgccgcacgatctagatccagcggcccaaattagatcccacacgatgtgaaccaatacccaacctccgccttctgatgccaatctaacgggtcaggatcaaaacgacgaagtgttatcctctgtgtctaatccccgtcgcacgtgcgtggatcaacgtcccatgttcctcaccatgaacctatcggtttcctccctgatctcggccgttagtaggccatgcaacggctagcggtcaccaccctcctcccgctataccgagacggcatcgccaccctcccaagcacggtggaggactcatcggaatcgctcccaatgcatcccggtgccctgatcgttgacctaacatgcgacgaagatagaggggcagatggcgaacacatgaggtttcattgtacctgtagtcgtgcaactgagaccctctctccatggcgagtttgaggtttcgcgcggtggagggctctgacgagtgattcaacaagcgacgaacactcatggcccccaattccct

SEQ ID NO: 61984 - DNA, 734 bp, Zea Mays
ctgggaagcgaggggtatttatagatacactgcccaacgttgccgaggggcaagcggcctgattggctcgcatgcagacaatgcaagctctaaataattgagctgttactggtaggttaggcacacgttgcttgtcatatccatgcatgcattgacttcactggctaaaaaaaagggccactattgaacaaataatcactacgcttcgtggctgtgtttgctgattgatcgagcatcctagtgagtaagctaaggtgacaaaaggaaccactcaccagcagctagcgcgtggtttgagtgagtaattattagggtactccaatcagtggcaactaaacctctcctccccaacaagcctatatacgtgctgttagtttttaagtgatcttgtctctgtacgtacttacgtgccttgttgactatatattggttctaccctcgttgcatttgatattttggtgtttggaagttagaaaggatcacaccatatccactagcgatcctacctgaatgggcgtaagagtattattgcgctggatccatgtgcaaccttagttgctggcaaaatggatggttgaccgtgcaatcatttatcagatcagctgtgcaaagcaagccgtgacggttttttttaaatcagcgggatatatatagtcaaatacagttttgcgttctgacgagaacatcactaccatacaaacaatgtgagaatcgataacacgagcacatgcacg

SEQ ID NO: 61985 - DNA, 638 bp, Zea Mays
aagccatcaaatcctagggaaaagccgagcggtggcgagctacaagctgacacaacaatttggcatccaaaataagagtgctacccctgacaagttgtcggtaggcaacgataggtaactcgccccaatgcaaaatggacagtgccaaaaaattacaatacaacaagaacaacacactgacattgttagaccagctaagccaagaatgtgcccactccaaacagaatctgagggttaaggttagcttgccctaggatagatcaatgggactatgtcgccaaatcaaatcccaagcaagttggatcagatatctttatgcacggagagtaggtggatctcgcatccatgagccatatgtcccaaagttcactaggatggccagtttccaaggccaaatcattcatgctcataccttttctcccttagaacgtcccacagattcaaaaagatctatgccaattaaatagcatgatgacctactcgaccttatatacaagagaagagttgcaacctctggagaacaagaggcgtggacatgtgtgaactcttgaagatgtttagaatgaactcttgtagtcttgtacgacactgtttgagtaagcacttctgcatttttacgcacggtcaggataacattt

SEQ ID NO: 61986 - DNA, 443 bp, Zea Mays
gacggtccgggccaatgtccggacagtccgtgcatgacctttttgaggaggattgttacctgaatcctcacccgtcccagcaacacttcccaccacactatgcaatgcatcagcccattaattcaaaatccagagcccaggaaagctttctggccccacctagaaggccggaaaggaacgatcaaacctatgagccatatagggcgaatggcaatgcaccacgtaactcaaaccaatgggggggaaagacaacatgctaatatccagccaaccccacctatgtttggccagagagccggtggtctcgcaccggctgccattgatatagtgagggaggaaatagccggggcgttccgagataagctcggagtaagcatggtacctgggggacaatcatataggaaaccgtatgacagccgatttgatcaccacccctaccccta

SEQ ID NO: 61987 - DNA, 737 bp, Zea Mays
ggggggagtattgctgggaatggctcgtcggagtccaacaaccacgccatgccgctgttcaccgcggacagatctcctatacgcgccaccctcggtgattgttgacttccccatttcaatttgcttagcgctacatgttgcaaccgattgaatggaggataggacgttagagcaggtgatcatggtgcccggcgatggcactgccatgtggtgcgtatgcgccgttgttctgggaagccgagaggaggctgatgggttcgctaccgttgatccatggggatgcggctaggattgaatcgggtcgaaacgagatatgggctgtctatctcgtttggtcggtcaggattataacgtaggtacccctttgatccattaaaatacgaccgtcaccttttgatcgggtggtgcgagatcgatcctggtcgtgaatgagttatagacgttgatcggagatcctaccactccggttgcatacctgttagaattaatgggagtctaatctcgtccatccgaactcgatcgggtggccctggttactctgtaccgctttgaccttgcacataagtataaaagtccctcggaaattatagattcaactcacagtcctgcgtgggacaccctgagtctggggacttctcgcgctttagctcctgaactctctgcaaatcatgcgcgcagtccaggcctctaggaaaacagagaaattcatttagagaaaggtttttaatgcaaaatta

SEQ ID NO: 61988 - DNA, 538 bp, Zea Mays
agaaaatttcaggatttgaattttcgggatgctacaataattcatctcctaaatcatgtgtgcaggtaaccttcagagcaacatattggtgccacttctggtcccagcttcagcctagaagggaggaccaagagttaataaagtcttcatgtcgtaatgtggagagggtgctactatagttcttcagcaattttggatgggggtctgcgttgcgtgtaactatgtagtagctgtggttcggtagctgaagttctttggtttggctagtttgggttctctgatgtggtcataggaggagttttggcaatatgctaccgtctcttgtaataaatggtcgtaacctcatttgaggccaaggtcggatgatttttccattatcaaaaaaatgtggtttggggcatcttgctccctcctcttctgcctcttcctttgtagaatggtggcaagacatgagtggcaggatcatcaaggataaaaggaaatgccttaattgtgctatatttttggagcatggtgcctttggttacaaagaaacagg

SEQ ID NO: 61989 - DNA, 378 bp, Zea Mays
tgcatgtgcacttgatctagtcacgattgggggaaatggttagggttttctaaaccctaatgtgatatgtgcattcctttactctctttcttattatgttcttggtcgtggatctttgatccagagccttttatcggtctatgtgacacggatttattgatttgagttaggtaaccctaaccctaacctgtcgaattcatgttatcatggccagtctttgttggcttgatccatgaaatgtgggttaagcggtgaagattaagcagttcttctaacctttccgttcttgatatgatcttaatgttctcgggtgattaagcagtgaagattatcggatcttaatcactttgacccgagattttttttgtgatatcaaat

SEQ ID NO: 61990 - DNA, 566 bp, Zea Mays
ggcgagcgagcaaagcaaatggtccatggatccgccatgcacgcgtgcgtagtacgtacggtacatacgtcgccctgctccaagacctgctggatgtgtggcggcgtcgatagagagatgcatatccacgggccatggacgacgacgacgacagcaccagcggcggacgacggtccccagtcagtctagctagctggccggcgttggcaactactgagcgcatgcatgcacatcatatcacagcaatcatccgatggatccattatgcggaattgcggatcaggaggacgaggatcagaaccatgcatgcatactgtaactgtaacaaactgcgcatatcggagatcctccacctgcctgcccattaacagccctgctttgatctgaaccaatcacaactaatacaatgcttactagtagtggaacttttggcactggcaggcagcaacatctcacatctgggccggtgagaaggacgcgaacatgcatggtgatacggcggcaatgtcgacacgtttggctttgacagcaacgttgggtcgttaacagcacagctagctagcacc

SEQ ID NO: 61991 - DNA, 800 bp, Zea Mays
caaatccagatgtctagggaagataggaagcataccgcttttataacagtggatgggctttactgttatgtcgtaggccttacggtctgaaaaacgccttgccggcatttatgcgggcgatgagtaagactttcggggacctgattagggacaaggtggaggtgtacgtcgatgacatcatagtcaagactaagagagggtcaacccaagtggaagacttaaccctggtctttgacaagctgcgggcaacacgcacaaagctgaactcggacaagtgcgtctttggtgtctccgcaggaaagttgctgaggttcctagttttgcaccggggcattgaagtaaatctggagaagatcaaagcgattgaggcgatgaggcctccggcccgtatcaaggacatccagaagcttacggggtcattagccgcccttagccgcttcatttcaaggctggctaagagggcgctgtccttcttcaagctgttgcggaagtccggcccattctcttggactgaagaggcagaacaagcctttcaagagttgaagcagcacctggtgtccctatcaatactggtagctccagaacctggggagtcgttgtatttatacatcgtggcggctgcagaagcagtgagtatggtgctggtcgtcgaaaggatggcacaagaagaccaggaacctgagggctcgggaccggctacaggggtccggaccgttcagaggtcggtctactacgtcagcgaggtcctccatgaagcaaaggccaggtaccttgagacgcacaaacttctctatgttgtg

SEQ ID NO: 61992 - DNA, 1464 bp, Zea Mays
tgaagtttgagcctataccggtggttgtggtaaggcccacgcagctggagagtgacttgccgaagccactgaaactgtaggttgtgaaaatggctattgattgcccacatactctagaatgtatggggaataacatgaagtagtatgtaggacttgcttcgtctgattctgtcgtgcttcggcctcagctatctccttttgcttaggtcacgacggatgaagcaaaggcagcggcagcggagaaaatgtgtgagcttttacttgctcatgaaaatgccctcgctacgggacgttgcacggatgcccttctcccggaaaggagcaccgaacttcgagactctatctggttgtcgacatagtgtgcgttcatctctctcctccaccgtcgacaaagacacatctggttgattacctgtgggtgctgccagaccgtttggcactcgccatcgccgatgacatttgtcgagggggtggcatcgcccctggctggatggtctctcattttgatgagatcgacgacgacgttatcgtagagggctacgctgccggccggagcgatgaggaggtagacattatcgaagagtaggtccgcccccatgctcagtcgatcgcaagcctagttgatgtcaggtccctcctgatcggccctttgaccctagaacttcccgttggtggtccaactgctcctgtttagtcgatgcccctaggattcatgtattgaacctctccatggtgcattttgtgtatttgaaaacacatgtttccgtgtggacaatagtttcgatgcacatttccaactttgattgattttgggcaaacttacacgattgcgacttgcttagacggggaagtttctttccaaactccattgctgggaaaccctttcgtcttgtgcctgtgcctatgcctccctatccattgactcacgcatgtttggggacatcagtggtgcttggagtcatcttgtggcatgctccttgctccacgggcccagcggcgatagggccgaccatggttgcatcaacatcgcccgaactgatgcccctttaggattctgcaagcattgggatcagctcggaggcttggagctgactcgttcgcaggcatacacaaccttgaatgaagcagtggctgtgatgactctgcacggtcctgacatcttcagctttaggtatgtatagttgggtatggccatgaacttggcatagcatggtctcctgaggatggcattgtggcatcccgagaagtccaccacctcaaaatgtagtcgttcggtgcggaagttggtggggtcctcaaatatgatgggtagagtgatctgcccgagggggtaggcctgatggcctaggatgacgccatggaatggtgccgaactggagtgcagcgctgagcgcgcgatgcccaaactgtcgaaggctcgatctacatgatcttgagaccactaccccatccatcagcaactta

SEQ ID NO: 61993 - DNA, 685 bp, Zea Mays
agagggagtaagaaatatcacccagtggatgaattccgtccattgttcactccggtctccatgtccgcttagccccggccgcttcagatctaccctcgccgaagttagacacctcgcatccttgcgccacgtgcctcgacactttaaccacgccgccgtgactcatgttagcccatccggtgatcgctggtgagcttgccacagtaattgccaccaatcgcgtgcgccagtgcccctcctcctcttcggccgccgcacgtctccttcaaattcactggccaccactctggggacctataaattgagcacgccatgagctccgtagggtaattacccaaccaaagcaccagcacttgcctccaattgttcaccagagaccacaaattgctcatttcccccaaatcgggtttccgccactgtgaaaaggtcttcgtcgtggctagctcgatttcagctcagcactcctagatgccactgatgctcctcgacccattcaattaagctagactgccctagatcaccgggaacacccgtgctcatccgttgtttgcactgcctccgtggacatagtgatttagagcttgaactgtgaaattgatcgaggggaaacgctcgttaggtgttgaattaggtttcagccaagttagggcaccggccatttcttatcttggtcggtacatgttcg

SEQ ID NO: 61994 - DNA, 896 bp, Zea Mays
cccgcaggcctctgatgctctgccttagttcgctggcaagtgtcacaccgggccacatactgagctatctcctttttcatccctctccaccagtacctggtcttgaggtctaggtacatcttggtggtccctgggtggatagagtaggctgagttgtcagcttcatcgaggaggattcctcgtgcctctccctttgggatacacaaacggtccctgaaccaaagggtcccttcttcatctatcttgaggtctgggagttgttccctgcaagctctttctgcaagacttgctgtctcggtgtccaggcactgagccttgcgtatgaggtcttctagcgttggcctaatttctaggctaccactatctcccaaacaagcattcagttgagttgattctctcttccagtcttccaagaaatcggttgctttctccccaaaaggtttccggctgagggcgtctgctactacattggcctttctggggtggtagtggatctcaatgtcataatccttaatcaattccagccatcttcgctgacggagattgaggtctagctgagtgaaaatgtactttaggctcttgtggtctgtgaagatgtgacatttgttcccgatcaggtagtgtgtaacgccccgaattttgcagttgaatttttttcttttctttactcgccaaaattcgggcgttaccttttctttttcctttttcccttcgctaaaccttgaccttttccaaagttctagcgggattcggtttggatttcccgtgtaagaaaaaccctaaatattttatgttgtttgatgcaccatgccgaaccttgcatttcttttgattgctttgaaagcgcaattgcattcatgtagaaagatcggatttcgaaaatgaggagatctttt

SEQ ID NO: 61995 - DNA, 775 bp, Zea Mays
ctcgtccttttctgcagcaaacgcggatatcaaaccaaaatagttgagaggtggttgttgttgaggtagggataaatcaacgaacagatttctaccaagatcatgagggtaagaaagaaaagagagaaaccaagaagaggaaatcaccactaggaaatgctagggccaagcgagcagacgaccatgagggaagtgttgtgcgggatgctttatagcgtggctagaacaacagcacgcgttcgagaagatccagagtcagttctaccatgatccccaggccccaacaacacttgttcgtcaccgtcgtccccaaaccccaaaatacaagctgccgcgctcgctcctaccatccgtccagcccacgttcgtcgccatccaagaagaaggagcgaaaacagagaaaataaatcctagcaagaccaagaaggtgcggaagaggttggatttacctgacaaaatcgccggcggagtggtggcggcaaccagcgaaggaggggtggcggcgtgtccgaccgcagtggcggagttctataaattgtcgcctcgagccacttttaaaaagctctttaagatatcgtgtggctaaatataccgctaaaacataatatactacaaacatagactaaagtaatatttacctcaattcagcaccttaaaataccacaaaacttgataaaaagttaaaattacctaattaaagatgatctggtttcctcgcctctaatagcttcataaacatcagcacgtgaatttaaacctacacattgacattgca

SEQ ID NO: 61996 - DNA, 720 bp, Zea Mays
tagttttttcgagttcataaatttataggtccacatatagctactccactccatggatagcattgaggccagtgacaagaagagatatgtcttctagagttctagggccaaataaccggtatatacgtactacatacaacttcaccgtagaacctcctcgccgtcatatccccaaagtagtcgaagattatattggtggtcgataagttttgctggatcgctgctccatcatcgtcgatatcatggaaagggaagattcttcacgatgaaatgactccgaggaaaacgagggaaggaaggatgggtgtttcttttttatttgtaattttttgaagaaatagctagctccgatcgtcaagaaatggtatagttatttaaaagtacaaagtgagtaatgtagtacgcatcgagagagacgacgcgaggaatgaagacgacaggccggggagttttgtaatgggggcaaaaagctgtccccgcggccggttctactctatacacacagagatgggcctccctatgcaagttgctttctctggccacatttgcacgcagcggaaactatagatgttaactaatcgccccataatccaactctgccagcttcgcttttgtgctgtgtgtgctgtgggagaagagaagatgccaagaaccggagctgaagcagctagcgccccgcccgtccgtaaacaaatctggcggttttgtcgcctctgcgtg

SEQ ID NO: 61997 - DNA, 534 bp, Zea Mays
tttctctcttcggtcatggctctagtagtactagctgcccctgttgccggccgctagtgtctcagctgtcagatgcatggattcagacttcagtagtgctgcttctttgacgtcttttgccttcttaacagaacaggtgcccagaaacagaattaaaaaaatcgaagaaagtattgttttggcagttggactgttggtagctttacttgccagttaattgtacttgtgtagccgtttatttctgcctgtaaagcagtttttttgttcgttcactgtatccattgttccttttaaacattgaggagcacctttctgaggggttcgggttctgttaatagctttgtccttttgctgagaatacatgcaaaggatcagatattgagttcagttattgcttttgtactaatctgctagcccttatagttagttactcagaggattgaactgttgaaggcttcagaaaagtatgatttgttttgttctataagtcctttattacaatcgtttgactttgtactcatcagaaggccttcc

SEQ ID NO: 61998 - DNA, 426 bp, Zea Mays
aggagtgttcacaccgtttcggttcattaaactaggaccgctagatcgggatctaagggcattggttagatcgtagcaggaacactatggactgtcgatctttgatcgcccgatcagtatgggataccggttcatatttcgtgcagtctaatccgcaccatagactatcgatccaacggtccacaaaagcatataccccttcagccgcctattttgctaaaggtcccctcgagtttgaggatatcaactcgtagtcttcaattatataaagatcacaccagtaagtcctagattttgcaagatagcccatgcgcttctagaaaataatgcccacggtcgtgaggcgttggattttataaataaattctagaaaatgattactaagtattaaataaatatagaaacataggaaatccatattttcac

SEQ ID NO: 61999 - DNA, 546 bp, Zea Mays
agaatttaaaccttggtacaagcaagaatatgaaataggaaattgtaccaaatgaaagagacatgatttatcaaaggtataataaatgagcaatgtgtgcagtgtttcaatccatattgcgagagtcaagaacatttagttcacttctaagctcacaaaatcttttctcatctaagggtttggtgaaaatatcggctaacttttatgggtgctcacatggccaataacgatatcttcccattgtgagcgatctctcagaaagtgatattgaatgtccatgtgttaagtgtggtgtaagtaaaatcaacctcttgagggttttggtgatcaaataacaaaacaaataaaagttctaacaaagtttgcttcaagtgtgtactaagttattgcaaagtcataaggagtatagtgaatcatgtccatcaaaaaagaagcatacgacttggtggaatcatgcaatagctcaatgtgtttagatatatctctcatgattctaagcgatagtgattttaaatttcatataatttagttttagaaattatcata

SEQ ID NO: 62000 - DNA, 549 bp, Zea Mays
ttggcttctactgccagtgtcgtactgacaaccctactgtaggtatgatccaagcatgttgccatttttcgctgaagcctgtcataaagtcccctcataaaacaattatttttctttagatctgtattcacttggtcgatggcatactgagatagatggttgaacttattgagatactgcattacagtatctaccccttgctttaaccggatgaactcttcttgtttcatatggagcactccctctggaacataatgctctcggaatgctagcttgaattcctcccaggtgatctgatgcccagccggttggattgctgcaaaatttgcccactaagtactggcaggccctcttaactgttgcgcagtaaatagtggcttatgcgtctccgtgtagcaaatcagcccaaacttctgttccataactcttacccactcatcagcttctagaggttcttctgctttgatgaagagcgggggtcgagtctcagagaattccgaatatgtagtatcacacagtccttgaggaggagctctcccaccatgcagt

SEQ ID NO: 62001 - DNA, 411 bp, Zea Mays
aaaaaatgatattcctctctgagctccgtaacatccaaaccatggtcagacctgaatgggtattattaggtgacttcaacatgatcaggagagcaagagagaaaaacaaagggtcaatcaacagaagagtgatgaggcagtttaataacacaattgatgatctgcatctcttagagctagagctcactgatagagcattcacctggtcaaatgagcaacttaaccctaccatgactaagattgacagattcttcgggacaacagagtggcatgacgtgtacccttcggctgaccaacactccatgtgcactatgacgtcggactactgcctgctcctaatgcaaggccactcttcggttactttctaccatgggttcagattcgaatctttttggcctcagattgaggggt

SEQ ID NO: 62002 - DNA, 899 bp, Zea Mays
gagcgataccgtcacaacacgaaaatagagaatttccatatacaaaaatagttctacaatttttttagaacagtgcacggaaatttatcaatttttattagccacgacttagtcaacataaataacttattttctaccagcagggcaaaaactgactgaaattagtatttttttgtcgtcggtgtgtggttcgaggcaccaaaaattaagaatttttatggggcttctctccctatccaacaaaaaaatagtttttttacccaacagtacgtccctcacacatgcttttatgcctcttgccactctctctttgcacctcctcctccaccaccaccaccacctgtcctgcccgcgttttaccacctccactcacccacacttgcctcaattccactgtatgtgctaacctggtatgcgcccacctcgaccacttgtcctaggtcatctaatattatacaaacaaaataaaatcataatcgaataatggtatgtcctatggatgatcagatgtcgtggatgtgtagagctcgatgagacgattacgatcgaatattaacttgtcctgattggattctcaataagctgtttttggtgttgggaaatcaaagttattggatgttagacttgagcgagtattaacttgtccagattggatgttggtttctcgataagttgtttatgttgttgggaaattgaagttgttggatgttagacttgagtttttttcatctttcctcctagcagttatcgttttcttcccctacttatgcctcttcccacgcgcgcgtctctcttccaccgtgtgtccgtctatgttcctcacacacttctttctttctagtcatgccctctctccctcctacgccactcttcttctctattttctagccacacctaga

SEQ ID NO: 62003 - DNA, 702 bp, Zea Mays
gccaacctcatcatggcggaggtctcctacgggctaggagccttacaagggtaaggccaaatctcccgacggactgacactagcatcgccctcaaccaagtgtggttcacggccttaaagccgccatcggtctaggtggtcctctcttgagacccaaaactcgtatgagtggtgtttcaagggcacgctaagacctgcactgtccactacgatgccctgctgtcaggctctgctttgccgaggcttaactcgtcagtcatggcataatcccatggtgctcgtggtaggttgtgtcagcttgtagcctcacgctcgtgacgttcggtgcggtggtcaaccacctcccgcaagttctacctttgctatcgccaaggcaaagcaagctgctgcttacccttcgaacctaaaggaggagaacacggctacaccaaccttgccatggcgaggtagtctactggtcatgggaaatcctcataaaggctaaccatgtgctctgctaggggtcaaggcgagcaccgagacataacccgtcgccctcaagcctatgacactcaggacaggctgtgtcaagcggtaggctcgggcgcatggcatttagagtagctaccgactctctcccctaagcaccacctttgggcatcgccgaggagcaaaaggttgttactgttaagaactacgttaccacggatcaccagatccgcc

SEQ ID NO: 62004 - DNA, 298 bp, Zea Mays
ttgaacttatctcgtttctcgagatacaactgcgtacgggcttgggtaaccaagaaacagatgaaatggaaccatgggcggaactacttgagggaggcttcccgtgtgcacatgtgccccccactaacacaattcagttgtttgccgtttgatttttaccaccttttgtgcaccctagcggcaagaaagaggattgaaacaatcatgtaagacaaatgctgcatgcatgcatgccttcttctacatctatataagtgggtgcttgtattgtatgttcaagtttgtagcagaactgaag

SEQ ID NO: 62005 - DNA, 466 bp, Zea Mays
tcccggtccgagtgttgggcgtaggcagcgaagggcggtggtgaagcgtagggtgagtgaggtggagggtggtcgtcttcgtgtggccagggctggcaagcgagaattgttgtcctcgccggctggggtgagcgtaggtgagggggagttgcaaagtctttttgagggtcaggagctgagtataatgccgtttaactatagggagatgggtatcatcccgaaggttgaaccaatgtaatgtttgatgccctcggtgtacgtatgtaactataatttgtatgatggggttgtgtgccttcgctgatccggccgtgtccgtaggggacttgtgcacttggtctagcgcgtttattatgtcggtccgactgcacctgtaatcggtctttgcacggatagtcttttgagcgagacttcgattttgcgcacttgttgtgctagtccgactgcacccttaggcgacttttgc

SEQ ID NO: 62006 - DNA, 655 bp, Zea Mays
gatgcgatgaaatctgtgagggctttggctgttatcagccagttagaactgaggcttgaggtaatttgagattatgaggtgccttagccctgtgatgaattctttgaaaatactgagggctatggctatggctgtttcattgaaaaattggacctgaggcttgtggtaatttgagattataaggtttgttagccctgtgatgttttctttgaaaaaagtgaactgtatactacacttcttctttttatgctaaaaaaatactgagggctttggctgtttcagcctgtttgatgatgttccattgattactgagggctttggctgtttcagcctgtttgatgatgtttcatgatgtgccatgtttgcaaaattctccagttcagttattcatatggctgttttcagtctgtttgatggtaatgtttggtgaccctgaacccttaaccctctgatcactttggcagtatcactggtatggatatttttgtggcctatttgctggtaatcttgtggcatgttttcagttgccctatgatgttttttggaatctttagaactgcctagtacatatgatgatttttttaataaactgagggcatattctgatcttacttcatattccactacatgctcatatggcttaccatattctgat

SEQ ID NO: 62007 - DNA, 605 bp, Zea Mays
gatcgataaggcgcttggccacgagtgagagcaacctctgctacgacacctcctccatgttagggttcaggctgatcacattctttagcagtagcatgttacctggacacactcacacatcggtgtcatgaacatcatggacgaccacgtggcacgcaccttgagagccgaacgtggagggagcttacatatggcgagaaggtagggcccgttgtcattctgataggagatggacgtgcgtcgtccgatgaagtcagtagcccttgtctgatgcatcgcatcggtcggctcacgtgggatggatgccttcgccccctccgacggggccacaggtgaggcgatgtggtgcgacagatcagatgacataggacggatctcccacgcagtcgatgcgacacagaagagatgtaaatcgccggaaccctaaacttaggcgacatcgcaagggtcgtcgactttgatgcctactccgcacttcctgggcatttttggtgtcattcctctcgatgtgtggacaacattggatgggtagggccctctctacctcgcatcgccgaggctatcggtgagcaggaaagtctgcgacttggcggtggggccagagg

SEQ ID NO: 62008 - DNA, 838 bp, Zea Mays
ttcggtgacggcctcgacgcactgctgcgggccgccaacgaggtcaaggccaccccgcctgctggcgccaggagcggcgtgatcaggttcgaggtaaggtgtgggtatcatcagtattgcattctgctttaatgtcaaaaaagtggcgggtgaattttgattggcgataagccgatgcctgttggctgttggatacagtgagaacctgtacattatttttgtgtgtgtgtgggggtgttgttgttgttgttgttgttttgctattcatccttctttcattccatttccatcgcttcctgagaaatcctaccggcgccgctgatcaatggtactgttgtgtatgtgagaatatgggttttgtttttgcaagagaattctggtatcttttgctgagacagtttgggttgccctctctcgcgccacatatggctgcttcctccttcctaggctggtgggaaaaggcagtaagagcagtgagcgggcttatcaaaaagggtcttaactcccttatcattttgggtgcttgggcgatttggaataaccggaataaatggtctttgatggttagaattcaaatataatactaatccttagttgggaaaaataggagatgcatcgaagggaaatagcgagggcaaaagatatttcttacttggcagccccttagctgagccctaaggacttccctggcagtgtgtgggtttttttgtttttctagatggattccttcctatatgcgtgtttctggcccccgtagggggtcttttgtattaggcctttctttagaccctgttttctttttcttcttaatataatgagacgcatcctgcccgttttt

SEQ ID NO: 62009 - DNA, 690 bp, Zea Mays
acggtgatagtgcagagaatcaaaggaacagcgtgttcccgacgacccatggcagtctagttcaattggacggtttggtaagcatcaagaacatgtgagggtgttggaacaataacatagagggcgagatcggacctgagttgagctagccgcggcgaggtgttcttcacggtggcggaaaccgaattggggagaactcaaaattcgtgagctctggcgaacgattgagggtgggagcgggggctttggtttcgtgatgacatagcgcacctgccccggccttcaatttatagagggcttaggcggtggcgcgcaatttggccgagcaatgctggcggccggagatagggaagaacactggcgcagtgtctaccgtcgtggtgacttcaccggcaacaattagacggctattagagagttacggcgatgcgacggaggtaccagagcacgtggcacaagaccagtagacggccatcaccggtgaacttatccaacccgccacggagagcttggtacgacggccggagttgtttactggccggggcttatccacggcggcgatatttacgtgacccgagcgttatccaggcactggtgagcgcgaatcacctcaccggcgggaatcgtggcgcgagggtcgtcggcggtgagggtcactgaacttgatccgatcggctactgtaccatggg

SEQ ID NO: 62010 - DNA, 504 bp, Zea Mays
taaaattcaactttgtattcatattctcatgaaagcttctccaaaatctagaggtaaactgtgatcctctatccaaaatgatcttcggtacaccgtgtagagacacaattcgagccatatataactctgtcaattgagataccttataagtagtcttgaccggaatgaaacgagccactttggtcaatctatccacaatcacccatatagacccatatcctttcagggtgcgaggcaaaccagtaaataaatacataccaatctcttctcacttccacttgggtatcttaagtgggtgcaatagtctagctggcctctggtgttcagccttaactttttgacacacattgcacatagccacatgtgcagccacatctctcttcagtccataccaccagaacttctgcttcaaatcctgatacatcttggtactcccaagatgaatagaataatccgagtcatgggcctcctttaaaatagtcttacgaaggctttcaatatcag

SEQ ID NO: 62011 - DNA, 373 bp, Zea Mays
agcttcgtttagtagttgagttacaactttgtccataatagcttcggccatcttaattatttcatcttcattttttgcttcggggtcggtttgtgactcgaagggctccgggggaggagataattcggctgcgatataaaacatgaataagttcgaagtcacaagaataaaatataaagtcaaaagcaattagacaatacctatccgcctttcaagttctgcagttttttcaactgcctttgctgcttctctagcatcgtgggtatctttttcactcttctttataatttcgtgagccatctctcggcaaccattttcccagatgtcggtaaaaaactttccgccaatcaggcttgcctaagccgaagggtct

SEQ ID NO: 62012 - DNA, 773 bp, Zea Mays
ctgatctgcaatgccaaactgcttgggtgtgcaaccatacaatgcctgaaatggagacatgcctatagctgagtgtggagaagaattataccagaactacgcaacagacaaccaccgactccacttgtgcggacaggcgtggacaaaacaacgaagaaaagtttctaagcactgattgacacgctctgactgcccatcggactgaggatgatacgcagtgctcatctgaagctgcacatcagccaagcgaaacaactctttccacaagtggctgagaaacacacggtctctgtcagatacaatcgattggggtagtccatggtgcttgtacacttgatcatgaaagagcctggcgactgacaatgtcatatatggatgtttaagaggtaagaaatttgcatacttagtgaagagatcaactatcaccaggatgcatgtatacgattgtgaacgtggaagagcctcgataaaatccatactgatcacttgccataatgatgagggtacaggcagaggttgtaacaggccgagcagacgagctcggtcagctttggattattgacagatgaggcaatgagaaacgaactgatttactacttttttcatacctttccaagcaaacagttgtttcaagcgagcatatgtgacaggaaacccggaatgaccaccaactgctgacgcatgcaatgctgcaattagacgatcctgaagaggagctgactatcccacccatattcttcctttataacgaaggagaccatcttgttaggaat

SEQ ID NO: 62013 - DNA, 436 bp, Zea Mays
ttcttatctgagcaaaagtcgcctaagggtgcagccggataggcataagtgcgtaacaccacccatagggtgcgaaatcgtctataagacacacatttttattggagcaaaagccgcctaagggtgcagccggataaacacaacaagtgcgcaacaacaccacaagggtgcgaagtcgtctacaacacacatacttctatcccatacaaaagcatcctaaggatgcagctggattcacactaggcacagcaagcgaagtcgtcacaaaagattaccaacagatcaacataaagcgcaccaagacacaattcagcacaaaacacaaataaaacacattgttacaactacacgatgtacaccatacacaagatatccacccctcatagatgtccccaccgctgtcctttggtgaagggggcgagggcagcattttcgc

SEQ ID NO: 62014 - DNA, 452 bp, Zea Mays
cgttgggggtgcttagcacgcggccgtgggatccccgatggagggtctggattagatagacgtatgggttagatgtggggtggatgtggccgttggatcgtacttggatgaatgggattacatcgcacttaataaaatcttgtccgttagatatctagcctatggctgagattataaccatcacgtaccgcttcgtggtttgatctgggccgtaggattgtggatggagggtgcaaaatggtttcaaatcatggctacctctcaactgttgatctcagaatcgatgatctacatcgcatatcggttcataaagtgccagatctaaccttgcacatccaaattggatcgtgcggctctagacatcccataccccttcggccaaacgattttgcataagagtgtccctgggtttttatcaaatcaacccgccatccgcagacgttatagaatca

SEQ ID NO: 62015 - DNA, 850 bp, Zea Mays
gcggagcagctcggcatccaccaacgcatgcaggtcgttgtgggtgatggaggagaccgaccataggtcgcggggaggaagcacgttcactttctcggccatcagagcaggggaagaagaccgggggagagcacgaaagcttttttgaggctaggagaaagggtggctagggcaggaaaacaggagcagaaggtaaggagccgaagtgtccatctcggacgaatttatagggcaggcggagtcaccgagtcttgggccaagccacctagagacaaaccaagaacgggccgggacgcttcgaattccttgcatgcgtacgacaacggtcggcctgcgggcatacgcgtctcgtcgcatttaatgcccgcccctcctgtcagctgacgtcaggcagcaagcgccgctttgtattacgcatcgaaaggtgtgtcgttccctcttcccaccttttccatctccttgcatgtaacgagaaaaagtgtctcccgcctcgggcatccttcctcaaggaaaagggtgagaagaataatactgttcgggggttcgaaggtcaggccctcataagggttcgggagatcgcctcaggacgactgggttccgggccctttactggttaggggttcgaaggttggcccctcggaagggtatcacgattgtcctagaacgtagagccagaaatgactatgggtatgtccatgcatggccaaaggctcgggctacgatcctgagatacccttagacatgtctaagacccccgagagtgattcataacggtatcccattggagggaggcaatcgagccctcgaaccccatcgaacgggaccgggaccgggaccaggcgaatcaccc

SEQ ID NO: 62016 - DNA, 299 bp, Zea Mays
tgctactagtgagttcgtatgataggtccgactaataaatccacccgactttccatttagttgaggactagtccgaattacttgcctgccacaatgtgcccgacttagtgtgcgtatatacgtccctgttggtagtttctcggcgcacgaaccctaactctgttttttgttcgccgcaatacagtctctgagaccctcgctcatccttgcggttgcgctcaagcttgcctgctcgtgaggtcttgatggcgcccaggaagaagaaataggggatagttacgcccgccattcccccaatc

SEQ ID NO: 62017 - DNA, 848 bp, Zea Mays
aaccatgacaaggtattcctcctagtgtactttatcattcttagttatccctcctatctatattattcttgtgtttaaacttgtatgtatttgttgtggattggcaggcaattcgagcaacaaccatgtatgccatcgaataaaacaaaccattacggttaatgcgttgttgggatatactaaaaaatgagccaaagtgggaatccatagcacacgataattatttagaggtgtccatgtgggtgcacaaggtggcggcttagggccatctttcaaagttgatcaactggacagttctagtcatgttcttatttcaaagagaccattggggagagattcatccaaatctaaaaagacgaaacgagtttcagcttcttcagatgctagtgactacttgagcaagctccacgacattgctactgcaaaatttgagcagaacctagccaaggaagagaagatggaaatctagcaagacaaagaaagagaaattgagttaaagaggttggatatagaagcggagaaactggaaattcgagtaaaggagttggagcttgaagagaaaaaggtagcgcaagaaaagttgaacaagatagttgcaactagattggatgatgttgatgacgatgtgagccacatcctactagagaggaggaagtagttgatggggttccttttcaaagtcggttagttgttggcgagccacacttacctactatgtattgtggcattttagagtactctcaagtttgttttgaacatcattatcaggtttcatgctttgtcgtgtcatgctagacatggaataagttgtattcttcgaacacgtaatgcatgttgatttgtgctag

SEQ ID NO: 62018 - DNA, 349 bp, Zea Mays
atgaggctgagactactgagacagctcccatttcgaagatgattaagcgctctggattggttgtgcaagaagagactatcaccgaaggtgctgctgatgccgaagctgaaccgactatcgccgaaggtgatagtgaaaatgaagatgaagatgatgacattatcttaagcccaagcaaacccagccatatcgaatttgggaaatccacgattaaggcagaggatctgattttaatgaaaaaaactaggatactttggagagaatgatgacggactggttcgttttgctggggaagaggtgattccagagccaacagatgatgaagttgtactctttaaaagctttttca

SEQ ID NO: 62019 - DNA, 579 bp, Zea Mays
caaaattagtgcacttttgggctaaagtgcaaaaaccatgaaagtaaggtgtcttaagttatatggttcacaattatgaagatttgcaacctcaaccttgagtattggacttatttgcaaaagagccccactcatactccaattgcttaagtctaaaattagtgatattagctcaactttggggccttgtaactttcaaaccataagggttttgccctaggtcaccacatcaattctgtatatatatcaaaggagaacaactttgtttaagggatgcaacactgttgttatgaaaaatgtgaagaaaaatacacccaaagatgggctgtcaggctgtctggagactgaacctggtctgacagtatgatgaggcaatctttgaacccagatttgaacatgatccgacgcaagtttgggcatgatccccatagcaagattgcagttggttaattgggctataactttgatgcagtgggatgatggggttgtcacatgaaatgaggagaaaagtggctctaattttgctctgacagactaactgcatggtaatcaccatggtacagtgaatgggggggatta

SEQ ID NO: 62020 - DNA, 1274 bp, Zea Mays
gttaggtggtagattggttgtgcagatagcaccgattttactagagtttccctaccagccttggacagtagtttgcctttccagccagccaacctgttattaattttttcgattagtggttggagatcaatcctttttatgttcctgtaataaaggggtaacccaaggtacttcctgggtaggctagtgtattttccaggaaacacgtccattagtgttggccataatgatgctggatatcgaattgggaaaatttctgttttgtcatagttgatctttagccctgaacacccctcgaacgcgttgagaatccctttcagcacctccaagtctgatttgtcagctctaacaaacacgcccgcatcatccgcgtagagagagcaccgaagcttagcccctctaggcagcacccgtccaagcagtccatctttagtggccttctcaatcatctgatgcagtgggtccatcgctaaaatgaaaaggaatggagatagagggtccccttgtcgcaccccacgcctgtgtttgattgcatttgaatgttgcccatttataattattcttgaggaggatgatcccaggatttcagcaacccaattgcgccatttctgggagaacccacaggcccttaacacatccaggagatatgcccaattcagggtgtcgaaagctttagagatgtcgagcttgacaaatagagttggattacctttttatgcagattcatgatcaccctttgcacgtatagaaagttgtcatggattgaccggttctggatgaaggcgttctgagcgttggagataatttcgttcattcttggatcaagcctatttgccatgatttctgttataattttcatgaagctattgatcaggctgatcggcataaacctatcaattctgtcagcattttccccctttggtatgaggatgatgtttgcttcattgaccagatgcaggcttttggatctatgttggaaaaaatcatttattgccatggaaaggtcgttttttatcaactcgaagcagcatttgtagaacagcccaatgaacccatccggcccgggggccttttcagattgaagccccatcacgacgtccttgatttcactgtcatcaatcaagttgtccagctcagataactcaaaaggagcataccccagatggtcccaacggacaacactgctcctccttcatgtcgtgcctagtatctggccgaagtgatgttgtacctcgttcattttgtcttcctgactcgtcaacagtgtgccatct

SEQ ID NO: 62021 - DNA, 493 bp, Zea Mays
cagccattagactggtgaatcccatcggggagcagggacggggacaagtggaacgttccatccctggttcacccgttggggatgatttttagtccacgaggatccccgcggggagctatatcatcctgttatcatcccctaatagatgaaatccccaccggggatcggggatcggggccccgttgccatccctagtcacggacaaggcaggagatgacgcgatctgctaccactagctgccggcatgaccccgtctacgagacagcctgccgtgtagagaccgctgcgaatgcctgcgaatcaacggggttccttgtggtaatttgctcatccaacatgtaattattacttagcggcaaaagacaacgccagacagctgtagtgacagccaactaaagatcttaaatgcatattataggcctgcatacgttcgtaaagacaacttagggtcggtttgatataaagagtggttttccggttttacaatactata

SEQ ID NO: 62022 - DNA, 291 bp, Zea Mays
ctctaggtgtgtcaaacatatgcaatgccaatgtttatgatgccatgcttaagtttttagttacagtaacaccaggggtgttacaccggatttccgtcagtacttgaaggattcagtgatgcaaactggatctctgactcggatcaaatgaagtctacaagtggctatgtgttcactttagctggtggggccgtgtcgtggagatcgtctaaacaaacagtatcgacacgttccaccaaggaggctgaattagttgcgcttgattcagcaacattggaggctgaatggttg

SEQ ID NO: 62023 - DNA, 896 bp, Zea Mays
tatttccaaatggtattgcatatgttcgcatccttgccagtggaacacgacggtggctgggtaagcacaaaacgaccatcgaagaaataaaaagaacaaagaaatcaccatgaacaaaaaagctcaccagtgtttttcgcggcggagatgaattcgacgcttcgacacgcaatgaatgtcctcattgtgctgcttgatgcttgttgggtactgcgcggcatagacaaaactcggcgctggatgagaacagacggggaaaacacgcgtgtcaacgccgaaaaaggtgaaggagcatcaaaatgcagaagaaatctaagggaaagcagttagggttcgtcacctgttcgtgagttgctagaccaaccgcgtccgtaacggcggttgagaaaccttcgccgccacttgcgaagctgcaatgtgcaaatggtggcaggaaaatcagggttggcgacatcaagacgatgcgctagtgtttcaaaaaaaaagacgatgcgctcaaagcttcggcaatgtgacccgcaatggttgaacgtcgaacgtcggttgaaaatccctgcaaaaccctagcgaacaaaacatctagcaagaggaaacacaaatgaggatgttggccaatacctctagggaacggagtgacgaacacacgcttgatatctgacgagggaggtagctggaactaggtgcgtcgcgggcgtcggacgatgctgggaaccaggaccgacagaggtagactgggctgacgcgagggagatagccgggaccataatctgtttcctattacttcgctttcttcctttttttatttttcctattcggttcatcgaggtgcatctagaatatgttgcacgggtcatatggcttgaaggctcccgtaaccgttgccttgaaatcggacg

SEQ ID NO: 62024 - DNA, 1074 bp, Zea Mays
cagctggtatcggagcgaagcccatctctttagacattacgtagtacttcaaaagaatttttaaacactttctggtagtaacttacctttgaaaagtcgggtaatagagtgttgtatatgaggaggtaggggatcgacgaaaggttgatcccataattattaggctatgcatgcttcatgcttaaaactatactaataaatcttcccctcttatggagatatggcgcgcactaagactacccagcacaaatcgactggaccacagggtgtgcctggacatcagctggcctctaggcatgaaggcagcagcagtggaagcaacgaccctattggggagttggatgtcagagtggatcacctcagatcggaactatgccacgggtgcagagagcgtgcgtgcgatagtcgtcgctttgctgaactgacagccgaagttagtcgcatgcggtatgaaatttcagaacatgatacggccattgactaggccatcaactcgtgctctttcgcttgggactatgaaaccaaagctctagctcgagtagcagaacttagcgcatccctcgaaaacctgcaagcgtactgcaacaccttacatgacgaagtacatgtattatatgattggctgcacccggacgtgccaccagacgttgctgtaatgggagccagaccattgggaacagctaatgaaggacctgatgggggctggacctttttacgccccctccttccatgaaccttgctgatgaatggtctcctgcagcagacagcagaacaacaaaggatgaagaagactagagtagtatagtctaagtattgtacttatgtaaaataagtaagaaaagttgagttgtataatggagtctgtataattattaatgttccgtaatgaaataaagatggtgtatgattgcatgttatatttttctaaatgtttctttgcctcagatgccatcccggacccatgcacatgatggggcaggtacatcccgcggtggggaggacactcccaatctgccaccggtacctcctaccttggccgaggctatcgctgccttggtcaacgccaccgccgac

SEQ ID NO: 62025 - DNA, 346 bp, Zea Mays
gaggaccggacacttaccagggacacatacccacggtcgggacgcatcgggggctggctgagggcgccagcatccagcctccctaccgtacccgctacccgcctgaggaggtcgtcggtggagagggaggtcgaggacatccgcgaaccctctagatcgacccccggcttcatctctgaaagccgcaactaccgctctgccaaggggagcaccctccgacgatgtatagcggcgacgacccccgcagcggtaaggcccgcggcttgtagcttctgcaaggcacggagaatgggttggagcttctcctggttctcgcgtgtgccccccaacgccagttatcaccggc

SEQ ID NO: 62026 - DNA, 592 bp, Zea Mays
gtcgagtcaatgcgcattatgtgtcaagatacacttcacaaatagtgtagggttgtgttcaagacgtcgagtagacactgcaagtaatcaagtaggtttgtaatgcaattgtgtgtaatttgtttataatgacattttatctcaagaagtgttatgttctatgcataaacaagaagtatgcatgttttgtgtagtgaggattgattttcaggcgtatgtcgcacgaaataaattaatgcgcataaaggcgatgaatgggtgtgacaaagtgcggcgccatcgatcttcgatctaatggttaggacggcgtaccagttcgaggtctgatctggtgtgttggatcttgatcgggtggcccacattatgctctgattcacttaaagcccggatctaatctggaccataggattctgatcggatggcttagaattcacgataccccttcgtagtgccattcttacttaagaacccacagtcctgagtattttaaagatccttacgctcccctgatctttagtataataatgtgtacagtcgagaactcgggggaattaaataattaaggaaaacgaatttctagtgtaaaaataat

SEQ ID NO: 62027 - DNA, 352 bp, Zea Mays
cgagagagcacgcagatggcggcgagagagacagcagagaggagagcggagacgaaccttccatggaactacgcggaccttccctggttggagattccccttccacgatggctgccgagagagcgtgggcgacggtagacggcagaaccaaaaattgtggacgtctacactagggacttaagtagtagtagagatatactctaactgtagatggtttataggagtggcagctttatctatctagccctccagaacttatctttaaagataggcaaatattatcttcggtagatcatgtaaaatagaggatgcaagtacaacattgtagaagacactgttttatgtactgttt

SEQ ID NO: 62028 - DNA, 546 bp, Zea Mays
gaaaatttgtgcattaaagcttacatcgacctgaaagggaagtttatcttaagggtgaaggtgctttgtgtgctaaagggctcaaacctcaaccttgtgataaagatgagctcaccttggttaaggtggtgttttcttgagttcctttagatcttaaggggagaatgcattaggtactaataatgcttatcatggtattcttgttgattatatggtgataatgcaatagtgatgtttttattgcttattgatgctttcgtttgatatgatcttggtgtagcatcgcctttagctattattgtgttgtatgtgttctagatcaattggtatctatggtgttttttgtttatcttgttgatagatattcatgctttgttatggtgcattaattggtatcttcatggtgtatagtgattggttgagatcctacaattatatctgtttaattcattaattggtatctctctagtgtttaaatctgattatgtgcatttgagtgtcatacacatcatgatttgatttctaacacaatgcaccccacaaatg

SEQ ID NO: 62029 - DNA, 425 bp, Zea Mays
gtcgcgattcatgccggccgccgcgatttgtgccatgtgtgaagtggataaccacgagaggtaaaaagatcgaaaggggggatggatcgagccgacctcaccatacctacttgaccggcaaaaaggtcgtgcgaccaccgccgtcgtgcccgctgtttacttcggtcacgacacgccttaagccgtatcaccacgtcgtcgcaggttgtggaggattacaagtgacggtcgtaaacttttgcccagtgaatgcgacgttaagcgaactccggtgactcacctttgctccggccgccagcttgtcttccccaaattcggagccaccgttgttggccattataaattgatgcccccgcctgctccactaatttgttacgaacccagtgcaccgctcctcgcccccgattaggcaccatagccggaga

SEQ ID NO: 62030 - DNA, 497 bp, Zea Mays
tgggggtgtaactacattatttgcgtgtgcaccaaacaatggtctgttgtgcatcgaaccctctgatctctaacttggtaggtagtcgttctgacctatcagggagcatcagaccgggtgcatgcacatgcacccactgccatgtcaaccgatcgttgaggaaatgcagtgcagtgttgtcacaattctcaaatatgtggcctcacgtccatcgatggcacctatgagtggatccgactcgcaagctactcggccactgatgtcctcacatagttgtgttgctgcagtgatgaggtctgtcacaaacaatgtcagtggtagtggcagtgttgctggtacgcttatgtagagtggtggtggtgctggtatagacccatcctcaagtgttggtggtgctcctaccactactgctaccactacagctagtgggaatttgctaaagagctttgtgtaggctgaagatgttctttaatgcaactgagttattattaagaaac

SEQ ID NO: 62031 - DNA, 849 bp, Zea Mays
atatgttgttccctgttttcttgatgtgttaattaaaacatgttaaataggaaaaagatgattgtttttatttttatttttggatctgtagctctagtggtctaaatgagttgaaatttttacagtagactcgaggtgtgatgcttagtgactggtaaaaatttcatgaattgtggtgcacgtatgattaagttagtaatttaacttgtttaatgcacattaagtagttataaatggtttaaaaataatgtagagatgcaaaaatggaaaatggtgttcctctgtccttgcatgatattatagtagcctaagaaaacttaatatggtgataaatccacagaaaataattagttttagatttaacttgctctcacatgctttattgcattaacaatttgttatttttgtattaaataaaatataaaacctgggcatgtgaaatttatacattagtcataatttgttattacctatgcctcataaaaatttcagccccagattagatagttttatatggtgctaaaatgacacatattttataattataacaagaattagtgataaattagaagtaaacaaaagcgtgcatgtttattgaaatgtttaagtgtcttcatataaattgaaacttgataactaaatcacaatggtttaaacttgagaatttggcactttcccttcatgattttgtttggtgcttgagttaagtgctattttgaccgcaagctaatttcctgcgtgtacagttttagttgtgcgattaatctagttaagtaaagtatgttttctgtagatatgtgctgtataaaagttatagttcacttgtatatctagctcgtcctaaaaatg

SEQ ID NO: 62032 - DNA, 544 bp, Zea Mays
cgcttgtagagaactgggaaatgccgaaggagactgtcaccaagtctagcgaaggtgacctggttcgactgaaatatacattcagatatggagataaatttgatgaaccaaatgacgactgtctgaaatgtatcaaagctacaagtgatgaactgcttgggtcatattccaaagcagaagataatgcattatccacatccttcgggggtcggggaaaaaaagagattgaacagagtttttgatgccattggttttgtttaccccgactactgctacccgctgtgaggacggggaaagaagaggaaaactgctgctttcagccaaaactactgcttcggccactccagatgagcctgcgccgaagagcaaaaagttgaaagtccttacccactgtccatgttatattgaaccgaccgtggtacctgagtttggcggggagacttcttcagctgctaaaccaaaagagcccattcctcctacgcagaaggctgaagagccaactataatgccgaaggaagcttcggttgaactagctaagtcgaag

SEQ ID NO: 62033 - DNA, 342 bp, Zea Mays
gggccgattagccgagctgtcgagtaggggtagggttaggttaatttttccccttttggcttcaaatcatttgaaattattggacctccgattctagcaacgaaagacaaggttcatcttcacccctgcttccctatgtcaattatccggttggtgaggtaacacagcaaccaacgaggtgggtgtacgaatgggaggaccctgagtagcgtaggaccactcacacagggatcggacaccaaggcctacagcaagcatattggacccccgattctagcaacgaaagacaaggttcatcttcacccctgcttccctatgtcaattatccggttggtgaggtaa

SEQ ID NO: 62034 - DNA, 692 bp, Zea Mays
aggaaaccgaggtggctatctggcgggagtgggaggcgctcaagaccgagcatcaacgccttggcgactggtgcacccaactggagaagcgcactaaggcggtgtcctgccaattcgcctcagagcaggccgagtttgagcaggagcgcgaggacttcaaggaggacatccggaaggtgtctgaccgagaggaagaggtgacccagaaggagaaaagtttggccaggaaggaggtacgcttagaccaaaaggaggaggccgtcacagcgctccataataagctgaaagcttataatacggtgctggagaaacagtgggacaagcaggctgcggttgaggcaaagctgcagaagctacagcaggaacttgtcgatagggccagcgacattgctcgcgccgaggaaagcctcaaggcgaaggaagctttcctagcgaaacgggcaactgatctcacctggcaggaggaggacctcgccttcagggaggagatgtgggcaaggcggaactggctgctagatgagcttgagctcgaagcagaggataaaaggaagtgtttggaggggaaagtgtgggctctggaggagcaggtccgctagttccaagtagcgcaagttgctcaggcgacacaaacggcctcgggcccccaggcagtggaggtgatgaggaagacactcgacgacctccgggctgag

SEQ ID NO: 62035 - DNA, 1168 bp, Zea Mays
cggattgtgcttcatcgccgacaccgcaagtggccattgcaccatggcccttagtgatgatgaagtgggcggcgaccgccaggacatcagcgacggctcttcttctgaggtatcacattccatcgatgatctcgccgctaagatagatgagctaaacgctgctttggtaagtcaggataagttgcttaggcaggctgctcatgataggagagaattttgatccaagtatgagagcacgcttagggagcttgagtctactagagcttcagttgtggtgtctaacgagacataatgtgatgagtgcgctctacacatgtcgaatatcacaactttctagaccaagtaaccgccaccttgctagatgagtgcaacaagttgaggtccaaatctatcttgttaggtgtgtgtaccgcttgtcatggcttgcagactgagctagtagagacaaacgccaggatagccttgcttgagaaggctagctcagtgagtgcccctacacttgtgcagtgtgcactttgtgagggtttgcagtcagctcttgagtcctacgacacaacaagacccgaatcgaggaagaaaatgcataccttcagtcggtcttgagctaggtgtcgtgccgtgagccccagttgggcatggtggttagctagttcaagagggaaactagtggaccgggaataagctttgcttataggtctggtagtgacactaagcttggccaggttggtgagtggagtggattgaaaccatcagtgaaaccttaagccactcacgagcttataaaaatcacccacctaagcctatcaccccaatgagagatggtgttattgaggagcctgtgagagcccctcttcagaaacaagtgtgggttccaaaacctaaccacctcaggaagacacttgatacccttcctgatatctctagtgttcctcctccaaaagttgagctacccaaaaaaatctatctcccaaaaacaaaatccacccaagagagaggtgaggttcaattgtgactattgtgagagggatgggcatctgactgcctttttctttaggaggaagatagatgagcagcggttttctgggccaagcaaaaagaacaagaaccgcctttacaatggtgttcatgatattcctgttcaaaatacatcctgttagctaggcctagc

SEQ ID NO: 62036 - DNA, 327 bp, Zea Mays
ctaattcaaaccctggcgatccactaggaatcactaatttaacccaaacgccaccctagagctcagttcacgtatacccacggaattggagacattcccgatgcgtccctagtgatttggtgtggtatagcttaattggttgagctgacgagcctcacaagcatacaagagtgctgaaacatggacaaggagggcgagggcggacctgagagcggctggccacggtggagtgacacacgctggcacaaacggccgatttgggggaagaacggaattagggcgctacggtggctaatcggaggcgggagtgggtgctctagattcatg

SEQ ID NO: 62037 - DNA, 748 bp, Zea Mays
tgttagaccaaaggacataacagtgaactcatacaacccatacttggtaatgaatgtcgtcttcggaatgtctgaaggtcaaatcctgagctggtgataacctgacctcagatctatctttgaaaacacgctggctcctctcaactggtcgagcagatcttctattctgggcaaggggtacttgttcttgattgtgacctcattcagagctcgataatcgatgcacatcctcctagtgccatctttcttctccacgaataggacaggggcagcccaaggcgaggtgcttggcctgatgtaacctttctctgacagctcatcaatctgcttcttgagttcaaccaactctggtccagatactatgtaggctcttttagaaatgggggcggtgccaggaagaagctctatagcaaactcagctttccgcttaggtggcatgcctggtaagtcttccaggaacacatctgggaattctgacacaaccttgataatctcgagtgaaactggctccttgctatcaatagccatctgatgacaacttcctttccttggttcaggtgagactaactcggctaccacttcttctcctagtggggacaccaacttaattatcctcttatcacaactgataattgcttggtacttatctagccaattcatccctaggatgacatctattccctgagtactcattactatgagattagtgggaaacactaccccccttatttccacacttacattcaag

SEQ ID NO: 62038 - DNA, 387 bp, Zea Mays
gccattggaagaatagccaagtgggcctatgagctgggagctcacgacattgagtttcagcctcgtactgcaataaagactcaagccctagttgacttcgtattagagtggaccgagcaacaagtaccaggtaacccagagactgcagaagtatggcggatgtatttcgatggctcgctgaagctgcagggagcaggcgcagggatcctcttcattgcccctagaggtgaacaactcaaatatgctcttcagttgttattctcagcttccaataatgcagcagaatatgaagctctgatccacggattgaacattgccatatcactaggcattaagaggttgatggtatacggagattcactggtgatcataagtcagataaataag

SEQ ID NO: 62039 - DNA, 352 bp, Zea Mays
gcgaagaccaagattgccgtagccattgccatcctagctctgtttcaggtctcttgcgccgcagcccggcggcacggcaagccagcgcacggtgatcacgacggtgacggcacccctgctgtgatgacggtgaacggtttcaagcgaggcgaggacggcggcggtgcagcatcgtgtgatggccgtttccacagcgacgacgacctgatcgtggcgctgtcctcgcggtggtacgcaggagggaagaggtgtggcaaggctatccgcattacagcggagagcgggcgtaccgtgagggcacgggtcgtggacgagtgcgactcccatggaggatgccgcaacaacatcgtgg

SEQ ID NO: 62040 - DNA, 549 bp, Zea Mays
gcactcgaatgtgtcgagaaagaggttgacgtcctcgacaaagtcataactagccatggagacttctgtgcgctagtggcttctcgcggtacggtcgccgctttcataaaagtcgggtttagccatgctagggccgttaataggccaaattttaaactttcggcatcagacctagttgatattccagccgaagctcgaagcataggcaacagatttatcacccaaatttgggcaaagggtggctgagagctggctggaaacgaagctcataatctgctcaacaaggtataactctttacctctattcttttattttacgtttttccttaccagattcctcattacccttttcttcgtcattcttcagggtgatggttccgaaggttagcgaaccaaagttaggtctgaaccgaagactttagaggcttccccttgttgatatctgtagaaagactttttagaaattctttgtgcaagaagtgtattatttgacaaaggattgtaattgaatgtgaacagaattgtaaatatttgtaaatgctttgtaat

SEQ ID NO: 62041 - DNA, 617 bp, Zea Mays
gttgaagattgaatcctgatcattgaggctggcagattagaagagagggaatcaaatgaagttgtcagatagcacagtcatgctatggtccatggtccatgttgtagtgctagtagattcagccatctagtacgatataaatttatagtagtcgttgacactgatttggatcacagactagtaagagttagtacatctctgatcgacacacaccttgaacacgaggaacatagtggatcgttgaaatcgatcgggggggtcagttaggccgatgttgatcctgttcttcgtctggtatactctcgagcacctccagggaagacctatcggggaggagcacacaaaggttgtcctaggatcagcaaggccacctagaacaccactaaatcttttcggaagatgtgacaaacaataaggtagagaggagagagtgtgtaaaaggtctagtagattgatttttgacgattgaaagttgggatacttaatcggtgataatcaacagggcacccggccgacttcatccccacctggccggctttggtcactcgtcctgaccagcttagagggacggccaggccaatttctgtagggcagcaccgctagggctggaaaataag

SEQ ID NO: 62042 - DNA, 581 bp, Zea Mays
caaagaccaaggtgggatcagaatctgactcgggtggagtttgaccccagtgtcgatgtttggtaccgacgacacactacgggacatatcatgtagtgcctttgggaggacagcgaagttgattgcagctcgatggttcatgcaaggcacgatggaacacaacgggttatacaggttcagggcacccatatacgtaacaccctacgtcttgtgcgtttctggtggataccgtgtatgtattgcttggaggttgaagattacaaagaattacaaaggatgaagatgattgcggtgtgttagtctctcctctttcgtatgggttcctttcagccttatatcgaactaaagagagctctcccgcacaatcccataacactattcctatctatcgacctagaagcgtgagacatcatccagcggtaagttggctcttcgtgaagcctgcacgtacgctgcatgcgcggagcacgatcttgggaaccttcagggcccatgcgtgtgtctccttcagtcgtccttggttgcatccgactgaggcccactgggcaccttatagctaggccattgggggcctataggag

SEQ ID NO: 62043 - DNA, 562 bp, Zea Mays
gcagcatatcacaggagtgaaaagtttcatgaagttaatttcagagcattttgtagatattgatgagaggtactatgtccttgtcgaaagtgtttgaatcagattgccagaccaaagtcaaagatagaggatcatttacatattcatggtatggcaagcacgtacactacgtggatacatcatggggaggcacaatttgatactgtaataaatcaacaagctgaccatctagaagaacaatattgtatgaatgaggatattagtttgaatgagtctgaaaacatacaagatagattgtctgatatggtacgagagttgttcaccgctggagaggaaggtgcacataaatctatgtttgcagctgttttggaagatatagagcaagaacttcaccctggtgcatcgtacacaagattttcttttgttgttaagttacttcatatcaaatctttttaccagatcaacaatgttgctttctccgcaattctaaagttgttatcattggctttcctgcagtgttgtttaccagcatcttataaggaagcaaagaaacttatcaaag

SEQ ID NO: 62044 - DNA, 1195 bp, Zea Mays
gcagaagctgagtacatagcagctggtgcatgttgtgcacagttgctatggatgaagcaaacccttagagactttggttgtgagtttaataaaattccactgctatgtgacaatgagagtgccattaaacttgcaaacaatcctgtgcaacactctagaaccaaacatattgatattagacattatttcttgagagaccatgaagccaaaggagatatcgaattatttcatgtgagcactgaaaatcaactagccaatatcttcaccaaaccccttgatgagactaggttttgttttctaaggagtgaactaaatatcttggattctcgaaacgtgtcttaagaactaaaatttgaaccatgattgattggaataaagttgttttgtgaacaatatgacatgtgaaatattgtttttattgcctaaattatacatgtcataaatattgcttgcattctaagccttatcgggctgatttggtaaactggttgagtaaatcgactgagtaggccactcaaccggattctctctggtgagaaccggttgaaccgattttggtcacctctgaatctgcgcagtctgtcagctccgcagtctgcgccgtcagtctcgcagactgtgctgtcagtgcgccaggttttctgcgcagtcagtcgtcgttttctgcgcatttactgtgcggttcggttgaaccggttgaaccagttttagtcagtttgaccagccgccgcctccccttttctctcctctccttccctctttctctctttactctttcatttgttacagtcgtcgatgccttcacccttctctctccctctctcaaaacccacactccaaatccctcccaagccatcaaatctttgtggagtttgttggagacttgttcccctcggactcctccatcatctcctcactcttcgttgggattttcgtggtcgattcgtcagatcgaggtattgactcgttttccccattttagactcgattcaacaccgttcttgattatcttaagtaccttttcaaggatattgtgtagtttaggtgcttggcacacttaaactgttttcattgtctcgaacattgtttgagttaagtagtttggtattgttcattgtagttaaaccgctcacatgaacggttgaagtgcatgctcaatatcatacgtgtctttcctcaaacgtgttcgttaaaa

SEQ ID NO: 62045 - DNA, 864 bp, Zea Mays
taactgacggatataaaatttcgcccgcggatattacccgttacccgcttaatttactagcccatcaaaatatcgcccatgtgttcattttatcctaaaacattgtgttgtaataattaatatcttaagagtttgacacttatgtttgtggatgattgatcatgtttgtggactttgaagtttgaactatgttccttgtcattatattatgtctctcaagttgttgatgttcttggtgaaatgaacatgaccacatactcgtatggtattttctggcgggtaacaggttgcctgatatcggcggatatcctgcggatacgggtacgagtcgaaaactttactcgcaagctctcgcaggcacggataaacactagaggcgcggatatgttggtgggcggttaaatggcttacccgcactttacccgatccgctgcctaccctacactgcactagccctatggaaacggtgtacctaaccaaggcacgcgttcattacgacgggcactgcgtgaggagtacgcgttccttctgatctgtataagggctttagagaagaaaaggtcgtattccgcatcattgtcgacggacaaattgcgtatacgctacctcgcgccggtgtggtacggttgtcatgcgcagccgcggccactcatcagccggctcgatcatttcttcgatgtcctagatagtagaaagactagacgaactacatacagccatgcatttcgacgagagatagagtttcagtttccgtatttaataattcagagattacaaattagtttctagaaaccaaatactccttaaattattctttgaaaataatcaatctactatgggttgagattttagacgaaggagtcc

SEQ ID NO: 62046 - DNA, 554 bp, Zea Mays
gcaggctgctgttctcagtgcagatacccccaagaccatgcggtttattggccacattggtggtatggatatgttggtactgttggattcgggcagctctacttcatttatcagccaccgagttgcttcacatttgcccaattggactcccttaccagcttcacttcgcgtacaggtggccaatggctcccaattaccgtgtgaccatgaattaactaatgtcacatggtacctcaatgagtatgccttctcctcaaacttgaagattattcagctcactcactacgacctcatcttaggtatggactggttgagttcccacagccctatgtgggtacactgggaagataagtggctgattataccgtaccaaggctctactatcaaattgtgtggtatgggagttcagaacatgcagtgtactgttatggaggtatcttccttggaatccctcactgacaaggatcaagccattgttcacaagttgcccgcagaactgcagcagctactcactcaatatgctgatatatttgaagttccacagggtcttcctc

SEQ ID NO: 62047 - DNA, 350 bp, Zea Mays
agggagttgcggcttggattgaaaggaagtaggaggcttgatgctgaatttggacatgacatcagtgaactcggcgtaagacggggcatggcaacagggcgatgtcgtgacgcgaaatagagaatgacgacatcatcttgtgatatcccaattttctgaaaagaagttaaaattctttttctcttttctttcatgttctgtggcattggggtttggagttttaggaggcattcctcagggaaacagtagttcttttggcattttttccgctggggtcgggagctcagatgggagagcgggtttgggcctttgatctcgatccgatggatgggagcccccccctcccgaac

SEQ ID NO: 62048 - DNA, 595 bp, Zea Mays
agaacatgtagcctacaggatatggccactgatagacatctgggaaatgccaaaagaaaccattactaaccctagcgaaggtggtctgattcgattgaaatataccttcaggtttggagactagttcgtcgagccagatgatgactggctgaagtgtgttgaaaatacaagtgatgagttacttggagcatattccaagtctgaaaataatgcactatctacggccttcgggagccgaaaaaagaaaatattaaatagggtttttgatgctattggatttgtgtaccccgactatcgctacccgccacgggggcagaaaagaaagggtgcagcttctggaaaggttgttgcttcggctgctccacgcgagcctgcaccaaagaggaaaaagttaaaggtccttacccaacggccgcgctacatcgaaccggccacagtgctcgagtttggtggggaaacttcttcagctgctactccaaaggaaccaattccttctatacagaaagctgaggaaccagccaccctgccgaaggcaccctcagccacgttagctgagccgaagactgataaagctaaggaaccaggaatcgaggga

SEQ ID NO: 62049 - DNA, 284 bp, Zea Mays
cataccgagtacgatgtcagcaccatcaggagtatcatcaacactgacttgattcaccctggctatagaatatcccttgctaggagtctgttgcttgttcttagctggtgtaccagaattccccataggacaagcattagcatagtgcccaatctgactgcacttgaagcatgtagggccggtcttctgtcctgcaggcctcgtcggggtgccagtgggagtagcctgacgagtaggaggtgtccgtggagacccctatggagcatactgaactgggcgtggtc

SEQ ID NO: 62050 - DNA, 430 bp, Zea Mays
aattgaacgctcgcccagccatcccatacggtagtaggtcctcctctttccaacaccatttcttcttctctcttactcatggaccccacacgacatctctttattccctaaccggttgatggctctctgttgcgacgttgcaggctgcacctgcttatgtccgtcactcgaccaatcgcttcctaactgctctcttctccgtcagtctctagtctctacccacacagccccacgcgtcagcacctaaattccttctccttaatcctcttgttcttctcccgcttcgccagttgtagcgacgccgctgcctgcctctgctcgaacgccaccattcagccccgtcgctcaagctcccaattgcctgcctgcccgtccgcgttcccagtggagaccaccatcgtcgccatgcctagcctcgcatgcccacacc

SEQ ID NO: 62051 - DNA, 355 bp, Zea Mays
tgcaaattgatggtagtgatcctatttcatgagcttttattagactttaccttatttaggtgggtgttttacgttataagagatgtcatgctaagatgattctgtagttaccagttatgagtcgtttgttgctattgtgaaaacccgaacagtttatttctaatgaggaaaaggtgtttgaggttgccaataacatgttttgagatgccctaattagcgctcctcccaaaaaaattacatgctcttacatgacatacacaactgacgaaggattatatgatgaaagtgagttgtatattatggagttgttgtatggctatttgtgatggctgataaagggtttagtagtggaaca

SEQ ID NO: 62052 - DNA, 534 bp, Zea Mays
tcaccggagcacgagatcgtcggagtttgccgcttatttgtccacagagtatacttttgagcaaggcattaaaaatgcagcaagacttagaggataaaaggcaagaagttataattgaaaacttagaaaacaagataaaagagcaatctgctgccatcgagaagaaagacttcgagctacaaacaggtgaaggcttattagtggacgctgaagcaaaaaaacagaattaaattcaaagcttctttcccaatcagaaaatttcgaacatgaaaagctgaagcttgatgcaaaacttgaagccgaagctcaaagaaattcggaactgaaagaatcattgaaaaatcttcagaataagtgcctagagttcagcagtcgatgcattcatcagttaaagcaagtgttccattttgttggagccagtagtgaagagtttactccttcagcttaagacctgcctggtgcctttgagcacattgagggtgaaattaatgatcttgacgaagttatagctgggcatagcgacttctgtgccct

SEQ ID NO: 62053 - DNA, 371 bp, Zea Mays
aattatacaaggtaggtgtttgctcacctttgctaaagtgcgtttatgtggatcacatattggcccaaagctctactggggaaaatctttcgttaaggtttctactggtcgaaggcggtttcgaacacaacagagtttgtgcagaagtgtgacaattcacataggtgtgcaagagatcaaaagcgaccttcgtccttgacccaattgatacgacccacatggcacttgcaaagatggaggatgaacataattggcccaatgccagcaccaaaggggaacttaaagtatgtagtggtggtagtgaaatacttccccaaatggatcgaaacaaaagccttagcaacaataactttgacaaccattcaaaagtt

SEQ ID NO: 62054 - DNA, 579 bp, Zea Mays
tttgaattaaccaatgctcctgcatactttatgaacttgatgaataggtgttcatggagtatcttgacaagtttgtggtcgtgttcattaatgatatcttagtttattctcaagatgaggagacacacgaagaacacctaggattagtactttagaagctccatgacaaccatctttatgctaagtactcgaagtgtgacttttggttaaaggaggttgtaggaaacattatcatcgatggtggaataaaggtaaaccctaattagtgtgggaaaagcccccgagtttacagaggatggccaaggtaccatttggttcagaaatagaatctatgtaccttaaagtgatcaccttcggtagatggtcttgaatgaggcccatgactcagcttattccattcaccccggaagtaccaagatgtactaggacttgaaggagaaatattggtggcatgacttgaaaagagatgtagccgctcatgtcgctctttgtgatgtttgcgagagagtgaaagcagagtatcaaagagccatccgttttgcttcaacctctgaaagtgcctgaatggaaatggcagga

SEQ ID NO: 62055 - DNA, 1499 bp, Zea Mays
acgtcatgcccctcatgtgtaacagtctgtcaaggtaatagacgacgacagagaggcaccaaagggtattcgggtgaagaagcaaagcaccagagtatttgggctagattggacccagcaatgggggtacactgttggcgagcgtatgtaactgaggccatgtgggagttggagacttagcttggggaaggagttggcgctggttgtgtctagacggtgacgtcatgtgtgagtgaatcccttctgttcgtcgagaattctagtaaaactctataacttcgtgagagaaggatagtttcaggggcggggctcgctatcatcaccatctatctctcacaattggtattagattcttgttgcgatcctagcggatccatctgagtatactcttcgcccttaaaatcaggcaagggggcaaaacaaatcgacaacatggagaagagtttagccgatctctctcagctgctgcaatctttacaagtccagaatgattccatcaagcaagccattgaggtaaacatagcatctaagccctagaccgaggacgatgtgggtcacctgcatgaaaatgtgggacacctgtcgaacaaagtgaagaggtgatggtctgcgcccaccacacattcatgcatcgaaggtgttcgaaggtgtgctattgaaggatcaagcgacgctggaagtctctacatcgacatcacggcatcagtctgtaccggacctctacgatcaccgccctgctacagcttaccggagtgatggttttggggttgtcaccaccctaacaccatctccggttgcaggtaacaaaacccttttgcatccggattccccttcatctaccttacttcctcatgttgaacccatgtggccatcttattcgcctcatatgatggcagccttacctcaaatgagttttccttagttcgatggtcaccatacgaagatgtggatggcaaagtgcgagtcctactttgatgtgtttgttgtcccgggtgaattatgggtcaaagtagcaatcatgcacttcgtcggttcagtcgttttttggttatagtctatggaaaaaagctttgcgaaacacagtggacttagttttgctcagcggtgtgtgcccgctttgagcgtgatcatcacaaccatttagttcatcggttctttcacatcaagcaagttgacactgtcacggaatatatgttgagcacttcaatactctggtgcatcaaattctagctcatgacccttcatttaacatatttgctattgtaaatcgttttgttgatggcttggaacctggcattaaggttgtagtttttatgcagcggccatggacctagatactgttgtttccttggctttgttacaggaggtgctcactggtcacaagacccactctatgccttctaaggtagctgaaccatcactgtccagaactgtgtcacatccgacaccattgtcttcctctcaacctgctgctacaacttcagaactccggcgtggtg

SEQ ID NO: 62056 - DNA, 2004 bp, Zea Mays
gttgtaccagtctttctgagccgaagttaaacatcagtttaatacccaatatctaagttcatatttggtgccaaagtaggaatcaacaatgcttgttcctgaacccatttcataagtgctttactttagcttctcaaaactaaaccatgggaagattaatatttgttagattatgatatggcgccgggtacacttcagaggtgagtagagaaggaggcgagcttgagggttggaacgcagtggatatgggggtagtgggcagctgatgtcgcggctggctggatgagccagggtgaccgaagagctgtccactaaggaataacttcttcgatagatccctagtacaaactatcggctggctttatagatgatgagccaccaaacctttcctattacttaacctagatatttggaaacagaaatatcaaatctaaacttcctaacaactcagcccttgattggaggatttgatttattcaatcaaaaccttcctactgacctcttcttcctttcctgtgttgactccttcctttcctatgcatgctgcccctttcctgcgcctgctgccagccttgggcgcctgtgatactggcggcccacaaactagtccacaacatttccctccacaccgacaaagaactcgtccgtgagctcgaactctggatacctctgcttgaattcttcaagtggttccctggaagcatctgtctcagcacgaccaaaccactgaatcaacaattcctaaacacctctattgagcctggcacgtaccaccttggatagtgttggtaggacacgaccatgcaagatcacaggtaatggtaccacttgtgttggcgcctccccttcaaacttcctcagcaaggaaacatggaagacatcgtgtattcgagcacgaggtggtaactgcagcttgtatgagaccagccctacccgaaggaggacctggtatcgaccgtagtactttggcccaagtttggagggagcagcagaagtcaacctgactgctgtgaactgttgtaggcgaagccacacccaatcgccgacttggaactccacctggcgacgtttcttgtcctggtaagctttcatggttacttgggcctgaagaagacgctccggatttccaccaagaacgtgacgcggtcctgcagctggtggtacagtgctgccaccttagtggagcccggctgataggacagcagggttggcggctcccggccatagacgacacggaatggcgagcacttgatggctgtctggtatgaagtattgtagcaatactctgcccatggcaaccactgcagctaggacttcggtcgatctcctgcaagacacttcaaatacatggttatgacccgatttaccacttcggattgaccgtcgggctgtgggtggaatgttgagctcatgtttagtttgacaccagccaacttgaacaactcggtccagaaaaggctggtaaagattgtgtcgcggtcgctgacgattgagtagtggagcctatgtaagcagatgatgtcatcaaagaaggccttggccacggacgctgccgtgtaggggtgccgaatagcgatgaagtgtgcatacctcgagaatttgtccaccacagtaaggaccactgtcttgccaccagcacgtggaaatccttccacaaaatccatggaaatgtcgctccaaacctccaaaaggatggttaggggctgcgggagaccgctaggatgtagatgatccatcttgttcttttggcaagtggtacacccgcgcacataatcggcggacctactgcaatgcgcctgggttgtggaaggaggcgcgccagcgattgaccgtcttctggatgccgtcatggctgcagtcgtggacgtacgccagcaggtgtggccaaagggccaaagcatctggcacatagacgcgaccgccgaaggtgatgaggtcgtccaccttagtccagccttctggagcagagccatcggttatctgtcggtgtaaagtcgcagcctg

SEQ ID NO: 62057 - DNA, 1466 bp, Zea Mays
cggcacccccgcgcgcgtgcggtaataggccgcacaggagaaggggaaagtgggccgacggccgaggtttgggcccaggtacggttttccctttttttttctttttgttttatgcttccattttcctattttgccttattttgaattctcattcaaaacctccatttaagttcaactttgtgggacatttgttctcagactaattataaatttgatcataccaagtgtggtgaagttatttaattatgattttattttgcattatataaaatcttcatttatttcctcttttctaaattctagagtgcaaatagggttagaactaattctcttcttttatgtatccttatcatcattaccactgtgtacaaatgcacaaaccaataaacaccagcatgatgcatgtattatttgagtgtcttttgttgtgattttcacatgaaatgatgaatataggtaacacacatatatgtaagggaagactctttctccttttacactttcttacaatttgagtattacaaatcctaccccccttacaaataatctcgtcctcgagatttaggaaggtctagggaaaaggtgaggaaaatctatacgaagctcttcttctctttcccaagttgcttcatcttcactgtggtggctccattgcactttgcacatctttataaccttattcctcgtaactcgagtcaaagtatccaaaatcttgatggggtactcagcataagtcaaatcttcttgaacactaaggtcttccattggtaattgctcctcaggtaccctgagacatttcttcagctgagatacatgaaatacatcatgaacatccgcaagacgatccggtaactccaattgatatgcaacttctcccactcgctttaagattaagaaaggtccaataaagcgaggggacaactttcctttgactttaaaccttctcataccccggagtggtgacaccttcaaatagacataatctccctccttaaactcaagcagtcttctccgggtgtctgcataacttttctgcctggattgtgcagttctcaaattctcccttatttgctgaacttgttcctctgcttcttgtataatctcaggcccaaacaactgtctttcaccagtttgatcccaacacagtggagtcctgcactttctgccatataaagcctcaaatggtgacatcttcaaactggcctgatagctattattataagagaactccgcataaggtaaactcttatcccaacttccaccatgtttaagagcacatgctctcaacatgtcctccagcacttggttggtcctctcagtctgcccatcagtctgtggatggtaagccgaactgaaatttaatcttgtatccaaggactcgtgcaacttcttccaatatcgagaggtaaactgtgatccccggtctgacacaatcttctttggtacaccatgcaggcatacaatcc

SEQ ID NO: 62058 - DNA, 778 bp, Zea Mays
cattgtttgcagaaatcgaagaattcagagttggtgaagttggatcctaggtcagttatgatgctatttggtatcccaaacctgaatattatgtcttgtatgaactccactgccttggctggtgttaaagaggcaataggcttatactctatccattttgtgaatttgtcaatggcaaccagcacatgagtatagcctccctgagctttcttgaagggcccaatcatgtccagcccccagcatgcaaatggccatgttatagggatggtctgcagttgctgtgccggtaaatgttgttgctttgataagaattggcaagcttcatatctctggacaaactccgcggcatcactcttcgctgttggccaatagaaaccagatctgaaaactttcccaaccagagttctggacgcagcatgtactccgcattgtccggcatggatttcccctaacagttgcttcccaatagccgagtgaatgcacttcatgaggactcttgtcgtacctcttatgtacaatgtgtcccctatgagggtgtagtgggctgattgtcttgcgatgcgttccgctgccgccttgtcatccgattcctcttcatttttatgtacctgatgataggctctctccagtcattggggtccaactctggttggctcaatgtgttgcactcttccgtctgatctgagaaaatactcgggcgtgatacttcttggacgaagatcccgggtgggacctgggcccgactggatcccagcttcgacaacgcgtttgctgccgc

SEQ ID NO: 62059 - DNA, 656 bp, Zea Mays
ccggtgtccttgttgccgctgtccaccatgtcctcaccaagtgccatggtgcagaggcctcctagtatatcggtgaggaaggagagtatgttcagcttgtccttgacccacctctcatgctcgtcatcgttcgaggaagaagatgagtcatcagagttgtggttgaggtcactgagggatgagaggaaggcacacaccttaaccttaaacttgggcttgctagaggtgtactcgtgcttgcctttgtgccaaccagcctctggctttcctgggcaactagcgatgaagtggttgggatcgatgtagttgtagcatccatccttggacatgccacaccgccaattcagatggttgttgcgtaactatgtgaaccaactggccacaagcatgagctcctcatccctaaggctctctgccacctgctcctctgtgatggtatacggagaagacaaagcaaacatagcaggtggggagttagaggaaggaccacctccaaagactagggccttggtggatgcactggggttctcaatcttggcctatgtctggtggtcaatcttagtagactttagctttatgaaaaactcatctacgatgagagtctcgtagttgggtgactcgatgatcgtcgagactttcaccttctaatccctcct

SEQ ID NO: 62060 - DNA, 500 bp, Zea Mays
ggagagtgagagagagctcaacatagaaagcgagagcatgctccgagggtaccgcgttttaccaagaacttgaagctggaacaacatgaacgatgacgaggacagcataaatgatgcgaacactagttgacatgcatacaacatttgtgattgcttcatgaaagtaattaaagagaaataatggtcacatattattgtgttaaaaaagtttataaattttgcgacagaagcatcagatttttacaactgtttgtataaggtgaattttgtaaataaaataggaaacacctacctcctgctgtaattgctgcgttccacggccttcaggggagtttaatattttcacaactgctactgtatgatgggatttcagtatttcaccttactgtgccatatgatctcttgccaatcataacagtagcagagaatgatgaggtcgacgcctgaatctcctcccaggtatacctattatactcatcaaaatcgtgccccgctatctt

SEQ ID NO: 62061 - DNA, 397 bp, Zea Mays
ctatgtcctctaaggatagatctgactagccttttgcaatcaaaggaagccgctccatctacggaggagaaggccggggggcagaagaaacggtggatgataaatgtgatgcaagctattgagcagatgtcacccccatcttcggtggcaaaagcagttgtgcctgttgatgccgaagataccgccggagctgatgaactcacaaccacaatgtcggaaatcgacagactcatatcggatgtggttgccgagaaggacatagccgcaatgcctcacaagggaaaaagaattgaagatgcctcttcggaagataaagattttgaccttcggcattggggtggccaagaactttctgaagaggacaaatcagaattgaaagagtttgctatatcctgcg

SEQ ID NO: 62062 - DNA, 800 bp, Zea Mays
ggaccacttagcttctcaccgaagtaggcaattggtcttcgttcttgcatgagcacgcctccgatcccaattccactggtgtcacattcaatttcaaatgtcttaccgaagtctgggagtgcaagaactgtggctgttgttaactttgtcttcaattcctcaaatgccttctgttgtgcttctccccatttgaaaggtacttcttttttggtcaatttgttgatgggagcaacaacaatactgaagtcttttacaatctgccggtagaacctagcgagcccaaggaagcttctcacttggctcacattctgtggaggcatccagtcgcgtacaactttgaccttttcttcatctacctctagaccttgtcctgatacaacaaatccaagaaatactaccttgtcagtgcaaaaggtgcacttctcaaggttagcatacaatttttgttctcgaaggaccgcaagtacgtatcagatatgttcaacatgttcatcaagggatttactgtaaattagtatgtcatcaaaatagacaacaacaaatttgccaatgaaatttctaaaaacaagattcattaatctcataaatgtactaggcacatttgttaacccgaagggcattaccaaccattcatacaacccaaattttgttttaaaggctattttccattcatctccctatttaatatgaatccgataataaccactttttaagtcaattttagtgaaaataaaagcaccactaagttcatcaagcatatcatctaatctaggaattggatgtctataccttacggtgat

SEQ ID NO: 62063 - DNA, 361 bp, Zea Mays
gtgaaggcgtcgtggcttcgtgccccggtcaggcgccttaccgacccccctagagcgaaacaaggatgctcttttaagggattcaagcatggtatgtttggccttagaagtgactaacgctgaggtgcgacatctacaatcgcgactagtgactcttgacaatttggggccaggtaaactgtcgtggtccggcctttaggctctcgacgctttgtagattcctgactacctggtggttcgtcgtaggtcctcggcatgaagcgatgggctttttcctatgcatagatcgggctacaagattcgtttgtgcatgggggaggaattagaggtcgcgtctccttgacatcctggagcacgttca

SEQ ID NO: 62064 - DNA, 1357 bp, Zea Mays
aagaaagagttgagcatggcaataaaatacttcattttctagcttcaaaattaacctctatacctttatactgttgtacgcgaggctatcagcaagatcatccttcgacaagaccgaaaggccttcttcaagcttaggaaatcccatactcttagctatctctcggcacacggatatttctttgttttccgggagacagtacaggaaatcatcttcgttggtaccattgaacactaaggcccccttcagatatttcagtctttgggcatagtgtttggcctccaagatctcttcttcagataatttttccccgaagcatgtcgaacaatgtaatcaatatcttcagctaaggcttcggggacaggagattttgctttttctaccatatcttgctctgtcgtcttgccggtatctaaaatttactgacccaccttatcttcaggctcggcggccttcgtctcagtaggcgctgaaggcccagctttggcttcgacttggattttggcagcttcggtagttttcttgggaggagcaggagttaaggccttcgtggtctctataacagcgtctagcacgctggccatcctcctcttgggagttgcagcaggagctttttgcatcttcggcaaatctgcctctgctggtgggctcaggatttctggcacttttatcactttttccacctgtggctcttcggccttatcatctttagcttcggctggcccgactgtaggcaccttcggcactacagtcagctcttcagcgctctacacaatcagagcagtttgtcttgcttcggcagccgaagagatcccttcgccaaattcaggtactacgatcggttcaatataacgtggccggtgggtcagaaccttcacctttttgctcttcggcttagctgggtggccgaattgacagtctttctctttttcccttgccctcgtagcgggtattggtaatcagggtatacaaagccaatcgcatcaaatacactgtttaatcttttcttgccccgactcccaaaaactgcggacaaagcattatcttcggccttggagtatgcccccgagttgctcatcactagtagcttcaatacacttcagccagtcatcgtctagctcatcaatcttctccctaaatctgaaggtatacttcaatcgtaccagaccaccctcactggaatcggtggtggtctccttcggcatatcccagctctctacaagtggccataccctgaaggctatatgatcttgaatcaaatccctcgtgccaatgaaggcacacacagtgctaaaggccttctgacatgcttcaacattgccatcaatttccaccttcggccttcggaggccgaagc

SEQ ID NO: 62065 - DNA, 440 bp, Zea Mays
cgggaaccgaaggcctgccttcaaaaagcttcggtaaacaacaacttcattttcctcaggagcaggggcagtgatgtctcctccaaccctcaaaatagacatatcgtgaaagtatcttcctctcatggtgtcaatatgactttgtttaatggtcgattttccgaagatagtatggcttggccgctagggccggtccttagaatcttcatcctcgctttccacatcataatcatcgctgtcatcagaatcttcatacaagccctccattatctccttagtaatttcctctgtatttgtttttgccatagactcataaaacccagcaataaaaggatccgcaacttttttctcttcatacaacttcttctcctcagttatcttcttctcctcagtcatcttcttctcctcagacatggaacaagcacgtctttaaaccaaag

SEQ ID NO: 62066 - DNA, 1000 bp, Zea Mays
gatttaaattcgggggttcggattaggtcccacccccgcgacctagtgcagaaccgagagccctccaatggaaaactaacgccctagatttaaaatccttagattgattcccacatgcacgatctgtatcggacgaccgagatccccaatcgaatcggtacgagacaactaccactggatcgagatccgatggctcagatcttaagctgcgaaggggtacgtggcttctaatctcatccactcgagccgcatcggacaacgatgggttcgtcttcacgcgccgaactagagtgcggtggcactgccagtccccacaacggagagatggccggagttcagctacaccatgcaaaagggccctagattttaatctaaattgtgcaatatgtagtgaaggacatggcgaacgcagggtaacggttcctcaccggcagggacgatgtacagaggcctgaccatggagaatcgtggtctacggtagattcaatctccaacgagaaatataccgagctctgaccgtccacggcccctgaactccacatggaggtgcccgcagacccttgacgaaatgacgagacacctcgagcacagattcgccctgacgacagcggctttatctctccttctcggcagtgctctctctcacgacaaaattgggattttctgggtctggcgatgcgaggcgagtgaggtgctgggttttgatgggaaacggggtgcggtccaacgcctcatgccacgcggatcggacggtagttcaccagctggtgccaggaagtttggcttctgttgcaacgcctagctcgggttatgatgacggggatgagagatgacggctaggccccaccagcagagatgatgtgcaatcaggtgactggctcaagagtcaagagccccacatgccaggtaacacgggcgcgcaggtgcgaccactgtgggccaagatcaggggcgcaagcaggccgtaggcgtggtcttggtgggccgaaatggccacttg

SEQ ID NO: 62067 - DNA, 456 bp, Zea Mays
aactttgcagtggcgggagggagacgaacctgttgtggcggcggcgaggaaggcaatctccgattggcggcagtgaacaggaaatctcaactctgcgatggaaagacgtgtcgatggatagattgcaggggcaatgtggtcagctgagaagacgaagggaaaggagcaggagataattgaaataattttaaaaaatattagactgctattaagaatgacaatatcacttctaaatactattagtgagacgatggagttcagagtactctaatagagaagcctgttaaaacaaatattataatagcaaaaaaatcgaagaagacaactgttaggccccgtttgtttagttggaatgccggcgcgggcgagcaggcggtggcgattgagaggtagcctactagtgttagctccctgaaattttgcttgtgtgttggttgcgattggatacctggtttt

SEQ ID NO: 62068 - DNA, 763 bp, Zea Mays
tgactggatgcctttgatatctagaagcaattgcatgtgtggagcaagttcacatgaacaacaagaggttacttacctattggaagtctatttgacacttttgcattagcacaacgagagatggatgtgttgttcatggcaagtgtagcgacatgggtgatgagctccctcctcgccaagctcgctgagctgctcagagaggactacaagatgtagaaggcatgaggtgtgaggtcgtgttcctcaaggacgagatgagcagcatgaacgcgctgctggagaggctagccagctcggatgcgcttgatccgcagaccaaggagtggagggaccaggtgagggagatgagctacgacatcgagggttgcgtcgatgattacatgccctagctgcagaatgagatgcagaggcacgatggaatcttatgattcttccttgggtatgtccagaaggtgaaggatctcgttacctgtcacgaggacgccgagcagatttaggagctcaaggcttgaatcattgaggctggccacagaaggaagagatacaagaatgatgacgcggttaattctggtgtcgccaatgtgatccctatggaccgtcggttgccagcgctctatgtagaattgggtagccttgttggtagcgatgctcctagagatgaggttatcaagctactagatgatggggtgcgagggctaaaggtggtgtctactaggtgaaggttatcaagctactagatgaggttatcaagctactgggaaag

SEQ ID NO: 62069 - DNA, 770 bp, Zea Mays
aaatttttacctagtgaatgcatcctaggtgtatcaaacatatgaaatgctaatgctgatgatgtcatgctcaagttttagtaatagtaacactaggggtgttacatccttccccccataaaagaatctcgtcccgagattaaaagtcccagggtaagtaatggaaaaggaaacacgacatgtctttatttccttattcttggtacaaagcaggggtggtttcgggatttactcctttattacagcaactatacacactttacaaattacatgaggccaaaaagcctaggaaattcttctctaaaaagtcatgagtctcccaagtagcctcatcttcggaatgttggttccactgtatcttgtaaaacttgagagtttttctccgggtaaccctgtccctttgatccaagactcgaataggatgctctgaatatgccaagtctggttctagggcaatatccattacgtcaatggttcgatcgggaacccgaagacacttcttcaactgagacacgtggaacacattatgtacagcagacaaggtttcaggtagttgaagtcggtatgccactggtccacattgctcaagtatagggaaaggaccaatgtaccagggtgcaagcttccctttaaccccgaaacgtgttacacccttcattggggagaccttcagataaacataatctccaaccagaaaatacaagggtcgtcgtcgcttgtctgcataactcttcttacgagcttgagctttcttcaaattatgaataatt

SEQ ID NO: 62070 - DNA, 553 bp, Zea Mays
tttgtaattcagcttgtagtctatagttggttcaaaaatctggagtctcatttttttatagtcaataggggttgattaggagagcataggtatccgactacttattatgtggatataagctggacaggttgtggtaagaaagattatggcaaggagaagacttcatctgaaatatttaaatcctgattcatctcgagatttgctttgatttgtatattcttccttgtcgatgttggtcttttcttctccagtctttgatctcattgagtcggggtcagtgtatatcatcggagttgggaaataaggttaagataggtatcgatgagatagacttcatggtgtaggtcaaagtttgtttgatgttgggtggggatagacagattatgcaatccatcatgactctattggttgggttagctcatggttgttattctagagtgggataaatacgctaattagggcaagatgaatcccgtagaatcttttgaggttagttagatctattagaatgacatgaaatctttttcaagataggatgattctattaaggcaa

SEQ ID NO: 62071 - DNA, 606 bp, Zea Mays
aaaagatccactcgtcatctattacatggatacatatagcactagtggtgttttcagtttagataaaataaatgggaacacacagtgggaagttgtagcactccttctattaatagcctggcctaatggaactctttggatggttgatactcttctgcatgcttgtacgtgtgtggacatcaacctggttgctgactgccttcttaactcacaaatttatttgtgatccacggttgatctacatggtagctgaatggtctatccttctccctttattctcacaagcatgtccaagcaccaagctatcattattcttctaagtttcacactgcaataccagcatgtcacagagagagctgatcatcacaatgttggaaggcaaaatccatcatcgtcccatgaacttgggtacacgccatcattcctaagaatattcaaacaacaacttgaaagcactgactgatctagatcgttgtgattaattaaaataaggttagcattcacctgagaataaatttccttctctagttgtttagctcgcattcttgtaactggaccataaatatttgttgcattcttattctttataattttagtgtcaatgct

SEQ ID NO: 62072 - DNA, 595 bp, Zea Mays
cacgacatgtcgatgacgggtagagagacggcagcggaggttgccggcgggacctggtcggccgggaagacgaagcagtccggaagggacgtgcgggacgtggtcgagtggagcagcttctccatggccatggatgatgatccgtacgtagcgcacaacaacagattagagattcttgtgaattgcaccacaatggtgtggtatggtatttgttcagcgtggtggagtgaagatctcttcattcgctgatacatacatattatactgtccttatttatttgcgtatacttgctagtggtcagtcaagtcctcgagtgttttctggggtagaactcaactgctctaaggtctcaaacaagattttgtggtgctgctgtcgctgtcgggctcaatatttgcaaggctagctttctgcatatatccatttttttacacaaattctaccattcacatgaatgattatatttcgtatcatttcagttggcggcagatcctttattttccaccgagtgagctaatggcggcttaggaaaggggggccaacgaaataatcatcccgcgggccgggtgctacggagtcatcgtcattatatat

SEQ ID NO: 62073 - DNA, 926 bp, Zea Mays
gccaccgtcgtggaacgatggtcatgggggtggggtgtacatggggacgctccttggtcctctctctacaacccatggaccagttgcatcatgtggcttggccgattcctaggtggacattcctcatgcttgtctcaacctcagctggcttacttgatgatgcatgaccaaggatatcctcttggaccacttccctctgtgccacaagcacctcaactaccgctaccacccccgccacccactttgtcacttgctagcttgtttagcatggtgaccctaaccccctgttgttactaactgggttgctacttttggtgcttcctatcacaccactctagatgctgatatactttcttcttcccacccacctttcatgtctcatgcatcatctaccattatggcaataggagcattcttctggtcacctatgtgggtgatttggttcttcctgggccctttcatctccacaatgttcttgttgcccccaaattgttcacaattttttatttgttcgttagttttccattgataactcttgctctattgagtttgatccttttgacttgtttgtgaaggatctcgctacctaaagccttcttgtccaatgtgatagcttaagcccttgtacaccctaattctgtctatgtccacttctccacctactgcttctgctacattgccttgatccttaccgcagccgcacacacaagctacttcgactacctccaacactcagcatccagcactacaagaaatacaaaaggagcatagtcattgaaaccttgacacccaagagctcttcgattcacaccaagataggtttctagcctccattcatcttggggacatcctcctactgagatctatccacttcatgcaccccaatgacattacaaggaaatacctttggcacatcattagataag

SEQ ID NO: 62074 - DNA, 556 bp, Zea Mays
tcgccagctcagagacctcaccgccggtgaccatgcgcgcggattcgtgctatcgccgtgattcacgccgaattaaacgtgaataacgatcacagggtgaaagatcttgccgcgagtgaactgggatgtactgtgtgcttgatggttcatcagtgcacaccggcgacgtggccgagcggctatcaccggtgtgttcgccattcaccgtgagggcgccacgccttatgaagtttaacgcgtcggtatgagccatagtgaccatcctgtgatcgtcgtagttcagtcgctctgcagttgccacggtagatcgccgccgtgactcattcccctctcggccgccagcgcaattcgtccaaattaaacgccaccgctcaagcacactataaattgagcacaccgaatggtccgtagggtaatcaagcactgatccaccaagccgtgcccccaattactcaccaacaagccccaatttcggtttccccccaaatcaatcccgagcaccgctcaaagtgatctcaccgtggtcagcgtgctccaggtctattcgtgctccctg

SEQ ID NO: 62075 - DNA, 857 bp, Zea Mays
aaagaataggaaaggaaggggtatcactagattggatgaaatatttgcaaagaagcgcaacatgcctaaaatcaaagtagaactcaataaatatggttagcctattggggacaattgtagaaggttttctagtgctcttggctgccatgtgagaaggaaattatcagttggttgttctgactggagacttgtggatcctcaaaagaagtatgaagtgtgggaagatatgaaggtatatcattatccttctttgatgagtagtacattattacccacatatacaaccaattggctacttttgcatgaaaaattagaaaatttatgatatcgatgatgttgccttcagttggtttatggatagcgccgaaaggaaatggaagaattttaagtcaacattaaagcatcatttttttgatgaaagcatatcatatgcagacctaaaggcaagacataaaggtagagttaatgatgatgattggaagtttctcacagaatattggaggtcatctgaatctgaagtaagtgtaaactaatattctcattgagatcacaatatttgctcttcaatagttaattgcactatgtaccttgtactcagactcgctcagaaatagcaaaagaatgtcgttcaaaggtgggaaatcatcacacttcaggaagcaagagctttgcttgttctacgcatgaactagtatgtgaaactttccatgacctttttaaaacattagtttgcaggtatctcagtgttgaaatttgcaaaacttgcaggctcataaactaaggcgttctccaagaagagatgaggtctatatcaagacacatacaagaaaaaatggagttccatcaagacatgcaga

SEQ ID NO: 62076 - DNA, 307 bp, Zea Mays
ctttttggcaactccgctggggacggggttgtagatctacaaaatcaggcttacatggccaattctaaagatctcaacagtgcttctccaaacagcgacacaaggctgactaatttatcggccgcagagcatgaaaacttaaaagatgacatgaagaagatggatgaggagatccaacgacaacaagatcagatgctcaaggtggcgaaaaagtggtacctctcacacttcaaggtagatcgccaccagaaggtcgtaaaggagagggaaatagactctgattacatgtcatctgtgctgcaatagc

SEQ ID NO: 62077 - DNA, 614 bp, Zea Mays
aagacacgacggcgatgagaacagtggtcggagtttatctccagcgtgatactttacaccgaggagtgcttatctgagtttggtcgggcgtgaatcgcgacgctggcgcgaatccgggcacacatgtcaccggcggcgaggttctctgacctgatccatcctgtgcactgtaccatcgtgaaatgcacttcagagctcctgacagcccaacttgtagcgtccagaacacagatttcttcataagaacttgctaattcgccagtagcaaacttgtagcccttcataccagctacaattatgctatagcaacaaccatcaattgatcaacagatctagctcaaaatggctctcaaacctagttctaggccattgtaagtctgatttcagggttaagctcgtctgacagaccatcttcagatctgtttttctcttactttcatgtagcactagggcttacttacttaataaaaattgttctccttacatagatctacaaaattgatgtggtgatctagggcaaaaactttatcacatggcaggtatagggctccaaagttgagctaatcctactgaaattagacttaacccactagagctcaaatgtgactttttgc

SEQ ID NO: 62078 - DNA, 576 bp, Zea Mays
cttgagtcgaaagtcgcaatgcaactgtgtcacgatggattctcgcatcaacacactgtgtgacgagttgagcaaaatgaagattgaagtgattccttctggtgctttgtctcacatttccgttgagccaacgttgcgagaccagataatcatggcccaactcagtgacaagggagtgcaaattattaaggagaacttccatcagaagatagagaagtataagtgtttccgctaagatgggaagggtatattgtggtttggaagcagattggtggttccgaaaaataaggatctcaataagaaaatcttggatgaggctcatctctccaaattctccatgcatccaggaagcaccaaaatgtaccatgatctgaagtccttatattggtggaccaaaatgaagagggagatagaccgttatgtatcagaatgtgacacatgtcagaggataaaggcaagccacttgaaatcagctggtgccttgcaacccctatcaataccttcctggaaatgggatgacatcagcatgtatttcattgtgggtctgcccaacacatctcggcatcatgattcgat

SEQ ID NO: 62079 - DNA, 313 bp, Zea Mays
cacagactcagcagaagagctatgatgataatcgaagaagaccactggagtttgaggagggtgaccacatatacctcaaggtgtcaccaattcgtggaatgagaagattcaaagttaagggcaagttatcccctcgctttattggacccttcagaatctttgggcgagttggggagatggcctaccaactggagctacctgatcatttgtcggatgtacacgatgtattccacgtgtctcaactcaagaagtgtctctgtgtcaccgaggaacagttgccaatggaagagctcagtgttcaaggtgatctaac

SEQ ID NO: 62080 - DNA, 460 bp, Zea Mays
ccgccgccatacccgcctgagtcacaaccgctttggatgggctcgccggagttagccacgtcacaaccttgcaccacttgccttggtgctttaaccacgccgccgtgagtcatcttagcccatccggtgatcgttggtgagcttgccacggtaaatgctaccaatcgcttgcgccagtgcacccccttctctccgaccgccaccgcgcgagctcaaattcacgggccaccgctcaagggccctataaattgagaacaccctcggctccgctaagtattcaagcatcgaatccacccacttgtgcctccaattactcaccagagagccccaatttgggatttcccccaaattggtctgaaacaccgcacatagtgacctcgtcgtggctagctcgttccaggtccgttcatgctctctgctctcccgtttcagtgtccttagattctcctgatgctcctcg

SEQ ID NO: 62081 - DNA, 285 bp, Zea Mays
tagtcagactccatgtcattccaagaaagatagtgtcagacagaggaacccagttcatctccaaattctggacaagccttcagaaagctatgggcaccaagctagacttcagcaccgcctatcaccctcagacagatgggcagacagaaagggtcaacaaggtcctcgaagatctattaagagcctgtgtgtgaaccttcgatagaagttgggaatccagtttgccttacgtggagtgctcgtataacaacagccatcaggccagcatcaagatgtcaccgttcg

SEQ ID NO: 62082 - DNA, 656 bp, Zea Mays
ccgagaagaggggatgagtcaccgcgatgatctaccgtggtgttcactagacaaaggcgtacgactattactggttagcctccacggctcaaagcgacgtggtaaaacgacccaaggtgtggcgcgaccgaatgaacggcggtagtaacggtgatgaccgtgcggccacgtcgccgggcaagtgggcacgacgacagggcgaaacagtgccccaagttcatctcctgtgcgatatttcttaccctgtgtagttatctacactccaccgggcacgaatcgtagcgccagcgaggatcgtggcgtggagtcttcggcggcgagatacagcgaacctgcgatctttttcagtgtactgtaccatcagaactccatttagagcgcctgacaaagcatgtttgagagcgatttagtccaaaaattgttcagcacctagtcaagcttggtataacaaaattattcactaatgttagaccttcaattttgccacagtgaccctgaccttatctccattgaataaaccatgaactgctcccaaagttaaccaaatgtcattgaacttaggttttcagagttaaggctgtctgacaggccaatttcaagtctctttttctccgattttcatgtagtacttgggcttactcacttaataaaatttg

SEQ ID NO: 62083 - DNA, 570 bp, Zea Mays
gttttttattccaaatgataagacccctcaccattgtcttttgttgccttttgttatcttcggcactttggccaccttcgttttcttggcaattttcatttttcaccttaaccgacctaattgcctctctcttcatgagactgacaattctttttatttttattttggcattagcttcctcctctatctttagataatctaggtattcaaaccctagagaatccataactctattcaaccttcgttttgatcgaccgtcgaaggcagccattattaacgggtcttcttttatcatataatttcaaagtttctcattgcacactaactcaatagaagttaaccaaacgatgcatgggcctttgaatacaaagtgccttttggagcgataagccaaaaccttctgcacaccactctttgtttcttcgccccctttgcaagcttcagcatttcctagccggatagcatggggaatgtctggtttgtaaggaaaccacggtattggaagctatgtgggttgtttgagaagatgatccaagtgccatgttgcataatggtttttgtagctgaagc

SEQ ID NO: 62084 - DNA, 558 bp, Zea Mays
agaacattaccatttattttaggagaaatatattaaaggtaagagaatcctaattacatgacatcccattttaaatccttttggagatttctctaattcaccaaagtatgatttcaggtgttacatgggtacttcagctcgggcatgtagcaaagtcttcatcctctcccttcatagggggcaaggcaaaggtccacgctagacgaggagggggctcgttagcaaccccacatactcgtcccaaaggctcaggcggcaaagtcagagtcccaacgaagtcagagtcaaagcaaagtcaagggcgcaacctcgcgaagtgaaggacgcaaccaatgacgaaagccacgccgattacggtgggacccagacgctgtcccacacatcgctcgagcccatttgtaagcctccttgtggggtaggttccaaagtgtaaccgagcaaacgtactttaccgcactgtaatgaccccattgcggggaacattctgtgaatgtagcaggtaaccagggcataacagtacttatggacccacctatccgctcgattacctataaaaac

SEQ ID NO: 62085 - DNA, 624 bp, Zea Mays
gaattatcgatctgtaatgcacacacctagcacattgttgctacaatatgtcgaagcaattccgacaccgagaaacgggttagaaaaaaaatatgtttgtgtctaaacacatgcaaccgatcgatctcaaccggcctgaccaactgcttcatcaccactggtacagacatgtacggactacacgtgcaattgtatgcagacgtcttggctgggtccaataacacatctgagaaattttgagcccggaatgcacgcaacgcaacatgcaaagcaggaccactactgctcacatgcgtgtctagctagcatacagagagctcaggttcttgctttgctagctagccatatgatcagcgcatcatgcatatatatcgccctgaagtttctgtcctgtctagcgtatagctgtctgtagtaccgtttttaaagagaggcaaaaacattgccagcgtatattatcagaagaagaaaaaaaatcgatctagtttttaaggggtcgtcgtccttgcatcatgaagccagttcatttcatatattaattgctgctctccagcgtcggtcatctgccggtgatccatacttctcatggacagtgcttgtcgctaccaaatcctttcatcaggt

SEQ ID NO: 62086 - DNA, 683 bp, Zea Mays
caacgaatggcgtaaactgaaggcccaagcatcagctagttgcaggactacaacagcaaggataatcaatccatacttgggatcaatttgacttgcctcctcttttttttcttctcattatgtgctgcagcagaatcgctgtccatcctagacacggtgctctgctgaatggttggttgatcgtggaggatgggcactcggcagaccgcggacgagaaactgaagctcttcaccttccacctgcttgggtcctgggcaagctggaccatcacgcggacgtcatattttttttttagaacttaaaacatgcatagctactaaaccgtgcattcaaataaaattctaatcacaccccgtttggatgtatggattggccctcagaatctaggaaccgatattgggctgaggcaaatacggcagtttggttgttgtcacgtatttgcaatagggaatcagctctgcccagccaattccataggacgtgttcattttgacactatgcaaatttgacactggtgcacatcttttatccgtcattgttgtccatgcctcgtagcctcaccaccatgtctgaccaagcaatagatttgcattcatacaataattgcagaaaacaaaatttaaaaaaaaacggaagagaagaagaatcgtgctggcagaatgctattttgaaacacattgtt

SEQ ID NO: 62087 - DNA, 1327 bp, Zea Mays
gtttttttgaagggggaaaggttgtagggtaaatccctatagcacgattttatttaatcaaaaagagggataacagagataacatgatcaaaagaaacaaagaaagaaaaccagagggaagggtgggaaggagcaggctatcgagaatttagccacgaagtcaccctggcactaaacctaaacatttacatcttcagcatatcactgaagtaggactgccaggaagaaacagaaaggggcaatgctcctgaagatgaagtcatttctttccttccaaatgctccaaaccaccacaggcaagatatccatgaagaaattgtatcgaaaagcactcttagcaacctcaatcatcgagaagaaatacagatcatgataccattagattcccacgtaattccagcattctaaactgaaggggcaatcaaacaggtggtgatatgttgtctcttcacagcctcggtcacagaggatacaattgaggttgttgccagcaatcaagaaaccctttcttccgagagtaatcttcgagttgattctatccctaaaaatcagcctgacgaacatcttaattttcttacaaactttggactgccaaatccagttgaaagttgatggaggttggattgatttgaaagttaaattgtaaaacttggaggaactaaaactgtcatttctccgaggataaatccatttgtccttgccaactctggaagtttgcagctgatcaacaatctcatagaacaattgatattcctaagtagcccgaggagaaattccctagacaatatggagcaggtttcatttatcacttttggagccctcggagttctaggttgttttttatttttaatttgtactgacttaatttggcttacaaagggatgacatgtttagcaaataaatggtgcgaaaatacatgttacattaaatttgtggccatacgagaagagatcgagttcggaatgatgatatatgcgacaggctatgagcaacaccaataaaaaaacttgtctaatatcggttgaggtggtctggatatgtccaacgaagatctacaaagttacagatatatagtgagttactaagaagcggtagcgctagaaagagagagagaccgaagttgatatgggaacatgcactaaatgaaaacttagaatgatggaaggtatccaaagattcaatcttgaatagaggtgcatggaaaatagttattgatgtacaactatctatgtgcctaaaccattactggtggtttctgttaggtgtaggtttaaactctagactattctaacttgtttgagcctgaaaggctttgttgcatggaaat

SEQ ID NO: 62088 - DNA, 857 bp, Zea Mays
ggcattcatctgttgtgtattcaatttacattgtaattcatatgattgggtcaacatatcattgatgttataaaacaattcttcttcgatgaaccgatttctctgcaaagcttgggaagatacactttttggaggtaggttgtgatcctttatgtttccaccacatttgttgaatagaattgtaagttggtctattaggtgatcccttatttgatgttcatccatttgatatgtagggtgattcattgttttgcgcatgttgtattgaatgtcatccgctagtaatttccaaactttctcaaagaatgtgtgttcgtctccaacttcgcaaaatagcaacatagtcacaaaaagttgtcgaagctgattcgaagttgcccatttagctgcttcatcaaatgcattataccactcttgatcatcgtttagaagaccatgagctttgcatgcttctttgaaggtgcggtgtagcacaccgttatgttttcgtagatcttcgtagctctgtgcacctttgacactcaatagcaacattctaagataatatctttctcctgatgatggatgtacatagtagatacgaccaattttgccttcctttgttcctcttggtctctagcttcttgttcgttcttcccatcgccattttgatgggaattctatgtaagttaactctcttgcgtcctccctttctttattggtagtaaaccattcagtaagcattgttttgtgtagtaatggttcagatagtacttgagacatatctgatgttgcattgtatgtgattgaattctcatttggtaggtgaactggcattctttcaacagcaggatagtgtctatggatttcataaccta

SEQ ID NO: 62089 - DNA, 293 bp, Zea Mays
atcttttctatcataaacaattttagaactgcaagatatacaattcttgtgcattccgaattttggaaatgttcctttttctcatgcagaaggtatatcaactagttcaatttaatattggtataatatttgtcctccaatgctgcatttcatttcaagtacaaaagatggaatacaggcacccaaacaataaaggaggccaattgtcttttatcatgccacaaagaggtgatagaaatggtgaatatttaattgtgttgctactggtaagtctttgcagatccttgctcctg

SEQ ID NO: 62090 - DNA, 1425 bp, Zea Mays
cttcttctctttcttcctcgactggcaacacttcttgcatgccaccaaggcttctgcctttgcctccctcttcctcttctccaccttgattgtagagtcctcaagaagggacagaagacatggctcgataggcctggtctcttgtagagcccgggtcaatcattcccaacaaaaaagccaaaggagcaggagaagacaagggagaaggaacttaccaaactgcttacaacatctttggaaagagggaggggtgaatcctcatccataaaggtccccgatgacaacaccgtgacagtattgagccgcgcttcgatctcggtcagcacgagtggctcgaaggaatgacagtcattgtcattgacaccggaatacttgtgcaatgacttttgatgggccatcagaggctgaacccaatgctgcataaaagttgcactctagccacacgccggtgagtccttgttgctttagtgcattgaccactttcagaagatgtgccaccttgctattgaaacgcgcctctgtgccataatgccacttctccatcgacaccggcttccgtttggtgaacggaggagcactgtcggccatgttcttggcataaaaccactcgccctcataccgcatcaaggatgggagcagaatcttgaaatactccactttccagcttgagcagagttgaatgttggctgagccgatgtactattgaccaccacagccaggagtcactcatgcgctgaagaggtactaccacaactttctagtaggggtcgatgcccatgaaagcctcacatagcgtaatgaagcacgctatgtggaggacggtgttgggatggaggttctggatctccacctagtagtaatggaggatccctcgcatgaagtgatgcaggggcaggccaaacccgcgctcgtagaaggacgcaagaacgaccacctcgttgtccctcgtacacgacatctcactctcgctttgcagtctccatcccaagacctccttcgcaaggatgaaccctttcttctgcaaaccaagaaggcgaatctcctgaatcgaggaggccgacgccatgagtgcgaagaatgacttgtgtggacgcaaaatcacagggagacacaatggcagagggcttctgaggaaacaaaggggaaaatacttgggcataggaattcagtaagtgaaactgacctggggtatctttcttttcgatttatatgcaggcaaagggaatccaagcagtgtttataggtgcccctccacgaacaacatgggaggatccaccgtttcaagcccacaactgcctcgggccttgtgtgaaaaatattcatattgcaggttccacaccgcctcgaacagagcgccaaggggacacacgataggggaggcaccagtaatgggtgagacggttaaccaccttatcacgccaccta

SEQ ID NO: 62091 - DNA, 493 bp, Zea Mays
tgggtgcgtctcgatcagtctgtcgtgtttgggcgcaaatgctaatctccagatagattaaaggttgtttgcgagcgatgtgtaatctaattaagcatgtaaaggtagggcgcgggtgtagattaattttccgattcagaatgtcacgtcaggtgaatgaaccggctcgaaaacaaaatgtcactggcaaatcgtagtaagtgaagtaactgagcagctaggacgaggtgtagcaactacgtgctcttctggacagctttagctagctagttatgagtttatgactccatgcgtgtgactgtgtgagtgaaagcttgcagattttgcttgcttttctggacagctttagctagctcgaggggaacagtacctgcagcacctagatcaagaggtatgtactgtatgttgcaataatattttttcacacatgtttttcatcattgatttaatgcatgtttatatatgttcatagtgtagactgctaccatttttt

SEQ ID NO: 62092 - DNA, 363 bp, Zea Mays
ctttagtactaccttgagtcactaaattatgccatttcagacacagaaataggtgaatatgacgtttcagacacaaaataggtagaaaacaagtcatttctgggcggatcggtaggtacgtctcccggtgcttgctcggctgggcccacaggccgattcacatcccatcgtggctccattttccaagacgcgtgcgcccgttcgacagcccgaggatatcctttccaaggtgatttcagcggcgcaaggatcacctcttttgactatgcaggcactacggggtccacaagatctctcgcatccgcctaatgagtctggttccatcaaacctgcgcctgctatatctcccgagaaacctaggcg

SEQ ID NO: 62093 - DNA, 359 bp, Zea Mays
ggggggggtagagataagatggcactgtagtagatatttccaactggtgatatttcagtgatgatcacagtttttaacatccctgccctcttctcatctttatcttctctctattccaaagtaagacacgacaagggaggaaaagatcagggatagatatttctgcacttttgaatctacaactcttgattgatcctccctacttcagtcagtcttttctccttattttgattaagaacaagtcagtcaccattaatagaacttgttcactaatctagggtctgcaaagttcctatcggtttcttggacccaaacctcatagattacaagttatggtatccaaaaaccagctgcaatac

SEQ ID NO: 62094 - DNA, 1163 bp, Zea Mays
tgtttttccgacagtatttccgaaatccactttttactgggatattcccgtgttccccattttcagaatcccgttttaggtagcaaaaaaataaaaatacaaaaaaatactagcttagtcgtaacctctatggcatgcttgcgtaatatttgatgctattatattaacatgttacaactgtacatgatattccgtcttatcttatgtatccacaagtttagggtcgattattgaagaatgttgatgaacaaagtttagatttagagtttttgttgcatatccattcgttttaatctgttttgtgtaactgtatatcctgtaaccgttttcgttttcggctaaactgtcctcgctcccgttttcgataaaaaaatatggtaacgaaaacgtgagagattttctataccgtttctgtctgttttcattctaaccgtgacgtactgatactgtctttgaaaatgggctttgggtcctctcggagcccatttgctccatcgtgagcacccaaaacggcccaacgcacacccctgtgcccccaatcccttcttcctccttcccgggaccctgccccctccgctccttccacctcttctccccacctgcacactgagaaccaccgcctccaggaggcagccgtcgccgctacccgggctcgcagagccatctcctacaagccgtttctcggttcctaaggctcttcctgatctcttggacaagaaaaaggaggtttattgactttagttgggggaggagcgagaggagaggcgatggtggtggtggtggtggtggtggtggtgagataggggttgcatacatacagggtgatggggagctgcgcgggagaggagtggcccggcggcgtgacggggccggacgccgaggtcggagcgctcgtctgggtgcgccgccgtaacggatcctggtggcctggccggatcctcggcatgggcgagcttcccgagaacatcgtcatcccgccgcgctctgccggcacacctatcaagctcctcggccgcccagacggcagcatgtccgtacaaaccctcgctctacccctgttgctctctgtaatcaatttgttatgctccttgttcatgcgttgattcttctggcttctgatgatctgttgccgctactttttctccttggtctaatggtcattg

SEQ ID NO: 62095 - DNA, 760 bp, Zea Mays
cttttaaataacctataaagactcatgcgcactattcctatgtgccactaacatttgcaccaaggccctttcttttctatttcttcacaagtcgagacccccgaccacggacggtggagcagcggctccgtcgagccaagaccagctgggaaacacaacgactatgcctatctgttgctcaacacctaattctaccctcggcgacactaattcctcactcaattgcggagttctagcccacaatcgctctgtccacggtgatggcgcaaaccgaggacaattcaaagtgttcccggtgatcctacgttttctagctcaattggctgggtcgatgagcatctacagcacacaggggtattgaaacgagagcgagaagggcatgatcggacctgtagagagctggccatggcgagctcacacactacggtgttcttgactgatttgggggaaagtctaaattagagctctctggtggacaatccgaggcacgggctggtgcgttgggtgtgtgattacttagcgaagctcactgggcggcaatttataggttccatcggtggtggtggctaattttgagaagacgcgcagcgcccggagaggagggaggtcactagcgcaagtgattcgtgtctcttactgtggcaaggcctcaggcgatggatgggctatctacggtgattaactgcgacgtggtaagatggctgacagtgtggcataaccgtgaggaatggcggcacgacggcgatggtcgcgcggccac

SEQ ID NO: 62096 - DNA, 608 bp, Zea Mays
gcggccgcgggtctgggtttcggcagccgataagggaagggcgcaggggaaacacgacgcgtgatttgtatagcacgggggaaaggagtccgcgcgcgagtaggccgaggtttccggcgagattggtgcgctccaattcgatcggtcgtggtgaagaaccctggatttccggtgagttctgttaaatcggcgccaggaaattcgccatctgttagcgctagaaacgaaggagagatagggcgagagaatcgcgaggtttcggtaatctcggacatggaatccgcagcgtttgctgcatcggttgtgggagaagatgaagctgctcgcgtaggggtgtagctgccatgcgggtcccacctggaagtgccccaacaggaaaagaaaaggaagaggagcagagtgggctggcgcggtggaaacgtagtattgggccaaggcgcgcaagaattcggcccaaggtgagtatttctttttttttttctttattgtctctattttcctttcttatttcaatttcacatcaaaccaagttttaaattctaaatttcaaatttatgcacaagaaaaacttcacatgatgcacaatttctacatagtatttcttcatt

SEQ ID NO: 62097 - DNA, 429 bp, Zea Mays
cttggagaaccattttgatgtctctccactatacatgtcctaaaggaagacatgttcaatcacatcatacacttcttcctctagcgaagctgtggcgggtttgttagcatcgaaacctagttccatggctgcgcgtattcttcctctgaggaagtagcgggcacaacgtttttgtcgtagagcacgggagactcgatggggacaagcatgggtctccatctcctcttccctgctacaagcggcggtagtgcccaagcttcagttttagcctagctatgccactggtggtgggagaagaaaccagggggacgcagatgtgtgtgtggatccaaggaaaaagtatgaggagtcgacgaccttaccatgtctaatcggcgcaggtgcgcatgcaccggcaaggacatgacgacaaaggtagctccaccacgg

SEQ ID NO: 62098 - DNA, 921 bp, Zea Mays
taagaagtgtgatagaaagtctagattgtctatgtaccgactgtcgcatgcctaccgattgccgctagaaccctcgtaaaaaatctgactagctagctacttgtgtagaccgtcccgatgcatgggatccacttgacgaccttcggttcggaatttgagtattactactattaatgaggcgtgatgattgacttatctcacagactcacacacaagtgcacaactgaagtatgccattgtcgacaaattccatggctctaacaaacttgtgctcatgcccaagcagcagagctcatcagctgcagcttctatgcttctgcttggccctctcactgcatgtcccttatcatgccaattctctctccttcagctacagcttcttcaaccctgatgacttcaggccggaggacgacgcgcaggtcgtcgatggcaggatcgagctgctcggcgacgagttcagagggcgtgccagggggcgggtgtggcacaagcagccggtgcagctatgggacggcaccaccggcgaggctgccagcttcaccgcgaacttcagcttcagcatcgagtcagtggctggcaagggcgcggcaagcgctgggcacggcatgacgttcttcctcgcgccgtacacgccaaacttgccgcaggagtcctacgacggctgcctcggtctgttcgatgagagccaggcgcttaactactccaagttcaacgcgtccggcgactcgaggttcgtcgccgtggagttcgacatccgcaaggacatctgggacccgagcagccagcacatcggcatcgacatcaacagcatggactcccgcggcgactacacggtcttgccagacggcagcctcgtcgacgccggcgtgatgtccgcgacagtcgtctacgacaaccgcacgcgcagtcttcgcgtcaccc

SEQ ID NO: 62099 - DNA, 534 bp, Zea Mays
taagaaaccttctccccctttttggcaacaagaaccaaaaaaggagagagccaccaacacaaagatcaccagttaggaggaggctgatgcggagcgaagaaatggtgcgctaggtgagatgcaaagtgttcttccccagactgatccgggggaggagcacttccagaaggatcctgggcggagggtgtgaggatgattgacccggattcccttagtagggaggcggggcaaactgctcgcgatcatcaaagtaggcttcttcttcttcttcgtcgtctgctgacataaagggcaccccgtaggcctgctggtgccactcattgatctccgggggaggtggatggagaggcacgtcaggcgagcgaggggcaaagggcatacccatagtggaagcttgacgacgaagattgtcgtcagtctcccgctgacgccttgccagctcatgcacatcagtagagatattccggcacatagagaaaaatgtcgcaatcccatgggccaagcgagcacccatccctcggccacgacctcgac

SEQ ID NO: 62100 - DNA, 831 bp, Zea Mays
gtgggaactaacgagttagactgtcttcaggagcttactcgtctctatattcaaacttcactctgcaaacggtatagtatacaatacaaaacaatgttttaggtgaccatataggtgaactgttggaaacggtcttagacattgaaatctcgattcttatagcaagaatcttggttcgaatgcaaggacaagagacacccgatcccttctcgtcctccgcggcttcatgattgtcgtctacttccgctgcctcaaccaacaccaaggattggcgcgacatctacatagtctcctcttgatatgcacaataaatttatgagctcctcttagtccgcataacaaccatatgaactcattctttacctctccggcacaatgatctgattacaaccgtgtacaaacttgaattggatcaccaacaaactctctgactgatcgtcgtactcttgatcatcaccaaactgtctagaacatgtcgaccaccgagagtaacaagcacaaacttttcacttgatctaatcaaggctagtgagaacagtaggtgcacactaactattctcaacacgctaatgaaatcgctaatcgagtgattatcaactctaaaatccttcattagacaaaggctcttcctcacacacaaatgagtttcttcaacggttagaatgggcaagagagcttagagaatgtaagagttgactgtatatttgtaacctctaaccggtcaaatagcggttacattactatagaaaaaagttatggcccctcaaacgttggataactaagagtcgaaccattcttctcggtttgataagacataaaagttattatgtc

SEQ ID NO: 62101 - DNA, 713 bp, Zea Mays
ggctgatgttgcacgacggtgagccgcttgccacgcagctagaggctttaccgccggcacgatgtttataccttgtaaccaggggtacccctgtttcaaggtaccgacactgtccgtgttgtccttagagtcgtttagcgcgtttcaatttatcaagtagtgcaccagagccgtgatcgccgcacgccggtgggagctccgccgtcgttcactggtgcgtcgccgtgttcaggctgggggtagaagatcagacgcggaaccatggatccatagatgggcggcccagattagttttagcataccgcctagggcgttggatctgtgtcgttggatcggtatcctacggctcgaaacagatcacgttccattaatttgtagccgttgatctccgaacttgcggctgatagctacactggttcgacaaatgtttggatctaatcctcaccataaatcgcggatccaatggccactactcactgataccccttcgccgcggctattttgttaaaaagccctcagccatttaagaaattaacccgccatcctctggttgtggaaaataaatacgggcacgcccctagaatttatagttttgcccccgaacttctggtaattagtacccacgacccatggcttaaataaatccagtaattaatatagaaaaatgatttctagtataaaaataattccagaatcctgtttaattcataaga

SEQ ID NO: 62102 - DNA, 965 bp, Zea Mays
ctagcactacgtagaagtgggagaaaaatagacctgaagttggtctattggtcgagtataactctaaaactagactgacactgaaccaggaccaagtttgggagatattttgagtatgatccagtgagtgtttgagtatggttgctatagcaagattaaagctagattttgggacaataactttgttacaggaagattactaagttgttacatagaaaatggagaacaaggctccacaaatcacgctgtcagaacaactgaagatgttggccatggtacagtgcacaaaagatctttagattaatccccctcaccgccggtgaccttgcgcccagattcacgccggttgccgtgattcgtgctaggtgcgtagtggatatcaatggggaagtaaaaagatctcgtgggggagtggatttggtcgcggggtgaagcttatcaactgcgcctgtagccgtgcgacatggccggaccgtcggtgtcgccgtggtactccggtgacctcaattatgtcacgccgtagctctttaccacgtagtagtaaccgtggcacgcctaggcttgccattttagaaccgttgcaccggcgggcgccatgactgagccgccagtgactcttccctccctccggtcgccagcacgccattccaaaattaggagccacctcccttggacactataaattgagcataccactagctccgttaggtaatcacaaagccagagcacccgctcctgcctccgattagccaccatagctctctaattctatcttcccccaaatcgggtttccgcaccaccgtgaacgccgcgttgtggccagctctctgcaggtccgttcacgccctcctcgctcttgtttcagcacccttgtgtgctatggatgcttatcggcccaaccaattggactagaccacgttagatcatcgggaacaccttggattatcctcagtttgtgccatcac

SEQ ID NO: 62103 - DNA, 588 bp, Zea Mays
tgaaattgaagatcttcggaaacagctggcagaagcaaaattaaaatgtgcaattgccgaagctgactgagacgccagtgattactggaaaaattattgggagaaaacagctgtagaacttcggtcttcaaaagaaaaatgttatgaaaagtccatagaatgtgtgagaaaaataaagacaagcttcaccaacgttggcgcatactccagcgaggacaacttcgtaagaggcgatcctgagggtccaattgaatggatcagcaacgaagccgaagcttttgaggaaattttgagcggtcgtggggatgtctgcgccttctcaggtgacagaggaattgcgtccattttggagaagataggttgcgaacatataaaatctttggcgcaaaacgaagctgccttatctaatgaagatacaaaagtccccttagtcgaagcaagcttagttggtggaaagattttcaccgacatctgggaaaatgacggccgagggatggcccacgaaattataaagaaaagtgaaaaagatactcacgatgctagagaagcagcaaaggcagctgaaaagactgcagaacttgaaaggcg

SEQ ID NO: 62104 - DNA, 277 bp, Zea Mays
gccatgcttgcccttgctacccttgctgccagccattgtggcaccgtcaatggagaagtgacaacgagaaggtaacatagaaggagtgaagaagacggtcgcaagtgagcgatatatttaaagaggctacgagatgatccttcgcctcctgtccgtacaatgaacagtcgcaaggacttcaatagccgtgtaaatttccaagaaaaaggagcaagtcagtgacacccattggtgtaacacggcaccagggaagagtaataccaattgctcaggcaca

SEQ ID NO: 62105 - DNA, 1422 bp, Zea Mays
atcgagaccgtcactaccttctcacacaacagactacgcaaaccgccagctgcacactgccacgagcccctccttcctcccgcacgctgttgtgatgctggcgcgggcgtcgcctaccgtcgctgcctcctcccactctctagtagtgtgtttggtttcagaacaaagtgggttgggtcaaaaccgatctattttttaggttgggccggacccgttccttatttggtttaagtgacgggttaaaccttatttcttgtttgattacaaggttgaagtggattgaagttgtaccgtctcttatttggtttcgtggtgagggatgagtgaaggatgaacagaatatggtcaccttcctcgtcacattaccacactaaggatcagtggcgagcgcaaggtaaaaatgaggtatggttgtagagaacaaaaaacgaggaagaaatattgtcgctaacgcttcgctcgaacgcgttcctaatcttggtggtatccacgtagctctttaatatttcgtcgtaggattgcgtttcaatggcccagcgagaccgtcactaccttctcacacaacagactacacaaaccgtcagccgcacgctgccacgagcccctccttcctcctgtacgttgttgtgatgctggcgcgggcgtcgccttacgtcgccgcctcctcccactctctagtagtgcgtttggttttggaacaagtgggttgggtcaaaaccgatctattttttaggttgggtcggacccgttccttgtttggtttaagtgacgggttaaacctaatttcttgtttgattatagggttgaagtggattgaagctgcaccgtctcttatttggttttgtgatgagggatgaatgaaggatgaacagaatatggtcaccttcctcgtcacattaccacactaaggatcagtggcgagcgcaaggtaaaaatgaggtatggctgtagagaacaaaaaagaggaagaaatattgtcgctaacgcttcgctcgaacgcgttcctaatcttggtggtattcatgtagctctttaatatcccaccgtaggattgcgtttcaatggcccagcgagactgtcactaccttctcacacaacagactacgcaaaccgccagccgcacgctgccacgagcccctccttcctcctgcacgctattgtgatgctggcacgggcgtcgcctgccgtcgccgcctcctcccattctcaagtagtgcgtttggtttcggaacaaagtgggttgcttcaaaaccgatctattttttaggttgggtcggactcgttccttgtttggtttaagtgacaggttaaacctaatttcttgtttgattacagggttgaagtggattgaagctgcaccgtcttttatttggtttcatgttgagggatgaatgaatgatgaacagaatatggtcaccttcc

SEQ ID NO: 62106 - DNA, 418 bp, Zea Mays
tttttggcttcccacctctaatcacttttgttaagaaccttgttagccacaacttttcttaatggtccaacttgaaattaagggattgataggttttcttgatgactcatgataggtacttcttattggccttttgggtggcttagggttgggtcacttaccttccttttcttagtacaaaatagctaagttagaccttctaggatggttatcatctaattataaccttgattcttaagtatggtgacttttgctcaaggtaattcacatgtgataataggttatgagtgtgtgctgagttaacctctatagctaaccctgaggtgttacacgtaggtcgcccatgtgttcactagttgctgctatgccgcactaccttcctagtaaaataaggaaaattctacgtgcgcgttggcgc

SEQ ID NO: 62107 - DNA, 598 bp, Zea Mays
gccgtaccaacttgcctcacggccggtccagataacctcgtcggagttggccacctgccgctcgggtgccacgtgcctaagcgcaataccacgtcgtagtgactcgccttagcatgtccggtcatcaccggtggtcttgccacggtgaagtgccacggtaaccctgcaccagtaactctccccctcctcggtcgccattctaaaatcaagagccaccaccctcgggcactataaattaagcatgccatcagctctgttgggtcatcacgaagccagagcaccccgctcctgcctccgattagcaaccagagagctccaatttctttctctccccaaatcagttttccgcacgccgtgaaccactgcgtcgtggccagccttctgcaggttagctcaagcctccttgattgatgttctaccctccctcgagttccctagtactcatagaccctttggattgaactagatcgccctggataacctagaacacgtcggtgtgttcttagtttccgccgttctcgtggacagtgagttcccaacccggaattgtgcaattaattgaggggttaatgtcgccaggggttgaattagatgtcag

SEQ ID NO: 62108 - DNA, 348 bp, Zea Mays
catatccaatggtgctcttactctagcgcccttgtaatcaaaaccaaggtgtatgtaaaaaaagtcttcatccggcaattttgctatccaagtatccaacctcacatattcaatggcgccttaatcaatctatcacaaagtggaggtgtggatgggagcaaaatttaaaatttagttcatgctgatgtgtgtcgcgcgcgctaaactttcggtaaactgtagctgccacgaacgaaaagtgtggcaagcaaattagaaccacgcttgtgttaatgttttgggaaagaaaataagtctataacatatgggatagagcgataagaaaatatggccagaaaaccaaacatg

SEQ ID NO: 62109 - DNA, 428 bp, Zea Mays
gtgaatccttctctctctacaattagcactggtggtcctcagttgtttgattggatggatgaggggaggaagagcttcggtatatatacaacgtcagtgatgcacgtcaagcaaatctcacgcggatacgcaagatctttggttgttgcaaccattgcagaatgggattttcgaatggagttattcgttcagccatgtccttattgtgtgatggatggatgacaaacctaggagatcatactgcgagggtacgactggggcccatgcgtcattgacttcagcgagtggtagaaaaaagaaaagagaaggacacataggtgggaaggctagggttacttggcccattcagtgaaggaggttgggcagggacaagttgggctaagggaaacatggctcgtgagccagtaaatgaagcctttccctttttt

SEQ ID NO: 62110 - DNA, 1142 bp, Zea Mays
cgcgacagcgcgcacgccggccgcacctggccatgcggaaggggtcgcgacaacgacgaggaagaaggctggggaagagagataaggggatttctcacttgcgctaacagagctccggcgacggcgcagtgcaggggaggaagggcgccatatgtgatggagatggagtgctgctgcgttctgggaacgagggggaagagggagagttgtgtgtgctgcgtgaaactgcatagaatgtgaccctttttcgtgggcgaataggcaaccggcggtgttggcgtgaggagaaaagtggggttgaggtggttgccgattttgcggtgggttcgaacccagccggccgagacgagggaagtttggaaatcaaaccaagacaaagaaaaccatcacgacatatgagtctgcatgataaaaaagatgaagataatgatagacgggaccagtgcgatcgtctgagaagatgaaactgacatgctggcctaggatgatagcgagaaaaacaagtgatggggaacatgcggttgcacgcacatagggttgaaaacggacggaaaaatctcgtcccgacccgtaccgttttctacatttgacccgaccgtttccgtatttacggaaaaatatggaaattggacggaaacgggagagggcttattccgtccgtttttgcgggatcccgtttttttgggattgaacccgtatttattccgtatttgacaaatatgggacgagcctaatatgaattagtatataaactaaattctcgtgtatttaggtgacaaattataacacaattgtccattgtaaccaccggctcttttcaaatgacaagtgatctaaagtcttaaacaacatcggatgtagctaaatatacacatttagcaaccaaacaacaatagaatgttgcctctctggatctatttgttttatgttattgttctgccaatcaatcactagtcaaacatcaataacatttctatttgtattaaattatgagtttccgttagtattttcgtttccattcgtttttgcaattccatttatcccgctcttgtttctgttcccgactattccggacccgatcccgtttccgatgataaaatgcggatactgaaacgggagagagatttttccgtccgttttca

SEQ ID NO: 62111 - DNA, 383 bp, Zea Mays
gtttaggagagcatttttttgtaatgatattagactttggactgcttttcacactcggaacttgtggtgaagggacttttatcttcttagaactgtttttttctcaaggggaaggtgaggctggtctgaattgtcggttcaaagatggaacatccatgaaatcgtcatcggacagtgtggatggagcaagaggatttcttttaacacgacaagctagggcctttctgcgaaaacgatgaactggtgctggttgtggctcagtctgcttctgattatgtggattatcatcctgatgacctgagctgctagatcgagttcgtctggaaatgtcaactgaaaaaacctcctgacttgactcaatggttagtctttttggattagtt

SEQ ID NO: 62112 - DNA, 303 bp, Zea Mays
ggaagccgatagagaggaaagtgaaacccacctccccacaccaccccaactacccttagatctagcccaagttctagccaatcaaacccgactcatcgaggtcctcactcaaagtctggaaaatcaacgtccaaatggtggaagaccgcaagacagaatgggggatttcctgaggctcaagcctcccacgtttgccggatctagcaatcccctcgatgctgacgattggatgcgcacgattaaaagaaagctggaagccatcggatgtccagaaaatcagcatgttcaactggctacccatca

SEQ ID NO: 62113 - DNA, 313 bp, Zea Mays
ttgcttgcctaggcgaacaagcaacttgcttagaagagcgctgaagcagcggatctccgggcgctttgctcggagatgaggaagaggacacctcagcacgacaagaagtgggtcctctagccgagagggtgcttgaggtggatcttggtaggatatccgttgagcgagagaaattccagaatcaagccattgaagcctcttcccgagccaagacccttgctaaggaacttgaggctcagcggactgcctgcacccagaaggagagtgctctggctgaggccacagcggcagtcaaggtgtcccagatcaaggc

SEQ ID NO: 62114 - DNA, 588 bp, Zea Mays
gggcaccagcaggacatcttctcacacggagtacctaccttcccgacttcaccgcccgacgtgatggcaaacctgtccagcatcaacgaccacaactcagacagccacctcaggtctctgtccccctacgctctcatcacaagaaacacggcactgttctccaaccagatatcgcccaaggatccaggcggctttcctctcgacggcagcgcgtcgagctacccttacatgtccatgacttccccctacatgtcggccactgcgctgctacagaaagctgcagagatgggcgcaaagaccagccaggatccgatatcgccgttgctcctgaaaagcttcccaagcaacgtgacgactcccagccctagagaccaccacatggacatctcttcaggaagccagggggactccctcgggaactcagcggccaacagtgtcgtcgttggcatcaaggcagccgaggacgagggctcctacctgagcggtcgcggtagcattctgatgagctcgccatgggtgaacacttacaggcctgccacggtgcccttgatcggactgatgaaccatccgtttggcatgagcagggca

SEQ ID NO: 62115 - DNA, 305 bp, Zea Mays
gcaacattttacgtgggatgcttcgctcaacgttccttatcttggttggatggtctatgaaaagagacatgtcgttgaattggttaaaatcctccatatcagatacaccatcaactcctatagcttgttgttttccaggaaaaactacatgcttcaatttgtctgtgcttttcttctcattgttagggatgatctgttcaacatagaagacctgtgcagcacgattagcaaggatccatgggtcatctttgtaacctaccttatttggatcaagaatcctcaccccatatttgtctatcgtgaca

SEQ ID NO: 62116 - DNA, 354 bp, Zea Mays
aagtaccaccgcctccaccaccaccaccagttccaccccgagataagcatcgggagttcatgagtcataagccaccgacatttgctagttctcctgatccactagacgcggatgattggttgaagtccgtagagaagatgttgaacattgctcagtgcacggaccgggagaaggttttatatgcttctggacgtctgataggttctgctgctgattggtgggattcatacactgctgcccacgatgctgctgacactatcacatgggcggagttcagtacacagttcaggaactatcatataccagctggattgatgaagattaagaagaaggaatttttatcgctgaagcaag

SEQ ID NO: 62117 - DNA, 1348 bp, Zea Mays
gcagccatgtttggatgggcttattttgggattctggcagccagaagctagaatcccatccaaacttctatcttttgtcttggcttgtgggtgaagcgcttattcctgaagccgcattgtaacggcgcgtgagaagcgagcttaaggctgtgtcggctgataagctgggcaactgacctattcggtctcattaaagaaacctccggcgtacaattttttttatagattccatgagtgtgtttacgcagatgagttaaaccggataaaaaaacaaacacaaacttacatgatatttaataaataaactaattcaagcggaattaatgccaaatacagttggtataaaaaatcaatatagaatatcaactcgtagcattaagagaatgccaacacgtatatctaaggccttactgtcaatgcacacaacaggccccacatttttgaattttatgtttattagtactacaatttgttgtatcattttatttatttcacaatctagtagctgacaatcaggtcatccatctaaattctaaccaacaaattctctagcaggttgccaaacactcagattcttactggccagcttttctcccagatttttttcatagctaatatcttagaaaagctcatcaaaaaaagctgtcccatatatgtccggcagttttagattattgtctatgtagcctccagcaaaaagatgaagatacggtccgatccattctagaaaaagaaaaagatacctagtacacttgcagagtttgcaagttgcagcacattagaaaaatgtgcgcatgtacttcatttctggcagggagttggggtttaggccgttagggttatgggaccagctctgcaatgtgaaccgtgtgtcttttttttccctttctgtttttatctggacgagacgatagtgctggaccgaagcatgtgggttctgatccagccatccaggaggtgtttggagtcggttggcagatgaggctgtgggtgaagcggaagccgaagcatggcggaggcaggtgcaaccggtggccaacgcgagcgccacgccctgtgtgacgccgttgttgttttctgaaccaaccccatcagtttcggccattcaggctagatttaggtgtgtggccgcggttgattcccccagcgtgcgtttggctgcccgggttagctggctgctccgacctccgactcgcagcttctagagtctagacgaccccgccgctgcaaccgcaacgttgggttggcgcgcgcgcgagggaaagggcgagggcgctgaccaccggaaaccacatgcgccagccgccagctaccaactaccaactggcatggcatagatgcgatgcgc

SEQ ID NO: 62118 - DNA, 873 bp, Zea Mays
tgccataaatacaatatgccactaatcactgaaccacatatgccacaaatacattaatggaataaaactaaacaataatactaatcacatacctaatgaaacaagcacaattacaaatacatactaatttcggcggctattaaataattgtcgccaaaaatatgcaataaaatacacaataaaaattaaccttttgatggagaagggcccgacggcggcggtggagtggtggcaggaggagcactcggtagcggtggacggtgtcacaacccaaccaaattatcggtcccacgtataccaatccttgcctttaaagcctcggatggatatgtatgtgaatcagataacttactcagggtgccgagtttcgataaactcgtttgtttctaaggatcattcacccgtaattgtgaaccgaggcccttttcatttaggccctgctagattggctaaccgaacaagagtcatgtgacctattcctatgtctcactgacatgtgcactgaggcccttttgtttttgttcttttacactttctcatcccagatcccgactccgctgagcacatgtcgaacacctggccacgcgtacccatctcaccgctggtgaccatttctagagaaactgagcacagtgatcgaatctatgagactaacccttcactttccctcggttaattggaatggggtaacgtacaacatctccagccatggtgacggcggagaacgagctccggtgagctcgaatctaggtctagagcatggtagcgttcaacccaaggctatggtgagtatcggtgatctatcaagcgcacggtgctcacatgagtttgcccgagaagggcatggtttagtcagtccacgcaaaggtggtt

SEQ ID NO: 62119 - DNA, 354 bp, Zea Mays
ctccgtagtgccaacaggcatttgctggcggttggttgcttgcaaccgagggggcctgaaaggagctctgactctgctgactgtaacgcgacggagtgggtccagctggtctattgaagcttggtcccttgggtggaagcccaaaggattgagctctctggtgacggtcttgctgctgagctcggagaacctggaatttcctcttgaggtgccctttttcttcctcttttgccctttccacttggatggctttgttggagaggtgagagaagttgaggaaatcttggctggcgaggatggtcttgagttctggtcttagccctttcagaaaacgggccatcttccttgcctcgg

SEQ ID NO: 62120 - DNA, 568 bp, Zea Mays
tgcgccatggacagcgtggttaggtatgagatttagggatgatgacggtatgctagggtttggatctttctccgcatcctatcgtgcgtctcaatgtcgaggatgaacttcggcacatggcatttcagtatccggccatggcgccgccgcactggggcgggtgcggcgctgctctggtgagtcgggtgtggaagatgaatggtgatcgtcggatgggaaatgtgcgatcccgattagaaactagttaccggtttaacttagatcgttgaatatgcatccaaggacgcagagtcgatctcggttatgtagaacgcggaccgtagatctccaatccaacagacgacatagcttaccggttccggttaaatcaaatctaatactatgcgtcgattagagatcgaacggtcaggacaggttcataccccttcgttgtgtcacaattgctatagagcccctgatgaattaggtattcaacccgcagtccacactgtaggaatcctgagtcttggaaattcttgcgagttagtccatgtcttctctagaatttgaggcgtagtccagacagtga

SEQ ID NO: 62121 - DNA, 521 bp, Zea Mays
ccatcacacatagagcgttgaatcggagccccaaattcacgttgtctctgacccctcctctcaaattgagtctgcacagtgaagctatagcttcttacggtcgagtagcctcaatccccaaccccaatttcaaccagagccgccgcaacaccaattctcccctttctctgtcaccggcaagtctaagtcttccgcgctccgtggccagccctctctggtaaggccctgtccgattcaagcattgttttagcagctctatgtgtccatgaagctcctcgtagtaaccgtttgaccaatccgagcgtaaataattgggaacacgggatcgacaccacggtttccgccatgcacgcgtgcagaccgttttccaagtgtccaagccaaagtgaagcatgttcctaggtcgccttgggtaggttatgcttcccctgtcgctcgactgagcattcatcgccggccagggttagtccgtgcggcgtcggtgacgaacggtgagcgctccgtgggcggggagctccttg

SEQ ID NO: 62122 - DNA, 667 bp, Zea Mays
ggcggagccaagggggggccggcaggggccatggcccctcccaaggctgcaacacatacaagaatatatatatatatatatatataatctaaattttgtgtgtataaatatatatactctaaattttgtatagcacaattaattaaatatgtaatatagtggttagtaatatatgatctataactatgttgtagtatgccaaccaaagtctaaaaaaggcaaagaatataagataaaatattcgttgaatgaccaatcgatgcataaaacgtcaaacctaattcgcttcagacgctaatatctaaacctcacccctttatgatttattatatcgtctggctaggcagttgtgattaccgctgaccacttgacttgcctctgccatagccccacaaccaaagtccaaagaaggtgatcacacgaagcagcagaatgagcgccagcaacttataaacatactacattagatctcgtggataataaaatctacaaatttcaactaaagttgtcaccttataattggtgtgtacacgacaaatttgacgtgtacctgcgtagtttgacgaattttcatgaatccccgaggctagttggattttttaattctctcaaaaaattattagctgcctcatgaatattagagtcattatataaaagttgaatctca

SEQ ID NO: 62123 - DNA, 420 bp, Zea Mays
attgttaagcttgtttgacggtccacccgatgaactagttcatccatggtcgcacctgtgcaggcctccatctttgtcacatatgtcaccactacctgatccgtcaccaaagtgtttttctattttatgcttctttcaccacacatctgactcttcctctatgaggtaaatgtcctccatattgctgcagcgacgttgttggttccgcagttgcatcctttgccagcctaagtcaaccagtaaggctttctgatggtgagtgtcaacacatcaaggaggttcatgattgctatcatgatctgcttcaaatgctttggcacactacatatgatcttattgaccatcgtctcctcctccagctttttgcctaaggtagaaagagttgtgaccatccctttgagacacaacacaaaatccttg

SEQ ID NO: 62124 - DNA, 428 bp, Zea Mays
cctatctggacgtaagcgaggacggcctcctggttcaaggaacaaactcatagctgcagccccgcaatggaatgagacatcaacgtcgaaaaaacgaacggtggatgtcggagatgatgattcatctggtagagagtagaagaccataagatacaattatttccttgtgtaaatgtgattcctgtgttcatttgacaacttccagaaatcatcataaatatacttgcaaactggcataaatgtctgtgtaatttgtcataagctttaacagttatgcagcaatctgactgtacatatacttagcatacatgtatgtgaaaacctgcataactctgcgttgtgtaatgcataagatggtaagcctgtgaaccatgactgtacaaaaaatgactctgtttgcagtatataactctgataatgtatataat

SEQ ID NO: 62125 - DNA, 421 bp, Zea Mays
ccctatcgatagctgttttcccaaagcatgtcgaacaatataattcaaatcaccctggggaggtgcttcgggagcaggtcttgtgggtttttctggaaggctttctcccacaagtttttctgccgcggcttctgaaggtcccgcttcagcgtgaatagaagaaatgcttccaatgaccacttctctggcatcttcaatcttttcaccagaagcttcggcagaagcagaaggtggcgttttcacggattccagaacaacatccaaaacactagccatcctcctcttcctcggagttgatgttgcagtagctgatagcttcgacaacgttgtcaccagcacctttggttgctctgttgtcttctcggattccagctctttgaccgagtctgcactaacttcaatcggcatcacaggagccatc

SEQ ID NO: 62126 - DNA, 496 bp, Zea Mays
tgaaggacctgagtgatctggacggctgatttcgtgggatgccatctaacttagacccagaggtggaacatagcttggagcccaagaattcatagtggatgtttccgataaggctgacatgaagctcagcgtcgcacacgagtcagaacggattttcgaaaatgtaggataggcgataaggaagaatgttgatacataatcctaatcatatcgtctatataagatgggttaggtgcccctacaaaacaattagtcaccccgatagtctaagagagcattcttacttccttgatacttcgtaacctcgaatttagagcaagatcatcttaaaagcacacatgacatagggtatcacgcattctagtggcccaacatatataaatctttgtgttctatcatgttaagaacgaaccatcgagctataattgatcttgccaaccacaaaaagcactacgtgatccatccatagtgtgttgctggtagcctggtaccaaac

SEQ ID NO: 62127 - DNA, 1060 bp, Zea Mays
tgggcaacaggtgctgctcgccaacatagatggccacgaacacggatacgaacagcattatggtcacggataggaacaggatgcgaacagtatgaacctcctcgccgagcgtggctgtcggtgcggccttggccagccggtaggtggagaacaatggagatatctccgtggtcggaacgctggtgtgaatgttgtgattggagtctgaagtagctcatgcagatgataaccttttgtatcgataatatcgaggtagccgagtgcaagggtgtggagccgttgtcgaggtgtcgtgcgtcgatagttgtggtcgatgtagttgtcgagaatgccgaagaagccaaactacacgagtcccgggcgcagcacgcgggaaggcccacggtgcgccaagaggcaccaggttgacgatggcgtagaaggagggtgtcgtaggcaaagacggtgacacaatcgcggtagtcgatgaaggagaagccaacgcagaggacgatgttgtcaaaccgccatggacaaggcgtactccaggttcaccagatctggaaacgcatcgtggacgaatgaacgcgctggtgtttccaatatcagacgtacaagggagacggtcccaaccatgtgtcagcgcctaaaggggctagaaaagaagacctccacggcggttgtgatccggtatcgctggagtgccatcacaactcacgattgcccgaaaagagtaaacaaagtagtcgaggatgagatggtgatgctagcaacaaggttgtgttggacaaagacgaagagatagacgtggcgacacatcgaggttcctggagttgccggcgggagagccacaacacataggaagaaggtcatcgacatcgccactgtagcgcgacggtggtgcttgaagttggcgaagaactcgaatagctgaagaagaccatgcgcgagagacatgcatcatatgcttaacgatgacgaagacaaacgttgcggttacacaaacatgtggcacatcctacaagggtgtttcccccggtggagatggatctcctcgtgagcaacacgaccatgtagaaag

SEQ ID NO: 62128 - DNA, 702 bp, Zea Mays
gaccgacctctaaggtttggttgcattttgaggaagttacggagaagcagggaggtaaggatttccgccatttgccttcactgcaagcacaccctacctgctaaatcttcttctagaactggacacttgatccgtcacctagaactttgccccgctaagaaagataaagaaaaaactggtagatctcaattcatgcttaagtttaatgctaatggatctgttgtgcactgggagtactctccatctgttgcaaggacttagctttgtcgtatgattgctagactagacctacctctgtgttttggtgaatgtagtgcatttcaagaatatattactcgtgctcataatcctcggtttgttaagtcctctaggcaaactactgctagagactcaattaggctttttaatgattgtgctgaacaacttattaatgtactcaaatctgtttcatctattgcacttacatctgacatttggtctggcaaggcaaaagaggattacatcagtgttgttgctcattttgtgaactctgattggtgtttagaaaagaggttgcttggtcttagaccaattgaggtagctcatacaggttataacattgctgagcgtgttgaactggttgctaacgattatggaattactgataaaatctttgctattgtgctcgataatgcctcatctaacaaaactgctatggaagtt

SEQ ID NO: 62129 - DNA, 324 bp, Zea Mays
cttgagtacatggcggagctgagggcgcggtcaatttatagagtccgtgcgcggtgatcgcaaatttgggcgctgacgcgcggcggtcggaggtgaagaagaaccaggcacgcgtgagtgcgtgtccacggtcgtggcgagctcaccggcgatgatgggactgttatagggagtcacggtggcgcggtggaaagactcggacacgcggcggacacagagatggcacgacggcggcgagcaaccttatccacggcggtgagcgagtggggatgaattgcggctagccggagtgacttccaagtcaccggcggcgaagatattttg

SEQ ID NO: 62130 - DNA, 553 bp, Zea Mays
gatggtgcatcttcttcttctgctgtaggatgtggtgtttaagctgaatctatagcctgatgtgccacttgttcaatagacacatcatctactgctgtcatcggctgatctcctggtgcagccaatacttcaactggtggctgtaatgtttcacctatatctcctgttgtatgcactggtggagcctggtctgctgacatgtctgcttctacatctgcttctactgttgtcgtgtctgctgcaacatctgctactgcggctactgtatatacttcaactgggagtggtggctgatctgcttgttatggaggtggcgtctgtgcctcccgcataggtgacggcgatggcgttgaacatgtcttatatctgcttccgccatgtcttaccctctgtcttttgtacgtccataaaggactcatcgttgacgttgcaggcttaacaattgacttaataacgtcactaatcttgttctaggcctggcaaatgacctccttattcttcttcagctcaacttgtgagtctacaatttgcttttctatcacttcaatattgg

SEQ ID NO: 62131 - DNA, 720 bp, Zea Mays
tgaactcatacaacccatacttggtaatgaatgtcgtcttcggaatgtctgaaggtcgaatcgtgagctgatgataacctgacctcagatctatctttgagaacacgctggctcctctcaactagacgaacagatcttctattctgggcaaggggtacttgttcttaatcgtgacctcattcagagctcgataatcgatacacatccttctggtgccatctttcttctccacgaacaggacaggggcggcccaaggcgaggtgcttggccggatgtaacctttctccgatagctcatcaatctgcttcttgagttcaactaactctggtccagatactctgtaagctctcttaatgatgggggcggttccaggaagaagctctatggcaaactcaacttttcgctcgggtggcatacctggtaagtcctatggaaacacatctgggaactcggacacaaccttgataatctcaagtagatcggcttcactgctatcaacagccatctgataacaacttccttttttcggctcaggcgggactaactcggtcaccacttcctctcctagtagggacatcaacttgattgtcctcttatcacaactgataactgcctgatacctatctagccaattcatccctaggatgacatctatttcctgagcactcattactatgaggttaaagggaaacgctgtgacggaacctcccaagtaattag

SEQ ID NO: 62132 - DNA, 383 bp, Zea Mays
cagaagtaagtgcagtgtgatggttttgagacttcttcctatttcgcagggcatagagatcgccctaagacgagcaattgcaaacgtgcttatgctgaatcgagtagtcgcgagcatgtcgtgccgatttaagtcactaccgacttaaaccgactgttccgttggtagggtctagtggtcaccctgagttaagtaaacgtgagtgtgtcacaccaccttaagtctttgccgacttaagtcgattgctctgttagtagggcatagtggtcaccctgagttaagtaagcgtgagcatgtcacaccgccttaagtcattgccgacttaagtcgattgctccgttagtagggcttagtggtcgccctgggttaagtaagtgtgagca

SEQ ID NO: 62133 - DNA, 1000 bp, Zea Mays
tatttatataggctgtaaaggctactattactactattaataaggatgctgtagaagcacccgaaaaattagttaggtctgagaagacgactagaatgagcatgcatcatgattgtcgcatcattgtctcttgtgcaccaacatgcttctctcacctttattccaataataagaacttgtgaataatgtgatgtactactatgttagaaatgccttacctcgtgtcagattggtaagtcttgttaggtcgtgctatgcgtttctcttgtcttgctagctaggtggtattgtaattgttcaaccctttttacaaaaaaatgttgtctgttctactcatgaaaagacccccctccaagcaaccctgagtttagcaagtgaaacccttaaaaaaatctaatcacatgatggtgttagtgtttttcgaacccttgcatgttttacccttgaagttaaaccttcacagcttatagacacccatagcttgacccctaaatcgactaaaagcttccttgtgcacttgtgtgtgacaaaaaaatggtttattttctgttcacacaaaccaggtctagcctcatattctttttggaaacctagtccaaattcctcattaaattctcctctgctcaacctagaagccatctaggttgatgacctctcttttcacctggatatggtaatcttttccctgtgaatcatgttgcgactttatcttccgaatctttggatccttcatcgattctgccctattatctggttatctgctataacccgttctcaagtattggatgttaatctgcataaatctctcaattctggtcattctcatacccccttctccgaggatcatgacattgttttatcaactttatctttaaacaatgtatccatttagttcaatggatgttgctgttgtctttggttctctgatgtctctaaaagctcatcaattctggtctcatggttggttcctcctcatatcaaatatcatactagtctcttg

SEQ ID NO: 62134 - DNA, 585 bp, Zea Mays
aaataaatagaccccagataatctgtaatgtaaagataggtaaaaaagacacaccttagcttccttaaaaaattccttttgaatgaacaaaacagaatcttcctctagtctggcttaaggccatcaagcattcaaggtattgctcgatgtcggactaccattgagaagagcatcaactgtttgttgataagatcactatacttgacttgcttctcacgttggtccatgtatgttccatgctgaatatcaatttgcacatttagtgttgatccagcataaacaaaccatgacaaattggaaaaagatgtactccctctgttctaaattataagatattttagtttttctagatttattgcttttgccacgtatatatgttatgcctagatacatagtaaacatcatgaatccataaatgacaaaatgccttataatttgggacggagaaagtgagagctaacctaaaaatttgtaagccaatattttctatcagcaatccgtttcttgctaaatgctaactcaatatgactgccatcttggtcatctacctagacaaaatcctttttgtgatcggtaatatcttca

SEQ ID NO: 62135 - DNA, 480 bp, Zea Mays
cagcatatcattattatcactcacatgacttggatacattcagaaaaatcgtggcaataatttgttacgtttactccttgatcacacggccttgacagaaaagaaaagctgatcagaaaggacagaaaagaaaagctgatcagaaccaaagtgtagtaatcaaccacagattcccgtagcaagatgtccgcagtggcacttgccaacaagatcggacgacgattagtgatgctgcgggttgggaccaccggggctgagcctcttcgacccgtcgtacggtatccccggcgcctcctccgaccaggcagaggctgaggcagaggtcgtgttcccttcagggcccttggcaatgacaacttcgtctcgcagccagcgtcgccccatcgcagggcggctatcagagagcgggaccggcgacgaggcgatgacgagaacgacacagatgcagaagcacaggacgagcttcatggctgatgagaa

SEQ ID NO: 62136 - DNA, 455 bp, Zea Mays
acaacttccgcatggttttagtgtccacactatgcatgttttggtgagcagttctgtgttgggagttaactttaattggagttactgaaatctatagttagcctaatcgcttgctactcaccttgcaagcattattgcatattacgagctcggcaattacagcacaaacgtccctgcacagaaatgatgttatccacatgtgtctatgcctcttgcgacagagttgtcaacagtgggaccatttggatcctgtaataagcttcatccttgtaaaacgaatcatttgtaccaaacaattctattccggagacaggtttacaaatttgagtcaatgaacctgtagcactcctcgatgctgaaaagcagtcattagaaactaatctcttgtttgtactgattggactattctttaagttgggattagcttctttggagctatttttcgtctatatatg

SEQ ID NO: 62137 - DNA, 917 bp, Zea Mays
ggacggggcgtctctagtgagggtggaatgcagttctgtcacgtgggaatagtggcggcatcccttgtagtgagtaagaggtgcttgggtggctgggagtgcaatatgagggaagtagttggtgcgggggtgttccttttataagggagcaccattgattaatgggagacaatgacagagagggtggtgcgaccatttaaagctcgaatgccgctaggggtgctcagggttaaatgatcaggcatcagggaggaaaggaagggataaaatttctttactctagttgtggggtgatggggacaagggcagtgctcaagcaagggagggcgagttcagcgcagagatgcctgtcgtgacacgtggggggtgggagtgggaggttgaggttaacaggtggggttatggcgtcagcgagagagagagcgactgagggggagagaagtgccaacaggtggggacgaggtgtcagtgactcacgggcacatgttagtggtaagtgaggtcgggaatggtttgggctgagtggatctaggctggctcggacactgtgctgattcttttatttttctccatttcccaatttaagtttgaatttttaattcaaatcaaatgaactccaaatctctccaaaaattacaaaaatctagaatatttagatgaatatgttggtggagtttgggctccgcttttggttagtatgtttgtataaaaataatttctctccttttgtcacttccaatattgacttaaatttttatgtagcaatgccaactttttttagtagtgtgccacttatagcacaaaaactatatccattttctaataatccttgaaatccacattctatttttagccattcttcaaaattggcacaaaactaggaaaatttaatacattcttgccataacatattctag

SEQ ID NO: 62138 - DNA, 296 bp, Zea Mays
gggcggtccacttgcagcgagtgaccattgtatggctccttggatcctatgccttttacctatatagcagggcatgttcttggtagataaaagtggcttttggtgctcttgtcatcttgctgtccacattttctttgacttcaaagctcatcaactctttttcctttttgagatcttcgtgctttcgccaatggcggagagtaaggtgatcttcgaactaggcgccttggcatcctcggatgtcgccgagaagaaggaagaaataaacatcgttctaataggtgttgtagacttgg

SEQ ID NO: 62139 - DNA, 922 bp, Zea Mays
gtttagtcaaaatatgaaaatttctcgaagctgcatcaaagcgaaaaatctttgtaccttgttactagtgtaggccaagctgtgggacatcttcttcttatttacatggcataacttctcttcaatgtccgaaaatcggatgtttcgggttatattctggacaatcttcgattcatcagcatccggtatacacattagcatccggtcctccccactaaacaataaagcacaagggtcataccctaaggcttccccattgtcccctagctttgaaacttcttcttcatttagctcttcgccactaatatgtcttgtgaagaagctcaactcctcatcctccccaatggtttgcgtagtttcgaccacctctgcttcacacacagttccttgttctttttgacccaccttctcctgtcccaaagagtcaccaccttcggcaccattcttaccagaagaggatgagcaactaaaggcatcactgttgggtcccacagttcgtgggctctccacctcttcgtccgagcccttcgaggtcggcataaaccaagtcaatgaaggtcctaagggactcaaggggggaaacaacagaggtcgagccattacctcgaagatccgggtgcagttcaatgatgaggttgtcgttgtgctccctttcaccgattcttgggtagctgcaacttttgttggagctgaagccttttctgtggctgcgtccttctgaatgattatggctttctttttcacctggcccgaataaggttcttcggcctctttcttcgtagccctcttcctcttttccccggacccagtgttggccgagggattctcgtaatctgggtattcaaacccaatggcatccattaccctattcaatcaaagttttcctcggctcccgaagataattttcatatcttcatgttcc

SEQ ID NO: 62140 - DNA, 382 bp, Zea Mays
tcttacgatgaagacttctgacatcacattataccaagaaatggagaaattaaacttggggataattcaacatggaaccttaaataacttgaagcttgagtcggttcttctgcaaagaataattgatgcacaaaaagtgatgagggtatgaaacagattcatgagaaaataaaggccggtaaagcaaaccgtttcagaaaagatgatcaaggcattgtatggtttaacaaccacatagttgtgcccaagaatgatgaagtccgccagcaaattttggatgaagctcatcttagccgctattccattcatcccagaagcactaagatctatcatgatctaaagcaacattattggtggacgaaaatgaagatcgaaattgcat

SEQ ID NO: 62141 - DNA, 334 bp, Zea Mays
gtcgacatctggtgtagccatggcatttatttgtggtgatccctgctttatttcttgcagagtgattgcttcggatccgtacattaaccgaaaatgggtaaacccggtggctctagattctgttgtgtttagcgcccaaatgacttcagaaagttggtcttccaattttccctttttatcgtcaaggagtctcttctttatggcactaaaaatcttgtcattggcgcattctactactctgttgtattgtgggtggtagactgatgtgaatactaccttcgtgccgatggaattgcaaaattctttgaaatcttgattgtcaaattgtttgcta

SEQ ID NO: 62142 - DNA, 521 bp, Zea Mays
tattaatggctaaaatttgtacaaagtcatgttataacatctatatgccagcaaaaatatgtcttagagaataaccctctcttaaaaaggagttgtagttcaaaacaccccctctgccctaatatttgataattttatacagagagaacccctcactttttgaaccccaaattttaagacagaaacttatacaccagtaagaagccactgtaatttttgcagaatatttgtaaatttattaagttaacttgtagttcaaacccaccttaaagacataaaagaaatagaaggaaagagaggaaaaataaacctcgctccaataagttcaactagaaatcttaataaattctcactaagacattaaaaggaaatcagtggaacaccaaaatggacttaccacttagtttaactaagcttgaccctaaattactaagtataccccaagaatcttcaagtagcaagattaagccctaccttattaaaatgatcattcaccagccaagtttaattgctaaattgca

SEQ ID NO: 62143 - DNA, 521 bp, Zea Mays
gcttgagctgattaaggattatgaattagaaattcactatcgcccaggcaaggccaacgtggtggcagatgcactaagtcgtaaggcttcatgccattgtcttacaatgaaaacttctgacatcacattatgccaagaaatggagaagttaaacctgggaatgattcaacatggaacattaaatcaattaaagcttgagtcagttcttctgcaaaagataattgatgcacaaagaagtgatgagggtatgaaacacattcatgagaaaataaaagtcggtaaagcaaactgtttcagaaaggatgatcaaggcatagtatggtttaataaccgcatagttgtgcccaagaatgatgatgtccgccaacaaattttagatgaagcacatcttagtcgatattccattcatctgggaagcactaagatgtatcatgatttaaagcaacattattggtggacaaagatgaagattgaaattgcacgctatgtggcgaagtgtgacacctgcagacgtgtcaaag

SEQ ID NO: 62144 - DNA, 396 bp, Zea Mays
cacgggcaatcgaacgcgttcccgacgatctaaggtagcttaactcaatcgagttgatcaaggagtatcaggggcaggtatgggtgctgaaacaagaggacagggagcatgaacagacctggaattcgctgaccatagtgagccaacacacggcggcgcggagaaccaaattgggggaagagagaaattgggaggctttggtggataatccgaggcaagtactggtgcaatggatgcataattacctaacggagccgcgggtgcactcaatttatagcatgcttgagcggtggctagtgaatttgggttggacgcggtggcggtcggagaagaaatgagtcactagcgcggtgattcgtggccttcaccgtggcagacccaccggcgacgagccag

SEQ ID NO: 62145 - DNA, 680 bp, Zea Mays
tttctgggcataatgatgagcttctcgcttttcctcttcagatagcattttgcccgaagcatgtcgtacaatataatcgggcaatttggaagttgaagagagagttttttcaggcagaattgctttaaagtttcctttgtagtttctccttcggtttccaaggatttcttcttggcagactctgaagttccagtttcgatttcagcctagtgctttgtagcttcgactccagaggctgttgtttcaatctgtgctttttgagcttcggcaatttttctcggtgtagagcttgaagactttattgtctccagtacatccagaacattaaccatccttttccttttgggggtcaccgctggacctttctgagtttgtggcactccaacttctgccgaagggcttaagatttctgataattttgtcccttcatctttcggctcttcaattctttcaaccttcggtgttgcagtcagctcttcagttttttgcgcaagtataggttttttggcttcagtagccgaagaagcttcgccgacaaactcgggcactatggccggctcaatgtagcgtggccggtgggtaagaaccttcaccttttttctcttcggcgctggttcactaggagcggtcgaagcaacttccttcacagaaactgtaccttttcttttccgaccccttaa

SEQ ID NO: 62146 - DNA, 412 bp, Zea Mays
cgtcagtggtaggtgacatactccccgcattgaatgcatacggcgcacccagtctgcaatgtatggtatacactgttacacacatgttaccaagacgagcattgactcaatgcgtcgtttgggcgcccttcattatgacctctactgttcctcatgcgttatggaggcatgaagagacatgcgaaggagataggacgacaccatccatacatccctacgcacgacattgtaccagactacaccacaacctacactaaggcatgcgtggttgcgcctgtgttctgattagacagggcaagaggatagcattctaagagcccgcatagcaaccaagaggagatacgagaccagaagatctagcatcgctagctctacccaacacctcacactttgtattatagtaactcctagg

SEQ ID NO: 62147 - DNA, 599 bp, Zea Mays
acacagggcagaagcgtcaaggattttggagtcgaattactgaagcttacaactcaagacgaggaacattgcccgaaaggtcgacaaaatctttgatgagtagatgggatactatcaaaacacagtgttccacttttgctggttacatgatgacagtcctccgacagaatcctagtggactcactgacgcagacaaggtacatgtttactatgaaacattacataagtattgtaggtatttgtaaatatgttcctgctctaaccagatttttatctcccagacttcacttgcagcctctaggtttgcagctattgagaagaagcctttccactttttacattgttgggccatacttaaggaccaaccaaaatggatggacaaccacatgggtcaacaaaatcagcacggcaacgctaatcccacccaatctaacactgtcgatgtggatgcagaagaatctgtaccaactagcttcacatcgaagaggccactaggttaagattcttcgaaggaaaaggcaaagcgaactaaatctgtggacacatcttcatcagattctgagttcatgacacggatgggagatctttctttggagcgc

SEQ ID NO: 62148 - DNA, 722 bp, Zea Mays
gaccgccttcattttaaaccccgagatccactccaaaccgtctgatctgagatctatgcacttgatttgatttcccccgaagcggtcccattatataatccagacagatcagctcgagatcaacgacccacataggttcgtctccctctgctggttggccacggcggcgcagatgtccatacggcggcaattcgtcggagaaatccccaaccgagggccccatgaccaacctgggtgtttttgggtgcaaaagtatgccaacgcaatagcgaatttgttggagggtgactcaccgttaatcgcgacgtcactcggtttggccacgacgagcagcggacggagatcgccgacgagcaattccagacgcgccaccattccccctatccaaacaccacagcagaaaccatccggtggttcacgctaacaccgcggttactttgcacgctccgaacggcttttcaagccagttactcgcacggcgcccccacgctcccccctcactcttttgcaccggcgcctggttagcccctacccaaaccatggttcaggggatcgaggcagtgcatacgcatttatactctcgccacggggagtccattctggtggcgaacgacgggctaatcgttctgttgtcgtgaatcatgggggaaaggggagtacgctcgagtttgttgggatggcgtcgagctcgggaatagaacacagttcggccagaggagcaa

SEQ ID NO: 62149 - DNA, 468 bp, Zea Mays
ttccatgtaaccaaacagcccctcaatataggcataagcaacaagcagatataaaaaagatgtgggctgctcggcaaacagtaaatacagagtatcgaattcaacaaagaaaaatagtaatacattacttactaatcaaacctttcattaatggcatcctctttattgtttcatttgttaagtacacctataacaccaaaaatacagagacatacttagaataacattaagctgaacctactcagccattgctggaaacaaaacacactaatatgaccctacctggctacacataacacaatattcgcatgaataataagaccaaacaaggatacagatttcttagccacccaatcaaacatggaagttttgtctcaataaaacatggtgaagagaatcccaaagaaaaggtaaatgcgctgaatcatccctgcaacatttaagtgacaaatgtgttttacaataata

SEQ ID NO: 62150 - DNA, 1070 bp, Zea Mays
ggagactccacaatctagaagaacatggaccaggcctttgcaacctgactcagcttggcaagaccgtgcccagtcccaactacacaatattgcaaatcagctgcaaacaggagataacccccctcgtcgtcaagattacccccacaacaaggtcacggtggcaacacgaccaggggcaggggccgaggacctcaacaacagaaaagattctattatcttttccgtgacgaagacttagcacacccaaccaaggactgcccagagactaaagcaacaaaggaccaaatggctagggccatgctagctgatgaccaaagagtcattgctcacacctaccaaccccatcaatacaaccaacatcaatttcaaaacgaacaccaaagagtcgtcgctagaaacatagagagggacttcgtttctagccagcacaatgtacactgcctcacatccgagcatgaagatcctagtagtcctcgcccaatcaaagaaaaaagggtcattgcctagctacagagcaacgaaggggtgaaaaaaagtccccctagacacaatgacccccaatcaaacgatcttgatcagcgaggacctcatcgaagtggaagaagaaaggctcatgtcctgtttgaaccacaataaagatgtatttgcgttgtctgccctggatctcaccagcgtcagtcgcaccatcattgagcacagcctggcaccgaccctatcgtgcgccctaagaaacaaaagttacgaaaaatgtaccatgataaactgaagcggcaaaggcagaaatccaccgcctattggaaggaaagttcattgagccaattgattaccccacttggcttgccaaagtcataatggtctagaagaaaaatggaaagtgcagaatgtgcatagattttaccagtctcaacaaagtcttcccaaaagacaatttccccctaccaagatagacaagattgtcgactcggcggcaggatgtgaagtgatgtctctgctcgattgtttctcaggctaccatcaaatttacatgaaggaagaagacaaggcaaaaacaagttttatcacacccttcg

SEQ ID NO: 62151 - DNA, 659 bp, Zea Mays
ctccatggtccgaaaccaaaaggaaatcgtgagtcgtccactgttgaggccctgtaccaccaggccttaggaaaatcccctttttctcgtcctccgccgctagattggagcaaagagaaaacgtgtgaaatggcgggtgatggcggcagccgacaatgatcttgttggcgccgcaagctaaggaacatagggacagatcatagcggaagaagcactctgttgtcgacagttacgtagtccatggcagcgtcgacgaggctatatggcgaagaagacccaaacaaccccataggagaaccatttttttctaataatgaccattgcccattcatattatttttattttaaaatacaaaataaaattaacgataaaacggtagggaaaaccccttcggcaaagagttatattaaataaacaaaacaaaaatagcaagaaactacaaagaacaaattagaagcaagcgaaagggagagagagaaaagagagaacaaaaaggagaagctataaagaatcaagctataggaaaatgtctgacctaaactccggaacaacttaaagttcaaaatcggacggacaaatgatgacttttgtggacctatatgttaatctggctattaattatctgtctaagggcatgtacagtggagagacaccaaaa

SEQ ID NO: 62152 - DNA, 282 bp, Zea Mays
agattttgcagctcttcctcacctacactcgccccagccggcgaggacaacaattcccgtttgccagccccgtccacacgaagacgaccaccctccatgtcaccacgatgacgcctatcacttcgcgacaattcactcactcttcgtttcgccaccgcccttcgccgcctacacccggtactcgcacccgaaagatcctcagcacccatcacacgcggagaagtctccgccgcagccacatccaatgctacaaaataatccaagtccttatccaaagactcc

SEQ ID NO: 62153 - DNA, 473 bp, Zea Mays
agagcctggagaatctttgcttgcctttgagacttgcaacagttctatagaaagttaaagctgaggcaagcatgacggcaaaagctttcttgacgtccccaagctatagagacggcactgctaagttcaaagaacgaaataggtccttgcactcgcaatgtactgttttaaggataaacaaacctgcatcccttggtcatcagtggccattttctacatcactcgagaagaggtcatcgtcatgacatatagccagagccacatcacggaccccttcaacctcaagctagggcatgggcatgcctaccctcacctatcaaaaagcaaactttgtcaaatgtggcgcgtcattccaccacataaattatgttcgacttcaacatgatgattgagcaatagggtagggcgcccacatcggctattgttttatacgggtcaggatgactccaagaggttgtggcttgcaagctctt

SEQ ID NO: 62154 - DNA, 480 bp, Zea Mays
agctatgtgctaaataatagatacatgttaagagaatgagctagtaacaagtatatggagaaggcgaggatagtttgtgagcaaactacatgggggcaatgatgacataatatttatccttgaggttttggttcttatcggcaacctatgccctcgttatgccgactccaaactaggtgagtcacatacttaattcgtgtaacattccgaaccaacaaagagtgctgtaagaatgactcgaggtactccaacaagccacgatattactagagttggtctttgtgaatccctcacagggataaccattaagccccttccaatacgatgaccagagctagcaacaatcaccaaagctgataaggattctccattgtccaagccatctagatgacaacaaccacaaagggtagttggaatcacgtagctcaataattactagtgctaataggacaataactcaatataatcattaaagatgat

SEQ ID NO: 62155 - DNA, 758 bp, Zea Mays
ctcttgatgttcttgaatccgctgtggcggcggaaaaaagtgttatgcgttcttacaaacaggcgagtgcagccgtcgtttgtgctaaggagacaatggccaaatactatgaggtttgtattctcaaactattactgagccaggcaatgcttgagatatttttggcatgtgatttcttttacagttgaagtgaggaaatgtgaggtgatataattgtttagccctgtgattgaattgtagaaagctgattgcagttttcaggcttctgattatttgagatgatcaagttgcttagccctgtgatattttctttgaaaatagtgaactgtatactatacttattctttttatgctgaaaaataactgaggtcaattggctgtttgtgatgacagttgaagtgaggtcatggttgcaaaattctatgtttgatgttgtttcattgaaaaaattgacctgaggcttgtgttaatgtaagatgatctacttgcttagccctatgatgttttctttcaaaatagtgaactgtatactacacttggttttgtttcctgaaaaaatactgagggcatatagctgtttggaggattcagattattggcagtatggctatttgtctgaaaacagcactgtgatgatatgtggcagtttgagggcatatgtgctgaccctaaaccctgagttcagggtatgtgcctgtttgttcagttgagggcatatggctgtcttcttcagttatgagttcactttggtagtttcc

SEQ ID NO: 62156 - DNA, 776 bp, Zea Mays
ttgtagagatggttgttgactacagcaaagtctctacttctatgtttcaacattttggcttcgatgtggtcagatgggtggtagtggccctgaaaaatatagggtgattggagccctccagtcttcagtcattattagattgactattcgatgtccgtcggcatcttgtgttatttgcagaccctcagggtttcttacggctagtgtgtcgatgtgataaaatacatcggatggcaagggttcgcccttcgctactgctttagctagtgtgtcggcctctttgttcttgtttcgctcaatatgttgtagtgtgaaacctttgaattgtttttcgaggcttcaaatggtggcgagatactgcattaatacgggctctttggtggagttatctttttcaatctagccgacgacgaccttggaatcagttttgataatgcaggtggtcactccaagggctcgtagtttgcgaagtcctaagatgacttcttcatactcggcgatgttgtttgtgcacttatctgactcgagtgcaaagctgagacacgcggcgtatttgtatttgagtccagcgggtgatgtaatgattgtcgcagtgtcggcgcctgcgtgacaccatgccccatcatagtggatgatccagactatttatgtgtgacactgttgtggttccgaaggccttgtctagtctatgttgaaatcggccaggacctgtgacttgattgttgttctgggtcaaaggtgatgttgtacccggagagttccgtcacccattttgc

SEQ ID NO: 62157 - DNA, 626 bp, Zea Mays
agcgtctaagttgggtctgagtgagcctgagcttgccttgtaacttcgtgtgccctcccttttatagctcaaggggggcacgtacaaggatactgagccccgacatgtgggcctaggggcaaaatggagggaagtaactaatgcctgtagcgcctgggcgatcttcgagtgccataatgtccatagtgcatatagtattgatatgtcgtgctgcttcatcggtaacgcgcaagtcatgatgggtgtagtacacgcggtagcatgggcgtactgcctgccaacggaatggacaggcacgccgccacaggatggcctggtcgccgctcgtcagcagagtggacagggctcattaaatgctgaggcggcacatcgcctgccagtggaatggacatggctcattaaatgccaaggcggcacatcacctgccagtggaatggacaggcggcgcgccttatccgcaataaatgcagaggtcgtgcggcccagaggccttacgtcaggctccgcccggtggcttacgtcacgggcagtaggccacgtggcagcaacgggtctccgcctgagcggggagcagaagcgcacacggtatggtccagacacgtgtcgactccggaccccgcctggcc

SEQ ID NO: 62158 - DNA, 294 bp, Zea Mays
gtcctgcctcccactcatggcctacgggcccctcggactgcagcacactcaaaacctacgaacccttcggactgcggcgcatttatggcccgcgtgccccagcctatggtgcactcatgacctatcgagaataggcatgagtacgcagaccgcttgtagggaacaacaagacaaatcgcaccgagccccaggctacagaggccaggggttggcatagctcgaatgatggcactcaggccccatgctacccgcatcatccgctataaagaatacaagacaaccagatgaccgtag

SEQ ID NO: 62159 - DNA, 810 bp, Zea Mays
cagattcggtcgatggcggatccacggttcggattcaatgcagcgaaaatcaatctaggttcgcccgatccatgatggacggctacgacacaactggacgaaccaatgcgcccagatttagtcatgaccacccatcggtaatccaacggccctaacgctctcttctaccccagtccgagctgggcgatgccttgccccaccgcggcggcgccctgaccgaagctgggtggcggatctcctccggtccctaatccacgtacaagatcggtgctataggtaccaagcaacagcccaaagcgactagagggtcttaccaacgtggccatgatgtcgaaggtatttgtctccacatacggcggcatgacgaattccggtgggtaaccagtcatcgatggcgatgatatagcatgcaacagtgccaggggtacactccctatgaattggagatgcccccgaacgatcccccaacagcatgagagcaaggaacacacagtattgcttccgcggtgactctgcccccatggtgccactgacttcatgcgcaacaccggagacctccccagtaacgcaagttcttttcacgtagatagggtcacgaggggcgcgagagcccaaattttatatccccatggccatgagtccgaagagggacgggattgggaggattcgtgcgggattcgctgagtttgttctagggaattcggtggtcttgttgtggtacgagatagaactgacagggatggcccacacgagggtgactgcactaccgcgcacagacaccaggtgagggactgaccttgcggccccacc

SEQ ID NO: 62160 - DNA, 603 bp, Zea Mays
ctctgtccccttctctcaaattaagtgtgcgcagtagaactagagttctttgtgaagccatagcacccgctcccacccttaatcatccacccgagctcttgaatttcaaatttcccccaaatttgtctctgccaccgcgaagaacagctccaccgtggccaatccgttctggtaaggcaccgtccaaatcaagcgttgttttcatgtctcctcatgtttgtgaagctcactgtggcgctcatttacctagttcgaccatgatttggcgggaacatgtgttcgtaagctcggtttctgccacaatcgtggtcaggtagtttccagtaagatttatgtctagtaaatggatgttcctaggttgccttaggtctgtgatgcctccccggtaattagccgtagcagccatcaccggccatggccagtacgggcctcgtcaggggtgatctgcgtgcacgccatggccagggatgtttgtggggaagaaatggaagttcgagggcatttctgcaaagggtcagcgattgtttcaaatagtgtttggactccttcgggttattcaaaactgcaagggcttgttcgcaaagtcgccatcgcgcgcgcggg

SEQ ID NO: 62161 - DNA, 818 bp, Zea Mays
attcaactttgacatatccactaaatagataaacaaaaaggcacaaccgatcatagatttttcatacacacatcacataatcacatagacacacaactcatctcttgcgcctgtgttatagccgcggaggcgccaacgagcttcgactttgacaccaccaagacgaagcagatcttcgacctattcctaaaagagaagtagttgaatatataggccgatcaccagattgcatcgaccgaggaattgaagggcaaacactaatgcatgtggtacaatgccatcactcacatcactaggattgcaaggtactccaaccattgatgcaatcagccattgatcaaggttggttcatcttcagtaggagaatgtttgggggttgataaggaacccttccatgacaacatggttgagatatcctcgactagcataggaaagaaagtggcgatccacacgatcgagccctagactttgatccaaaggaatatacatcagtagtggaaatctcaaggtttcactgatgtcgatagagtccgtgcacctgatcgccatgtatgcacggtggtcctaggactagaacatcgaggaagaagcacgtgcacatgcacaacattgggcacgagaataggagcactgttgccataaaaggtagtaacagtttgaggagcagtatcaatgcgatggacatctggattgcaagcactaggtttgttgtttgttccaatattgttagaatcatggagtgcaatggctgcccactatcgacaactgcctcgagtgcactcagccaagtcatcactagtgataagcctcagttttcg

SEQ ID NO: 62162 - DNA, 363 bp, Zea Mays
ctgaagacaaggctgatcagcaaacttcagatactggcataacagcagggcaaggtatggcagaaaaagcaaaatctcctgccctcgaagctccagccgaagctgttgattacatttatcgacatgcttcggggaagaaattgtccaaagaagaaatcctggaagccagacactatgcccaaaaattaaaatatccgaagggagccttagtgtttaacggcactaacgaagatgatttcctatactgtctcccggacaacaaagaaatatccgtttgtcgggagatagctaaaagtatgggatttccgaagcttgaagaaggcctttcggttatgtcgaaagatgatcttgctgatagcctca

SEQ ID NO: 62163 - DNA, 1156 bp, Zea Mays
tcaagcactagttgacttcgtatcagaatggactaagcatcaggtcccggacaacccagaggctactgaagtttggcgaatgtatttcgatggctcgctgaagctatagggagcaggcgcggggatcctcttcattgcccccagaggtgaacaactcaagtatgcacttcagctattattcccagcatcaaataatgcagcagaatatgaggcactgatccacgggttgaacatcgatgtgtcactaggcgttaagaggttgatggtatatggggattcactagtggtcataagccagataaataaagactgggattgctcgactgattctatggacaagtattgtgctgccgtccgaaaattagaagacaagtttgaagtgttggagttccatcacgtggaaagagaccacaatgcaacagctgatgcgttgtcaaagctgggatccagtcgggcgcaggtcccactcggaatcttcgtccaggaagtgtcacacccaagtatcccctcagatcatacagaagaatgcaacaccttgagccaaccagaatcggaccctaatgactggagagagcctatcattaggtacataaagaatgaagaagaaccggatgataaggctgcagcagaacgcatcgcaagacagtcggcccactacaccctcatagggggcgcactgtacagaaggggtgcgacgggagtcctcatgaagtgcatttcctcgactactgggaagaagctattggatgaaatccacgctggacaatggggagtacacgcggcatccagaactctggttgggaaagttttcaggtctggtttctattggccaacggcaaagagtgacgccgccgaattagtccagagatgtgaagcttgccaattcttgtcaaagcaacaacatttaccggcacatcagctgcagaccatccatgtaacatggccatttgcatgctgggggctggacatgattggacccttcaagaaagctcagggaggctatactcacatgatggttgccattgacaagttcaccaaatggatagagtacaagcctattgcttctttaacctcagccatggcagtggaattcatacaagacataatattcaggtttgggataccaaatatcatcataaccgacctgggatccaac

SEQ ID NO: 62164 - DNA, 717 bp, Zea Mays
catataccctcctgacctgtaagctaataatttcatcgcttagaaaatcacagtaacttttgcaacagaccactcatgctcatgctgccgcaggcaacaaaaagaaaggttagattaggttctgaaccacaataatcctgaaggcctatgagctagaagggcatgtgaagaaaatgcctaaatacaggacttgaatggcttcagattcacaattacaaacaacccatcaaagagattattttcatgcatcagagtatctaatcatgtaaagaaaagcctgcaagctcgtaatggtagtactcagaaaaaaggtaagtctccactgcataaataaattgtctgtgtgtcgcaacaggggaagttatatggattcattggaatcagtaaattagaatggggacttcatttccctcacctgtgccatgcatctggtatccaatatcataacaagcttgttcaaacatgagtcattgttgtgcatgttatgtagtaataaagagtcagcataagagtatattatcatctataatgaagtatcaaaaaagcaaaataatacacaaacaatataacctttggtttatcaagtgattcacctaataatgcctttgaggatgacacattcagaattaggccaccggaagaggcgatatggaggccccctttagcagggctctctcggtggctctttttctggctcttcgtgaagccgtaccaaac

SEQ ID NO: 62165 - DNA, 361 bp, Zea Mays
ggcaaggggatgaacgtgttccgatcaaacagcgacgaggatgggcaaattgaggctgggtaaaggttcacgggttcaccagggtccatggacacactttggtttgtgcagaacaaggcccgaagagcgggtcgacggtgagggggttaaggcgacgttctacagagcaagcacgcattctggtgaaaggcttcagccgcaattcgattagttgactgggggcaataggaggctaacagcaagcaagaacatgaaacaattggataggtactcacccgaggaccgctggtcacgggggagttcttcgcggcggaggtaagaaccgaagagagagggaattggggctacgtgggttttccgg

SEQ ID NO: 62166 - DNA, 581 bp, Zea Mays
taacgccgagcgacttaacacgatgtcggagttttagagtcaactgccgagcgacttgagggcgacgtcagcgttttagaggtaacgccgagcgactcgaagacgacgtcagcgttttagaggtgacgccgagtgactgaagacgacgtcagcgttttagaggtgacgccgagtgactgaacacgatgtcggagttatagagtcaactgccgagcgacttgagggcgacgtcagcgttttagaggtaacgccgagcgacttgaagacgacgtcagcgttttagaggtgacgccgagtgactgaagacgacgtcagcgttttagaggtgacgccgagtgactgaacacgatgtcggagttatagagtcaactgtcgagtgacttgagggtgacgttagcgttttagaggtaacgccgagtgatagcgggctgtgtgggccactttgaggataatagccgagtgatgatgtggcgcaccagtgttttggaagtaacagtcgggtgatgacgtggcacgccggtgttttggaagtaaccgtcgggtgctgactgggcgctttttgaaacggtatctggctcggg

SEQ ID NO: 62167 - DNA, 855 bp, Zea Mays
gtcaggtatcgtaattaggggtacctgggttacacccctagacacaattaacccctaaactatcgtaagacacattcctcgacgtcaagaaagtatgagccgcgatttgcctaagaccccactcggcggtcgctcaacactctgtctcgctcaagcctgccctcaggcgagggcaacacttggggaaatcctcgtcccgcccgaggtcccctcttcacggaacaactgtttccacctcacccgagctcatctcgggcaggaggacaaccccgagcctaccctcagttaaaggtcgcaggaaccgcggagacatgagcattcaatgcaaatacctaacccacatgacgccacagtcaagtaggagcgacaggatcacagtcccatccactttcactgactacgatgacgcatgcccagaaataacagctactactccccacgccgtttgctgagttcaaacaactccggatggggcatgcgtacggcagagcacggtctcaccctcgagaggaaactctacctcacccaaagccagccttagcctctgtaacatcccaaaatttaaccccaaggttagaaaccctaatctcctaacccccccttgattattccctagactccacctcttaggacatctcatcatatgcatacactatgattgttagaagcacctcacatagaatatatttttcttagcacccaagattatttagctaattatttgttcaaaagaaaaggagataaaagaaatagaaatataaataagaattggaaatagaaaaagaaaaagaaaaatcctcccccctcggctggaccgtttctggcccaaccttctcccgcgcgcttcgctccccg

SEQ ID NO: 62168 - DNA, 626 bp, Zea Mays
ctccggtcgccaccgcaccatgccgaattcaagagcgaccaccctcgggtcctataaattgagcatgtcatcggctccgctcagtagtcacgcacccaacacaccagcccatgcctcagatcgaccaccagagcgtcccaatttgggatttcccccacatctgtcaagaacaccgcgtgtgagagctcaccgtggctagctctccacaggtctgatcatgccctcctcgctcttgttttagcatccatgtgtgcttgtgatgcttctcgacccggccaatggagctagaacacgtaggatcaccgggaacgcttcgggttgtccgttgatcgcgttgtcaccgtgggtagagagattaggggataaaaccttgaaattggttgaggggtaatggttattaggggtcgaattaggtgtcaaccgctccagagcaacggtcattgcgttttccggacggtcttggctcgccggagccgctgctccgccgtcctcagtcggggacttcaattcgtgaagaattagaaagtgaagggcctctacgcaaagtgtcagtgacacataggaatagtgcacaggactctttacgggttattcgaacagccagggtcctctgtgcaaagacgcca

SEQ ID NO: 62169 - DNA, 488 bp, Zea Mays
ttagtgaatagaaataccttgcttaaggaccaattagaaaagctaaaaattgaaaatctagcttttctagaaaaacatgatatgcttctatgttcttatgaaaatcttatggatgatcatatcatgttagacattactcatgaggtagtgatagaaaatttaaaattccaacaacctcactcatgcacatgtactcaaattaaaactatattaccatgtgctaatgcttgttgtccgtcgacaagcaacttttcctttgagctaggttttgcaggaacaaaagatgatatatatcaaaagctcaaggaagaaaatgagaggctaaatatgagcttgacacaacttaaagggaagtgcattgctcaaccttctcaagataaccgtgatcacatggtgaagaagcttgagacgggaacaaccgaagcatgcactaactcccttgaagaaaatgtcaaggacttgacgattgccaagaagaggaagcaaaa

SEQ ID NO: 62170 - DNA, 399 bp, Zea Mays
aagttcttgcacttgcctttgtatttccttagtttcttcaggattggttcgatatggtggacggttaggaagtgtagcccctggaatgagatcaatttgatgctcaatcctacgaagtggaggtagtccagctggtgtttcttgtggaaacacatcttcaaagtcctgcaaaagatcagccacaacactaggaagagatgttatgtcgttaggagaaattagagcttctttgttcacaagtacaaagagcacttgatatgggttgttcctcacttctctcagctcagattttgtggctagcataactagatgttctccctcttccttctttttatctcttaaatttggcttgtagcactcgctcaccgaattgtggatggcactcaatttcttttgctc

SEQ ID NO: 62171 - DNA, 920 bp, Zea Mays
ccaagaaggccaggggtgcaccgggaaagacgaggcgtggagggggtacgagaagagagaggagcactagtgcggcaccggccaacttggttggagggagtgcaacggttgggtcgcggatccggttaaggtcgcgtcagcaggggagagtgcagtgtgctacatactctgctcgagtgtcgtccgaggacacgggggaggacgaaaagcatatgcaggagcagacaagagtggaagatgtggagttcatggaggtggatgatgattatgacgacgtcaacgtggctggcaatgtcatagatcaagagagtgagcaggacgaggctctggaaggaaggagcagtcaggatagccatggctatagcgaggacaaggagggcaaagactctgctgctttgagtgataatgaggaggatgtggggggaaaggaattgttggaagaggaggaggaaggtgccgatcaagaagaaagtcatatcatctacgatggtgaaggagaacaagaagaggacgcatctgaggaggaaacacaggaattggatgaaacaggggaggcgcagccattcaatcctagcaacaccatggcaggtagcactatgaggtcaggaggcgatggcaagcaagtctttaggaggagggtttttgagggcatatatttgcctgagaatccacacaggactgttggcaagggcatccaagggcggacgcgatcacagcgaaaatgcaaggacaagaaactgctgaaacgcggaactttcagtaaaccttacaacattgatattccagactcgacttctgattccgaagaggaaatcgaaccaccagcgccacagcaagggctactgtcgtcaagtgaggaagacaacatgacttttggcaaaaggaagcgcagaagagcagcgataaacaagagatgggac

SEQ ID NO: 62172 - DNA, 924 bp, Zea Mays
gtgcggttgagaaattgttaagaataaaaaacctgctcccatgcatatagatgttcagaaaggtcgtggcccgttagccccgcacgaagtacggttttttaacatgtcacgagcccggcacagcacggatatatgagggcctgggcccaacccggcctagaaagcgtgccgggctcgacagctgtttgagcccatttggccagcccgagcatggcctggtattagccgggccttgttaccggcccgctacacaaatacacggcccagtgctagaggcctagcccacaaatacctcgtgtagtcgtgccctcgcccgccgtggtcgtataaccctaaccctaacaccactccgcacactcgccccactcctattctcatgcctctccgctcgtggctcgcctcttgctcagtcactctcgatctctccgctgcgctcttgtgtctcctctcgtcatctctcgaaccctccggattttggtgctccctgcctccgtgcgaccggctgaccttgcctccggcgtcgttgcctcatcggtctcagtcattccgacgtgctagtgctcgggtggtctggtgctcgtgctccctgctcctccagtcctccccctctgacctctgtacctcgacctcaaaggcaccggcgctggcggttttaaattggtgcttggtgctctagatcttctcctgactatgaggtgtgtggatccgtgaggaaccagtgtgcgtcggctccatccatctccacgacgagtcggcgatgaaaccagtgctccgaatctactgctcactggtgccatctccttgtccagcatagaggtaaccagatctgctctagatctactgctcaatggtgttcatctgctctcctctattaagctcctggtctggttgttgtgtgatgaactactatttcttggaatcttg

SEQ ID NO: 62173 - DNA, 759 bp, Zea Mays
tggagttcgctcagcatgtggacacttagggcaagcatgcggctccacggggaactacccaaggggacgtcctcatccccgaatgtctgaccgaaggctgccaccgcgtcggacagagcgtcatacacggtgctcttcttgtcgatggctcgagagagcatctaagacatctcgatagaggtatggaggtcccgctcaaactctgaaaacaaccaaacagaacgctgagcatagccgaagtagtccgagcaggtgaaacataggtaaacaaaacataactccgctcgagccttccattgctgggcctcggtctgatgagcctcgagttccttagcaagggacctagcttgggaagaggcttctgcggcttgacacaggaacccctcccgttcgctggatattctcttaagctcctcctccagctcgtgaaccttctcatccagaggagccgcctctcgccatgccgaggccgcctcgtccctcatctctgagtagagcgcctgaagatctgccacctcggcactcttttgagcaagctgctcattcgctcgagcaagtaggcccttctggcgccacgacgaatcccaaacgccatgctcacggcagaggaacaagacttggctgcggatttcgccatgagctccataatggaaatagacaccatcaagacatgtcctaggtgaaggagtgtgttagagttaagcttgacagtgtgctggttagcgcgtgcgtgtgtgcgtcgtgttgtgtgcgtgttcg

SEQ ID NO: 62174 - DNA, 314 bp, Zea Mays
caatgtgctcgaatattctgttagaaaatgttctcggtactgaatgctattattatttttctgttgtttgaattcaacattcgttacgattgaagaggtaagtgcagtgtgatgattttgaaacttctttctatttcgcgaggcatagagatcgccctaagacgagtaatcgcgagcgtgcttatgctggatcgagtagatgtgagcatgtctcgccgatttaaatcactaccgacttaaagctgactgctccgttcgtagggtatagtggtcaccctgggttaagtaagcgtgagcatgtcacaccgccttcg

SEQ ID NO: 62175 - DNA, 354 bp, Zea Mays
atcacaatctgattaaaatcaacacaaataagcagttccaaacaacgtttagatattgcgacaattttttcacaggaaacctgtagtttttaatgtttccatagtatatcttaatagataaaatccagaggatggaaagaaacatagtatatagagacaaagtataatgagtagatatttaacagtaatataccatatttagctctttaaccaattgaggaacaacacaacaatgagcaagaccatggtaagcatgttaagcacgaaacgatgaaccaattatttaagcaagtgtgctcaatctagagtacaaaatgttgcagctagaatttaatttcttgacatacaggtaga

SEQ ID NO: 62176 - DNA, 570 bp, Zea Mays
atttgtattgatcgtctctagcaacgtgtcatgttgtgattggaccacattgtttcgaagtccgaaaactcaaagaaaaatcaaaaaaatcatggattctgtttgggttcattcaaacccctcgctctccaattcgctcttaccatttcccatttcactcctttaactctctttcactccaccaaaccactactaccatgtacttctcgggcttcgacgttgagatgaccgaagacaagatattcgataggtttcatcaaactatgatcaatgtggcgatgaagcttgcctctgggtcttcaatgagatggagtgaaggacgtagcaatggagccccacatcaaccaggatcataaagtcacccacaaccggctgatacaagactacttcatcgacccatgcgtctatccttcgctctactttcgttgaaggtaccgcatgcgaaggtatctctttcttgaaatcttggagaggttggatgaccattcctcctatttcacttttagaaccattacactaaaatcacaacgattctttccccacaaaaaatgcaccactttcctccacttg

SEQ ID NO: 62177 - DNA, 732 bp, Zea Mays
tttcgctggtccatcacatagccttgtatatatgaagaaaaaataacaagttacctactgatgagctgtttcgctttatgtagttggtggttgcagtagcggatggcctccgcctcgtcgtcgtcgcaaacacatcacccacctatactcgccaaaactctacatccacctgggatttgtcgtagacgatgtaatgcagcgagtatgtgtgcctctgtcatgtttagaaaaacatttagtgtgcatcatatcttctgcagtttttattagaaacatctagtaacaatattctattctctaattttatcaagaattgatatgttaaaatagtatgcagcagcctggcaagggaggaaagaaacaaaaatagaatggtactattaaaatgtacacatataaaaggataattacggaccagagaaaacatatctgttgtctaaaaaatcaatttgtcatatgagctacaagaaaaataggaaaatctttagcattaaaggcaatccgtctatctcttgtacattgtactaaaacaggcaagcagctcgtgcctctttgtgcataattagaaatttgttgtagtgagcactggtctaccaaggtcaatgttttcctagcaagaatgtggcaatgcagcaaggaagcacaagcactcctaactgaaatgtataaactctacctcaatataagactgaagcataaggttgcatctagcaaacttggggatagtttcaa

SEQ ID NO: 62178 - DNA, 422 bp, Zea Mays
atccatctgagtgagacgatatgatccaggccgagtgacttccgctaccatgaatggtccttcccatagaggcgacagtttgtgttgtccctcccacgttagaattcggcagaggacgaggtctcccactgcgaaggatcgatgtcatatggccttgtcatgatagcgcctcagagtttgctgatatcgggccgactgaatcactatattcaatcgttcttcttctagtatatcgacgtcctccagtctagtagcttcggcttctgctatgttttcaaagattaaccttggtgccccaaacttgagatcagcaggtagcactgcttccgaaccatagaccataaagaaaggtgtgtttccatgcaaagctcgactaggttgagttctcaggctccaaacgacatatggcagctctatgaccc

SEQ ID NO: 62179 - DNA, 371 bp, Zea Mays
ccgtgcgaggggctacgccaccgccgtagaggtagctgagtcgggtgttggtcagggtcgttgatcgggaaaagaacggccaggattagaacttggcgtaccgcttgggttgaataggcgtaaccatctgattgtgatccggtgactgtgattcaatctcggaaaataagatcgggacctttgatatacccatcaacggtctgtttgtgtatgagaccatcggggtatccggaccgggggatcaaaatcatgcggtcagttttgcataccggttcgacgtaatatagatttaatctgcgcccttcaaatctgatcagtcggctctggattcaggttacccgttcgctctggcgcatttgcgtaagaccccc

SEQ ID NO: 62180 - DNA, 673 bp, Zea Mays
gaacaactcaactttggtatgctcaataatatggaagcaacagttatggaagttgaatctactttggaaaaagaaattcataaaggacaagagtctgatgagaaaatcaaagaaattaagacagaaattagtttgggaaaagccccggatttcacagaagatgatcaaggcacagtatggtttaaacagagaatctgtgtacctgaaatcgagcacctacgccaacttattttaagggaagcccatgattcggcttattctattcaccctggaagtactaagataaaccaggatctaaaggaaaagtattgttagtacggtttgaaaagagatgtggatactcatgttgcactatgtgacatgtgccaatgagttaaagctgaacaccaaagaccagcaggattgctacaacttctcacggtaccggaatagaaatgggaagaaatcagtatggatttcatagttggactaccccgtactcaggatggctatgattcaatatgggttatagtggacaggttgactaaagtggcacactttatacctatgaagacaacttactaaggagcccagttagcagagttatacatgtcaaggattgtttgtctgcatggagtaccaaagaagatcgtatcgcatcgaggaacccaatttacctcacgcttttggaaaa

SEQ ID NO: 62181 - DNA, 854 bp, Zea Mays
gccagcctcactccaattcccccccccccccgtccaacaagctctcgctaccggtgggccctgcatgtcaggcctatcttctccgtggccacacccacttctccgaaaaccatgcaactccaaatccgctttcctctccttggtagctgcatgcctgtgtcctcgtgggtataaagaccgagacccccctctgttgccccaactctttgggggcgctcctgccaccaaaacgggcatccaccgccatgggagagaagagaggtcggaaagggaaaagacaagggactccgccgccatggaacttgtacagggaccaacgtcggggcctctgtattagcccaggtgcttcaccatgtggcggggagggtttctgtggtccctcctggcaggattggctggtgatgactcatgaatcgctcaccggaacaattccaacgtcgcggatcccccacgactatggatggatccctacgcctcgacgttcgccggtaaattgccctcccataggtttgccttcctctctgattagtgtagcacacttctgatttggcgggggaatcctagttcgtcgcactcgcttctccggtgtgggcgccgccgtcacgggcatgtgccccgccgtgctcagctgttgcgtcacggaggaagaagaagccccctgcaccgtccatcctaggatagacggttgagatatgaagtagagagatcgcttcatagggtagattagagccgtggggtggtgatcgggcgacccatgtggaatcaggcttcattaaatctatgacgtagatcttgggatgtgcggttctgggcgctcgattcttgatctgaactggatcactggatcaagatcc

SEQ ID NO: 62182 - DNA, 876 bp, Zea Mays
agatgtccatgcactcaggtctaggcctatagtccttgagtgcgccacaggccgagcggcgcgagggccattaatgcaccgcagtccggggggctcgtaggtcatgagtgcttcgacctaaggggtttgtaggtcatgagtgcgaagcgtaccagcgctcgcgctatggctcgctgctaggcatggttaaatacaatcgactatttatggcagaccaatctagggctgaacgtgggatccactcgagtggttccccttcgatacgctcgaccccccatcaggttctgccacacctgaccctggactcagtgccgtggggttcggccgggggcatgctcctacacggttgacgtatccacctctcccaactaactaacgggccccagcgatcaggggctctttcctcagcgcactctctgaatggtgggtcctagataccagggatcatttccacgacagtagccccagagccctcgaggggagagtatctcccttcagaggttgatgatgggtcggacgatgtcctatttttttcgttccttaagaaatcatggtggcgtcccctcaaaatttgacgacgtctttatggtgatcggtcgtctctcggggtggagtcaggcgcttctccgtctcgttttataaaccttggatagtcgttcacctgccagtcattcttgacacgtccctcgatctcgccttcgacttggtcaacaatcgaaccttgatctatcaggatgtcatgctccgttggtcatgatctaaggtaagcttcttccctctggcttgccgacttccttttctggtctgacttcgctacaccctttcttccctcagcagcgcggtcacctctatcccaggggttgtgccatggctgag

SEQ ID NO: 62183 - DNA, 361 bp, Zea Mays
gtggattatggagttaggggaggctaaaatctattatatcatataaggtaacatttatacaatggcaagtgcaaggtaataagtatttaaaattccttaccaaatgatatttgttagcatcttatgatattgctcttgccttgtatcctagcaagtagattatgtgagctacagtataggcgactagtgacaatgattgcggagcaaattgatgaagaaatacaaatcttggtacagattctctcgagcctttctcccccatagatgagccgtccaggtgaaggctccgtttcgtctggattgaattttaatctcgtataagttgctcatcactcatgcaagttgatcaggtaaggcagat

SEQ ID NO: 62184 - DNA, 496 bp, Zea Mays
cgccatcgctgagtcgcgtattttttgcatgccctgtaggcactgtgtgtctgtcgcgagccacaattgcgcctgttgcgcacgttgcgtggatttatcgtgtaccccaattatcgagccataattgtgcctgttgcgcttattacgaaggcttgctatactgtcgtagccctgatggccgcacacgcattaacgccacatacgctagagcttatactcgcgtggattgtggtgggttgttcaagcccctaaagtcacattatacgcaacttttgtaaacaattttgtttgcctatatattttatttgattgtgttgtgtggcatcatatatttatataaatcgccaaggagccataacaactatatcaagctctatagtgcttgaataatctgggaaactaaattgaaatacaacagaacttggataagttaattctctgctctctcctcatgcataaagttttacccgaagtaacccgaagatatataatataa

SEQ ID NO: 62185 - DNA, 346 bp, Zea Mays
acccttatcacctctatatcttaccttgatgtttatcttatactggccctttaaaatctcctcttttcatctcaatctaagcgttgtacttcatctattttcccttggtcgtatccccttccttgtcgcttgcgagtttttaactccatcctttgttgtgctccggtcgggtattacctctacctttctcatctctcgatcttaccttggtaattacactaagtccgttctctgaaatctccaatctccaatctcaatgtgagagtggtgttttacttacctcacccttggctatatcctcttctttactacgtgtaagcttgggtgcaactccattctttgttgt

SEQ ID NO: 62186 - DNA, 758 bp, Zea Mays
gccatatagtataaaaaggagctactgtttgaaaaagtcttatacttatcagaagtaagtttttgatcctccattttagtacaaattttgtgattctagatttgttgacctcaagccagattgtgatcctatactttgaaatgaattgcttgagctgtaacaaaagacataaaaggattgagtgttcacttgtttctatggtattcattaatgagtgtttggtttaatgaatcatcttttctgatttaggttgtcctattctctatagtatgtaactaaatagcctatacaaaagttaccataatggatcagatcttaacggaaaatgtttgtgaatatctatctagcttctagagttctgttaagccttcatttatcttctaactaggcagaggattgtctcatttaccctttagctgagagcatgtccatttcaccttcatcgcttggagcatgtccatttcaccttcatcacattagtaatcatgtactatcaggacataatcccttctctacaaaggaaaggcttggcacaccattgttttagttattatgatctgaacaaaccattttatatatggagctcatggcaatggcagccccgcaacacgacgatggagcccgtagtgcactcaggctcgcgcttctttgcaacaatgcattgttctccataagggctcccgtcactattgcgttcacgttgtccatcgcaattggaggctcgttaatttgtgtttcgtcgcaacgcacgggcacat

SEQ ID NO: 62187 - DNA, 606 bp, Zea Mays
gtcctaaaagatgacggttgcaaccaacccttctcaagtgatctaatgatcaacttaaggtcacaattcttctttatattcttctcgtaaggatctctacagattggagtatcttgtagccatattcaagttcgatgggagcacaatccccaagaacagcaagagggaggagtagaacacacaagagcaaagaaacaacaccaaaagacaaaaacacaagcatgacagcaacacgactcaatctcactacaaagggcgctcgaatcgctttggcgtggttcacaaatgtgtaggaatgaagtacttgctcttggagtgcttggtgtgttgtggaggtcgaaatgagggtatatttatagccacaagcctcacaaagtcgttgtagtttcctccaaaaacatgtagaaaatatgctttcgggtggcgcaccggtctggtgcaccaccggaccaggaacagtagtaggtccttcaggatcttgaatggcgacttccaaatctggctagcactggaacggtctggtccaccattggaccaccacgtgtcactcgaccgttgaagtagccattgcgtgccaaagagccattggagccgaggaccagtgca

SEQ ID NO: 62188 - DNA, 603 bp, Zea Mays
tgggctcatgaccatcgtctttagcttctccctcttcttctcatcgaccttgatataaaaccactcactcttccaatcggttggccacttggtagctgaggaccggagccttcgtatccttgcgatacgcgaagttatagcaaccaaaattttcgtgcaacctgtctgctctggccttcgtttgatagtgcaactcatgcactcggcaaaatgcttcggcatttgggtccatcccttggcttcgaagggcccaaatgaagatgctgagcctaacgatagcattaggggtcagctgatgaagatagatttcataattatccaaaacctctccaatcatttcattcagcagaaaccgtaatcctgctctgaaaaagcttttgaaaactactacttcatcatctttcggcgtcggagtggtttcttcccctgcaaaacgaataagcttcttctcagcttctccgaagtagcctagtttcatcatcatgggcacatcggcttcagacacagtagatttctcaaaattcaggtggctgggttttgatgggatcaaaatgctataatcttcttcttcttcatcagcattttcttcttcctcaatatcag

SEQ ID NO: 62189 - DNA, 333 bp, Zea Mays
atttttataatttaaatgtgaggtatacgatgaaaatcataaaactaggaaaattagtgttttaatatagtacagatattattctctgaaccaaagacacacaccagaatacaactcacatatgcattgcacgtgtgaagctccgacacacagggcgcaacaactcagctgctttctttacgtgatcagattgctagagtacttcacaaagggacgccgagagagtatcgttcaccaacctggcagtggcagttgccgcattgtactagtgtacaaaagcccagctgaacggtgatcagtggcctcccaatgccattctgtgtaggcgatcac

SEQ ID NO: 62190 - DNA, 567 bp, Zea Mays
cggacacgaccatcctgtggtctctctgcctgaggcctagcaataagaggcaaaacacttttaggctctcttaggacgtctctaagtaggaaaatcattaacaccatgacatgagtggtttatgctccttctgctcaacatagaaccacatcgctcatctctcttcctcctaaagaaaaaggcagccaaatgaccctccctctcatagtaatcatagtgaaaactcacatctctcttaggtggagtctattttgggatttttggatggatggggtgcttttggaaggagatactagtggtgtctagcagggtgtcaagtgtgttcctgagatggttaggttttggacaccacacttgtttctgaggtggaactctcacaggctccacaggcactcctctcacaataggggtggcagatttgggtggagtgagcttgacaagtttcgggtggctgaaggtttctctgaaggttttaggccactgcactcaataaactttaccaaagcaagtgacactcccatccttagcagtaaagcctaaaattggttcgccagttcccctcttgag

SEQ ID NO: 62191 - DNA, 371 bp, Zea Mays
ggttgccctaaaatgagtaattgcaaacgtgcttgtgttggactaagtagacgcgagtgtaccgtgccgatttaagtcattaccgacttaaaccgactgctccgctagtagggtatagtggtcaccccgagttaagtaagcgtgagcatgtcgcatcgccttaaatcattgccgacttaagccgattgctctgttagtagggtatagtggtcaccctgagttaagtaagcgtgagcatgtcgcaccgccttaagtcattgccgacttaagctgattgctccgttagtagggtatagtggtcaccccgggttaagtaagtgtgagcatgtcgcaccgccttaagtcattgccgtcttaagccgattgctccg

SEQ ID NO: 62192 - DNA, 468 bp, Zea Mays
ttatagagtccgtgagcggtggccggtgaatttgacgatgacgcgcggcggccggaaagataagaagttactggcgcacgcgattagtgtcctattaccgtggcaagctccccggtgatgaatggagggttacaatgagtcacgacgatgtggtggatgtgccaaggcacgtggcgcaaggccataaggcggctatcaccggcgaactcatctgaatccgtcgtggctaactcggtacggtggtcggagtaatttagtggccggaatatatccatggcgatgatatttactcaaccccaagcgctatccaaccgatccgagcacgaatcaaggcggcgaaggcacgaatccgtgtgcggctcatcggcggcgagggactgagctggcggcctgatccagtcactgtaccatcgcgaagtgcattcagtcggtctgacagagcagattcaaggcagcttttctccaaat

SEQ ID NO: 62193 - DNA, 465 bp, Zea Mays
aatgatgtattatcccattacagaatacaatgctgccccgatagcttttgaaatctcgctaagggtaaaacttcctgagatgctctatattccatgaattccctattttcgtgccatccatttgagtaagccgatatgatcccggccgagtgacctccgctactacaaatggcccttcccatagtagtgacaatttgtgccgtccttcccccgttagaattcggcgaaggaccaagtctcccactacaaaggatcgatgtcgtacagccttatcatgatagtgcctcagggtttgctggtatctagctgactgaatcactgtattcaatcgttcttcctccaacacgtcaatatcctctagtctggtagcctcagcctcagctatgttttcgaagaccagccttggtgccccaaacctgaggtcggcaggtagcactgcctccgaaccatagatcatgaagaagg

SEQ ID NO: 62194 - DNA, 351 bp, Zea Mays
atagtcttgagttctggtcttagccctttcaagaaacgggccatcttcttggcttctgtgctaacatcgtcagacgcgtagcgagccagttctatgaatttgtgcacgtactcactgacagatcttccaccttgagttagctcccgaaattcatcttccttgacctgaacgatcccttggggcacatgatgttctcggaaagcggcttcaaattctgcccaggcagtgctggtggggcttccttcttccgttcagtctggcatccttgactcttggtctacttccggatcttcttagtgggggcgagcttctttaacttcttatcgtaatccatcttcagggtttggaagg

SEQ ID NO: 62195 - DNA, 451 bp, Zea Mays
cgccggggagatggccacggtaaccggacactaatcgcgcgccagtaactccttgtcccttcggccgccgcgcgtcgtcgctcaaattcctggccaccgctcatgcttactataaattgaagccaccatgagctccgtaggatcatcacgcacccagccaccgagtattgctctcaatcgatcatcagtgagctccaattttgaacttcccccaattcggttttcgccaccgcagacaccctcatcgcggccagtctactccaggttagttcaagcttctcagttgtttgttctagcatccttaggttctcctcaagctcctcgacccctcgtattgaactagaccgtcatggatcgccgggaacacgttgttcctctgattgtctccgctgtcaccgtggccagagcaagttaggtaaccattagtgaaattacttgagggaaaactctg

SEQ ID NO: 62196 - DNA, 1072 bp, Zea Mays
caagtccctgccgagcagccttgcgaggcagagcagacgaccatgtccctgccaagcaaccatgcgaaaaccaagtccctaccaagcaacccggcaaggtggagcaggcaaacaagtccctgtcgagtagcctcgcgaggcgcaacggacgacgaggtccttaccgagcaaccttgctagaggggcgagcaaccgagtcttgcgctagtctgactagcgtaagggaaggtcgatccaatgatgcgagccacgtcggtgatacaagatgggtcatcgccaaactacacctgggtcttgggtaaatcgtcgaaaggtccccgatggacgttaaacgacacctcgtcgcatacattctcaggcaacccccaccgacggatagggccagtcaatctcagtcgaagggatcttaatatcagagtctctacagtgatcggcatacccaaaaatttgtaatggatacaccataccgggttgtgggcacacaaacaagtgacacagacccattacgacaggcaaagctacgctatatgctaccgtgccatgggactgacccgcaggacccaccgcgcactactacgaagatgtcatcggtagacttgctacatggacccatatgacgaataagcgagacaatgcaccataccaggagtatggctacgcacgaccctacggacagcacaacacaaggagcactacgtcaagctgaagcaatagaacgacctcataccaggtagagagcaagtcacccctgtaaggtcctatcattgaactataaaatggtaggcccttttcttctagacacaagcaaaccagttgtaacacgctccaagcaattctacgatcagcactacaatggagtagggtgcgaacccgaaccaacataaacctcgtcttgcaagtccatcattcgagtcctagcgattcaccatttggagtgagtccgcgccatcatccccaacgaacacaaatcttattgttcgctagtttccgaaaccacgacaataccattggtagacatccctgcattaaggatggtcttggcttccatgggggagtcaaggacataaagagc

SEQ ID NO: 62197 - DNA, 1076 bp, Zea Mays
ctgctgttcaccgacggggtgcagggttatgtcgagcggctggagcgcgtcgtgccgctccgcgacggcgtggtgcacacggcgctcgacatcggatgcggggtgtgttgtactcgcatcgcatgaaagcttgccgattcagaaactactcgttggaagtctctctgttcacgtgtcgatgtgtgtccctgacaggtcgcgagctttggggactatctgctcaactatggcgtactgaccatgtccattgctccgagggatagatttgaaccgcaggtgcagctcgccttggagcgtggactgcctgcaatgatcggagcgcttgttgcccacaggctaccgtatccatcgaggtccttcgacatggtgcactgtgcggactgccgtgtcccatggactgctcatggtaggacatgcaagacgtcatgctattcctgattaaacatacttccttcctgatgcatcatctattcatttattatttcactgattactaattgttcaaaataaagtgattttcctattggcaaatgttggagtcggtgaacactgaacagaacaggacaccctcctcatatgtcgatgtcaaaactaaagtacagtttgtttgtttttttagtcgagtgctcttgttctcattcacctatagctgattccagatgggctctacatgctggaaatcgaccgtcttctccaacctggtggctattgggttttctctaagccacccgtcaactggaaatctacatacaacatttcgaatcaagggaccatagacaagcaggacaatcaagtagctatggatgacatgtcgaaaaggcttcgttggacgaaggtgtctgaagagggcacaatttctgtttggagaaagccttcttgtaatctccattgcgaccaagaagcaaatgcaaagcttgctggattgccaccactctgcacaggagaagacccagatagtgcctggcaagtttattactgtccccttgtcactttgcatctccggtcaattgaaatgaaacatgtgcaaatcttatcaaccacggcacaacctgatccattttttttctttgccttca

SEQ ID NO: 62198 - DNA, 312 bp, Zea Mays
ccacgatatagacatcgtctcctggtaaggtggaatcttgtcgaatttcgactatcccaagattagaatgtgtctgtctcgtcacttgagggtcaaaccaatgacatttgaatatcactggagtaagaggtttggaaccatgaaaattgagttcatatatttttcgattcatccaaaataatcgacctcgtcaaggccgggcgtaaagactccagaacacgttgtttttcgattgggctgactttggtcgtagcttgttgtgcgaaaacagtatccattgacatcatacccagaatatttcttgaccctata

SEQ ID NO: 62199 - DNA, 900 bp, Zea Mays
atttgatgatcatgacattgaccaatgctggaaaatttcatagaaacagtactgccacggtatccatgtcctcacgagggcgtacttggaagcaaatgatttgaatagtaagtaattctagccccttaatctccttcaattctcttgcttcaaaacaagtcacggatggatattggtatttgaaaactgaaaagtgttcgagaaaaggaggtgaaattcacgaatactactactagctgactaatggaggtgtgtgtgtgtgtgtgtgtgtttttttttttttttttgaaagagggacgcctcggatgtcggatagtggtggtcaatccagtgcggtgcggtgcagggatggggaattttgtcgccgggacatgagaccaacaacagcagcagctccttgaatagagtgatggagcctgggctaagctgtgctgtgcagcctgtaggagtacatcagccaccaaaaaaaaagattcccgagtggtgagcactgtacgtacgtgctcgactgctcgtagtcaagcgtggtagctctcctagctagtccctagacggcaaaggagtacgcacagagctaggcctccctcagtggcagcagccccccttacacgtactacagcgccagtacgtactacgtagtactatacgtacgacaaatctgcgcgcacgttcggtcttgagaagtctcgcggatgcagccagggcctatccctcccgatcggtcccttttcttctcgtttcaatttctcttccttcttttgtttagcaacgaataaagataaacaccggatgagaacactgatctctctctctctctggacctaaaatactccatgccgaagccatcacatacagctccatgccgaagccgaaagcccgaaacgaaggaatgatgcgcag

SEQ ID NO: 62200 - DNA, 625 bp, Zea Mays
caaggagcgttgtctatgacacgattgcggttgttccgtctccgtctcctttggcgaggaggatgggggcggaagtctactcgttcctccatgggccaggggaggaggagtggcctcgcccccctggctattagatgcggtagtcagcattaggcgggtgtctaggtgggaggacaaccatggcatagtcgatgccaagttacatgaactcaagactcccgaaccagatcactgcgtcgagccgcaagggggtgctgggggttggccatctagagccttgatgggaacatggtatctgcacgcaacgagcccctacctgtcgtgccaactgtcagtgttttgacctgaggatcctaccgactagtgaattagtgttgtgtgccatgcgccagatgggtgatacaatgagacataagcctttatcctggttcgggcaagagaaggccctactttcagcagaggggatgagacttatattacttgcacctaagtgcttgcagtgtggaatacaggttggtcgggagaggtaaaaggataccaagtccttagggttgattgaggcatgtgccaatatccacgtgaaggtgaaaaccgtgaagtgtttcctcccccgcctgaatctctc

SEQ ID NO: 62201 - DNA, 949 bp, Zea Mays
ctctagggtttgtgtgccacttaaatccatcacacttaatctcttgtgaacatttccaacaacttttgaggcaatcctcaatttggccttacatttacccatatgccctaatcccaggattaagtatcctattctagggttaagaacacttcaaatcaccacatcacaaattttgttgaagttttagcctagtgaatgcattctaggtgtaacaaacataatgacatgtcaatgcatatgatgccatgctcaagttttagttgtagtaacatcagaggtgttacatccttccccacataaaagaatctcgtcctgagatttaaggtcctagggtaagtaatggaaaaggaaacgtgtcacaactttatttccttatttatcttacagagcagggggtggtatggggcttgttccaattttacaataagatatacaaatcttataggttacatgaagctaaaaacctaggaaaatttttctctaagaaatcttgagtttcccatgtagcttcgtcttcagtatgttggttccattgtaccttatagaacttaagagtcctttttcaagtgattatgtcgttttgatccagaactcgaatgggatgttccgaattagtcaagtctgtttccaaagtaacatccaccacatctatggttcgatcaagaatccgaagacaattctttaactaggatacatggaacacattatgtaccacagataatgattcgggcagttgaagtctgtacgccactggtccgcattgttcaagaatgggaaatgggccaatataatggggtgccaactttacttttaccctgaatcggttaacacccttcatcggtgatactttcaggtatacataatccttggcttgaaagaccaaaggtcggtgtcgtttatccgcatagcttttctgccgagcttgagcttctttcaagttgtgtcttat

SEQ ID NO: 62202 - DNA, 1065 bp, Zea Mays
cggatggtgtgctcgtgggcgcaaggtttatactagttcgggtaggacgtctctattagtctttggtggctcacgctaccagcatctttgttactcgatactcgtagtaggggttacaaacggacgagagggaaggagagctctcaggtctcttatgtatgggtggacctaaagattacgagactggagttctacgctaagccttggctccggcctccaggtcttcaagtcttgtgtgttgttgccttccgtcgaacgtctccggttctgagagtctaatcctcccttttgtgaccgacctcctccttttataggcttaggtgggggttggtcgttggtggcctcctcgataaggagccactataccatggtaaatcaggtgttttaccttagtgaggccgtattgctcatatgcatcttggttgcctggttgtctatgctcgtgcttattatgatggacggcgtgggtgacatggggtcctggcgccatcattactacatatgtgccacgccgacccctagcctctgtagcctaggtctcggtgtggctcgtcgcattgcgggccctatagatgcctgcgcgcttagacctagtctcgataggccctgagtgcgctgtagcacgaggggcacgtaggttttgagtgtgttggaggctgaggagcctcgtaggtcatgagtgggaggcggaccggtccttctactgtgacttggtgtcagacgtagttaacgtggtcgaccacttatggcgggtcagtcttaggtcaggcgggtaatccactcgattggctttccttcagttcgcatcccccttctagctccaccacgcccgaccctaggctcagtacctcagggtttattcggggcggtcgcttctaggggagacagttcccttactcccctgctgactggtggtccccgatagtcaggaggcccttatcccgcagattctctctgaccggtgggcctcaggggctcggggttctttttcccaatagttgtattaagcagtctcttagctgtctcttattcttgaaaaactgatccatggtcacaggatgattg

SEQ ID NO: 62203 - DNA, 479 bp, Zea Mays
gtaggactgtacattgattagtgggtccaagtgttttatgccactgtttagatataccataaacacgagcaattttagtttagattttagggtagtgactataggctatatgctagagatgtcaaaaagttgtttggattattagcatcttagactcgtatccatggtcattggtatggagcatcttatccacctcgacgtcctcacgataatggcatgcctctatcagcacaaagtggcccatctagttaggccatcgtttggagatagatctcgccatggacgagttgacttcacacatgtagcacatatcctctatgcaattatgaggacactactttctcggatgggatatgatgaggcattcaccaacatttagcatttgctccttggatcgttaagggtcgctagccacaaccaaatatgttgaacctcagcattagccgtctccaaagctatgcgagtcgctcccaaatccc

SEQ ID NO: 62204 - DNA, 371 bp, Zea Mays
cgagtctggggtcgggcatagccataatgatgacgcatgggaccatcgccaccctcacatcatctgccacggtaaataagagacagtcatgcagccctaggccccacgagtacgtgtggctctacccagggtaaaacacgggttttacccttgccttgcggctccttccctgggaagtcactgctggccgacccctctcccaacctataaaagggagaggatggcctcacgacaaggggatggaaaggagagagctcttggacaaccagacgccttcagacgacataacccacaaggacgaacaggaggagaaggaacgtcgacgaggaccaggaggccagagcctcgccaagccaagtcttagctaggac

SEQ ID NO: 62205 - DNA, 288 bp, Zea Mays
tctgcttgttgaaagacagaggcctgactgctgaagctatggtcgctgattttgtcttcaagaatatccagcctttgaagaaaagggcgtacccggcttatctatacagtggcatcaatgattctacccgggccgcaaacaagagaatccccactgaagatctggtgagacgactggatattattttgaaggcagagtgtcaaattttggtgcttctgttgcctattctgcctggaatctgccaccacataggtcgttttctgaatttgtgtccaagcctcctgctag

SEQ ID NO: 62206 - DNA, 361 bp, Zea Mays
cgagagatgaagtcgcctagtggtggaaagacatggagaaggcctaaggccgatttcgtcctgagcagggcccagaggaaggaagtactacagtggatcaagatgttaatgttccctgatgggtatgcagctaaccttagtaggggggttaacttatctcctctgcgagtcttagggatgaagagtcatgactaccacatatggattgaacgaattctttcggcgatggttcgaggctatgtccctgagcatgtctggctagcgcttgcagagttgagctatttcttccaccagctttgtgcaaaagagttagctcggaccatgattgcagacttggaaaggatggcacccgtgttactgt

SEQ ID NO: 62207 - DNA, 300 bp, Zea Mays
ttatgagagacttgacaaatgggtcgagggagcgaagaggaaaagggttgccagcattctaagcagggaagttgcccggtccgtaaaggcagacgaaagggctctgaagagagtgaaagtagcatcgtagccgaaggtgcaagcccctaaaaaaagaaaactttgatgaaataccttctgccgaaccaaaggtagatgaagcgtcgaaggagaccttgaacccttcgtcgcccactgctgtcgaggtggcggaaattttgaaggtaatgactgaatcctcaccattcaagctgataagtc

SEQ ID NO: 62208 - DNA, 532 bp, Zea Mays
gcaacctgcgggtccggttctagagaatgggcgcttgtttcctagggtggtccagagctgtgtagccgcttagcctggtcctgtaccctaagcctgcacctccaccactctgcaacgggtgccctagtatttggagctgtgatcttgtaggtctagacatgaggcttggcttcccatactcaatcctacaggtcctgttgcatgaatcaaaggatggctgataccagacgatgggtcctatgggtgtgctactaacacttcctagccgaagctgtgtacaggtccaggtcccagtcgaggctacctcctgggggccgttgccaactctttcttaggtataccagtatccagcttcgacacgtcgagcctacatcccaggggggccaagtaccagggaggagttggtaatgccacacacaacaaggacaaatagcatacatataagtgctaatactgctcgataaatagtactcaaaagtatcttacaaagaccaaaaattattacaaagccacttcccagcgggacccttgc

SEQ ID NO: 62209 - DNA, 1181 bp, Zea Mays
tcttgcttgtgttcttgattcacttgcaggaaatccttctcgataagaccaatagcgtagtgtgtggttgataaccaacaaagcagtgatgtaatgattgtggaggtttgaatcagacttagttcaaagtctagatagtaaaaatcaggtttccacccatcaaagttatgatatcaaaagaacagaacatgtctacatcagactggccaatgagcagtttaatcggccagtccacttcttcagctggcttagtcggatcctagtagccaggaaacccatcgagctaccctaatcagttttcagttgtccatctagccaaatgatcaacccagtcttctagtgtgccacatccaagaaccggttgaactggccaagccggtcttctatccatgctggtttggttatgcatgttgtgctgcccgctgtgtttttaagcatgctatgttgagtttcttgttgatatatttttaagagctccactatatttatctagtcatcattcaagaacattaaaacttattcaagttgtggtggtgtattaaaaaaattgaatttatttctatttatcttcactcgttgtctttgttggttcttcacctttcatatatgtgctaagtgttgaacaccatatttggcacctaggcacggtaggacggtccgatcgtgtggcccggatagtccacgctctggacgatctacgatatagcctggacggtccgcgatcagattaatttgggcgagagtacttatcacatacgtggttagcctaaactatccatgggaatatgttggatctcgcctaggaatgggtccagacctcttcctataaatataaaggggtacgaccgattgagaacccccaaacacaattcaatcaaaccaatctatttaccttatttatcattcatgccatatgagtagatgtagtgtagcttttgtgtagtttgtccatatcaatattcacctctatttgaatctatgtcttctagaagtgtcttgggtggcctaccgaccccaagacgacagtaggatctttccctgacgaggtccctccaaccgggctagatccaggttcaaccgagacctctctacgccatcgcgaacggtccattcgacaccttgtagagtcgaactcatggtcttgcacatcacatgaaatccctatggttcattgttgttta

SEQ ID NO: 62210 - DNA, 304 bp, Zea Mays
ggaaggcctcctttggttgacttgtttacgcagcagcagcaagctcattttgcttttgaatggttatttggcaggtcttcgtggtgtcacccttgttctctccacagaaaactgaaaaaacattcttgattgtcagttgaatctacctccaaagctttgcccccctcttcctcctcttggagctagatgtcgaaaattactttgcgaaggttgatgttgtgtccctaatgtctaggatgggtcttgtggctgattttgctgtccttgaccacgactagatttttggaggctttggacatgtctg

SEQ ID NO: 62211 - DNA, 467 bp, Zea Mays
ctccatgtgtgttctgttctctctttttttagcaaggattcttctctctgagaaaaaatcctggtgcatgctatcatgatgttcgatttgagcttcatttacgtccttttcttaccaaatttatactatctagctagagcttgttatttttacgtgacgtgtttagatgactattgccaattacggtggtaaagcaaacaggcatatgtggcctgtcaatacgacattggtcaagtaaatggccacatcaatagaaaatatacatcggggtgcataaaaattaattgaatggatgtattatcatatatttgtatcccatatttacgtctattttaaatatgaatgtgtaatcttttgtattccatattctactcagatgtagttgggtacccaccggcaagtctacttgtatctattttttgatgaaagttgttgtggttatttttaatttttgtagtggttatgat

SEQ ID NO: 62212 - DNA, 535 bp, Zea Mays
cttcaaacatcacaattttgcacatacaacgcacaagaaccatgcatttgtcacaagatgggaaaacataaatagataaacatcttcctcccattaaatttacgtcaccgagcaaactccatgttcccattgaagaaagcatcattattgttcagcaaatcctgttgtgagaaacagaagttgagttagattaacctcacttatgtaactcataaatttcacatgtaaagcccattgtgaaataagaagacatgaaaatggtaaaaagatcttattagtttaacccaatcagccaaaaaggcatgtatatcatcaaaatggttccattctgtacctcgcttgttcctgtgtcaagttcattggtgctgtccacttgatcaccgacaggatgtggattaatcttgccatctttagggtgtttgccactgcaaccccaccattcaacatctgggctggtatgagatagttgtcaatccgctcttcccttgtcgccattgagagttcattgttgttacttttgatcaccaacgatcag

SEQ ID NO: 62213 - DNA, 684 bp, Zea Mays
taaggtgtttccgacttaagtcgattgctcggttagtatggcatagtgatcaccctaagtcatgtaagcgtgagcatgtcacaccgacttaaggcgtttctgacttaggccaattgctccgttagtagggcatagtgatcaccctaagttgtgtaagcgtgagcatgtcgcaccgacttagggcgttttcgactaaagctgattgctcctttagtagggcatagtgatcaccctaagtcatgtcatgccgatttcgagtcgtgcccaatctaagtcggttgtcaatcaagagattgaatgcctttggaagatgaaagctttattaatgatgaaatcttctgattacagagtacaacttgccctcgagacttttgaggtatcactaagggtagaatttcctgaggtgctcgatattccatgagttccccacctcggtgccgtccatctgaatgagccggtaagaacccggtcgtgtgacctcggctacgacgaatgacccttcccatggtggtgatatcttgtgtcgtccctcccccgttagcactcggcaaaggaccaagtctcccactgcaaaggattggtgccgcacaactttgttatggtagcgcctcaaggtctgctggtacctggccgactggattactgtgtttagtcgctcctcctccagaacatcaatgtcctcta

SEQ ID NO: 62214 - DNA, 286 bp, Zea Mays
cctctagagtttgatcaaagttggccatggacagctcttgcagaccaataagggcagacaaagcaggagaaggaactccactacttccaccgctggcaatgaactgccgactgtttttccgagttaaaggagcttcatcttcttcctcttcatcctccacagcggcaacacaagcagcactcccattgggatcagcaacagtttgggcacacccattgggttcagcaacagtttgggcacacccattgggatcagtgtcagtaagaccgattacaggcacttcttc

SEQ ID NO: 62215 - DNA, 464 bp, Zea Mays
tttaagatagcccaacccctcggtctcgctctcctgcacgcctttcaccctcaccaaggcctaaacgccggtgttcgcctaagacccaagcccagtgccacccacaagcttgctcgagtctcggccaccgtggttcaaccaacatagcccctctccactcagtcaagcttcaccattggcttccccagaggccgttgaagctccccagaccctcagactgaacactacctcgccggagaagccaaatcacacgctccggactttacccacccgctggcgcacatggtcttggtaatccaacgagccattcctcgattccttgtgcacgcacaccccctatcacccactaaagcttcctgtgcggtttgattgaactctactgtcgtggtttggccagagcaggcgccgccgacgagcttcgccgcctgaactcgtggccaggacacctctggtcgcctccgacg

SEQ ID NO: 62216 - DNA, 1759 bp, Zea Mays
atcgaacagggcgaaaatttatctatgtatctcatgattctggaggtgacgaatgagttcgaatttttaaattagtgtccattatgttacttttaaaaaccaacatatgaccatcatctgaggagtgttgtcagtcagctacagccagcgagtcccggtcaccagagggcaaaaccggaacgatcaatcagtggcaagctttacgagctagtttaagaaatgagtaatgacagagcgccatggcccacgaggagaggctaaacgcacacatgcgagccgagccgacactgcagggaataaaagaaacgcgggacgacagagcccttcctccctctttctgtcggtgggggcgaaaagagagagacacacagagagagggaagaaaattcgcacgctgagctgagacgaggcgagcgcgtgagcccggtccatcaaccaacgctgtagaccccatcgcccgtcgcgacggtaggtgctgcaacctggacgtaccaacaacccgtggcgaccatgcgagacattaacaacaataagtttttttactttattttattctttaattaatcggtatcggcatcaagatctccagctgtagtgtagtaccgtagtctgtgggccagctccaacaacccctgtgcatccctctgccatagcgcctagcgggagcaagaaacgagtgcagcttgcagccggggaaactgatgcatagtgggtggggcctgcatgttagcgagtggaaaggactgccggtggacagcttggttgcttaaacgtctgcatggctggatgtattaggagatatagcctgtgcatggtcatgtcatgtcctttatgtagggaggccattaatttatatttacacactagtttctcgaggaaatattagatcatgattgaaggtcaggcaggcccaggctcgtgtccaataaaactcaaaaaaatgatacttgaattctctcatcctccatttgaatgtggatattggagggcgatgaattaaattgatttcaataccaaattctctcatgctccatttggatgacagaagcacgtttctgctcaagaatagcagacgcaagcttcctgtcggaaatagttgtttcccccaagattagcattggtattaacttcacaaataccaacaagtttgcgaaccagtggctgttgccgctttcatctttcaagaggagctcatcggtgatcacttggcgtcacgcagtcacgcttgccgtcctgcggttgcattagcacatcgttgttaagactttacacccgagaacgttgctacgtacgtcgtctgagatgggacaataaattgggaatatgtatgtacaatgattctagctcgtaactgatttccgcaaaccctatcaaagagaaatgatagcaagcaaaatgtaaggctcgctgagctggaaggtggaagcagcatttgatgcaattggcaatctgcatgtcgtcatatggtgtgcttggaagttaagccaacgatcacgggatatacatatataatataatagtttgcactgtacaaacaggagaggtctattaaacagtaaaagatcagccagtgttactgtgggagcgggagtgctacttacgacttccatcaggagtccatagcataacatctcattttatagtgatgttgctgtttgcattggatctagagtcgttagcctcttcttcagagcaaataaacacatggggccatcaaagccggagaggatccattttgtaaaataaggaaatgatggca

SEQ ID NO: 62217 - DNA, 645 bp, Zea Mays
agattcaccctattcacccccctctaggcgactttcagatactggagcaacacattcatttattactgcatcatgggtagaagcgcataatcttccaataactacatgtcaacacccattcaaattgattcagccggtggtaaagtttgagccgatagtgtttgcttgaatgtaagtgtggaaataagggggatagagtttcctgctaacctcatagtaatgggtactcagggaatagatgtcatcctagggatgaattggctagatgagtaccaagcaattatcagttgtgataagaggacaattaagttggtgtccccactagaagaagaagtggtggctgagttagtctcacctgagccaaggaaaggaggttatcatcagatggctattgatagcaaggaggcagattcactcgagactatcaaggttgtgtcagagtttccggatgtgttcccgaaagatttaccaggtatgccacctgagcagaaagttgagtttgccatagagcttcttcctggcaccgccccatttctaaaagaccttacagggtatctgggcccgagttggttgagctcaagaagcaaattgatgagctgtcagagaaaggttacatcagaccaagtacctcaccttcggctgccc

SEQ ID NO: 62218 - DNA, 901 bp, Zea Mays
ttcggcggaggtgctggaggtggtttcggtggcggtggagggctcggtggtggcatcagccatggtggcgggtttggagcgggtggtggattgggtggaggaggagggtttggaggaggccttggtagtgggtttggtgttggatcaggcatcggtggtggcggtggatcagggggaggccttggaataggacatggaggaggctttggtggtggaggcggaggtggaggcggagggggagggggactcgacggtggccatggtggtggtttcggtagcggaggtggagttggaagtggtgtttacggcagtggaggagggtttggaggcggcggcggaggaggccttggtagtgggcatggtggaggctttggctctggactgggtgtaggaagtggtagtacacatgaaggtcttgatggtgttggaggcatcgggggtggcggaggacttggtgccgggtatggtggaggttttagcgcaggagcgggtataggaggtggcattggaaaaggtcttggaggtggaggtgggtatggcggcggcttcagagctagtgctagtttcgaaggcagtgttggtggaggcggcggtcattgatagggcagacaaacaagcatggtgttttgtcttgttgtgtttcatgacgtacgtggatcgattgcatgcttgcatgtaatctccagggttcatctctaatttgtctattagtccgtgtttgatatgagatttgttcgtttagagtgatgatattattcaacgtacgtgaactaataagtagtatctgctgattcagggatctcaggtgtgtataagccttaaactgtgctctgcattttgaatctgtagcgaaggaataaaacagtgagatgtgattcactcaccaaactagttcttgacc

SEQ ID NO: 62219 - DNA, 612 bp, Zea Mays
aatataatcagaagcttcggaagaagcttcgggtgtgggagcgccagtttgctcagacaaaagttgttctgaagtgtctcttttcgtttctttatctccaatttccagggatttctttctggcgggctctgagggcccagcttcgggtttagcatgactctctgcagcttcgacttcaatttgctttatatcaacttgcgtttttgaagcttcggctatttttcctgaagtagagcttgaagtctttatttcttctagtacatccaatacgtggaccattcttttcctcttaggggtaattgcaagatctttttgtgccttcgacacggatacttctgccgaaggacttgtaatttctgatatctttgttctctcaacctccggctcacccaatttgaccaatggtgctttcggcgttgtagccagctctttagttttctgcattagcgtagtttctttggctttgttagccgaagaggtctcaccaccaaattcaggcactgtagccgtttcaatgaatcgtggccgatgagtaagaacctccaccttcttcctcttcagcgcgggctcgcttagagcaaccgaagcaacatccttgacaggagccgcacc

SEQ ID NO: 62220 - DNA, 554 bp, Zea Mays
ctctttggtcgagcaatctcaggagatacaacttattattggtgagatacatcaacttgggtgcatcttgcctgatgcatttataacagagggtatcattgccaaattacctccaacttggatgggtttttccacggctttgaaacatgggatggaaaacatgtctattaagaatattttagcttgtcttgatgttaaagaaaagtctcgaggaaaggattgtgcatccaaggaacgtgaggcatagttaagtgctaatatcacacaacttgctaaaaaaagaaggggaatcgaaaagtcatatagaccaccaactttaggaagacgataagcataaaagatatcatctgctatgtgtgtggcaagactaaccactttgccaagaaatggcatgatagggatggcagcaagaagagtcaacaagagtagaataattctattaatatgattgtgaatgatgctagagcaacagggtatggtaatatgtatagtattttttcagcatgtcaatctactaaatggtgggttgatacaggggccaacattcatgtttg

SEQ ID NO: 62221 - DNA, 446 bp, Zea Mays
tcggttgcactcctccataatataaatacacatatgaaacaaaatgatgccatgaaggataatcgaacataccttgggacgacgtatattgcacaactaaaaaatatggatgatgcaatgactaatagctttgacgagccagggcaaaactttcacccaaacgtcctgtacttgcttacttccttttgtttgcctttactccactaagcatcatccttacctggatcttgagaactcccattaggggcccatgtcatgcctctcttcttcagctcttgtgcaccgagtttttctagcctcttgttgtgccagattgatattccaagtgggattctcgattgtttgggcacattaggcttcttaagtttagatttagtacctagactatcgctagctaatttctttattgtttgggcactactagccaaattatctaacacttcctc

SEQ ID NO: 62222 - DNA, 573 bp, Zea Mays
ttcaacttcaacaaacagatatgcaagcaggacttaacacctaactatctggctgtttatcatgaatgtatctggccatgttcagaaaatatatacaaatacactggtagttcgtagaaatattacacaaccaaattcgttcaaaatgcagcaccttaataaaatgactatggtcacataggccatgcaacaaaactttaaagtctggtttggtggataaggattacgagaggatccataggagaggaatcctcttgctattcaattttcaccaaattagctctcaccaaattagctcttagagggcacatctattgtcggagactcctacacggggtctgcgaaagggataaaccaagataagccttctgctgcaaatatatagagattgctttgacgtctgcaaaagggataaaccaagataaaccttccccgcaaatatagaggctgctttaaacctgtgatgagacagctctcaccaccacgtcagcacttctggagcaaaacttccaaattaaaaaaaaaggactccaaaccaggtagcatcccaataagacatgatctttatgcaag

SEQ ID NO: 62223 - DNA, 400 bp, Zea Mays
accaaaaagacactccgcgcaaaaagtcgcctaagggtgcagccagaatagcacaacaagtgcgtcaatcgaagtcctttacaaaaaaaaaacactccatgcaaaaagtcgcctaagggtgcagccggagcagcacaacaagtgcgtcaatcgaagtcccttgataaaaacgctccgtgcgaaagacgaccaagggtgcagccggacaggcacaataaaatacgccatcaaagtctctcgccgagaaaacggccaacaggccacattacaatacaagttatagttacatacacacggcgagggcaccatatactacatcggctcaaccttcgggatgatacccatctccctataattgaacaacattatcctcaattcctcaccctcaaaaatattttgc

SEQ ID NO: 62224 - DNA, 487 bp, Zea Mays
gtggtttcagactgcgcgtttaaaaaatgtttggttcactgaaaaaggagagcatcagacaatgggaaaagaaagcacaacactgttctgggtataacagtattttataaagcgctgcgggaataaaaagaggctaactcaacagacaacgtatcagtgtacatgggcttggtgcacatattaaatccaggtctatcatttgtgatcaaacatctctctctcctgattttttatcagaaatcatctcccaccttcctcacttcgttttttccccgaaaaccaccgttgcggcttcaacaccagaaaattgatggtctccctgattgatcagaaacgaatcttctctctcgtctccctgattgatcagaaatgaatcttctctctcgtctccctgatcgaccatcggtacgccaaaccgttgcggcagggtctccaggtgggcaaaacaattgtccgacgctctgctagtgcgctagccatgtatcag

SEQ ID NO: 62225 - DNA, 839 bp, Zea Mays
caatagagaaaatcatcctcatcattgccgctatacaccaaggatccttgcggatacttcaaatcattggtgtattcccttgttctggcaatctgctcctccgataattgtttacccgaagcatgttgaataataaactccaactcttcggcaggtgcttcgggaacaggagacttggacttctcaggggcacgttctttttccaagattagtggtgcagtctctgaaggtcttgcttcgtcaaaaactgagggtccagcctcagaaacagcttgcgcagtgctagtttcgtcagatttctttaaaatttcgccttctgaactaggcacttcatcagaagcagttgatgccttcacagattccatgacagcgtctagcacgctggccattctcctcttccttagagttgttgcagggatccttgatgccttcggcaattccgtctcgcgcggtggacttagggccttttgctgctctatcgccttcttcagttttgtctcttcacccggtcccgtcttagctttgacaggcacaaaatgacttggctcagatatagaagcagacccttcaattagcgtggcacttcggccatttcaatgcgcttgggccggtgcatcaaaacttttaccttctttgacctcggcgcactagaagttgccgaagtaacagtctttcttttctatccttgctttcgcgaaggataacagtaatctggatatacaaatccaatgacatcaaacaccctgtttagcctcttcttgcctcgagccccgaaggccgttgtcatggcatcatctttagccttcgagtaggctccaagcaattcatcactggttgct

SEQ ID NO: 62226 - DNA, 571 bp, Zea Mays
gctgcgctcgtcacggtggcgagaccgcgaggaggtgatgtgtatgtgcatatcttgcatccattatcttcttcggctattttagtcgttttggttgagtgagcaaacgtacgacggggacgcatccgacatctcctctgatttctcttagtataacactaatataatcccgcaggttgctcggttaaagtcacgaaagcgcagtggagatcgatggcgaatctgacatctaacgtttgtgctcttcttcaaaacacgcatactgcgagtacatttatatatatcacacacggcggcactaaagtgcattctctatattgaatgcacccaggtacaataacacaccgagcacgcccttggccctcctgtacgcgtgcttccgtgcccccgccgcgggtatcctctaattgcaaacttgagtctctgtttttactccttgattaccattgcatgttgtgttgttgctcaagttgcaacgtttgtcgcttgttgattgcaactatgggtatccgctaattgcaaactcatgattgtgtgttgttctgcaggatgcaaacatacttgatgtgtt

SEQ ID NO: 62227 - DNA, 590 bp, Zea Mays
ctcgaataacccaccataatccacgcgagtacaagctctagcgtatctgacgtcaatgcgtgtgcggtcatcagggctacgacaacacaacaagccttcgtaacaagcacaatagacgcaattgtggctcggtaattagggtacacgataaatccacgcaacgtgcgcaacaggcgcaattgtggctccgatgatcacggctgacagacagtgcctacagggcatgagaaaaatacatgactcggcgattgcggtccgactcaacgggagcggtctgatttaaacgagagtgtgacatagcaatcacatgacgcagtaaatgcttagccaatgccaaaatacagccgattaataacgcaatatcatcggtacgtccgagtacccactatacaatttaaccgctcaacatgagtcaaaaaaactcaaaacaacacaaatattcagagcgatttgagtatgcgcactatatccttcacacattttaataatttctgctaattatctactacgagaaataaagcagacaaataatactggaatttaatgcataagcagatcaagtgcatgaaagcatttttcctatatccgag

SEQ ID NO: 62228 - DNA, 546 bp, Zea Mays
aaattggcttacctccgtgtatcaaaatgctacttgctccttgcatgtcaacctattttgtctgctggaaagaggattagaatgtgcatactgcaagtttaaaaccaaggaggcatgagatttttccccaaagaaagaaaataaaagaggggagcgctgaaacagtacaaaacaaaacaaaaatacacacgttcttgattgaagcacaatgctaagcaaacagaggagaaaacgagggaggttaaggaaagggattctggcgaaaacgattgaagacacgggccaacgaattggataagcataatctgcagccgccaatagaaaatatgagggcaaaaaagattaatttctttctgatggatctcaccgacagataacacaaacagtaaaaccacaaagtcgagcaaacagaggaggaggaaagaggggattaaggaaatggattctggagaaaacaattcaatacatgggcattgaactggataagcagaatctacgcccgctacggaaaaaatgagacaaaaaagtaacgcaccgaaaacaaag

SEQ ID NO: 62229 - DNA, 344 bp, Zea Mays
gttgtgtttgaatattttgtggataaggcactagaacgtgtccttggtgttgacaagtataacattctgttttcctggagtactgattgttttgttgttagggtataacgatcgtcctgaacaattgtgaaagtaaatgtggtgtgttggttttggaactttttctgacttaagccaatcgcctagctggtagggcatagtggtcgccctaagataggtagatgtgatcgtatcgtgctgacttaagtcattgctgacttgagtcgattgtctcgttagtagggtatagtgattcccctaagccgagtaagcgtgagcatgttgcactgtcttaagtcgtcgcc

SEQ ID NO: 62230 - DNA, 574 bp, Zea Mays
tatactagaagaagagcgattgaacatggtgattcagtcagcacggtatcagcaaactctgaggcgctatcacgacaaggccatacgacatcgatccttcgcagtgggagacctcgtcctccggcgaattcttatgggggatggatggcacaaactgtcaccactatgggaaggaccattcatagtagcagaagtcactcagcctggatcatatcgtctcactcaaatggacggcacagaaattgggaactcatggaacatagaacatctcaggaagttttacccctagctatatctcaaaagctattgggacgacaatgtattctataaactgggaaatatatcatcaataaaaagacttcaaaggcactcaaattgttcactgtcaacccacaagcttacttaactcggggtgaccactataccctactaacggagcaatcgacttaagtcagcaacggcttaaggcggtgcgacatgctcacgcttacttaactcggggtgaccactataccgtactaatggagcaatcgacttaagtcggcaacggcttaaggcgatgcgacatgctcac

SEQ ID NO: 62231 - DNA, 385 bp, Zea Mays
aaacaacgctctaaattcaacagtgcctaaattaagtgacacaaccctaaactttcatatgactactatatagcatgtgttacatacgatccgaggagatgatcgatgatggtggtggcgcaagtgaggagagggggaagggaagggatgagggatgattcaagtaaagtagttcatggggaacggagatgagttatccaactatctggaccgttgattttgatagtgtgttaagtttgagtacaatatgtttggtgaatttagtgcaaagtttaaactgatagattatatagtggtaagagcataactcttttctattatataaatatatgtaactttctatctttaacgtatacaactttatatctaactttctatctttaac

SEQ ID NO: 62232 - DNA, 280 bp, Zea Mays
gtttaattcgtgtttcaaatagatggacaattttttgagcttatatcatggaggcaatgtggaagaagatccctatggaaatgccaagttcattgacatgtgacacgtgcctgtactattcgttggtagaccctccttgagtgagaggggaagaataacaccatttcttaccgatccccgaacagtgtgagtgtggcaagtgcggtagacttggtcataattcacacacttgtcgttggcagattactgaggtttgtattgtttagtatttttatattac

SEQ ID NO: 62233 - DNA, 377 bp, Zea Mays
ccaaaggaaaatcatgaaccagcttggagcatttgtcacagtagctcaaaatggaactatggctgtgaacttgctcagagaagctcttgagcaagccaatgcttcagaagaggatatagtgtccttgccctaccatgtcatcttcatggattgccaggtttgttcaaccaaaacttttttacctctgcatgtgcaaagctccgtctgatgattgcctgacacctgtagtattccttgtttgtttttagatgcccggtatggatggctatgaagcgacgaaactcatccgcgaggaagaacaacgctacggaattcatgctccgatcatcgctttgaccgcgcacgacatggaggaggatctgcagaaggccatcgat

SEQ ID NO: 62234 - DNA, 1193 bp, Zea Mays
gaattcgcctgcatatgatgttgattgagctattaaaacataatatactcgttcaagtttcactaggtttggctgccattgtgcaaactctcggtattaacgacgtgctatgaggtgggtaggtgaacttgatgtgggattgctgcttcctgccttgttgcccactctgtaagactcggtaagaaaaagaaagaaaccaggcaacaaaagctagaaaaacattaataactacaaagacaccaaacaaacggccacagaagagatggcaaaggaaaacaacaactaatgggaaaattcacagcgaatctgctttgcccataggtaatgaacgaatgccatcgatggaacaccacttagatatggaaactgccagccgaccagctgggctggttctttctaacttcgcgtaatgtctttatgcttagtttatgtatgatgtcgaatctctagatgcccctagcggaatattggtacctttcaatcatcgtattatgcttgacttttgatcatttaggactaaattatgttggaacaagtaccacccacaccaatttatttgtgttaattcatcaatggctgacaactaccgtcaaaacatgaacatacccctgctgcaactaatgggagcattcacagctaatgtgctttggcccatagataatgaacaaataccaccaatggtacacagcttagatatggacaccaccagcctaagttgggctgattcttcctaacttcgataatgtatttatgcctactttatgtatgctgtcgaaagtctagatggccctagcggaatcttggttcctcccaatcagcatattatgcttaactttccatcatttaggactaaaaaattatgttggaacaagtaccactcacaccaatttatttgtgttaattcattaatggctgacaactactgtgaaaacatgaacataccccactgcaacgaaaagcacttactttgggcactaaaagagcttgtttttttctctctcttgtgtctactatctggattctggaatttagctatatgactggcttgtgattccacggttttgaataactctatttgcacacttaaaagtaatgaaggaattagaggagttatgggtctttgtaggttgtgctttcaatttgcttttgaagttgaatggaccaccattctgatcatttccaataaatctcgg

SEQ ID NO: 62235 - DNA, 526 bp, Zea Mays
ctagatgttgggcaatgcaagggcatttgtcggagaggacgactgtgtgtgcttcgaggcagccagcggcgggtggtccaagtcttcggacgggatggcggcgtcaaatagagaggctagcgcgggggttgtatgcgtgtgtagaaaattaaaacgtcgtccgtacctagaaatactctgtagaatataagctttatgtccaacagctatactgacagtcgttcgatataaatttgatatctgacggttgtcagtataaccatcggatataagtgttactttcgacggctgctagataccgtcagacatgatataattgacgaccgtttactgcaaagtccgtcggacctttctcattttactattgtcggacctttcccattttactattgtgactgtggaccacacggatagatagatatacagcggcgggtagcgctggcttctgatgtctctgaatgagcagtgcaggtgcagcagcgtcatgttttcccatgccatttgatcacttcattaagtagctagt

SEQ ID NO: 62236 - DNA, 614 bp, Zea Mays
ggtcctaaagcttgaagctagatgtaatatctttggagctcgtcaccattccatgaccttggaactttgtttccctccatgtcttttaatctgtaggagcctggtctgttcgaagctgacaccagaaagggatcttcccactttacttacaatttgcttgctgtgtctaggttagccacccttcgtagcactagatgacttggcactatgtttttgagcttgacctttctatcttgccaccttattgtttcttcttggtactttcttatatgcttgattgcttcgagccttgattcttctaatgcatctttcgaatttttttgttgtcctcaccatctgtcaaagctataatccttgcagaacccaacttgatctcttcgggggtgacttcttcgtccttgaggagatgcttgaatggtgtaaaacccacagatcttgatattgaagtattgtgatatcacacaactttgataagttcttctgtccattttccctttggcaatccaaccaaggactttgtaattcccaatagaattatgtcgtttgctctttcaactagcccattggactttggatgtttgaccgaagcaaaatgtatgttagttctcacttta

SEQ ID NO: 62237 - DNA, 640 bp, Zea Mays
caacctattatacaacagtacaacctacaatacactactctacatttattacaccattagtcctgctttccattactcttggcgacctcattgtcaggtgtgggagtccagacatcaaccaacctcaaggaaggagggggctcaaaaaggtctaactccccacccagcgcgcgtcccgcaacgtgagagggtccggcttccgcctcagcagggtgtgcaggcacactagggtgtaattgtgagtatagtacatggacttcctcatgcaacgtattgcagtagacctgcaggttgtcgacagttgagctaagttctttaattcgggcctgagcccttgcttccttagcacatgccagcaaacgggactgtactgcccagtcaagtgctaagtcccgatcagcaagctgatcctgcaggtgacggatgtcccttcttagttcatttattctatctccgtcggtgacccaagcatcggtcctgtgttgctgcgccgcttgaagtcgactcactcgagcttcaagatctcctatggggtcattactcccactgctactgctttcatgtcgaggggccagttgatgccggggcactccaattggtccagttgacttgcgtgccgttagccttgtgcgtggcggca

SEQ ID NO: 62238 - DNA, 508 bp, Zea Mays
tgggcgcctccacgcgccttgcgcggcttgccgcgtttgcggcctcgtgtcgaggactcccccttcttctggtcaccctggcaggcctcccactgctcccgagtgagatgtagcttcccgccaatagtgatagggccagagggagcctgtggttcgtcgccgtcgaccacattgagacgacctatcgcctcttcgatcgtcatcgtggagaggtctagcagagactcgatcgagcgagcgatctgcttgtacttctcggggatgcaacataagagcttctcaacagctctctcctcatcgtaggtatcgtagccgaactgcaccatcttctgcaacaaagtgttgaggcggagagcaaagtcatcaacatcctcacctggcttgaaggccaggttctcccactccttgcgaagtgcctgcagtgtggtcttgcgggcacggtcgctgccgatgcgggtcgcagcgatggcgtcccaggcctccttggcagtccgcttctgggaaagcg

SEQ ID NO: 62239 - DNA, 1280 bp, Zea Mays
gccattctgctgtccaacatttattttttatggcaagtcatacaaaggtcttgcatatgggggccgcccaggtcctccatattcttttccatggttcaaaaggtagtgcaccccagaaaaagctatgtatgcagacttggaaccaaaaaccccattaatgttatgtctccaaatatgtttatcatttgtatcttctacatgaaaattttctatgacatcccacagctatagatattgctcaatgcccgcaagagaaagattaccctgtatgtattggacccaagcaagagacgaaagggcctgctccacagtcctttccttttgaactttttagtaactgcagccacaatactcggtgctacatcttcaatagaggtcccatgaattcatttatctgtccaaatataagttgtgactccattaccaatattggtgattaaagctatccgaaataaggctctggcatgggtgagatattaagatcgaggccactccaaggcttagcagcgcttgttttctgaaaccacaaccaaatcatttgtagagcccaactcataatgacgagatttggtattcgaaggcctcccaactcaataggcctagtaaccttctctcaagctataagacagtttcctcctcgagtctcttttctgccattccacaagaaatttctcctaattttgtcaagggcttaataacccattttggaacattgagggcaacaagcagatagactggtatggcagagagcacaaatttaattaagattattctcctagataagtttaagagattagctttccaacctggaagcctacttgcaattttctaaatccatggaataagatcaccggaattgagtcttttattacttaagggaagacccatgtaagtcgtgggaatactttttgtggcacaacctaaagtttgggcagccaactcctccattcatcattacaccgagtagtgtagaaaatgttagagcaactgtgtaccgatgggttgtgtttatgtaatggacgtagacccaactactcttattataaatacatctctcaaccctggttagggtcagggtttcaatctatctaacatggtatcaaggtcctcatcttgtcagaccttttcttctctctaatataaaagatgcgtagctctcctgcgcgttagagaaaaaagctaggtttctcctccccttctccctgcagccgccagcccccttccctcccacctccagtcgttgtcgacacgacccagcccggctgccacccagacccctc

SEQ ID NO: 62240 - DNA, 434 bp, Zea Mays
tgaggatgacgggcccatggtcgccaacgcgacatcctaccagagtctgacatgtgtcctctagtacttgaccttctctaggcctgacatcgccccgtcgctgacgctacatcctaccgaagtctgacatgtgtcctctagtacttgaccttctctaggcctgagtcctgacatcgcctacgtcatctagcaggtgtgtctgcatatgcacaccccgcgggaaccccacctcaccgctctcaagcggattctacactacctctgtggctccctcaactacggactcctactccgcccctccccgacatcgaagctcgtggtctacaccgacgctgactgggctggttgtcccgacacgcgtcggtccacctccggttatgctgtgttcttgggcgctaacctcgtctcctgggccgccaaacggcagtccatcg

SEQ ID NO: 62241 - DNA, 375 bp, Zea Mays
agcttcaaaactaacaagcatatactatggtgcagctgaactatttccgcctccgaagccatatgatccagaagccgacccgttcccgaaggaagcactcgagactatcgaaattgccaatgaagctgttgacgaagctgtcaataagctattaaacgaagctgtcgagaaggtcctgaaggaagactagaacttttatttttgctagtttgatatcgttgaacatgatctctggtcttgcaagaaacacatgtaaacaatttatgtatattgatgtaatatatttctttgtgatgcatgaaacttttgtacataccgtttttgagtcgctggcgaaaaaacatcttcccttcttttcatcctttacgaaaaaag

SEQ ID NO: 62242 - DNA, 1223 bp, Zea Mays
tgcctcactttagggtttatctccagttgcctcctagattgtgcatgggtctaggtatagagtacacacgcgtgtttcccacgcactagaggccttagcctctcaatcccttccttgtgtatgtaatggatgtgcacgcatgtgtgtgcgtatggtactctggtgtgtagtggtgtgcggtcatggtgttcttgtaccctcacaaaaaagaagaaaaacttggataatgttgttataatctttatcgctgagcacgacgttattgtaaaatctaaacgataacactacatttggatgaagatattcagctatggaatttataattggtattggccaggtgtaaatgccgttgtttggatgctcaagagtttggaattggaaatctatcccaatactaaatggtattcagcacacctagaccccatcacccgcaatatcaagcttcacccatctgttttgcgttgaattggctgcaaagagtgaaaagggaggtgagcgaagggggctaaattcaattccatgttctacacttccaaacagaaattgagttttccctattcatatgattacaaaagtcaattttgcggtcatccaaaaactgatatgaattatcgcccatttaaatactatgactgatttggtattcttcacaattcaattccatactctcctatacctacattcaaacgaagcctaaatatgtcatgattatattaaaaacgaaactttttgtctgtagtcgcatatagccatattaaactccactctatgaccggtgcaatatatagtgcaaaacaataacttcacgactgatctgatgaccacatcattaaagaaagaaagaaagaatagtgttcatggacaggagaacatgtggcagtggtagacgtgtcctcgggtcggatatggacggatattgcttgtaccatatttgttttcattttttctcttcggattcggatcggataaggatattatcgagttgtttcagaaaagattagaatgaatatcgacatcttaaatatccaactttaagtacacagatacaaatcagccggataatgaatacccgactcgaatatagatcggatttcagttttattaggcagaccaaatttggacagataatatcagtatcgtttacacccctgcaatggccaacataacacaaattaaaagtgggtccgggccttatatatagtgttttcttagggctaatttgg

SEQ ID NO: 62243 - DNA, 597 bp, Zea Mays
agcggtttggggttggattcactattatgtgtgctattagattaagcttgtttgtagcaactttggtgaagatcttgtaactaacattcaagaggcaaatgggtctattttgttgtattaggttcgcgtattataccttagggatcaaggtgattacaccaaatttcaagctaaacaatggcgggtcacaccaaaataggtcctcaaacatttgcagcgaatcatacttgataatgccccttatttttggtggaactttgctagaaacccatctagacctagagctttgtttcgctccattttggaggatagcattagttatctccttttgtgaaaaagggtattttgttcctctttcatatatgtcccagtctatggtgacacgtaaataagctaccacctgaagttaacacacacacaccaaaacaaagctagttaaaacctaaaaccatgaaccaattaataaagtaagtctgtttgaatcacctaaaactaatgtttaggtagactattgtatcatgtgggcccctcaccatcctcctcgttttcttccccaagccatcatgcacatacaccgtcgtccattctcgttctccc

SEQ ID NO: 62244 - DNA, 523 bp, Zea Mays
aggacggtccatggtggcatagaaaatggacgttaaatgtttggattggaggaagattaatagtagattgatcacatcacatatatatggaggtgactattggactgtccgatccatctataaaagggggcccttatttcatcggttgcacttcttctctctggcgcttctatctctgccacagtgagtagagaaagcaggcgtgcagctaaccagcccagcagccactatccaccattcctcaaggaacacaccatttcatcgacactgacgaacgcatcacgtcattatgctttgtagcacacacatcggtccagctagcgactttcggagcaagacgataactgtggggtgtcggcccaacatgatccatatacgccactggttcgttgtgggctagttttgtagccacggcaaaatggtcacgcaggcccaacactaatccaatggtacccacggccccatgcccccatacgccatcagggttcggatccagtccagtgaggacaggattcgtgctgcg

SEQ ID NO: 62245 - DNA, 415 bp, Zea Mays
gcgacgatgaggcctaagcaaatgagtatgaccgtgtcgtgttaggcccattcctttagtttaatcagatattgctataaaaatagattgtgaaattccaaaatacctatttgatgatgaagcaaaggagaaaaaaaaaggttgagacctattttaaatctcttccctcctttggcacttttgtttatgtattcgcttggctgtttcggttaggagaggttggtgtgactgtgggcgagtttagggtttggccgtttgggcatcaggctccagctcacgctcgtcagcctgttgtgcaggttggattttgtccgtttggagctgagatgatggtggtgaggaggatcccctctcggatgaggtgtaataatcagggagggcataggagcatctcgctgaaccctgcctgctggaa

SEQ ID NO: 62246 - DNA, 991 bp, Zea Mays
cataggtaatcatcatgatcatatgatgtagacctcttactgatgggcaaataacattttgctgtctaaaagcttggtctttgggcaaatgaattccaagaacttattgcagtcaaagcctagatctccatcatgtgttgaataatcccaagttgaatatatgcatcatattttgcaagaattcatcatttaattaagtagaacttaattaaaagaactctttgagttgccagcatgaccgcagcgtccaccctggccccacagcccgtgacaccattcttgttccttgtgtgttccattctcttcttcgttccaatagcaacttctctctgttctcgtgagcagtgctgataatgtgttagaatacaatgaaaacgagattcgagagaatgtgtaaaatggcggtttcattctttattgcagggaggatcatgtttatatacaagtgacagtggtcatcccttatatacaagtgacagtggtcatccccaagaggtgtgtcatttggagatgagttcgttgagtcccgtggattggtcaccatgtaacatgttattttgtgacatgttgttttgtaacagcatattttcctctctggtcgcatgaagcaagggggtgggggatgagaatacggcatgcaagtgggacccaggagatttctaagcacgtactgagtacatgcaggtaggcctagcggtttccatttctatggtggatagtgggctagtgtctggtggcatgcgtgcatgtgggtgggacccaccagcagtttttctttctcctcaagcacgcacaccaactagcgcgaaactgggtggagtagagctcgttggccgatgatcgcggccgctgcgacgagcacgccaaaatggagagaaagagaggtcgccacggagaaaagaaagaggaggaagggctcacctcgggacggtgcatgtcggggagggatcgtggatgtagcttgctccggcgtgcagtgcttcgacagcaa

SEQ ID NO: 62247 - DNA, 499 bp, Zea Mays
gtaggactcacggattgggaaccgggggctctggtgcgcgattgggggaaactccggtgtgcgcatcaccgtggaatcgtggcggcaccgctcaggtccgcagtcgggagtgggtattagggggagttatggctgaccgttggatgtgcatcggacgtctgggaatcaatctgatcggtggatttcggatcgttgatctggccgtggtcggctcggatttggtgggagtaacgcttcgccatttttaatcctgagccgtagattagcgatccaatggatctggttgggtaccgcttcggttgaagtagcgatctaatccgtgccctcggctgcggatccaacggccctgagtgcacggtacccgttcggcctgtaaactacaaaagagtccctgggatttggagaaatcaacccgcagtactgggtgaatgtgctctgagtctgggggaatctttcgctgaggcccctggtgttcggtttaattttgcgcgcagcccag

SEQ ID NO: 62248 - DNA, 1779 bp, Zea Mays
tcatggactattctgtataaaactatctccaacaaactccatgtccactctctatctcactcatatttcaaactttactctgcaaacaatataatctacaatacaaaacaatactttaaactttaaagggacttttacgcagcttgctagagaagtgtcactccatttacccgtctgcctttttttatataaaaggcagtatgaatggcatcgatagctttgtcaaaagtctctcattcctaatcacaaaaactttcatgtcgttaacctgattgatagctgaatactgttgactgtgggggagatggagaaagcttacaggggaagtaaaaggtaggtagcccgaggctgtgtgacgtttcctttagaaacctccattgctggctccccatcctcttcctgcttcatggtttcacctgctgccttctccttcctcgattgccgcagctgctatgggaataccatctttctacaaatgggtcgtcagcaagtacccaagcatcatctcccctgtgaaggacgaaccagaggagtgccctgatggcatcatctacgacaacctctacctcgacatgaattgcatcatccattgctgcttccacccacaggaccagctaacgcatgcagacatagatgtatccacacacctcaatccatgcgaatctggacggtataaatgtatgtgttgactgactgacacaccgttgcaggtgcgccctccgacgacggccaatgaggtgttcgagtccatgttcgagtacatggaccgcttgttccgcatcgtcaggccaacaagtctgctgtacttggcagtaggttcgtgcatagattgttacacatcaaactgaactgaattccgtgtttggtttgaggaacaaattctcacctctcactttttttatttggtttgtgaaatggaatgaaatgagttgatccatcatcatttcatttcttatatactaataattagtaactaataatatgaggaatgagtttattctattaccgcggtgtacattaacaaccagcaacaagtgttaaggatgatgtttgttaccttcagttatttgagcaacttagttacacatgcatgcacttccctatctgttccatctgcagacggcgttgctccttttgccaaaatgaaccgaatacgaaggggacgtttccactccgccatggaaagacttgctgtaatgacaaatatcagattctctcgtcaatgaaataattgcatatgatttttttctacattgacagtgtgatgtctgaaacagccgaaaaatgcgtccatgcttcgatttgcaggaggaaccaccgcgagagatttccgaagtttctgaccccaatgtcatcagcccaggtactgagttcatggagaaggtatcagaagccctcgagtactacatccgtgccagatttaacagtgacccctggtggagagacatcatggtttgctcctgtgctttactaaatgcaatttatgttcttctctctctctctcttcttaaagggaagttcatgttcatttcagcttcaaccattagacatacatgctgaatctaactgcagggtctataaagtattgacaaacattgacttgctgaatctaccaggtggatgttgctgacaagtttaacatatctgttctgaaggtaatactctctgatgcgagtgttcctggagaaggagagcacaagatcatgtctttcatccgtgcgcaatgcagcatggaaggctatgatcccaacactcgacactgcttgtttgggcatgtag

SEQ ID NO: 62249 - DNA, 620 bp, Zea Mays
atcgctgcttcactgctgttcgatgagccctactgccccactgcacggcaaggctgcgagacacaaagccacaaagatgggaagaagagggagcgtcgctgccccggcgagccaaccatggaatgggaggagagggcaagcttcacgcctttgccactgccctgatgagtcagccatagagatgggaggagaaggcgagctgagcgcccttgcccgacgagccctgctaccacactcgacagggaaacgagttcaaatagaacacctcgtttggtgctccaccaaattggtggtgttggggtaaactccacgtttttcaggagcggagctagttgaagttggaggtgcttggtaactgatttatgaagcggagctagaatacgtggatcagagcagtccaaacactccataaccacaatagtgcacaactaaaaaaatgtatctaattttatagtaattagtagtgtgtttttttttcttttctaggtatattggcattagggaagctcaacgtacgtagcttcgtccctgactgtacctaccagctactcctacacaagaaacacagcagtacattgagtcattgatattaattagaaaagaagatagttctagatcta

SEQ ID NO: 62250 - DNA, 328 bp, Zea Mays
tgccacgacgagccctaggctataaaggccaagggtcggtatacacaaaatgatagcacgtgggaccatcgcagccacgcatcatctgccatggtaaatacgaaatagacaatcccgggcccatgagtacgcgtggctttatgaaagggaaatgtgcccttgggccatttttatttagttttggtgattaaatactcaccacattgttttggaccaacatcatcttgtatgagcatgagcacatgtagttaaagaaaattgagaaaagacatttctaagtttgaaaatgggtgtaccatgaatccatatggttccaagtgaaaaaggt

SEQ ID NO: 62251 - DNA, 298 bp, Zea Mays
cggcgataaaggttattataattaaactgcttgctaccggctgcacccgcagcatggcggtacggagagggaaatattaaacacaagacatatgttgattcgtccctagacggctagaccagttcatcataaagaggagagaggacccattgcatcgcaaatcgattcatcatatcacacagagagtgggggccgggtgattcgtagatagcttcagcacacatctcaaatccattcatcaattaatcatacagagatccgaccagggttaactattccgtttttcataatttctcgc

SEQ ID NO: 62252 - DNA, 449 bp, Zea Mays
accacttacaatttttctgttccctatactttttcaatgggaagccaacttcatatgcatacctactataaaattggtatgcttcatccacaccactgaatgtcataccaactttaggtaccaacctcagatcaattgtaacttcctgtgcaaataaataaaatatatatgtatgtacaaataacaataacatgtacgttgtatggtgtccaacttaattttccatcgtatgcacaatataacatgtcaaccatctagctacataatattacactcgattcaatttttctatcgtctgcaatctaatctactctaatgaaaatccaaaacagttataaagtacttacatgtctctgcagaatcactggtatgtcctgttcatgctcaccaatagttcgcattgtagtcagctactgtcctccttgatttgtgtccatcctcgacgcatc

SEQ ID NO: 62253 - DNA, 362 bp, Zea Mays
gggtgggtaaagtcatctatggaagaggatcagacgtaaaggttatggtagaagaaagaaaaatgagagagcctggattgttaaaaggaagtgggttagatcaaattttttactcctttaatttctaatcctttcatgttttataatgcatgcatgctgaaaagaacgtatcctcaccgaatcagaatgatgtttttagtgcatccttgaaatcctaagactagctcattgggcctacttaattagccacctgttttccccactattccgaaggcctttcgtcataggtctagcgttctagtcctgacaattccaatactggtttctaagcaagttttaattttgaaaagttggtattcgtg

SEQ ID NO: 62254 - DNA, 633 bp, Zea Mays
gtgtcgttgattataactcgatggttcgtgccgagggcacgagggagagagagttgggcgattttctgcaggttcgggccgcttgaggagcataataccctacttcttggggtggctttgtatgcgtggggtgtttacaagtggtgtctcccgaatggcgaggtgctaatgagatgaaaatgatggggacccttctaggccttatatacatgaccgtagggcacttcctgcacacatgctgatcacactcttccagcttatcccctagctaatagcgaacaaattccacttatcccgaggaaaactcggcacctccattccgagctgtccccagcgtttgaggacatcggacgcgggaaaagcaagcaacttcaacaggatcacgcccaagctgcgaataatccgggcgtgagcccatcgcctccctgagtcggcccatttccaccactatcttcgcccggtctacgacgcggtggccttgtggggcgactggcacgtggccccaggcagggttttcgccttctagtggacccaggggatatctgtcccccacagagggtgaataggtgaaacctgaaatttacaaactttgaacacacacttcacacggggttagggttataaataaataat

SEQ ID NO: 62255 - DNA, 721 bp, Zea Mays
atcatcgaaagaccagggctttggatctgtccacacctacatacccgatgcaactaagggtatgcctcagttctcgttcccacctgtatctcctactttgttgaagacgggtgagtctagttgtcgttctttggggaagttacccaagttgtcatttcctctgtttgatggtgagtatccccagctgtggattgctcgatgtgaggcatattttgttatgtatgaagtggaatctgaggcgtgggtgcgaatagcgtccatgtatttttctcctgcggtgggttgctggtttcaggcattgcaacggagatatgttgaattgtgttggcctctgttttgcaaattgctgttggacggatttggcaaagaccaacagcagtccttactccgccacctgtttcgcattcaacaaaagggcacattatctgaatatattgctcagttttccactttgatggatcaattatctgcttatgaaattgtgtctgattcattgtatttcacgaccagatttatagaagggttacaggatgatgtgcgggcggtggtgatgatccagagacctggtgatttggatacaacctgtatccttgccttgttgcaggaagaggtctctgaacctatgaggcgccgcgagatgcccaagttgagtcagggtaattggtcgaaatctgattctaaaggaccctttccattgccacctccaccccaggttgggcgc

SEQ ID NO: 62256 - DNA, 616 bp, Zea Mays
cttctaaaaccgggtgtgacagaatgccgatcgcccctcgacctgactaatccaaccataatcaaacaagtttttggcgcatgtataagaatcgaagagtactgtgaccagtactagcatcgaggtcttcgatcgggactctcggaggggatggagcaaagggacacactactcgaggggggctcgttgtggcctcgtggatgtgcccttgatgactcggactcttccactcagtaaaatagtcccgacgaggtccaaggcttgactttacagagtgaaaggcgcaacgcacatgcaaaggtatgccgttctacggtggggcccaggctacgccccgtcaccttccgggcccatttgtaagcccctctttggggtagcttccgtagtatgtctagtctgattgtaccgcacaccactgtaatgacctcgtaggaggaatattccgggaatgtagcaggtaactgggagtataacagtacttggggacccacctacctgcccggttacttgtaaataccctcgcacggtacacggatgggacatgtataacgagaggctacagttctcgcctactatttcactgtgcacctgagctcttcctccacctgagtgttcg

SEQ ID NO: 62257 - DNA, 462 bp, Zea Mays
aagatcttcatagaactgaacaattgaccaacttcactgacagcttctcagataaagaggaaagtggaaacaaatggattacccaactaaataactaactttattaataactacaccaagttgtaggggatacccacaccttggtgacaatcattacaaagatccaacttcagtacatgtccatcataataagcatccaactaaaataagcaaactaactctaactaagactgaatggactaagacactgaactaagcattattacagactccaactctatagatctaaggatccaaatctatccgggtcctgcaatctagggtaccatagtcgaagcgaccatggggcggtgaacggtaagggtgctgaatcccgacaggggcaggagaaccaccatccaaatagtggcgtgctgcgcacttagcacgcaattccgcaacttctgccctaaccttgcccaa

SEQ ID NO: 62258 - DNA, 853 bp, Zea Mays
gtctctgccaagcaaccctacaaggcagagccatttaccaagtcttagccgagtagtcgagcaaggcggagccattgaccaagtctttgtcgagcaaccctacaagtcggaggccctggtctagtactattgacccacgttagccacgacaagacgcgccatcatcgaaccacgtccggaccatgggtgcggcataccgaaggggtgctgacagctccctatcaacacgatggtacgccaccacatatggtctttggcataccccatcttccttgtgggaccagttaaccccagtcatgggggatcgaagcactagagtctatacagtgacccacctaccaggaaggacgagacaatacgccataccgggtgtatgcctatgcacactggagggtgacgcagggttcgtgacgaaaggcgaggccacgccgcgcatgaccacaccatgagactttcatgtgggacccaccgagcaccactacaaggaaatcagcatcagacctgctacagggacccatacgctcgacggatagcggtatgctatgctaggagtatggctacacacaatcctacgaacgatgtcggaggcattacgccagttaggggcaacagatcatgcccttaccgcccttacaagtaggaaacaagtctcctctgtaagatcctacccttgagctacaaaagggtaggaccccctctttcttcccacacatgcaccagttgtaatacacctctcaatcaatactacgttcagaactacactagactagggcaaaagcttgaactagtataactctctatctccatcctctactcaaatcctaggtggctcaccattcggagtgagtccgcg

SEQ ID NO: 62259 - DNA, 464 bp, Zea Mays
cttgtggggggataaataacccccaggttgccatgacccagttatggtttgtgggccgttataaaggtctcaatgggccggacatgcagccttataaattggtcagccgagcgcgactagaacaaaagagggaggcagttacatgggcacgaaggcgcatgaatcaaaccccgctcatgccagagggtgccatgtgcttcttgaagactcgttgactcccaggtaagtcagagctcgtgaggatggactgataacaatcatgggggttgtgtgtaaactccattcggtcgggataaggtagagccacagaggtggtacccctaagaaaattgaggcctccgagtaggtatagtcatcttcaacctccagaccactctgtaatcgaaatcaccgagcaatatagtttcgcaagcgcacagggtgtagggtgttacatgctcaagtagccaaaatgtgtataattc

SEQ ID NO: 62260 - DNA, 510 bp, Zea Mays
agcttgacactgcatatcatttcactaatgtcagcaccaagcttggtgtcaagtaaacccaaaaccctaatatttagagctccaccactaatcctatcaatctatcatgcctagcttagggaatacaacttgctagatttttatattttttacagggtgtaacttggctttttctcctttctctcacacccgtaagatggttccatatcatccttcttttgatcacttttattattgagagatgcctcaagcttgatgttctttctcataatgcttgatgtctccttcacacagacttaattgctcttgtctccttacaagttcatcctccttgctctttagacaaatttggtccgccctcaagcatcactcttgatcaagcctcctctgttgttccacctcacgagctcgagtcatcttcacaaagtattggcctttattttccacctcctttgtcactcttcgtggctgtgtcggtggttcctgagccacccattcattgaaattgca

SEQ ID NO: 62261 - DNA, 438 bp, Zea Mays
tgaaattactacatgctctagattggagggtttgggaggtgaaggtctcgatgatcatcgagtcgcccaactacgagaatcttgccatggacgagctcttcagcaagctcaagtccacagagattgaccaccagactcgagccaagattgagaaccctagtgcacccaccatggccctagtctctagaggtggttctgcttctaactcctcacctgctatgtttgctctatcttctttgttgtctattacagaggagcaggtggagacccttggggatgaagagctggcacttgtggccagccggttcacgcggttccacaacaaccgtatgagccggcggtgtggcggatccaaggacggatgctacacctgtggcgatccttaccacttcgttgccagctgccacaagaagggaaaattggagactagcccgcgcg

SEQ ID NO: 62262 - DNA, 404 bp, Zea Mays
ttaggcttttcttacattgctatcggcaggatgcgcagtatacttcacgcagggtcaatccaagacaggctactgctatcaaggttcttttgttctgtggcggtactgcagtacatgcatggatggacatggaccatggagatccaagagaccagtccagagagagtgggattgaaataaaggggaagaagagtagcgaagaagaagcaggcgtgatgtcacctgcggggcccgcgcgggcccacaggccttcattcccctcgcccacgcgcgatggaaaaggagggcggcccccgtcgcttgctcccttttttatactcgccaccttctcccccctcctttctcctccttcattctgttctatacctctccagcacaaacctcccctcctcaagctgtttatt

SEQ ID NO: 62263 - DNA, 434 bp, Zea Mays
cagtcagagttaaatatgagacagaggagatggctcgagctgatcaaggactatgacctagaaattcactatcacccaggaaaggctaatgcggtggctaatgctctaagtcgtaaagccttttgtcattgccttaccgtgggattacctgacaccactttatgtcaggaaatggaaagactaaatctaggaatagtgcaataaggggctttgatgcatttgaagcttgagtcgggtattcaactgtaacaccctggaatccacaaacaccccgagatgctactagacttcactaccaacagccgagtagtaagcaaaacaaaatttggcagcatctcctttgtaattataagcatcacagaagcaaaagagatatatatcaatacaaaatgaatcatactaatatgatataattctcatcaaagatgattaac

SEQ ID NO: 62264 - DNA, 645 bp, Zea Mays
gcttaattttcaacgggggtacggggtaacatttcggttcgagaacactttttatcgtttcgtgttcgtcctactgctactctctcttgacctgaaaactgcattgcaggatgtgttttgggttgaacccgatcaagagagagagtaccttgtttgtttggttgcagctgaatgcacaagagctgtgctgatcgatcttgtgcccgcccgaggcatggaaacggtcgcctggctcttcattgttagcgtgacatgtatgttcagggcctgtctagaagaacggtgctatgcgctgcgtgtttccggcgtcacataacaacggaaacagattcagaggaatacaatactcatgaatgaatcagctaggccggccggcggcagcagcagcaatagaggaacatgagaacgtggccgccctgcaaagccgccgcgccgcgtgtaaaaaaagcttggaagcgcggatgaaatgtcctggacacgcagcacgcgtgtgcgcatgtatgctgagctgagctgagctgagcagatacagagttgacctccgcctatatattcattcattatttatatatgtacacatgcatgcaccacgtcggcataaccaaccgcaagacggcaagaggttgaaatccccgtggcggtgat

SEQ ID NO: 62265 - DNA, 481 bp, Zea Mays
aaaagaagaagaagaggaggaagatgtaaaggaggcttctttttttgggaaggttgaggaggtctggtggtgatcaggagggatgatgccccagaaatgggaagttccaccatgcatggaccaacttgtgaatctagcagtgatgtcccttacttgcatcatgcatgcatgcatggaatctaacgggacacccattattatagggtcatcacaacagcaagcattacttaattcctcatgtccttcttaagtaccattcgcaagtcatgataagctcgatcagtgtataaataattgctgtggacctactggtgtggtgtcctccttggaaccatctgtatctgtgagtaacaaatgcaagtaccattcgcctgcatgagttctcttgtgccaaaacaagtcccccttcgcaccaaaatttcctaatctatataataagtatatctatataaacaggcgtgcacctttctgcctaatgagt

SEQ ID NO: 62266 - DNA, 904 bp, Zea Mays
cgtgtcaaatcctcctgctggtgatagcggtttgggccttagagtgcgaccctctcccgaagaagttagtgctttggttgcctcacttgaagaaattcctgacgacgagaggcaggatcattttgaggtgcctttgaatccaagtgacgcagagataagtgtcatgctggatatgttagctgaggattcttctgatgccgctcctgctgaaacactggtggtggcgcccatccctgaggctggcaatgctttggatattcagaggtctgacagtgttcgcccgaagcgttctcgccgagccaatcaacccacttctcctgctgaggggaagaaaaagaagaagagacgtcttcgtcgagtgtctagcttggatcaggatgccggtccttctgttcctgctgctgaagaagtgccagtgcctgcatttgctgaagctgaccctaatgggtgtgacccgactgctgtggatcccaatgggtgtgacctagatgacattgaacccaatgggtgtattgtccgcgttgttgatgaagatgaggaagaggaggatgaaatccctctaattcggaagaacagtcggcgttacctagccagaggggaaagcagtggtgttccttctccagctttatctgccctcattggtctgcaagaattatctctggtgaattttgatcagactcttgaagacatggtcccagaagatctgttgttagaaccagcagacggtggcatgatggatgtttgcactgatgtgcctgatgctgggctggagttatcccgggcggtgtcccacgcctcatcaaccttggagcgtggtcttaagggtcaggaggctggtctggattgttcttctcccatggaagtgggtgaaggtccttcagcctttgaggtggctgttatagag

SEQ ID NO: 62267 - DNA, 294 bp, Zea Mays
ctaacaccgtgcgacgcaggggattcttcgccaggcgagaaggcaaaaaggggatcacagacttacatgcagtgcacctgatacgggccatctacaaaagacatcgtaagcacaagagtaagagtggaactatgagaccagaaagtaaacaaaaagagaagtgagacaaaacttttgagataagtaaataacatagagttggtcaagataaccaacttttgaaaagacactaaggtcaaggtaagagtaggggtctatagtccttagggcgaccattctagtctaggttagcgg

SEQ ID NO: 62268 - DNA, 987 bp, Zea Mays
cttgacgttgtctgtcatttaaaatctgaatgcttacaataacatcttgtggattgcatttaacattaagcctctgctgtaaaaatgttacaataaatatgttatacctatataatgagataccaataccatttacatttacatctgcatagtcgcaaatcagttttgggcatcaaaaaccctaatccccattacaaatatatctagacaatccaacaaacttgttttaaagcaaaaacattaacaatataatagacattatttcagtgtacaatgtattttcacgcaagaagtgatatattgacattgaacataaatactaacctgtcgggggttccactggtttcatccgctttgtaacggtcttcttcaccaattttgaaggactgctatcaaggttacacttttcattactggcataaagtcgctatcgtcgtcgtcaccggcatgcgttggtttgtgactgacagatgtcgccggcacacggggtatatcaacactaaagcactcctgactagactaaattattatgcgctttggattagacggaggtcggtccacgttcttcatgtatgtttttcctgccaaaacaaaccatgtagaaacatataaacatatagataagatcttttgaaccaaatatttttatgcacatatgcaacaacaaattaatatagtaagccacaaccacctacaaaccttgaaggccgatcaggtgtgcatacgacacctaggctctttttttgcgtactggcgccaaatgacttacgctaaattaacattgaagttacgctgatatgtgtttcaatatatgaaacaattgagttactagaaggtgaatctgatttacgataaggtttatgtaaatatgaaatgcaggtaaatattagaaggtaaacatttgagttacgctgatatgtagataacagatgcagttaagcataattacagtttatgaaacatttgtgttatgagaaggtttgcttc

SEQ ID NO: 62269 - DNA, 460 bp, Zea Mays
ccgccgccttctggtgtatcgcgagggaaggatagatggtggccgttgatttgatcaccggtggctgagattaggtctgggagggttggatctcggctgttgatccgttaaccgatggtgaagattagacgacagtaacgtttcggcctacgagagtcgtgagccattgatcgtgcatcggacgtccctgattagaagttaggataacgtttcacgcgcgggatcagatccgttagatttagatcgtacggtcgagggtgagcgtggaatagttgtgcgcctagatctaatctggcgcgtccgttttggattgaacggctgaaattagaggataccccttcagccctggagttttattaaagagcccctaaaattttagaatatcaacccgccatcctttggcgctgtgtcctgtgtctgcggattattcccccgaagcccctgtacttttcggtaattg

SEQ ID NO: 62270 - DNA, 453 bp, Zea Mays
agtgtgtatgttggttatgtatctctacaaattttcttcagcctagtatagaagtattcctatttttctctgtattaataaggtttgggtagtttcctaatttaaaccaaaactctagaaagtattataggaaccatggggttcactattttttcttgatagtttataatatgtaggtcctagcaaaatttgtttgaccaaatttggttgaatataactcaagttatgaattttcaagctccctgttcatttggaaaagaataaacataaaagtttaaaggaaaacgactttgcatcggggtccctggatgtattcttatccgagtagtttaaaccatgcccctaaagaaccattcatatgtatcactgacttaacacttaaccccctggccttttaccctctctaacccgcactcctccctcgcctgaacagtagccgaggaagaaaaagtg

SEQ ID NO: 62271 - DNA, 838 bp, Zea Mays
tatcaaaaatacacagcttcactcttctttcaggactttatcggcagcttcgttcaacagcttgtcgacagcttcgtcaatagcctcattagcaattttaattatatcaagcacctgcttcacagatggatcagtttcagggtcatatgcctctggagggggagacagctcagctgcattaaaacacaaacatctgtcaataccgaagctgcaaaaatttacgaagctgagttataaagggtatacctataagtctagcccgctcaaccgcttcctcgactcttttagcctcttctaaggcatcaagagactctttctcattctttttaatggcttcatcagtaatttctcggtcacccttcagccatacttcggaataaaacttcccacccaaggtagtagcttcagctgacgggtttctaacatcgtcagctgagaaggcaaaatctggctgagctacaaccttggtatgatcacaaccaaccttctccaaaatggacagccccacgggcaccggcaaaagcacagaagttccctctatcactaagaatttcctcgaaggctttatcctcgtcgccaatccattggataactccattggggtctccatggatgaatttttgctccgaggaaaaggcaccaactctggaaaagttgttctttagattcttagtacattccattgctacatcgaatcatttttccttagccgcacgaagctcgtcaacgtttctctatgcccttgatcgttcaatcttgcatatttcatgcttcgtcagctctacattaaaattttcagttgcttcgtcaactttcttttctagctcttgcacttcat

SEQ ID NO: 62272 - DNA, 397 bp, Zea Mays
actccactgctagcttcgggagaacgatcatcctcgatgttcatggatggaggggctctaaagagatccaactccccataaggtcctccaccagctactcctgttgcaccagctcccattgccgccacttccggtggcacgttcggatgcaactggtcatatatcacgtgcacttcctcatgcagagtattactatacgcttgcagattttccatggctacgcttagctcttccacccgggctcgggcagtcgcctcgcaatcccaggctatagatcgtgaatttatagcccagtcaatagccctatcccgctcacacaatctcccgctgcaaacggtcaacctctgctgacaactcagcgatgcggcgactatcacgcacgctccctgcttccatg

SEQ ID NO: 62273 - DNA, 660 bp, Zea Mays
gtgctttgaactacaactgtcttctaacagtgaattattccctaaggcttatttttgctggcatttaggtgcaatattatgactttgtaccaagttttagccaatgatacgtattggtcattgtattgtgatttcctaaagtttttgggcctagtggtgctttctactactactatacttgaaaaatgtcaaacaacagatttcctaatttttatatcttcttctttgagcaagagcaatcattttagaatttggcattttttctcaaagggaaggggtggtagcatttcttggaatatatgtcctttttcatggaataggaagtgaggtgtattacattatgtttttacctcaatttcatatttttctctggtggcttacatcataagtaattgggtaaaaattgtttttctcactgttgcacatttttagtctttcttttaatttatttgaagtatgggccaactcaagttataattgttcaactcacttactgtgatggtttggggtgtttatcatttttgtagtggtatactagtagttataggtctactgaatgtttcttgccattattgtgtttgaccttatatttttaatcatggcttttcttgatttcttaatgcctaataaaattataaactcagactagcactagactat

SEQ ID NO: 62274 - DNA, 730 bp, Zea Mays
gaagcccttctttgcagatattatgaggcatcttcaaaaagattttctaaaaagacttatctagaaactctcttcctttcttacctaagtattctgaagagtctatcttaaagaccaggtagtaagagtgcaacatatagaaggtgtgaatcaactaaggttgattctgtaattatacatgcatcatgctaagaaccatactaatcaaattttcccccttagaaaatgtcgtcgcgcacaaggagaacagcgcgcaaacatactgcaccgattggtgtgccgagtcaccagctggccccaaggcatgataatagtagtagcggaagcaatgatcctataggggatgtcgaagctgaagtaagtcggctccaagcggaactccgccgcaggacggctatctgggtcgtagatggcgaccgcataaatgagttgagaagagatgtccgccatctgcgagatcagctcgcgtaccgggatttggcacttgactgggtagttcaatcccgttcgcttgcatgggacaagaagcaaaaagctcaagctcgagtagccgagctcaacttggtcgttgatgaactgcagacatattgcaataccttacatgaagaggttcatgtattatattcgcaattgcatcccagtgagcctacgaatcctgctgagtcggaagctggaccctcgcatgttgcgggacacgcgcttggtggtgagttagacctttttcagcccc

SEQ ID NO: 62275 - DNA, 340 bp, Zea Mays
cttgtgaatctgcttcggcacaagagtaagagcttcggaaaagacaaaaaagccaacaccaaaaatttcaagtaagtcataatcaaatggccagagttcgctctactgcaagggtcgatcgtgagggagatgagaccgaagttgttgagactgttcctatttcgaaagcaatgaagcgatctgggttggtaacaccgaaagacgtccctgctgctgaagcagagcaagctggtattgaagagaccgattctgaagatgattacagcagcgcagtgccgagcaagcctagccacctagacttcggaaagtccaccatctccgaagctgattttcctaagat

SEQ ID NO: 62276 - DNA, 487 bp, Zea Mays
ggcgggttggtttactaattttaggagggctcttatgcaaagtcgccaagccaaaagggtatcagacaatggacactgttggatgcaggatcaacggcgcagattacacgggcttcataatgaaccgatacacgatatggaccaccagatccaaaatcagtggccacgattcaaaacctcccagatctaatcctacgcattcaccagacatcctacggtctggatcgactcacgcgaaggggtatgcctcgcttaatcctggccgttaaacagaagatcgacgatcaggggcatcccttcactctctcctctctcccctgttcactccggctggtggtgagcctacttgcggcagcgccattattggcggacattggccccgcattctattataccgcagctaacgcgacttcgttcaaatcaaagtggaggaggaggcgaacgcgtcagtggattccttaccggtagataagtgggcagatgtgtt

SEQ ID NO: 62277 - DNA, 732 bp, Zea Mays
gttttttcgctgaaggctcaaaaatggtatgtacacaaatttcatgcatcacaaacaaatatattacattaatatacatataaatatttgatgtttgacccatatacaaatattacatttcctagtatacaagaacttagtcttccttcagtatcctctcggtggcttcatgtaaaagtttgtcaacgacttcgtcaacaacttcgttagcaatcttcattacatctaaagtctctttcattattggatccgcctaaggattgtatggctccggtggtggcgaaaggccagctgtagtaaaaagcataatgatgaattttcgaaaatataaacaaacaacgagacaaaaagtttttaaaggatacctataatcaatgcgcattcagtagcttctttagcctcctttgcctccacttgtgcatcgtgagattctttctcactatgctttatagcttcatcggccatctcacggccacccttcatccagatattggaatagaacttctcgcccatcaaagtagcctcggttgaaggttccttcgtatcgtttatggcgagggtggcttctgcctaggctgtagccttaacatgttcacatctagttttctccaaaactgctgcaacccctcgaacaccagcgaaggcacaaaaatctccacggccactgagtatttcttcaaaagcttcgacctcttcgccgatccattgaataactccttcgggatcgcctcg

SEQ ID NO: 62278 - DNA, 1398 bp, Zea Mays
gcaaaagcagcaactccattattttggtgtgactactcatgtaaaaatggaagcttccagatgctcactggttcctaatagaatcatatcacaaaattaatgagacaaaataaccagacctgtgatgggctaatcatatcgcagctatttgctactctcagtgactgaagtatccgaagagcctgtgtgtcaaagcatgacaaattgatctctccattactgctgtttttggcaattcttaaagcaacatcaacaaggacaagttcttcaggaatatatgatggagacagcttttgttggagttgcttagcagcagttatttgcccaaattccagtaaagagagcacagccttctccatatctacaggcctaacattttgttcccaaccagataaagatgcttccatctttacaaattcctcttcagagagcaaatttctagcttgttcaccaatctttgaactatgtaaagtgttagaattgttatccagctcattagctctactttcaatattgtcattgacacctcgtttaagtggtgaatttgttttcatccttcgctttgctcgcgtgttatttattgttgttgaagatgcttcactgttagactcaaagagttgcacatgttggtatgataaactgtcccgtgtgctattcctttctgtaattttcatgtgcggcaagctcatgttactgtctatttttgtgatgatatcagcagtatgttctataatactgctactgtttccaacagctttgttatgagcaacagcagaagtggcaaattcaccatcaaccttggattgactctctgactcaacagccaggagccacaccctagtctcaatttcccgcaaaagatgaagaggatagaccctgcaaaacggaagtgctaatcggcaaggagaagataagattgagcacaatgtgaacataaataaaaagattaagcttacggagaggatttagtcatagttccacttagccattgtaaagagagcaataatatttcatgaagctcttgtgctggtatctcttttcctactgcttcggcatgcttaaggaaaaataatccagcctgcatgtacagaaaatgaatataaaacttagtgatctccatttcataatacaaggcgtttaggatttgagacagtttttttactaggcatactacattcttcaagcatgcatctatgagtgttcctaatgtgctcttattaattggttagctttcaatagaactgaaaaggtgcctccaataaagtggtcaaacatagaatgtaagaaagatgttctcaacaaatgcagcagctagatggcattgatcatttcatggttgtttcttaggtagaaagcggaactctattctcgtcttttctcactgctacctactgagtc

SEQ ID NO: 62279 - DNA, 648 bp, Zea Mays
ctaaattggagggaaataaaataatgggagggaaacagaaaataataccttaattatttaattaattcaatatggttttcaaatattttgctaaaagctgattgtgtaattcaaaatacttgtattgttaaattttaaccataatacagggaagatttgttacacaattataatattaatgtacatttcaattgatacagtcgcgcaataaattgatgaaacacttgaagcagatcaagcagggcctttcctggcttttcaggggcccagtgcgaaattcgatatagaagcctcatccaacaacttttttcgatatatagaatcaccaagccatttaacctctcttgagttattgttgaccataaatagttcataaaaaatttaattttaaaaagcttctctctaccgaagcaaccatcacatgtatagtttataatactctctctatatcaaaataaaatttgttttgcttcttagtggatttatcattgctgtcacaacccaaccaagttattgggcccacgtacaccaatccttgccctcaaggcctcggatagatatgtaagtggatcggataacttactcaaggtgccgagtttcgatgaactcgttcatttccaaggaccattcacgcaaagttgcaaatat

SEQ ID NO: 62280 - DNA, 554 bp, Zea Mays
gttaggctacaactttgatgcagagagttgatcaggtcgctacataaaatctggagcaaatcgaccctaaacatgctttgtcagaccaactaaagaagttgtgcgatggtacagtaaccagattagatcgccagctcagtaaactcactgccggtgacccccgcgcgtggattcacgccgctgtagtgattcgtgctcggtgcagttggataacgcagagggagtaagaaatatcgccagtggatgaactccggccactgttcactctagccgccgtgtctgcttagctcacggccacttcgaatctcccctcaccggagttagacacctcacagccttgcgccatgtgcctcggcactttaaccacaccgccgtgactcatgttagcccatccaatgatcgccggtgaggttgccatggtaatggccaccaatcacgtgcgccagtgcacccccctcctctccaaccgccaccgcgcgagttcaaattcaccgaccaccactcaagagccctataaattgagcacaccctcggctctgttaggtattccagca

SEQ ID NO: 62281 - DNA, 495 bp, Zea Mays
ggctcctaaccaacaagtgaatttgtgttgcgtgccttggtccagatggctgatgcaagaagacataagatttatcctagttcgggcaagagaaggccctactttcagtgagggggatgagacttatattatcttgcacctaggtgctcatggtaggggtacaagctggtcgagagagggagtgagtcccaagtctctgagagtgattgaggcatgtgccaatatcgggagtgaagaataagtggtgaagtgttgtgtcccccccgcttcagagaccctagactccttttataatcgtaaggaggaagcttaggagtacaagggttgtcctgttgttgttgtgattagaggagatgagtccgagctcatgtagcaatatggtcagtgagatggcccttgtccttagcgtcacctttggtcaggagaaggatgtttgatccctgtaacctacactttgaccaggtagagggtcgaggtcgggctagggggctcgga

SEQ ID NO: 62282 - DNA, 470 bp, Zea Mays
ctccggaatcaaaaagcactgaagctaatactgagtcgaccaagaactcaccaaaaatcactcctggttcatcttcagctacttcttctgcctggacatggttcaccttggctcttccaaatgtctgttggctccttgccggtgcaacacggttggctccagttggctgttttggtccattcaccgagttggaaaagaccgatggtgttggctggttcttgtatgggcagttggcaatgaagtggcctgtctcacgacagtggaagcatgctcttgggttactcacttggcttcttccagcagactgttgagtttgaaaggtgttctgagtctttgcagttggggttgactgagcttgcttctggaatgaaccaagatgagttttgaaatatgacacactctggctccgttggactgagtgagtaggaaattgagtcctctggaacttttctgactattgaggcttcctg

SEQ ID NO: 62283 - DNA, 673 bp, Zea Mays
gcaaggagtctacagtagctgatacaccgatgggcgatggcaagcaaaatgctgactcgtcgtctccctcacaagtcacaagtacgctcgcacaaacggagggccccggccggctgctagtggatacaccaatgcaatgcaacaacggcaagcaaggcgtggtcgttgtctgtgtgtgccttttggcagtacgtgatcgtgaattcgcaacactcgagtgtgcaatgtaggccactgggacccgtttgtttattcattcatcctaatcgaaaacgcgcgcgagagagatctagagaggagcgacgtctccctctgagcgtccttgggcaacagggaggcttcgagtcctttgctgctgccgcgccactgcatgcaccaccgagtgccctcaattcagtcgtcctaatcacaaatctgacattttagtcgaagctgcaattcgacagatgtggggtttagatctggccacgcatgaagcctacggcctacccatccagcagcgagcagtcactgcagattgaaggatagtattagagcaagaacacagtagtgcacccttacctgatacgactcttgatacatcggttcacttcgaatttacggatatctatggcgcaaattatttcacatgggattatagcctcatctgtctgctctatttggtcagaaaatt

SEQ ID NO: 62284 - DNA, 900 bp, Zea Mays
accagatctatcagcacctgcgtcgtctattgcctaagctctctatccaccgggccccacacgtcatccaccagttgtgaccgggtctctgtgtccgcattgccggtgttgcgggcgtcgtaaccgccattccgtagctctagctggcataaccgccgggtgagatcccctcatcgttggcttcgcccgcaggataagtggacgaccctctcttctcttctccccatttcaccattagctccgtgaggatggattgagagaagcagagtgtcgatgccactgtcgctgcgctcaggtctcgccgtgattgcgacctcgaatccagccaacgacgtccgccgcagcatgcagatcaagattatatcggtgttgggcgcggggtagtacccatcaagtgccaattcctcaccggcgtcgaagcaaatccctcgaccgcacgtggcccgacttcccctccacctgggattcctggtatgggcctctactcgattcgtcgtgtacctaggaatcaaatggcgcttctcgccctcgtgcactgtaccgacatagctgcgaccaccgagctgattggcgtcgtgaactaggcgtcatccgccattgggggttgagtcccctgcattaaaccctgcagtagaagtctagctgtgggagttcaccatacttccctcgccatgaattgcctcgcggggtggagaaatagggacccggggtgccggacgtgatctccggccatggccccaccgttcgctagtgtgcgccgccgcctgggttcggttggctatgaggatttggggtgggttttgcgctggaccatgatctggattcgggtggccacgattagatctcaggttaccccttcgtcattttaaatcgggatcattgattagtgatcatgcggtc

SEQ ID NO: 62285 - DNA, 357 bp, Zea Mays
atataccttcagatacagagaccggtttgacgaacgaaatgacgactggctgaaatgcattgaggctactagcgacgagttacttggggcatataccagagccaaagatgatgctttgtcctcagcattcgggggttgaggcatgaaaaggttgaacagggttttcgatgcaattggttttatatatcctaattattgctatccctcgtgaaagcagggaaaagaggaaaactgtcactttggccatctctgttgtgctgaaggacaagaaaatcaaggttttgacccaccggccaagatatattgaaacgaccatagtgccaaaatttggtgaagagacatcttccgctgccgaag

SEQ ID NO: 62286 - DNA, 303 bp, Zea Mays
gtgattcacagccatcgacggccctcagggcaagatcgaggcttcacgtgatcaagcgaaggtgtttcatagtggaggaagtgcgtgggagttctctgcggcgctgcaatttctcgttgtcgacctacgctccgccgcagatccgccttcgccgtggccggatgctctccgcgccgagacgaccggtaagacctactctagcgtgctcgccatcaattctgtatcgcgtagaaactctcggactttgaggtagtgacctagggcgccaaattgttgatcaccagcgatgttccgccgctggcc

SEQ ID NO: 62287 - DNA, 493 bp, Zea Mays
tgggtgcacaatgtagcaaagttagagttggtctattaggctacaactttgctgcagagcattggtctagttgccatataaaatcgggaggaaattcgccccaaacatggtctgtcagactgactaaagaagaatctgatggtacagtgaccagaagaatctattggttcagtgaaccggccgccggcgaccccgcgcgtggattcatgccggtgaggtgattcatgctcaccggcgcccggatgacgttccgcggtgaaaagatcttctcctccggatgagcttaaggcactgtttgtccggccgccgtgtccgctctaccccgatcaccttgaatcgaccctcgctggagttagacacctcacagttttgtgccacgtgcctcagcactttaaccacaccgccgtgactcgtactgaactatccagagatcgctggtgaggttgccacggttgcagccactaatctcgtgcgccagtgactcctttcttct

SEQ ID NO: 62288 - DNA, 590 bp, Zea Mays
cttttagataggatagaaccaacttatatgagagtgctttctactcttcacataagacaaataaaatatggaggctatcacacgcgcccgctcgcgtttcatgtttttcacgttacttatcgtgtgtctagtgacttgcgacgatacacgatcatgtcgtgacatgttctaaacgacaatttattttttcgtcttttgtttatttagttatcaaatatcacacctacactgccacatcaaacgggagtagtggacacacacgttagcgagatctccgggcagttgcacgtagagagatttcagaggacgatttctagaatttagcacatcaaatcaagcaggttgcggcaactcctctataaagggaaaacagccttcagtcgaaggacacacatgaatagtaaccgacatgtcctcttcttatatctctacgtcgtcgctaatctgctctgccggctgccgtaccttcgtctgccgtgccgcagatcaagggagagcggtccaaaccaacatcgacgttttgatgacctgtacgggtgcccacgaatgaggtttttgggaagtgattcacgtacgtccgctcggcttcc

SEQ ID NO: 62289 - DNA, 1293 bp, Zea Mays
gtttcaaatacaacttgctgcgatctggaccctttgtaacatatttgaaaaggtacttaatgaatatgcttttgttacaccattctacattgatgtgggcctgatattttttgagtaatgtcatgttgtagggaacaacccatctattgtctagcttaatgttagatttcatgacgaatctatcattctttgatcgtttgtaaactgcaaatccattcatatcaactacagtttcaatgttaaagagcttaggatagtgcttggagcattgatttcttttcatgcaaggcgaattttgattgtgatatccacatggtccatggaccatatgttctgcaagtaaggcatatcctaatggatcagtagctggatctggtatctcagcagttatgtaagagtctataaggttagcacttggctgtgaggtatcagttgacacccagaaaatgatatgtgcatgaggtaatccacgtttctggaattctactgtatataggactgcatcgcgtaaaaaaagagatgaaagtattagaaaaacgcatgaggtattctacatttctggaattgtactgtatatagaactgcatcgcgtaaaaaaatagataaaatgattagaaaaacctatagtagttaagttctgacatttgttgtagtaatggtattaacagactcatcactattatgtatggattcgtgttactgataggtctactaagaaaagaacaaaccaaacaaagaagggattcctaatttttttgtttattaagttaaagtgtgtatagtgcaactcatgttgacaaccatgaaaaatattattcacgcaaatggcaaatggagcaaagagacaaggagcactaaacttttggtaaataagtttgattatgtataatatagcaagggtattagtagacatggcaatattgtttatgggattgcattgtacggaaggttgcatacggggaaagcacgaaaatagtaggaaaactcttggtaagtaattttgcgtttgtaataggtcaatgttattaacggtcttgtcaacatttctgtgcatttgtattaaatgtttggacaatcaaggttttaatatgtattatgtaaatgttttcggtcagagggttgtattctaaaaaaaggactggacaaggtgatataggtttagtggatcatggataaataagtaaatctaaccttcgtactgaagctaagaaggttatattagacgaggtgatctaaacttagtgtataaacgatgaataagtaaatttagcctttatactcaaattgtgggtt

SEQ ID NO: 62290 - DNA, 816 bp, Zea Mays
cccctttggtgtaagtggattgagggagtggtcaacccaggtatcctaggggttaaagtgaatgaggaaattggccatcacttctagactagatacagactcggacggggggtctcatttttatagttttgtttagcctagttgatgatatgttggcccttctagtttctagagctaagatcaacgaccaattcaagggtctagtgcctaatctagtgggtggtctttccatcttccacgatgaaaactatactacagttttcatggaagactgccttgagggtgctaacaacttaaagatattattaggtgctttcaaaaagttgttaggactaaaagttgttttcataaaactgaaataatttgtttgagtttggcaagattagaggaagagcaagtataataaaaggctataagttggctaaatgtcgaggtggaggggagagagaagaatcaaattgtaaacttatagtcggcttagacccaaaaaccaagaagctttgtgagagagataagtggggtcctgtattaatagtgaagagctaactattatatggatagactaaatggtaggatgtagagatccttacagccagcagttagttgtattattaaactttaatgagtttgtagaaatgtactctttatttctggtatatcttggaattccattgcggtaccaaaatttgtcaaacaaggattggagtgtttgaggaaaggatccaaaagaagcttagtagctggaagggcaagtttttatcccacggagaaagactagtgttggtaaactcagttctgtctagcttaccaatgtat

SEQ ID NO: 62291 - DNA, 410 bp, Zea Mays
tgcaatttcaattttcatcttcgtccaccagtagtgctgctttagatcatgatacatcttagtgcttcccggatgaatagaatagcgactaagatgcgcttcatctaagatttgctggcggagctcttcattctttggcaccactatgcggttattgaaccataccacaccttgatcatcttctttgaaacatttggttgttccagccattatcttctcacgtatgtgcttcataccctcatcatctttttgtacgtcaattattctttgtaagatgactgactccagcttgaaatgatttgaagtccaatgttgaataattcccaggttcaaattctccatctcctggcataatgtgatgtcaggagtccttactgttaaacaatggcaggaagccttgcgactgagcg

SEQ ID NO: 62292 - DNA, 637 bp, Zea Mays
ggtagggaaataccaagggcgcgatctgatcctggccgtacaagtcggatccaatggccccgagcctatcgactaccacccagcagcagcggcagcggtcctgctttcgcgaattacggcggcgtcaaacaatccgcccggcggcggcgccggtggccagtgcgcccgacgcccaaacctcgattccgaaaagctatacgcagggaaggacgtgacagacaacatggaagggtttctcacctgcaagagattgcggaggagcctgcccacgggcgaggggaattcacggtggagtccaagattcagcgagcaattggtgcggccacaatggtcgatccaccccgccacggccacaggagccatcctagacacactgtggagttcccaggtctaacttcgaagccatcacggtgacaaggacgtaggtcgacggcgcagagcggcccgcgcccattcaactcccactctgattggtgaacatgaggtgatctgctcatggcggctcggattctcgataggatagccaggaggggcgcagatcagcaatggtgtctcggcactagcttaaggcttcggtttccaagcaacaggtatggcactcaagtggtccgggcaaaaaggaagggtctcagattgc

SEQ ID NO: 62293 - DNA, 604 bp, Zea Mays
ccttctgtcatccatgacggaagaagttttgcgggatgttgccaccgccgtcacggcaaaagaagcttgggactccctgcaataaaagttagcgtcctcttcacgggcgcgcacggttcagatccgtgctgaactcgctacatgcaagaagcgagatatgacggcggcaaatttcttcaacaaggttcgtggtcttgcccatgaactcgcagctgctgacgcccctcttcgcgacgaggagattctcgcctatctgtttgcaggacttccggttgaatatgatccctttgttactacgatgaccaccctgccatctgctccaactctcgatgatgtttttgctcatctactggcttttgaagcccgtcaacttcgtcaccacgccgagcagcagctgaacctcggtgcctcggcaaattttgctgggcgtcgtggctcgttccgtggtcgtggtcgttctgaccgtggccgtggtacaccatacaggggccggggccgtggtccaccttcccgtggagggggtcgtggctctggttcatcttcccgcccaacttgtcagatttgtgaaaaagaagggcacactgctcgtcgctgctggtaccgg

SEQ ID NO: 62294 - DNA, 616 bp, Zea Mays
gtgtgattgaggtcgatgccaatatcagaagtggagtgagcggtgaagtgatgtgttcctcctcccctgctctgaaggccccgggctcctcattttataatcatcataaggagaaaacccaagcgtacaagtgttgctaccggaggtgcgcccaagccctgtagcagcatggttggaggaatgtccttcgaaaagggtgtgtttgagccatcctgtctcatcggtgttggcgggagagcaggagacatcgcacttttctccgttggtgcagttgggcgaggccgagctccggcaagatggaggtttctctcgaggccgggtcagaacgctggtatgcagtcacgattagagtggttggaacatcagtaggagtggggaaatagtgcttgatattcgcgccttgaccgtcattgtgggtagtaaaagaatagaatagaccggggtcttgtcaccctttattgactttggtgcgctcgacggggtaggtggtcggctgtataactgtattaaatgtgcatgtcctagggtcggagaaatcggctgaagttgctctcgtactgagacctggcccgagatatcctcgggcgaggcggacatgcgtttcctggccgagggt

SEQ ID NO: 62295 - DNA, 473 bp, Zea Mays
cccctagccactattcatcgtctctctgacaaatgcacagaggtcccccgacttttgtttcttctccaaactaacccaaggccacgacgcgctcgtcgtcgaccaccttgttgctcggactggccatgaccaacgttggctgcccaaattaactaatgggcaagtattactgacccgaggcgaacctagaacaagctttaattgagttaatccggccctggattcacctacccacgatgacaacgatcactgaggtcaaactgaggcattcccgacgagtaagcgccgtctagctcatttagttgagccgacaagcatcacaagcatgcgagggtgctaaaacacgaataaggagggtgagtgcggacctgagagcggctaccccgacggggtgattcacggcgatgcagatgaccaatttggggaaaaacccaaattctacggctatggtggctaatcggagctgagagtta

SEQ ID NO: 62296 - DNA, 508 bp, Zea Mays
accattgccggtggtggtgcatagcaccacacttcccacaccaaatccaacatcaggtaaagcactgctctgctacattggtagttgtgtgtgttcagtatataatgatagctgtatgtacatgtatataatggtagaaacatctattgaattgttgtcaggatctaagcgatcaaggtcagaaaatatgtgccaaaaccttagtggtttgtgtctacatcaaaatgatggcagtggtagaggttctggtgcagcagcaacaaatgatggctgtggtagtggttgtggtgcagctgatgtaggtagggatactttgccaagtggaggtggcagaggtagtgctgctgctgcagcggatggaggcagcaatagtgaacaagccatcaatattgaggatgatgtccctactggaaaaaggcagaagaaatgcacatctgatgtatggcagtactttaccaagaagaagttggtcattgaggataatgggaagacatatgttcagttgtgg

SEQ ID NO: 62297 - DNA, 454 bp, Zea Mays
gaaccatatgctaccagaacaagaaagatgagagcggttggtggccaaggctcttgaaaaaggacctgtgttcttgaaggttgactggacaaatggtaggatgaggatggtgaagatgttggatgttagtatttcacttttggttgattatgttttttcttatgcgcctgacaaatctagatatgcaaccagacatgctttattcttgttcctgttttgttttccttatgtattaattccttaacttgtaatgcacatgatgttttccttatgtattaattccttaacttgtaatgcacatgatgttttccttatgtattaatttcttaacttttaaagcacatgatgaaggctggttgtcaggtaaattctcttaaactttggtaagcttacgtacttttgctatggatattttgaatcaattacaaggtaattcatttaaaaatcgtagtaa

SEQ ID NO: 62298 - DNA, 503 bp, Zea Mays
gaggatttgagttgcactaaagtcattttagactgctttggtgaagcttcgaggctgaaagtcaatattcaaaagagtttggctattcctataagatgtaatgatgcaggaatgtaggtcatatctaattctattcactacaccattgggtccttcccttgcaaatatctagggctccccatctccaaccggaagcttagaagaccagatcttcttaactaggtggagaagattgccgataggcttcctagttggaaggttaatctccttaatccgactagaagaacaactcttgttaatttagttttatttgttgttccagtttatctgctaattgccctaaatgttcccagttgggtcctcaaagctatatataagattagaagggcttttctttggaaaggtcggaaggaggtcaatggaggtagttgattgttggcatgggatatagtgacacgacccagtgcctaggtggtcttggagtgccaaacctttggttcatg

SEQ ID NO: 62299 - DNA, 443 bp, Zea Mays
cgatgtggaagtggaagcgcaactattggaggaaggtggagacgggagggacacctattttaaaggcccggaaagagcctagtaatggctggctgggtagataatgttaatggcgtttgtgcattattgctttggacagggtccggtccaactccagctccgacggacaaggcgtggggcgcttggatgatgtccaaatgtcctcgtttgcattgcagctgcttcgtttctgcagtttgaacttgcacccaccatagtttcaggctttcagcgacggttaccgtctcgttccagtttctcggggaaaactggtagacatgttttctcatttggactttcagctacatacgtgcgcccagcctgtaggcaagaaccagggaactttgtcgcatgacagacatgtttcggactttcggtttgccggtttttttgtaatttggact

SEQ ID NO: 62300 - DNA, 786 bp, Zea Mays
atttcttagcagggcgggaggagaagctagcagagcttcaccgacagatcgagatggtgagccggagcatagcactcgtggggtgacctgaacgctgcgtctgctggacatcttgagccgcgtctggaacgtcgtggttcgtgccatccatcggggtgccgctatcgcctttgttgtcgcccaacttcgcactagggctgatcttcgcataccgatggagcttcctcaaggtgcttcatcgatggccttcgagaatctaattcagggatatgacgaggtcgctggcgggatcacatgcatcatgtcctcagaggacttgctacattggtgaaggatcggtgaggtgaccaaagggggtgaatggaagccaccaagattctatttcgagaacaccaccatgacttgattcccaaatctcacatgaaccccaaaagacgaatgaacctacataacatagtagtatttagtccagcgttgactgaatacaccaaactgctacataggaaactacccaactatctgcaaaaaatcatagtgaaaatcgtagaacagagggagcggcagtgccagacttcagagcgatagtggcgggcagcggcagtgccgagcactagagtggtagtgtcgggcaatgaaaaatgccagatttgcctcaaactttgtaggtagtttgcgtagagggaaatcggtctattcgtgaaatatgggcaagagcaactcaaaaatccgtgcgtagatgcaaaaccctgagagtgatgggattttgttaggctttctcaattgaac

SEQ ID NO: 62301 - DNA, 747 bp, Zea Mays
ctaaaatcaaaaaccctaagtgcacacttaaagtgcataggggtactgaagataaagtgaccaagaaaaactaaccaaacctcctaatcacaggtgagcccttaacaaaagtggtagctaactaaatggctaacaaaaattactaaggggcatacaccaaaaaggagtggtaagggtccaaacaatgccacacatgtgggagaagagagataaaatcaggattttatacctccaaaataagccctattccaaagacgtcacgtgttcactagcttgcaaacctcaaacataaaaactccaattacaaaatatgtgcctaattaccctaggagcaccctggttaagtttgagaatgagacgccatcgtttgacatgctaagacacgattttccctcgggctggagcagatggacaaacacactttggcactcaaataacttcaaatcctgaccacatctgcacttgggacttgcacggggttgatagaacgtaacacggtgaagagaccttacacaaggatttggccaagataagcatatttgggtcgactaatgaacgtttgagcacgggtagaagtaaacgcccacgtgttcgatgcccaccacaagctagagcgtggactggccagcgcccctgcgcgccgcgcgctggcgacctgaccaagtactcattcaccctgcctcagtgaagctcacacatccattcctgagctcgctactgcaccacaatcgtgtgccactgctcgct

SEQ ID NO: 62302 - DNA, 709 bp, Zea Mays
acttagttcatataaccataagttcatactccataacagaaatagcaagagtgcaagacagacatgctacccactgccctgatgcccataagttcatacaattatacttagttcatagatcaccatactttaaagacacatgatagcagcagtgccagcacccaacaacttagttcatagatcaccatactttaaaaagagctacttacaatggttgcctcgttaaaaacctttaggtaaaaccccatttcaactacatgaggactaaaccctaaaggaaaaaaaagaatacaacctagctcttttagtggtctaacggttcactaatttatgttcattaccacaactaccacaaacagaactgtcctcttgtgcatcaaggtacatgtttgccattaggtcttcaagttctttgttcttcacactgtgttgctatcgaactgcagcttgctcccaatctttggcgagggacaacatctccacatgttttggtgttagacatcatcatcattgctcgatcaacctgccacataaactaaaagcggactcagaagaaatagtggatacaggcacaataaatacatctttagctataattaacaaaactagataggttctttatgatgatgccaccgactaagtacactaaatgattcatcaaacccagtaagaggatgtctgtccaaataagatgacaacttagaaatta

SEQ ID NO: 62303 - DNA, 381 bp, Zea Mays
gttatcccgtgattgtttagtgctcatgtgattgttctgcagtggtctgacggagcctgcatgggtccatgagtccatcccgtcctcacgtgtaaatgtctcagagctccccggcctcaaccctgagtctgagtgcatcgatcatattggctgcacctgtacctgcagacgcagcattctgaacgatggtaacaggcatgtgccattagctggaggggaacagtgcaaccaacgatagtgtgatgtggcgccgagtcgctgtaaattggtagtgtccgtcctgttgatgttcacaagcacacagaagttatagctggcagaaggcggttggcatgtcaggatccgtagctgatcaggatattattagccctatcttgcttt

SEQ ID NO: 62304 - DNA, 428 bp, Zea Mays
tgtagccgcttagcatggttccgtaccctaagcctacacgctccaccactctgcaacgggcaccctagtatttggaactgcgatccagtgggtccggacatacggcttggcttcccaggcccaatcctgcaggtcctgttgcatgaatcaaaggatggcagataccagatgatgggtcctatgggtgtgctcctaacacttcaaagccgaagctgtgtgcaggtccaggtcctagtccactagtaggtagtctcaaactgtagagaatacctcctaggggccagaccaccaattttatctttggtatactggtatccagcctcgacacgtcgagcctacctcccaggggggccaagtaccaaggggaagttgatgacgctacacacagcaaggacaaataacatacatataagttccagtttcaactc

SEQ ID NO: 62305 - DNA, 624 bp, Zea Mays
ctccgcgacgtcgaacacgacgttctccgtgtggaagttttcctcggtcccgaatgtaacggggagtgtgatgctcccaaggtgatacaccggttgtgggcccacttcggagaatgggtgagagggtcctagccgggaccctgggatctgcagctgcttgaatgcagcatgactgatgacgttgaggctggcccctccgtcaatcagaacatggtgtagctgcatgttggcgatgacaggagcggtgatgagcggtagtacatcggctcctgctatgttttcgaggcagtcggataccccgaaggagatagtggtgctcctccaccgctgatgtggagcagccttcgggacccccgagaccgtcgaaaggacctctcggcgcagggacttgacgttcctgcgggaggtgagctcccagctcccgtcgtacatcacgtacagcttcttgcggtggtcatcgttgtcaccagagtcggagtctccagtgaagacgtccttaaggtccccctcgaatgactgatacccgagttctcgttcccccgcggccacctcgccgtcgtcgaccctctccttgtcaggccagcgacgaggtggggaaccatcattggaggactgctcgcgtcg

SEQ ID NO: 62306 - DNA, 281 bp, Zea Mays
ttcaaaggaaatcttaatcctgctttaaagaagcttttgaacactaccacctcatccttttccggcttcggagtaatttcctctccgccaaaacgaatcagctccttttttgcttcactgaaatagcccaacttcatcagcttagacatatcaccttcggtaatggtggatttcccaaactccaggtggctgggtttagatggcacgacgctgtaatcatcttcagattcaatttcctcagcatcaacctgctcagcttcagcggcaggtgcatcctccga

SEQ ID NO: 62307 - DNA, 291 bp, Zea Mays
ctttatatcaagataattatgttttagctacaaccactgtctattagaatttagcaaaacaattacacaagatattctccatcgttatctactgcataatacaatataacttgttataaaaaatatttgcagttaacaaccatattgtttagctaccctgcaaatggttagttgcgaaactgcttagctaccttgcaaaaacagatcaaccagtacagaaatagatctgaatatggagagccaaatagcaggaaaggaagagagataaggagtgcacatgcttggtgggtg

SEQ ID NO: 62308 - DNA, 814 bp, Zea Mays
cccgaatgctattgtcatgctcagcgtttacatctaggctctatgaagccaaggaaagagcactaacgccgaagggttctgccgagttcatgagcttcattaccaaacaaaggcaagggctaatggtctacataaaaatttcgggtgctacaactttgcataccgaaaggatacgaaggccctggtgataggccaccgaaccaagtggcccactggttggacgagtgaatggttttatgataaggcagacaagaagaaaagggaaaagcttatgagcatggtgatgagtccactgtgattaaacttcggcatgactcggcccctgtgcaacatgcagctggggtctccttgcctgctagctaaagtggaatttagggtcgtggttgagcatatcatcacgagagatttggtacaagaatactaggcaaaccgaacatttccaacttctaacgactggggaatgccgaagaagagagaagaggggaagaaatatgatcttgtctgtctaccgtatcgtttcaagtttcagaaaagatttaaagaaccatgtacttaatggttggaattgatagataccatatgcaatgaaattcttgttaactatacaaagaaagaagatcagttaatgactgctgccttcggcacccgcccaaagcaaaggctgtaccgtgtgatggatgctctaaactttgagtatcctaattacgaaaggcttgttgaaggggctggaggaatcaagaagaaaaggattttcagtattctaagtagggaggctatccggtcagttaaaaaagaccaagaggctttgaagaag

SEQ ID NO: 62309 - DNA, 510 bp, Zea Mays
tctcaactgaacaaaattttattcgtggttatcccgaaggtgtagtcaaatggatcgaaggtgaagttgaagcttttgatgaattccttattggtagtggacatttctgtgcctgtgtggtgcccgaggggttgcgtcattgcttgaaaaatctggctgcgggcatgtgaaggttgtaatccatccagaatttacaatttcgataaatgacatcaaagagccttcagctgaagcaactaccctaggtgggagattttactccgaaatctaggtgaacggtgggaggaagatagcgaacgaagctatcaaacggagtgaggaagagacccatcatgcttcagaagaagcgaagagagctgtagagcgagaaaggcatataggtatatgtttctgttaagctctggcttcgtaaatgttttagcttcgtatttaacaaaattacatttttatgtagcggaactttctccccgaaaccatatgatcctgacgttgatccagcattgcggggaa

SEQ ID NO: 62310 - DNA, 1083 bp, Zea Mays
agacgtgtccgaagaagcaccaaataaaccactagataagagagctattgtaccaaaaagactacttgtcggtgttctaaaaccatgagctattgatctgcgtgctttgtgtgtccactgcagatggtgtgtaaggatgacataaggattttatattggttcgagaagaatgtccctacattcagtgggttacttgtgtaccctgcattaagtctgtacgggggtggattacaaacagatcgagagaggggtgggagcccaagtctctggtggaagagaagcgaggcatcgacgaatgccctgtgtattgcaagtgtgttcactactcatgctagctagttgtccatgtcctttggtcgccaccttccccttcctattgtagaccaaggaaggggatggtctgggtacacaaacacatcatcttgaccagttggatgaggcttttattttttcgctttgtcctttcatcccattaaatgcccatcatctggtggttggcatcgttgctccttaccgtgttgccttcccgtcccgaggcgtgtgtgtcttatcttatcctggtacatacacatggttgtccttcgggtcatggcttggttctttggtcaactttcatactgacaacgcacgcgagtgccctctccagagtcatcattcaggttgtccgatcataagatatgtgtgtctagttttcaactcccatcctgtcaatcaagcattggtctggtactttcgtatcgtcttcgagatgggcttcgatactacttccaagagtatgcgactctcgaggggtcaggcgcaacctccgacctccaagtcatacgagacagtcttcctaagagtttggcattgtgtctcaacctataggtcgggcgagtcggatcctatgaggacaattttgcatccgactctttaggcgatcaagggtcggatgagtcggtgacctacattgggggtcggtcgaagcaagaccgttcctgagggacggaaaaccaactcaggggttgtacctaggttatttatcccgatagtagccatcgagtctctggtggagcttcttgctcctttagaggttatgctttc

SEQ ID NO: 62311 - DNA, 314 bp, Zea Mays
aggaaagttagtgagtatatagttagcatatacttgtagcatattgtttagcatatactggtcagcatattgtttattatgtagctatcgtgcagtttcctgtgttggcaaccatcgtgttgtcgtttatttgcaggttttagaaacatcactttataggagaggtgctgccaaattttttattgacaataatattttttgtacactggtgtcattccgacttgtccttctccaccgttagttggactcgtacgcgatctcaggtatacattgttttcgtacattattcatagattatgtaatttcgtttgatg

SEQ ID NO: 62312 - DNA, 435 bp, Zea Mays
cagtgatagacattgcaagttgatgcaacatagtgttattgttgtgttgatcaccatgaagaagaggaggaagcgagcaatcatgtcgctaacactccctagaaatgtgattgttgtacttttacccgagcacataaacatttggatggcactcattttagaggcctgctctcttagaacccatacacacaagtgctgaaatagagtgcttggctaacagctgagaagcaaacgaagagcagattacatgatgaagtttataaaggcgagtcaggagacctaagcagtagcgggagaccagaggatgggagagttgaaagggcacaagactctacattctaaatctcctgaatcacattctaaaacttatgcacactctcacgcttctgactgtctaacttcttacgttctaaaactaaattacattaaaagtcc

SEQ ID NO: 62313 - DNA, 307 bp, Zea Mays
gttttgcaacacgtatttgatcacatcggtttgaccagaaacagtgcaacgactagacagcaaataacatctacacttggtgcatgcataaaacaagcataagcataacttctcgatgaaagtgtacctcgtttcagcatccaccagcctccgacttagataagtcatcacatgctcctttccttcggtctctcgtgtcagaacagccccaataaccttatcttcagctgcaatgtacaatctgaacggtactcctatttgtggtgcttttaatacgggagccgaagacaaatatttttctgatgag

SEQ ID NO: 62314 - DNA, 571 bp, Zea Mays
ttttgacaaaaggtggtaaaagatactttctcacttttatagatgactccaccaaattttgctatgtgtatctcttaaaaacaaaagatgaagcgtttaattattttaagacctataaagctgaagttgagaaccaacttgagaggaaaataaaacggttaaggtccgatcgaggtggagaatatttctctaatgttttcgatgagttctgcgtggaacatggtattattcatgagaggacactgccattctcaccacaatccaataggattgctgaaaggaaaaaccgcactctaacagatttggtgaatgccatattgagtacagcgggattatccaaggcatggtggggtgaggcaattttaacggcgtgtcatgtcctgaacagagttccaacaaagaacaaagagatcacaccatttgaggaatgggaaaagagaagattaaatctctcatatttgcgcacttggggttgcttggctaaagtgaatgcgttaatcaacaaaaaagtgtaaacttgggcctaaaactgttgattgtatattccttgggtactcttttcacagcactg

SEQ ID NO: 62315 - DNA, 1242 bp, Zea Mays
ttttctgattaccagttcataagtatagataagaagggtttcattcctgtaatgctagagccgatggagaatcggctaaatcctaaataaagtttaaatgatgagtacacacaaaattcataagtccttggtcatggatagtccggcttctaaggccggatggtctggtctttcacaaaacagttcggactttaagaccgaacatctaccacagcgtaaagacagtattacggatgatccgacccccgagatcggagtgtccgccatcacacaaagatcatctgattcctctgtgggggacatgatagaggaattcagagatctcgataaactaggacaggggtttacatcggccgatcctttaaaggagatcgacataggagatggtaaaactccaaggctgacttttgtaaacaagactctggagaccgatcctagaaataagatgatcggtctattgaaggaatattctgattgctttgcttggaattacactgagatgtcgggattaagtcgagagatcgtagagcatcggctgtccattaagtccggtttcagacctttcaagcagaaagctagaacatttcgtcccaatcttctcccacgaatcaaggacgaaatccaccggctactagaagctaattttattagaccttgcagatacgcagagtgggtctccaatattatgccggtggagaaggagtcaggtaagcttagagtatgcattgattttcgcaatttaaatagagcaactcctaaagatgagtatcccatgctcatagccgacacattaatcaataatgcatcagggaatagaattattagctttcttgatggtaatgctagatataatcagatttttatggccgaagaagatgcgtctaaaacggccttcatatgtccaggcttcattggtttatttgaatgggttgtcatgacatttggtctgaaaaatgctggtgctacttatcagagggctatgaatttgatcttccatgagctgttgggaaacactatggaagtctacattgatgatattgtagtcaaatcggctgagtttagttctcatatagctgatttgcgcaaagcctttgataaaatgcgttggtatggtttgaaaaagaacccacgtaaatgtgcttttggagtgtcgactggtaagtttttaggatttgtcatccatgaacatgatatagagatagaccctgaccgaatcaagtctattcagaatgtgggacttcc

SEQ ID NO: 62316 - DNA, 535 bp, Zea Mays
cacacgcactatcacgaagagacatcagcaacagattagctacagggacccatatggcgagtgaacaggacgaaacaccataccaggggtacgacatcgcacgaccctacggacgacgtcagtaggaccacgccactagagacagcaagccaagctcccttctagtagaatatgaataaagtcgtccctttaattataaaagggcaggggcaaccttccttctacacacaagcgcactagatgtaacacaatctactgcaattccacgatcaacactacactggactaggggcccgacctgaagcagaataaacccgtgtcttagatttctcatcgagtcccagcaactcaccattcagagcaagtccacgctagcacccctaccgaatacaaatctcattgtcccccgattttcgaaaccacgtcatttttatcttgagtttaggagaagtcgtactataaagggggactcaagaatagttagtcaactgttgaaccaaatgctcaaaatctgagattaataccctatacctag

SEQ ID NO: 62317 - DNA, 677 bp, Zea Mays
aacccaaaaagtaatgcttcgacccctgaggcgcctcttgtcccagactggtctaccacagatgacttcctcctctatgggctatggcaagcacatcttcgtgatggtggtccacatgtgaggttaaaaatatggtattgtaatcttcttccaactatattgtagacatgcaagcttcatggatattttgtcaccaccaagcttttagattggactgtaaacattagttgcagacattaaagcaatctattacataaagccatgttgcaactgccagctacacaataaatattagatacttcaagaaatataaatgagtagcacatgaactgaacatgcactgtgtagttctaaagtttgcaaaacattcaaagatgatcagtgtttctaaatttaccacatacatgtgtttagttcaatgttgaaactgataattttcttctacctccttatccgccctcgattcccaactcgcacagagaaggtgtcgtcgctacacgccaggtgctcaggtcttcatcggtgacgagcatccaacatgtatgcccacccttctcttcccttcgtgttgtctgagatttagcacccaaaccttgacatcatttatagaaccctttggatcttgtctaattacaaatgtataatctacacgctcaatgatatatatgctttgattt

SEQ ID NO: 62318 - DNA, 532 bp, Zea Mays
attttctgaattgttttatcccttttattcaatgattggactggggacactattctgtgaaagaccaggggctatttcgtatatttctccaagactcatacccaccccgcgcgtggatggcgggttgaataagaaaaacaacaggggctctttagaaattatccaccgccgaaggggtaccttcagatatgagccattcgattgatatctgatggcccagattagactagaactgagacacatcggcaaccctcaaatcttgatccatcggttcagatcatacattgacctttatgcactgatgaccggacatcatcagatctgtggtcccaatgcattgagcgcatgcatacaagttgacccaatcctagccgttggtggctagatcgacggacaagggttgtcttcctcctcaccatctctccccaacctccagtcaggcgcgctggccgcacggcggcgcccaccactggcgttcggaccacagacgccctgtgccccactcaccaccaaccgcttcgagatcgatact

SEQ ID NO: 62319 - DNA, 364 bp, Zea Mays
gtaccgttacaacgtccctccaatctcgataatgcttgtgcgcttgctcaattgcaggaggaggtctcagaactggcaagatgggaacctcgcaagttttcctccactactacaccgaagccactgccatcacccctgccattgcctcgtccccctctaacagaggaggctcgtccgcggcatgggaatgacaagctgaattctctcaaggcttaacggcgggctcgtggattgtgtgacaagtgcgcggagaaatggacttcggggcatcgttgttcacctacagtgcagttacatgtgttggaagagatatggcaactcttcgacaatgcttccgaatcacccacagcagagcctgacacaa

SEQ ID NO: 62320 - DNA, 421 bp, Zea Mays
ttcagcccatcaatgtaaccgagccgtactcgtcaaggctcagcctgctctcttcctgcccccccgtccgatctctacccggcggaattccgtagacctcgccgtcggccaccgcccgtgcaatttggagttgagggaagttcaccggaaggcagcacgatggttcagaagaagaagaaagcggccgcggcgcccaaactccgcaagcttccgaagcgcgacgcggtagctagctacgctccatttccgcaacctccgcgcttggattggatcctctccgggggaaggagtgtctaacttcctttttctcggtctcggttctctcgcaggataagaagctcgggaagaagggtgacatggcagagttcagggcgcagctggactcccttgggctgaagatagtccaagtcacggcagatgg

SEQ ID NO: 62321 - DNA, 610 bp, Zea Mays
gcaagtcagtttgaactgaagcatcagccaaggacaaacccaaatgatgcggttgacgcccataaagcacctcaaagggagatctgcccaaggaagaatgaaatgttgtattatactaatattcagccaatgacagccactgaatccattttgatgggcaagcatggacaaaactccgaaggaaggtctccaaacattgattaacgcgttcaacctgcccatccgtttgagggtggtaagatgaactcatccgtagagtagtactagccaaccgaaacagctcttgccaaagtttacttgtaaaaatctgatccctgtccgaaacaatagaatgtggcagtccatggagccgataaactgaatccacaaataattgagccaccttaagagcagtgaatgggtgtgacaagggaataaaatgagcatatttggagaacaaatcaaccaccaccagcacagtattagcaccaccagatcgaggaagaccctctataaaatccatactgacaatctgccaggcatgttcaggtaccggcgaaggctgcaaaagcccagggtagcgattcctgtccggcttagcttgttggcagactacacaattcatgacata

SEQ ID NO: 62322 - DNA, 921 bp, Zea Mays
taattcatgagatatatattcatcgaggtaggtgcaacgtcgtcgctgctctgagatcccaggcacaataattcatgagtgagacgtacagatgacaacaatggttgctacatgcatgctgttgggggtatcattgcttttgtgttcacattgattaaatgttgagcctgcattcagccaacgaggggtctagaatttgggaccacaactcacaaaacaagccaaagacaatttggcatgtgcgcttacgtgccgacagacgaaacattgtgatatatattcatcacctagtgtgatagaccataaccttacgtgtcgacagacaaaacattgtgatatatatttatcacctaggatgatagaccataacctggaccaaccatcctggcgtgtccacccgctgagccaacctccctcccgcgtcccatcttagccgggcgaccgaacccccgcgccccatcacttagagtcgagccgagccacctctgaaatggcttcatctttacttaatgacttaaatgttacgtagactttaaaatgacttaaatgtggtttggatggcacaataataacttaatattttctggaatgactgaaccaacaacataagaaatgtatgagaaacccctgaaaaatgctgaaaaccaataataactaatgttttctgcaaaaatgatttaatatttactaggatgacttaatgtttattagaatgacttaacattgtctgaatgcctgaatggctttgcttggactttgaaatgacttattgttgtctggacgctagaatgactgaaccaataacaaaggatgtctgagaaacataaaaatgacagaatgacttaatgtacgcaggaagggagccacacataggggaggagtcaacacgtggctacaaaatgagccgcgcggggagcacgg

SEQ ID NO: 62323 - DNA, 1134 bp, Zea Mays
catggtgggtcgaggtgagctatggctgactccacggcgcgcgttgcagtgttagcgaggctcccctcgaggttcccttagagcaaggaggggcacccgattgacgagatttcgaggcattcttgggtcgaaacatggataatcctattcaacgggaaaatgagtatgcctactgaccctaacaaggggaatccagatgacggtccctgatacctccaaggccttggtaaaaatgggttgtggtgagcctggctgcatgctcccaccttccaagggatcaaagtagaggtggtgaaggcttacaatgatgtcaagcgactcgctcgttaggggagtctgggcttccggggccctgttcatcttttcttcgttgctcagggcattgcctgagttctcgaagcgtttggttgctccaagagcccgtgctatgccaacatcatttccagacatctagagctcagagaatctcgtcgcggaatgcataaggcccctacctgacatgccaactatcggtgtttcgtacctcacttcaacaattaaatttattgtgcatgctctgagctccggagggtgtgcgtggagggtgcaagatttatactagttcgaacagaatgtccctacatcctatcattggtggtttgcgctaccgacaccattgatgatcaaactcatagtagaggttacaagtagtcgagagagggaggagaagcttgtagatctcttatgagggtggaagtggagcttagaagctgagaggtgtagtcctagctaagtcttggcttcgcagggctccggcctcctggtcctcaccggtgctcctcctcctgttcgtctttatgggctcgtctcagtctgaaggcatccagtcgtctccatgttgatctattctctccgtctgtcggcccccttgccaagagaccagcttctcccttttataggctaggataggtgtcgaccagaggtggcttccctaggaaggagccataagggtgggtgagtccacgcgtactcgcgaggcccgaggctgtctggctgccacgtatttatcgcgggggtggcgatggtcccagctgccatcattccggctacgccgacccctggcttccgtagtctagggctcggtgcaatccgtcg

SEQ ID NO: 62324 - DNA, 469 bp, Zea Mays
tcaagttctgtacaaaatttgtagagtatagatcaaggaacatatcttttgcactgactgagatcagaatccaaacaaaagacgccaaaaatagccgcccactgtgtgttcgttgcttcgtccatgaggaaaactagctctggcaggcagccgcccatgcccaccaatgtgtagagctcgcacctaccattgtcccctcctgtctgacccttctctgcctcccccatctatataaacggcgccagggcaccccacccccaacgttctccattccttctccacgctcccagcgctgtccctcccattctcgtgagctcctgtccatggccgctgtcgttctgctcgtagccgtgggcagcattccaccagccaccaccgaccgagctgcgaccctccagtagtgcgcactggccccctcgtactccccctccatttccccgtcgtcggagagcatcccatcgccgggaat

SEQ ID NO: 62325 - DNA, 889 bp, Zea Mays
ttctaccattgtgctatctcctttgtttgtcttctccacaaccatatatacaccaacttgccaaggaaggcttcatggccatggcttacctccccgttttcgtcttcctgttcatggttgtcttatgccaatccgatgacaggctaacacctgcaaagccactcttgcccaacgaggtgctcatctcaggcggtggtgtctttgctcttggcttcttctccctgaagaactcttcaaggtcttatgtcggcatatggtacaacaacattcccgagcgcacatacgtgtggattgccaaccgcgacaacccaattaccaccaatgtgcctgggaagctagtttttaccaacagttctgaccttgtcttgttagactccacaggccgcaccatctggacgacgacaaacaactataccgcaggaggaggcggtgaaactgcttccatcctgctcgactcggggaacttggttatccggttgccaaatggcaccgacatatgggagagcttcagttacccgactgacacaattgtccccaatgtaaatttttcactgaacgtagcttccagcgctacgctccttgttgcctggaagggacctgatgacccatccagtagtgatttctccatgggtggcgaccctagctcaggtctccagattatcgtttggaatgggacacagccatactggagaagagccgcatggggtggtgaactggtgcacggcatattccaaaacaacacaagcttcatgatgtaccagacagttgtcgatacaggagacgggtattacatgcaattgactgtgcctgatggctcacctagcatacgcttaactttggattacacaggcatgtccactttccgaagatggaacaacaacacgtcttc

SEQ ID NO: 62326 - DNA, 584 bp, Zea Mays
cccatcctgctacgcagtccatttctttcccccgcagcccaccagtgcggtaacacttacgcgcaggtcccacttgtcggcctccctgctatttggccgggcgcccatcgcggcttggtgacctgctccctcgcgccgttgttccgctgctggtggggccaccttggcagctccatctcctccgcgtgaatggaacagaacagggcacgatcgcagcgactccgcaccgcgggtgccgctaccccgatttctttcggtgtggaaatcaaggcatctgcctcacccggataacaaatcttccctctattcacgtaatcccattaggtgtgcttctcagtggccgaatcggacccaatcctaatagactcgcggagttgttggggattttggcatctgcggcatataaaagtaaacctcgactccctccaatggccaagctcccccgtcgcgtccctgcttccaccctctgctctaccgtgcccagacctttttcccatcagcactcggcgcccggtgtccttcatgatcgtgttatcctcggctgttgttggggaaccatggagcgatcttgctcgtcagaaatt

SEQ ID NO: 62327 - DNA, 1072 bp, Zea Mays
agttgagctattagtcacactgataactgaattatggtcaccagtgacattggcaggactttgaggtcgaattggagtaggatctagtgatcgattggggatggttactatagtcgatttgtagctggattgtagattaacaactttgttacagaaggattagctagttgctatatagaaattagaaatcgaagctctgcaaagtactcggacagagactgaatgggggtttcccatggtacagtgcactgaaaaagatcttcaggtgcgtccccctcgccgccggtgacccacgcgcccgaattcgcgccagtgccgcgattcgtgccctctgtggtgtagattatgatcgaccatggaaaaatcttcaccgtggatgagctcagaaccctgtagccgctctgtcatctatccactcacgccggcgacgtggccgagcggccaacgtcgtattgtacgtcgtttgctgtgatcatgccacaccgtgaccatctcaccacctcactactagccgtaacaactcaccagtgaccgccgtagctcctcaaccagtgatcgccacggtagatcgccgcggtgactcctcccctctcttcggtcgccagcacacctttgtgaaattggacaccaccatcctcgggtcctataaattgagcgtgccatcagctccgctaggtagtcacgcatccagcgcacccactcgtaccttggattgtccaccagagagctctaatttgggatttctcccaaatcagtcaaaactccaccgtgtgtgagctcgccgtggctagctctccacaggtgcgatcatgccttcctcgttctcgtttcaacatccctatgtgttgtagatgcttagcagcccggccaactaaactagatcacgctagatcaccgggaacacttcggattgtccttgttttgcactgtaaccgtggacagagagattaggagctcaaaccttgcaattaatcgaggggaaatgatcgtcaggggtagaattgtgtgttagccaagccagagcaccgaccattgcgtatcttagccggtacaggctcgccggagacttgcc

SEQ ID NO: 62328 - DNA, 313 bp, Zea Mays
atgagatgaaggataaagatggatgtagcttcatggagataggtaagtgaagaatttctcattgagaccctgtagttccgcctgaaagatttggcatccgttaaggctggcatggcatcagatggagcagaggctagacctcaggtcctcagccacaagtggaggagatggctcagcttgaggtttgtggagcatatccctgtcggccactacggtcttcgtgtacggctggctgacccctacatcaacaaggctcggcttggcagcatgcaacgtgatggccactgcccacagcacactccttgagttccag

SEQ ID NO: 62329 - DNA, 320 bp, Zea Mays
cccctcgccgccggtgaccttgcgcctagattaacgccggcatcgcgattcacgcccggtcgaacacggataacgctcctcggtaaaaaatcgggcaccgcggatgagcttgagaccctgttccgcccggtcgccgtgtccgcttgactcacagccggttcagataagctcaccggagatggctgcctgccgatcgaatgccacgtgccttgaagcttcacacgtcgcagtaaaccactccatattgctggctcgtcgccgttaagcctgccacggtgaaagacacgcagctcttgcgccattgacctcttccttctccg

SEQ ID NO: 62330 - DNA, 450 bp, Zea Mays
ggtgttacgcattacaaagcatctcgaacccgtttaaacccttgtgcaacatcgaggtgctctcgcacgaactatcgagtcgtagtcaacgacgtcgtcctacccaaaagcagcacatgggtaacccatagtgcgcagtcgggtcatataacaccgacaatgtatgttctaattataattaaaacagggacgaggatcctcatcggggatttatcctcgcggggtaacggagataggaaaaatgtcccccgcaagcgttcgtgggatccccatgaagaaatttttgtggataggtatggggagctattcaccgatgggtaatttcccattgctaaccatatgtgtatgcaagcataggacagagtgtacgcagggataaatttaggatggtttgttggggttagccgacccaaataaaatttatgaatcctttaacagaacagaaaatct

SEQ ID NO: 62331 - DNA, 743 bp, Zea Mays
cgcgtgcctctgttgctggaggagagggggtcgcattgcattgcatcccttctgggcggagtcacatgaatcacctcacaattatctgtctctcagtggtctctcgctgtgtgtgctgggcgttccttttactatgtggcagccagagccagcggcatgttttggattcgaaacagggcacgtgccctgaacctcgtgcttcggagtaaatccctttggatggaccaaagaaaaaaaagccagggtctgaggaagacgcagtctgccattcccagagccaattgtgtttgtgacgtcctgattcttcagacacagtgaacggattacatatcctctctctctctctctcttcctcgctctattcattgcttccttctctctcccggcgtaccccatggttgaaggattcatgccttcatcaatcgccgcctacccctacctccggggttaccctgtgacgccggtgtgtccatgtccacagtcgtccactgcaagaatgtactacctgcaaaataatcaacggccaatgttagttttaaagtagtgctggcccacgtgaccactttagaagatataaacaactggaggatattaggacaatcggtaataataggtcgtctatcacttctgattcgtggctctcaccgacagtggtaggaataggatgggtttcccgaaaattttgggtcgggtaatttaaatttcgagttctgagaattgttatccaaaataataacggtttt

SEQ ID NO: 62332 - DNA, 861 bp, Zea Mays
ttcgcaagaccaaatccccgacggtgaacgacggcgtgcgctctccggcgaactcgtaccggccgtaagacacaacaatccgtgccctaatatggtctacgcctaattcagaccttggtgatccactgggaatcaccaatttaacccgaacgctaccctaaagctcagtccacgcgcaaccgcggagcttgagacaatcccgacgtgtttccgacgacacagtacataaacacacaaattgggagcacggtaagcttctgcaatgtactagggttcaagaacgacagctaggaaggccggtggagggacatgacagtgggtcgacggaggaggtgctcacggcagtgcagagagtggatttgggggaaattccaaattagggtgctacggtggacgatcgggcgcgaggagtggttcactgggttcaatttatagaggacgaccgagaggagggaaaatttggacggggaagcgctcgcggtgagaagggggaagagtcaccggaggtcgctaacgtggcgctcactggctaactatctacgacggtcactgccgagtccttatagcttgcgacgacgtggtgaatcgactacggcgtggcgcaatcacagtgaacggcgatctccacggcgatgaccgtctggccacgtcgctacgcaagtgggtacgacaactgggcagtaatagtgccccgacttcatcccctgcgcgatatctttcaccctacgtagttatccgcacgccaccaggcacaaatcgcaacgccgacgaggatcacgacgcgggatcaccggtggcggtgcactgaacctagcgatcttcgtcaggttactgtaccatgcgagttcctttcagtgtgcc

SEQ ID NO: 62333 - DNA, 540 bp, Zea Mays
aagactttgcttaaataggacaatagataaattaattaatcaaataataatcatgctgaatgatgcgtttgagtcgaagctgcaacctcattttaaatttgaattcaaagtctaaatcaaagtgaaaacgttaaacaaaaatagaaattgaaaataaagaaaagaaaatactaaggatctcaccttgggcctaatccccctacggtcagcccacctccaaccgtgcggcccagtctggtctccacgttgggtggcccatcttccccgtttggcgcgctggcactgtcactgcggacccactcgccagactactctcacgcacacgccgacgcaatgggcccgcctgtcattccctcgtgcgcgctgctgcacgttcttcttcctcgcgcgaaacgcggaccggcttcaaccgagcgccgtgatttaccagccgcggactccgtgggcgcgagctcaaccacctccgcgatctccccggttccgtggcgcgtaggatgcggaccccccctccttctttccggatataaatcttggcatgcc

SEQ ID NO: 62334 - DNA, 880 bp, Zea Mays
cccggacccaaaaagggaacgattctatctgggtgataatcgaccgtcttaccaaggtagcccatttcatcccagtgaaaactaccttcggaggagccacccttgcccggatatatcttaaagaggtagttagactccatggtattccacggaagatagtgtcagacagggggactcagttcacctcaaaattttggatgagccttcagcaagctatgcgcaccaagctagacttcagcaccgcctatatcccccagtcagatggtcagacagaaagggtcaacaaggtcctcgaggattgttaagagcctgtgtgttgacatttgacagaaattgggagtccagtttgccatatgcagagttctcgtataacaaaagctaccaggccagtatcaagatgtcaccattcaaagcattatatggacgaaagtgctagacccctctaatgtggtccaacgtaggggaaatacactagaagggcatgccttcattaaagaggcagaagagaaagttgccctgatccgcaaaagattacttaaagctcagagtcggtagaaaagttatgcagacaacaggcagagagaactcaggttcgaggaaggagacttcgtctacctcagggtctcccctatgcacggagtcaaaaggtttcaagtgaaaggaaagctagctccacggttcgtcggcccctatcctatcattggcagggtaggacccgcagcctaccgccttgaattgccagaatccatgtcagatatccacaatgtgtttcacgtatcccagctccgcaaatgcctgcaagtgccagaaagtcacatcgaagaagagacaattcagattcagaaggatctacagtaccgagagaagctagtaaagattc

SEQ ID NO: 62335 - DNA, 604 bp, Zea Mays
gagcttcgacaattttccttggagtagagcttgtctttattgtctccagcgcatctagtacgttgaccattcttttcctcttaggggtcgttgtaggacctttttgtgccttcggcactgtcacttctgccgaagggcttgtaacttctaatatctttgttccttcgacccctatctcttcaatattatcagccttcggctcagctaatttgactaaggttgtcttcggctttgcaaccggctcttcaatcctctgcataagcgcaggttctttggcttcagtagccgaagaggtctcaccgccaaattcaggcacttcggccggttcaatatagcgcagtcggtgagtaagaaccttcacctttttcctcttcggcgtgggctcgcttggagcagctgaagcatcatccttcccggaagttgcactctttcttttctgcccccgtgacgggtagcggtagtcagggtacatgaacccaatagcatcaaaaactctatttagctttttctttttccggcttccgaaggccgcagatagtgcattatcttccgctttggagtacaacccaagcagttcatcacttgtagcttcgatacacttcag

SEQ ID NO: 62336 - DNA, 302 bp, Zea Mays
gcatcttcccattacgtttactattaacggtaactcgtacaacatggggtattacctcgtggatggtacttaccctgattggctagctttaatcaaaacaacacgccacccttccgacctttgcactaagcgctttgcaacaaagtaggagtttgctagaaaatatatagaaagagcttttggtgtgctttagtcaaggtgggtagtgatatgtgaccctgtatacggttggtccacatcccacattcatgacataatggcagcatgcatcatacttcacaacatgatagttgaagatgaag

SEQ ID NO: 62337 - DNA, 590 bp, Zea Mays
tctgcaagtgaagcttcttcagaacaagtacctggagattaattattcttaacactatccatggcagctatctcgggtacatcttctccaagatctatgtcgctctggaggtcactgtatgatcagtccatccatatcatcattgattctggcagttcccatacatttgtcagtgacaaattggcagcacaactgtcctcactcatagtgactacttcaccactaatggtccaggtggccaatggtcagatactggtatgttcttctcacattcctcaagctcagtggcaagtctagcactgtcagtttgtgtctgatttgagagttttggcactatctagttatgacatgattgtgggtctagattggttagaacaatatagtcccatggaagttcactggaagcatatggttatctattccctatcaaggtgattcagacagaatttatggactgttgcctaccattcatgagggtgctctgattcggataaatgctattgactctattgctcaagatatttagaaactacagttgccatcatctcttcagaacttacttgccttgtttctactgcccactgagttac

SEQ ID NO: 62338 - DNA, 991 bp, Zea Mays
gcagatttgtgtttggtgggggatgctagcgcggacacactccgaatggtgaatatctgagattcaacaagagatttgagacataggggggttatactggttcaggatggagccctagtctagtgtagtgctagtcatagtattgcttggagtgtgttacaaccggtgtggctgtgtgtcctagtcctagaagaaagaaggcccagccctttatagttcaagggtaggaccttacaggtgtgacttactctctacttggtatgaggttgatctgttgccttagcctgacgttgtgcccctggtgttgtgctatttgtaggggcgtgcatagccgtacccctggtatggtgcatcgtctcgctcattcgtcatacgggtccctgtagtgagtctgctgccgatatcctcatagtagtgtgcgatgggtcccgtgggtcagtcccacacacgacagtgtgtagcgtagcttcgcctgtcgtcacatgcctacgtcacttgtcgtcgtgcgtaggcatacacccggaatggtgtatccgttacatctatccaaatattctggtcactgtagagaaactggtatccgttacatcgggtagtctgatagaggtctggtgcaccaccggaccatcactattcaaggttcggtgcacccagaatctgtgcagtttttgccaacttattccaacggctatttgggtggttggggctataaatatccccaactagcacattgaagatacaagagctactccaaccaatcatacaccaattgcaactactcttacgtattcaaagtcacacaagcgcgcatccgatcaatttgagtgaagggagacttagtgcttgtgttcttgagtgttgcatactcttgtgctcttgatttagtttttgattctcgctctcacccccattctcacaatttgtaaagctaaacaagatactttgtttctttgtgtggaggtccttgcaggagttattgtccatggtggag

SEQ ID NO: 62339 - DNA, 1016 bp, Zea Mays
gttttggctaactcttctgctgtagtatcatgatggtactttggaagtttaccaaaaccaaccattctctggacaatatatacatgtccacatgaggattagatgtagatactatatattaatacattaatgattggaaacaaacttacccagaaacacatgtccatataatgctttctattatttatgatttctcctttcggcccatgtgactctttattggcaagcagctgaacagccatgtcaaaacatcttagagtcatatgtagtggtagcatcgcgttttctatgtgcgcgtgcgtgaaagtagtcgtcgtagcagcacgcaaacacacgtacacatggtaatgggagtcggtgcactgatccccattagcttggtaaagctccaccgaacagcctcgcgggttcctctccacgcatatacaggcaacctggttcgaggccgtttccaagtccacacaattcagtaatccaccatacatttctatatgttcaattgtactgctattgccactccacgtgtaatcaccagcctaaaagctcgtttacaactgatgctgatttgtttgtattgatttctttgcttcaaaaattaatattctggtaactattttttggctcgtccatggtgagagaacaggcaatttgagtatgtgctatactctcttctgatagtttttgctaaatatagtagcataacttgctctcttggtaaaaacaagacacagagacaaaagctaaaatcacgccctcgctaaatatactgtattgtatgtctccacgcatatacaggcagtctggttcgaggccgtttccaagttcacgtatttcagttatccaccaaatgattcagtgccatacaatatgttgtactcaagcacacagatagtaacgacactaacataaatcggtatgaagaataagaacaaagccaagtttgtgactgaacttcactcagttctatcctaccaatctagtgatccaaacagtttaacggcagagccagactccat

SEQ ID NO: 62340 - DNA, 468 bp, Zea Mays
cttatttcatgtacttgatgaactcactattcatgctagagctggacaaatttgtagtggttttcattgatgatatcctggtctattccaagaatgaagacgagcatactgagcatctgcacatcgtgcttcagcgactgcgcgatcatcgtctttatgctaagttgtctaaatgtgaattctagctaagggaaattaaattcttgggtcacacaatttctcaggatgggatatcagttgatcctgagaaggtacaagaagtaatggattggaaacctcctaccacagtgcggcagattcggagttttctgggattggcagggtattatcgacgatttattccggatttctcccgaattgccaagccaatgactgaactgttgaagaagggagtcaagtataattagagccagaagtgtgaagatgcctttcatacactgagacagcatttgacaacagccccagtgc

SEQ ID NO: 62341 - DNA, 730 bp, Zea Mays
caacaaacgaggagctacacgaaatttcacctaaaacagagttcagatgtggtctacagaaaatcaggaagttctctgaaaagcgtgcgagaactttgacgaaatttttctttatttttctgatttttttttacaattttgtcgaaacccaaacagaccgaaggtgagtttggccggcctcagaatggtgtcaacaagcccctgtaaaaatttcagattttttgaacaatcgagcgaaaagttatgcccggtttaaggaaggtatgtttaaaacgaccgagatgagacaaccgctttgtatcctttctccttcgttttctttttttttgtttctgtttttttacgtaaccgaaggagaaaaacaaggaagcggcgttgactcggtttgtttttttttctgttttttttgacgtaaccgaaggagaaaaataaggaagcggcgttgactcggtttgtggcgttgactcggtttgatgtaaccgaaggagagaaacaaggaagatggttgcagtgcgctagggtttgatgtaacaaaaggagaaaaacaaggaagctggttgcggcgcgctagggtttgatgtaaccgaaggagaaaaacaaggaagaaagaaggatggtgagaaaaaacagatgtgaccagcaacaaatgacgcgaaagcacacaaattcaacaatgcagattattgaaagaaggtgtgaggctcaaaagggtgctggtataaggtctaac

SEQ ID NO: 62342 - DNA, 331 bp, Zea Mays
ttatgagttgtacagaactactgatgaagtttgatttttgatagttaccatgaggttggttgtgtatatttttgaacttaatgttcatcactggaagttgatcggctagcacaaagatggcaatgttttctgttaggtacttatcagcatacacacacatgattcttgcatatttgctgctctaatgggttttagcatgattttttaaataagtatgctgagcaattgcttttaggagggaactacatcaggtacattttaaatatatgttttgctctgtttaacatggtgaacttgggaatgttatacttcttcaggagctaatggaact

SEQ ID NO: 62343 - DNA, 387 bp, Zea Mays
cgggccagcaacggtcggtcccatttttaatgagttacagagatatgcgtctgacccaccacatgttacacaagccctaaaccacccagacagaccgtccacatatgatcacggacgatccgcatatccgactggacggtccatgtatccgactggacggtctagcatagggttgtttgaggaggattgttacctaaatcatcgcccgtcccagcaacacttctcatcgcactatacaatgcaccagcccattaatacagaatcccaagcccatgggggtgagtactttccggccccgcctagaaggccaaaaaggaatggtcaatcctatgaaccatatagggctaatagtaatgcaccacagaactcaaaccaatgggggggaag

SEQ ID NO: 62344 - DNA, 324 bp, Zea Mays
atcacacagaactgcacaagtatccacatcaagatactagctggatcttcagggcacactactcgcagagcttgtatatggtcaaactgtagaaagtaaaatcatgacaataaaatcatctgcctgacatgtatatatgtgacaaaatgtagaggaaatgtaaataggtaacagaatacttatatcaatatgcacgggttagttggtaactgattgttgcagcaatctatgaagattcctcctcacaaggcaaacaagtaaaccatatgtgcaaacacgtattttccatgagtaccacccttttgccaggtgcaacgaaatacc

SEQ ID NO: 62345 - DNA, 740 bp, Zea Mays
cagaaatcgttgaggagtaacaaaataggtttgaatgcttctacctgatgtagatgtggatatacccgggattaatatcatatccacatttgacttattggcatttgatctattctgcggggacgcttgcgaatatgatccatcggccttagtcaaagcatatgttctgattgcagattcacgtggtttgtgataactttcctccgattaattcaccctgatggtgatttgcctcacaaagaggttcatcttgatgatgaaattcctagcaatgcgcgcaatatcattgtgctgggaatacggaacaatgaatctttcattttgggaaatgacagagattattattaaatgtgggagacaaatatgtcgacacctatcttgcctctctagattgcaaacggatccaaaacaaagtcctaggcatgagtgctttaagctctcttatcgggtcattgataaatgcaatcgaggttgaaccaagaatcgcaaagtgaaagtcgcgagcttgaagtttggacattatgggcactattgaaataatgtgtggtgaatgcgatggttcaagtggtcttgtgagagacccatcccacatatgtgttgaataaacactattctgctatgtaatatatctggtaaatggcatgaattaaattatgcagttaataggattccgaagatccgtcatgagatcctatgaggattcatatatttgatttataaatatgcaacatataaatctc

SEQ ID NO: 62346 - DNA, 987 bp, Zea Mays
tgaaacaaacaaattaggaccaacaagtcacttacaaattttatccgagtcatttcgtgcgctagagttattaccacacaattaacaaacacatgcaccaaaataaagtactttggcaaacatgtccgacatcacacaaaattgtgatgaaatactaatatttaactttagaccatcatgacataaccatttaaactttaattggtattaaggtgtaactcaagcattccatgaaacatgcatgattttgttttctcctaattttcactaactcgtgtaattataaaaggggtgttattttagcaccatatgaaactatctaatttggggctgcaatttttatgaggaatagttaataacaaattatgactattgtataaatttcacatgcccaggttttatattttatttactacaaaaataacaaattgttgatgcaataaagcatgtgagacaaggttaaatctaaaactaattattttctgtagatgcatgaccatattaagttttcttaggctactataatatcatacaaggacagtggaacatcattttccatttttacatccatatatgttttataaatcatttaaaactacttaaggtgcattaaacaagttaaatcactaacttaatcatacatgcacaacaattcatgaaatttttaccagtcaccaagagtctactgtaaaaatgtcaacccatttggagcattggagctacagatccaaaaataacaagcaaatcaatcttcttttctctatttaacttgttttaattaacacaccaagaaaactgtgaacaacatataagatttgtatttttccttgatggcgtatgacaacatctaactaacaaaacaggtttcatcatttttggatttttataaataaaattatggagagaagcaagttcgtttattctctaaaccagtttttatttacgaatttctacagaaaaacttttccactaaaacatgccaaccta

SEQ ID NO: 62347 - DNA, 530 bp, Zea Mays
cttgacctgtgatctgctcccggccccaactccactccatctcgttgctttttcttttgcgttggcagtcagcaggacaggactacgatcacgcgctgtgctgtgctgtgctgttctgtattgtccagtgcaagaagcgtacacgaaattacaaaaagtacccatccagtttccccttttcctccgccaagatacaacaaagcacacggaaaacatgcgtcgaagtcaaggaaaccatcaaaggccccatcagctaaccaaacacggcaaccaaatcagaaaacatgtccatactgctgcacatccctcagctcagacgaaccctgacctcgtctcttcagaacacacaaacacacacactgcactggcctggctaggccacaacaagagaaagcaatgcacctggccgactgggtttagagcatcctttttgctcacatcgccaaagacaaccaaatcattctctgcactgattggtgcacatggccacatcgcatgggcataaggatccatgctgccaaaccaaccag

SEQ ID NO: 62348 - DNA, 560 bp, Zea Mays
attttatatgaatgtataacttgcgtgaatttttgaagtcaattctctacaatattaaaacatcagtttcgacgatcgtcctgcgtcatctttttacagaaaggcccttacacttctttgaaatctaacccgcagtccaactttaaggttcataaccacgccccgccgtagcccttgcatacgccagcgcctcctcctcccagaaattttccctaccgttcattctggcgttatacaatcacaatcgtccgttataccgttatgcaatctcaaccgctcgatcctgcgatctagcccacgtgtgacaaccgcgtcctctgtatctgctcctcgctcagtctgttctcctccccgtttcttctgcctcctctcctgctattcagttgcagcaagttctccctccccgtatccttcgcctcctcccccactccctagctagattcattttgcctctcccgcatgtactcactcccaacgccccgtctcgcactctcgcctcacctcaccgcggggagacggaagacggtggacgcatcatcacctctcccgctagctgccgc

SEQ ID NO: 62349 - DNA, 681 bp, Zea Mays
cctcgctataggcataaagtggtcaggcgcactagaaaatacatgagaggaaggaggaaactttgaggtcatcaaccgatacagtttcataagaaatgcctcctcacaaaaaggctctggacgcccctctacaagacctaactatcccatggtctgattaggtcaaatgtgataggaccttaggggttagacgtgccagcagcgatacgcatttgggaacataagagatgacatacaacttgtaggaaggagatggccctttgatttttctatgttacaacaaccacatactacctagactatataagggggacattgagctcctgtagaaacccaagacaactaagcatccaagtattcaaaaatttaaacaagaaagcaagaaactataatttgttctctcacataagaatgagagcccctaggcttcaccttataacacattcaaatagcaacaaagacttcagctccatactggacatagtggacttccccaaactagtcaaaaccttctttcaagctcacagagcaaagccatcgagatagtagcccacaaaatccccctatgacattgaattttacttggcatgcatacaaaagcattgcatgtaatgagccctagtcgggcatgatggtcagccaattcaggagtaaaagtggtggaccagtgttagactttgc

SEQ ID NO: 62350 - DNA, 441 bp, Zea Mays
ttgtagtgcttgagtgcttgagcgtgggtgtagatgagtgtgagagagcttgttcgtatccaagagtacctcccccactgcaacacgtgtgccctcccttttatagtccaagggggcacacacaagggtgttgagcccgacaggtgttcccagcaaactagcgttaaataatgtacaccatggagctttaagtgttgtggcagatggagatattcttcctctgtcgtcgtgcgtatcttcagaccagatgtgcctttgtcccgtctgcgggctcgaatcggctatggagtggagtctggtatgctggcatatgtaggggccgaccacgctgacgtgcaacagagttaatgcgaatgacccgtgtgctctacttgagccatcgactgctcatgatggtgccactcacatgcagggcgctgaggcacaatcgcttgcctcggc

SEQ ID NO: 62351 - DNA, 586 bp, Zea Mays
ttggactgtcaggctggattcattctgaaattcagcttttcagtgtaactgggtcaactttgagtatgaattcaaccttgatccagtgctcgaataagtttaatccctatagtcgagttgttgctggtatgtagcactacaactttgatgcagagacttggacctgttgtcatatggaattgggagaaattagaactccaatgtgctctgtcagttgtctgatggagagttcacgatggtacagtaccctaaccggatcagatcgcccgccgtagaaaagatctcaccgccggtagctttccgccgtgattcacgtcgccggcgtcacgattcgcgctcgggtaagtggataacttcgcggcgtcaaaagatcgtcgtcaccgccgagctggaagcccccccgatcggccacggcacatctcccctggctcatcgctcgcggtaaagtgctcaccgtcgaccgccgcctctcggtcgtgtgccgcgtggctcaactctttcaccgtgtcgccgtgacctcctctgaactctctgtggctcaccggagttactgccgcgctataggacacgtaatcgcgcgccaagg

SEQ ID NO: 62352 - DNA, 411 bp, Zea Mays
gcccggtgtagttgttcctgatgacattgttgcggatgtcaaggctacgcctgatgcttcgagttgcccttcctcctcgattgctcctgcgaaaaacattgccgaatagaaatgtttggatgtgtttacaagatattgaatgtgtttgtgaactatatgtgtgtgtgatcagtgcactcgaatgctcgataggatattagaatgtgttcttggcgctgaaagttataacattttgtttctgttgttagaattcaacagtcgttatgaacgattgcagaagtaagtgcggcgtgctggtttttggaatcttttcttaatttatgtcgattgatcagctggtaaggcatagagatcaccctatgacgagtagctgtgagcatgttgcaccgtcttaagtcattgccaacttag

SEQ ID NO: 62353 - DNA, 658 bp, Zea Mays
gtttcagcatccaccagcctctgacttaggtaggttaccacatgctcctttcctccagtcacttgcgtcagaacagccccaataaccttatcttcaacggcaatatacaatctgaatggtactcccacttgtggtgcttttaatacgggaaccgaagacaaatactttctgatgagatcaaacgcttcctgctgttctgcccccaagtgaatttggcatcattcttaagccgaaggatagggctgaaggcatcaatcttcccggctaggttagaaataaacctccgcaaataatttatcttgccgagaaacttctgcacttcgaccttacaggttggaggtcccacattccgaatggatttgattcggtcagggtctatatctatactatgttcatgaatgttgaatcctaaaaacttaccagccgacactccaaaagcacatttacgtgggttcattttcagaccataccgacgcattttatcaaaggctttgcgtaaatcagttatatgagagttaaactcagccgatttaactacaatatcatcaatgcaaacttccacagtgtttcccaacagctcatgaaagatcaaattcatagcccgttgataagtagcaccagcattctttagaccatatgtcataacaacccactcaaa

SEQ ID NO: 62354 - DNA, 369 bp, Zea Mays
attccttacattgcagttcagacactgatatttggcctcatcacgtacttcatgatcaactacgagaggaacataggcaagtcacatgtcatcaaggaaaaccattcttcatcaaaggacttcatgctttctacacatgatgttgtttcttgtgtgttcgctgtattctgatagactaaacatttttgtcacaggaaagctgcttctgtatcttcttttcatgttccttactttcacctacttcacgttctacgggatggtggcggtaggcttgaccccaacacaacaagttgcagcagtagtgtcatctgctttttactccttgtggaatcttctctccgggttcctcatcccccagtctgtaagtta

SEQ ID NO: 62355 - DNA, 526 bp, Zea Mays
gtatctcgtatttgaggccgtatgttgtcgttgccattatttcttgggagctttcacgtaacagacgcgatcttcgtaattaactgaagcaaaaaaacttgggacgttataaccatccgagattcgcgtacctagtacccatcgtttcatttgaagtccgatcctaccggggtatatatgcatgcccacgagaccacgagccgccacgcatgtgagggagagaaaccaaggcggatgggacacagggtcgcagcgcttgatcccgtcgggcggccgcggagcgtatcagctcgtgcctgcgcagtgccacggtaagtcttgtgcccctgggctccctcgcccttaccttcctggcggtagtgcttgcgtagggtgggtgctaacctcggcaccttgatatcactccggtgggcgcgcatcagccatggcgctgccgccgctgtccggcgtgtgggaggaaggaggcacttgtgccatcggattagtttccagcggatgagattagaatcggtatagcgatttggtg

SEQ ID NO: 62356 - DNA, 456 bp, Zea Mays
atagatttgaggtcacagtcaccttgtcgccatccatcaagctagctattcacctactagatggcaaatttgtgggtgaccatatccgagtttttagggatttcccttatgtctttccaaaggagttgcccggaatgccaccagaaagagacgtggagttcattattgacctcttacctagaaccgctaatatttctaaaagaccatatataatgtctatagaagaactaaaagaacttaagaaatgattgaaggagttacaggatctcgggtatattcgccttagttcctcaccatggggagtgtcagtcctctttgttcagaagaaggatggttcccagaggatgtgtgttgattaccggtctcttaatgacgtcaccattaaaaataaataccccttacccgatattgaagatttgtttgatcaaatgagagatgccatgatattctccaaga

SEQ ID NO: 62357 - DNA, 661 bp, Zea Mays
taaggttttgacaaaaataaataattgatctccactagtttaagctatttctaatcaaaaggaaaaagagaaaaataatctagagagagagaaagcctagagtgagaaaaggaagattaacacatgtttttgtgtgataattagaaagaaattttatacccccaaaatcagggtgttacactcggccatctcttccgaaatgtcagaactgggtagctcatctcagagcgtggtacaaagttgcagcaaccgaagttgttgtgatattgctcctttctggtagccttcgtctcataagatagctcatggatgttacagaagaattttgcatttggttctaacccctggctcctcatggcccaaataaagatccccatcttgatgatagcttcgggagtaagctgatgaaggtaaatttcgaaagtcttcagaacttcgaccagcaacttatccagagggaaccaaagctctgccttcatgaagcttctataaactaccatctcatcaactcgggtagaggcacattattttcccctccagccctcacaattgaaatatcacggaagtaccttcccctcattgcataaatttgcccttgcttgatggttgatttcccgaagacaacatgggcttggtctctagggccgatcttcggcgcctt

SEQ ID NO: 62358 - DNA, 425 bp, Zea Mays
cccgtggcctggctctgttctttctcccctgcccgcgtctgctctcggtctcaggtccttccctccctttgtcggcgatcttcctccccggtggcgatcctctggcgccctgtgcctgcgaccctcgctcggtgagcagcactccgctctcctctccctctatccctttctctcttgttctctgtctgagaggcagtgaagcacttctgtttccacccctttttgcccaattccaaatcctgtgaaatcttgtgaatccatgttgtggtatgtgtgtctctgtgtgtattgagcattcctgcaggttcttagctccttcgagagggttttcccacctcaaatagccatttcaccgaaaccctagaactctgcacgtcacgtgctcggtgaaatgcccaaaccagccaaaaatgctccaattgaac

SEQ ID NO: 62359 - DNA, 551 bp, Zea Mays
caaaatcaaagttggtttgtaggatattaattttgctacagaccaattagagggttgccacataaaaatttgtgaaaatcacccctgaaaatgccctgtcatgcgctctgaatgaagttctgatggtacaatactgaagaagatcttcaggtgcagtgcacctcgcagccggtgaccccgtgcctggattcgtgccggcgatgcgatttgtgcccgtaggcgcgcggataacgactcagggtgaaaaagatcttcaccgtggatgagaccgggagcgagccccatacccacttgccttgcggccggtctaggtaaccttgccttgcgaatgccacgtgcctcgaagctttaccacgtcgcagtaaaccgccttaggtagcttgatcatcatctaagacactacctgggtgaaagccacgacagctcacaccagtgaacttcccctctctccgaccgccagcgcgccttctcaaaattagatgccaccgccgtgggattctataaattgatgcccagtgagttccgctaggtgattacgtacccagtgaacc

SEQ ID NO: 62360 - DNA, 450 bp, Zea Mays
taacaactatatcaagctctatagtgcttgaataatctgggaaattaaattgaaatacaacagaacatggataagttaattctctgctctctcctcatgcataaagttttacccgaagtaacccgaagatatataatataatgcatgaaagcctttttggcacagaaaacgtcacaaattgggattttattagtaagcaataagaccttatcagatgaataaatgctagaatctcagtcatacattgctcaaccagatgttggcacattgctatttgtcgctgaacggcatgaagcgaactttgagataaatggctagtaccttagcaacacgaagttgcgagtacatcgaaaggtaattctgagaattttttcacaacattggtgtgaaaaaacattgtgtgttctcgtcgaaccactttactcggcctatctaggacctctatgcttg

SEQ ID NO: 62361 - DNA, 945 bp, Zea Mays
cccgagggtgccactgaagacaacccagccccgagggtactactgaggatggcctagcctcctagggtgctgagcttggctcctccttggctacttccatggacgttttgacggatcatcaccggttcaatctaaggaactagtggtgaccagtcctcctactgctcttgtcggtccagtcactttagaggtcagtgacccggatgctgggaatccgctgcatgctgtcggagctgaagtctctctgagtgttgccttgggcgtgagctctgatcctcctttgggtctcgagtctgctcttaatattgcttctgcctatactccaccattagatagcgcgtcgatgcctccggctttgggatttcccttgttcctttctaaccttcaggtcagctattgccctgtgttacttatgtcggcaaataggctctttagctaacttttgtgtttgcagaatgttctgaactctgtgtcggcccaattgaggtcttgtggtgtacctgttcccgatcaggttttgtccctgctgcagtggaatcctctcttgctccagaagcaaatagatgatctaaaagcctcgaacattggttagtgggtaggtagccttctttgctattcattgcttctctcattttaccttttgtattttttcttattgctttactagttctgactcaacgatgctccaacgctgaggcaaggtacgctcagagtcaagccgatctgaactaggcttctgcatgcttggacagcgctcggaccctaaactcttccttgaatgctcagcttgattcaaagaagagggcccatgaggtagatcttcttaactgtttctggtgcttctgtttcgcgcctttaccccgatattcagtgctctttttgcctgtaggaggaaaggcatgcgcttcttgattcccatgacaatctggatagattgtactgcga

SEQ ID NO: 62362 - DNA, 1062 bp, Zea Mays
ctcgtattctttatggaggacggcatgggcagcatgtggcctagacaccattattcaagctacgccgacccctagccttcatagcctaggtctcggtacgacctgtctcgttctgctctacaagtggcctgcacactcaggcctaccccttatagctcatgagtgtgtcgcaggctggggcgcacgggccataaatgtgctgcagtccgaggggtttgtaggatcatgagtgcgctgcagtccgaggggctcgtaggtcatgagtgagaggcggctcgacacctctgccacggctcgacgctaggcataattaatgctaccggtcacttacgtcgggtcagtctcgggcgagtgaaggatccactcgagtggtttaccttcggttcgctcagcccctatccaactccaccatgcccgaacccgagctcggtgcctcggtgtttgtctgggagcgcgtgcttccaggacagacgtttcctttctcctcctactgactgatgggcctcggttgctagaggcctcttcctagtgccctcgctgaccaatgggcccctgggacacatgggatcttgtccccgacactaatctcttctctactccttcctttaaaccatgagtttcgtgcgtcatgtgttacacgcgaattttcttcggcacgtctttcctaacaactggttaagagaagtcaatcggataagataagtattacctcttacatgtgtaaccaaccatgcaatcactcatacaaccaccacgagcgcttcctcctccttgctgtttgttctccctcgcgcctttcctaacaaccagataaaccaaccaagccacgagcgcttcctcctccttgttgtttctgtcgttgtggacgtcgtatatcaagccctaacttttctctctttcaccgtctccgcctccctcacctatattttttgcaccaccatggtggccttcaactcaccggtcgacgccatcatgccccacttatggcgccgcctttaccttcccccgtcgacaaagtgcctcgagccgctgccgcgactctccgccgccatgcgcctatgc

SEQ ID NO: 62363 - DNA, 595 bp, Zea Mays
tggaacttggagtgaatgatctgggaaatgcaagcatgtctgaatggggaagatgggaggagccaggaacagccaatgattgcttgtgtgggtgcagagcacacagtgaggtatctctcatgacacacatacatgagtgcatatggagacttgcttgctaatgctaggagagatatgatgtatgctgtgggttgtgtgtatatgtgctgccactgtgtgtacatgcatgtctggggaaagtggagaattgaaggtgatgagcttttgtttcttgttgggttcccttttcaaaccctgcatattgcatcgcattgccttgttgcttttggagatggaggagatctccatgtcaggctatagaactgtgctgtgatccatgccctctcatgcatatggtcatcgtcgtcgtcttgcctctctcggaggcaaaagcaaaagccaggatggcacttggtggggacaaaaggagcgggtgtaactgatcatctttgaacaagagggcactgcttgctttctgcccacactagctggttgctgtggcttgcaatggcaattttggtttccaagctccttcaatggagaatgtatcctatgc

SEQ ID NO: 62364 - DNA, 791 bp, Zea Mays
tcgggaagataattaaaaaatttgtttaagtgttttcaggaattttagagatcctttgtgattttctctaggccacaatacaactctgtttcaagtgaaattttgtgtgcttccatcaactgtgattttggatctgtgataaaaaattcagaatatttcgagcttgtttgctggtactactttggaaacgcgcctttgatttctactagtgctgaaaaatctgcgctatttacagaactgtcattctgctagtttgttacttttatcttgttgtgcttcgataggacacgtcttagccagcaattgtgacttgtgatttggatacttattgaacttcgctaatctgcactcgatttttgctaatccttgatattaatttttggcctcccaagctccacatattttcttctgatcaatacaactatgacattgcaatcgcgtttcactacctcttggtaagtatcatgactcagcctccgattgtaccatcctttgctcgtatttcgtcagatacttgtaagagcttggtaagatacattagagcgtgttcctgtgttccacctgagaggagcgtgtagtgaaattattagggataaccgtcaccgtttgtttcctgtttttgtgtttcgatggaaggtgacgacgaagaagcaaggattcctacagacttcgatgaatgtgttagccgccaagatcttgaggcaaacaacaagctcctgaaggagcaaatggaggagacggtccacaagtcagtgcatgatgccttcattaacatggaccttggcaggact

SEQ ID NO: 62365 - DNA, 624 bp, Zea Mays
aaaaactgacttaatatctttgatttgtagaaactggattttcatatggaaggtgtaaacttagcaagaccagataaggccaagcctaagggaagaacaatcaaaagtagtgagcaacaagttcttaaattgggtgcgaaaggagctaaggagatgagcaggaagtgccagaaatgtggcacagctgatggtcacaacagccgtacgtgtttaactgtggaggataatagggttcgattggctaacctatctggacgtaagcgagaacggcctcctggttcaaggaacaaaatcatagctgcagcaccatagtggaatgagacatcaacgtcgaaaaaaagaacagtggatgtcagagatgatgattcatctggtagagagtagaataccataagatttatgataaaattatattctggatgtaaatctgattcctgtgtgtaattgacaatgtccagaaagtgtcataactatgcttgcaaaatggcataaacgtatgtggaatttatcataagccattaacaattctgtagcaaacagaatgtacatctacatagcatacatctatgtgcaaatatgcataaaactgcgttgtgtaatgcataaactggtcagactgtgaag

SEQ ID NO: 62366 - DNA, 697 bp, Zea Mays
cgtcgaatggcctgtgcgaggctgcggctaccgcggcgggcggatcgaagcaagcagcgacataagaaactgttggagagctcgacgatcaggcgaagatggtgcgagagcgcagctagcggctggaacagagcggggacgtgacctgcatcgcgcggagcagcatgacacagagtttgacaacgacggccacatggaccatggcggagcaaagatcatcacaggcgcatggcgaactggcgcggtgggatccaaatgttggaattaggccactcgtgtgtggataattcaataagtaagtcaatgtaatgtttagagatgacatgggctttactcccatattgctcatctaggtaggagaaaaccaacttatatgtgggagtgtttacttttcacatgagacaaataaagggctatggaggctgtcacacgcgcgcgctcactcacgtattgtgttagttattgtgtgtcttgtgacttgtgacaatgcgcgatcgcgtcatgacatgttctaaatgacagtttactttttttccttttgtttgattgcagggtgcggttcctagaatttagtatattgaacccgtcaagttgctgcgaccctctataaagggggaggtcctttagtcggagggcacatgacatagcaaccgactcgtcttctcattctcttctctctgcaccgccgcttctctgc

SEQ ID NO: 62367 - DNA, 357 bp, Zea Mays
aagagatcacatagtaatgctagtggatcgaggtcttctccgttcggtcttgttctcagccctgtcttattagcgtgtgggcaaaggttgcggcataggtgagtgtaaggagaatacaaacggtgtcgtcccgtcccctcatgcttcgttaacacatgaggaatggtggatgtcataatgaagggcacccaagccacgcattgagtcaatggtcttgctttggtaacgcgtgggtttctgacgtggcacgggacttacaggccgcgcatgccacctatcaccggcgtgaacagtcgcgcgctctgcccaccttaaacgctggtggccccctgctagaggcttacgtcaggttcttcc

SEQ ID NO: 62368 - DNA, 331 bp, Zea Mays
gccctgagcagcgtggacactgtaccgcccttggtgcctctgcctctgtctctgtcccgagtgtgtacttcactcctctgtcggtagcactaccccatccgatgttgcagctacccaatctacactcgttgcgtcctcacggctgccaagaccgttgtgactgctgccgcgagtgcgaatgtcgctgctctcgcctagtagcatgaaagcactgttgccgatacccctcgctaggcagcttgctggggctgagcgtcatttgcttgtctctcccatcctgaagcctctcccagagcccccctatggtcgccccttcggcgtacgaggcctt

SEQ ID NO: 62369 - DNA, 354 bp, Zea Mays
gcacaacacaatccaattctactcattcaaccaaacaaaaggtgagacaaggtttggaataagaaagatattataacataaaggagttgggtaagagttatcaaggggttagacaagacatattcgttggtggccaagagtaaaataagataaccatgaactattaaagtgaggataaatgatacaaccaaggatatgaagtgagttagggagaaagtattatcaaggagacaaaataatagagcattatcaagtaggagtaaggagacaaagaatccagtatatcaaggtagatattgcgcaaggatggcaatacaatagcaagaaaacaaaagtataagaagtcaagggtta

SEQ ID NO: 62370 - DNA, 1019 bp, Zea Mays
ttcacctttgtaacttattgctgctctgctcgattttgcacatgttctcgtcttggattgtacactgacattgtgctctgctcacaagaaaatcgatgaaagttgaaaccctattccagattttcaaatatacatttagtacgacttggggccacacactgtaatttggccaacaagttattaaccaattaaaaattgcattgcacattcgtcatgtatttcttatcaagtagagaagtttaaatttgagctatgatcataaggaagacctttatttgcatacaccagcaaacctcaatgttgttatgtctttacactggtcttcttatttcaggatctggcacaagctattcatttccatctcaagattaatgggctttggatctatgcaacaacatgggaattcgatcagaatccaaatgacttggcacattctaatgagttaaaactagaggtcctggatgacctaagagagatttctctcataacgaggactagctattgggattggtctactaggcttcagcttaacaacttgaacagttttagtaattccaatagaaaggatgctatatcaagtaagttgaatagatcaatttaggtataggaattaaatcatcactccactgtaaatataaacctacagcatggttattaacggaatctcaaacttgcttcttatttagcaaaagaaaataaaaaagacagggaatgtagttgaatgcattgtggctggttgtgttgcaagaatattttttcaatggtactctctcagtgtccagtagtgttcaccatttcccttgggaaacatcggtttcaggtgaaatttctcttgaaaccatttcgcttgggaaacatcgcttgggaaacatctaataactatcttattatatgtggttcagaagaatgaacctgttttccatattcaggcagtggttcatcagacgaaagcctcccctaccggtcacaactcatggtaaacaaatgtattatttttgtcctttttatttacgccattt

SEQ ID NO: 62371 - DNA, 510 bp, Zea Mays
gcactctaggttgcaaaacaacttcctctagaacttgatataactcaaaaaattccagcaacactctaaaagtcaggcctccctgtaaatcattaattcattgggaatcaagaagagcctcgctgaccaatcccttgttgatccttctcctaggaaccatggcagttagagaaggggcaatatccccaacacttctattaccatccagccatctgtccttccaaaagagagtattagaaccaagtcagcaagaaacagcgccaaacctcccatatcctttggtctagtggctctaggccaagtcagcaaacagcgccctccattagcttctttcctacccttccacaagaaatcttttcaaagtttattgatttctttgatggcccaggtaggtaaatcaatagccattgcaatgtagattagctttgcagtcatgacagactgaatgtaaacagccctgccaacccggttcatcatctgtgctttccaacctaggagcatggaagccac

SEQ ID NO: 62372 - DNA, 434 bp, Zea Mays
aatttgttgagatactgcatcaccatatctcctccttgcctcaaccggataaactcttctagtttcatctggagcactccctctggaacataatgctccgaaatgctagcttgaactcctcccaggtaatatgatgtccaacaggctgaattgcggaaaaatttgcccactaggtactggcaggccctcttagctgttgagctgcgaataggggcttttgtgtctccgtgcatcgaattaacccaaacttatgttctattactctcacccattcatcggcttctaagggttcctctgctttaacgaagagcggtgggcgagtttcagagaattccagataagtagtatctcgtggtccctgaggaggagctcttcctccatgctgtttgaatttgttgcctgccattttgtgcaagaagtgcatattgttagcg

SEQ ID NO: 62373 - DNA, 487 bp, Zea Mays
ctgaccatcaccagttgtgccctctcggcatttgcaaggtctaaattttgctaaccacattggcatcagtcagcgaactcttttctgtttaagtagcatagattttgtttcttaaaagggtgctaagttagcacatttggagtattcagtcacattgcaatgattgacttggtagaaagatttgcatgctgtctttgataaaatgaaatgttgaaagtctttgttgggcagtagtcgggagaagtaattagatgcttgacatttatgtgatttcttacggtgggttagaggaaatagtcttttagggaagtgaactgaagtgttataccgtagagtgacctgattacacaaaatcagggtttctccgtacacattgtaaatcaatagtatcacaataagatgtaaacatgggaaacatgagaggagtccacatttgatatgtagatattaaaaatgggcatgcttgtgttcatttttacagatttcg

SEQ ID NO: 62374 - DNA, 303 bp, Zea Mays
gccggaaggcgttactagcctgtacgcgctgggggatgcctttgacttgacgatgaatggaccctcccatttcggctccagcttgccccgtgattctgtccgggtggtccggacgagtacgaggtctcctttgttgaactctcttgggacgaccgcattgtcgcgccaggcctttgtttgagcatgatatttgttgagggcctgtagggcgaggacacggtctccgtcgatgagatctttggatgttggttcgtcgacatcggggaccgctgatgtgcttgttcggggggacccatgttttat

SEQ ID NO: 62375 - DNA, 570 bp, Zea Mays
cactggtatactcctgaaggtcctgcattttctctattttctactctctgttgcatttctgctttttctcagggggagttctcttgtcgagtgggagtttttctttctacccttgtttgtgcttgatgagttcacttgtcaacaagggagagagattttgattttccggttcctctatctagggggagaatttggtctttcgggcttcctctcatccaagggggagggatgtgttatttggagttatttgtctttggtagagatttttgggagtattgtgacagggggaggagagttgagccttttggagcttttgctagttgtgttgagccgtttgcatctttctgaaggaactagctttgattttagattttgtgctgattttatgctctgaattgatttttatgctccgataaagctttttgtgctccgatgagatttgttgctactggctaatggtgttgagccctgtttttgcctcttattgagggctagccttttattgcttggtcgtgttgagccgttgcccatttctttggggaccaagttttgcttactctaaatgacttg

SEQ ID NO: 62376 - DNA, 707 bp, Zea Mays
agttccaacacacgtgctgacgaccttctgtggatttcactcgctggagatggcaactcaccccattggtctgttccccattgagaaggaggatgacccaatgtggagggaccgggttgatcacgccagggctgtgtgggcgatctaccctaaagccatcactcaactgatggtacgatgaatgagtgcactataccgcctataggccctacaacgcgtggccatgtcacacttgatgggcctagctcaggatgcaaaggtcaccatcggcgtcagagaagatcttgtggtggatctatctactgagttggtggagaaggacccccatactgagtagatgggcacccaaatccatgagcttgaagagtaagtggaagaacggatccacaccattgaggttctagagaaccagcttcagactacctagcaatagctcaaggaggcaaacgagcatttagacatgcatcaccaggaaatgcatcaggatatggaagtagatgaggacatggatatcaagggtgaggatcccaagctggcttgtagcttagacatggctagcgtagctcgcttcggggggccaccttatccagagtctagtgttgcctcgtttatctgctaggtgtcatgcttggagtagaagtgataggaagtagcactcctcaggatagcttagctttttgtttcatggtatactaggtgtgggggac

SEQ ID NO: 62377 - DNA, 330 bp, Zea Mays
ggactcggttcacgcttccgtttgtcaccggagcgacgcggcgagccctgacctttcttgtccttgctcatggctagatggaagagaagagaaggttgaggaagaaacaacggatgatcaaaggatgtgtgaaaacaacgacggagcaaacatgctatttatagaggccggaagcaactattcatctcctaccacacccaccgaacagtcgcaagtattcaataagcaattcaaatcgcctgaaggcgagtcaggcagcagacaccgcttcgcgtaacaagacaccatttggactaaggtcaactgctagggtaatatgattacgcccag

SEQ ID NO: 62378 - DNA, 847 bp, Zea Mays
agtgaataggagtgaagtgtgtgcttggtttgaagttttgcggagaaaacgaattcttggcacttgactcaaaaaggattgctataaaagggaagtgggggaataaccggtgtctgggatatcgaatagttgtgaaatttggcgagagagttactggtagtggtcggagggtgttggaaaaaattggggtcgatttgagcaattttgactggtttgggtatttcactaaacacgtggtgtgcgggttttgagttgagggtgaaatggctatttgagtggatgaaaccctccctagggagctcaaaacctgcagagaagcataatggagtacaaagcatgcacacaagcacttggattcacaggatttgcaacaatttcacaggatttcgagcgtgctcaaaaggtggaaggggtgggcttcactgcacagagaagaacagagagagggataagggagaggcctcagcagagagagtggtggaggatgagcacgggtaggagcagacctcgccgaagatcagtcgaagcacgccgccggtgagggagaggaggaggtaatcgccaggcacagagatgagaggagagcggcacagctggagaagaaaactgatgcctgggctcgagctcgagcggagaaaatttttaaaaaccagttatgggcacaccggacagtctccggtgaaccaccggacaaggcagcacacgaacagatctgagcgcgcccagccagtgcaccggacattgcacagtgcagtgtctggtgcacaccggactgtccgctgagcctagacagagggaattttgaaattttctaggaaattttgaaccaaatcaaatcccaacttat

SEQ ID NO: 62379 - DNA, 661 bp, Zea Mays
atttgtttgagtcactgacaaatgcagataggccctccttctttttcttcacaactcgcggtccccgacggtgaacggcgccaggccgagctccagcgagcctgtactagccaaggcacgtaatggtcggtgctctaacttggttgatacttaattcaacatctaacaatcgtttcccctcgattaattgcacggttcgagctcccaacctttctgctcacggtgaccgcgcaatctggggacaattcgaagtgttcccggtgatctaatgggttctagcttaatcggtcgggtcgagaagcatcaagggcacataagggtactgaaaaaagagagcagaggacatgaacggaccagtagcacgctagccacgacgaggtgctcacgcggcggtatttagatcgatttgggggaaatgggcaattgggcggctctggtggacaattggaggcaagtgctggtgtgttggacgcataattacctagcggagctccctgaggcttcaatttatagcacgcaacggcggtggtgctcaatttggaggagaagcgctggcgactggggagaggggtgagtcactgcggagatcaactatggcgatcgcagggcaagttgctatagcggtcactgggcagtcactatggctcacgatgaagcgata

SEQ ID NO: 62380 - DNA, 695 bp, Zea Mays
attatgttgtattggtgttaaattactaattgtgttcaagaaccatcaaaatacatcgtctagtactctgggtcctccacaggcgatggttcccgcgtttatatccattctgcaatgaagtcgacgagggcccaggacttgatcgcggttctagaaacgtagccaatgtcgagtctgttgagatcaagggaccacttcacgatgtgtttgaacgcgtcatagttgcagacgatcttaccaaggagtgttgctgacaataccgacatggggtgccggtcgaagtagtggatcaactttggcttggcgatgaggactgggtagagcagtttttgtatctgagggtatcgtgccttggactccgtcaatacctcactaacgaaatacaccaaacattcgaccttgagcacatgtccctcgctttctctttcgaccactagtgcagcgctaaccacctgggtggtggctgcaacatagaggagaagggtttcaccttgtttgggcgcaactaaaaccagcaacgaggctaggaaacttttatccgatcgagggcctcctgggccacggtcgtccaagtgaaattgtcgcttttcctttagagtttgtagaggaccattccttttcccccgagtctagataggaaccggctgagcgcagtgacgcacccaaccagtcgttgtacccccttgaggttctgg

SEQ ID NO: 62381 - DNA, 613 bp, Zea Mays
gggccaacctttgaaccccttatcaataacgggctcggagcccatatgtcctgaggcagtttcccgaaccccgtcgagggcccgaacatcgaacccctaaacagtactctgctttccttctcctttccaaaggaggatgcctgaggcaggggacgctctcttctcgttatctgcaaggagatggaaaggaaaggagagagggagagaaaggcataccttttgaggcgaaagctgactgtgttatttccatcggaagcacatgtatttaatgtgatgggatgtctttgcctgcaagccgaccattgtggcgcgcatgcgcgtgggattcgaagcaacctagcctactttgactcggaacggattggccaacgtctcggtgactacgcatgtccctataaattcacccgagaggagatcttcggttctttactttctcgcttcgccttcctactctagacgccttctgcctcagctgcaaaagtgcacattgcctccttctcgtctccctccttaaccccgatggccaaaaaattaagcgttcttcctccccgcgacccatggcccatatcctccatcatcgacgaggctctggaagcattggtggatgtcgggc

SEQ ID NO: 62382 - DNA, 334 bp, Zea Mays
aacctcagctaaggcggtggaattcatacaagacataatattcaggttcggaataccgaataacatcataaccgacctgggatccaatttcacaagctcagagttttttgatttctgcgaacaaaaaagcattcagatcaaatatgcctcggtggcgcacccaagagccaacgagcaggtagaaagagccaacgagatgatattggaagcgctcagaaagaaagtttttgacaaaaatgagaagttcgcaggaaagtggattaaagagttgtcgtatgttgtttggagcctgagaactcaacctagccgagccctgcatggaaatactcctttc

SEQ ID NO: 62383 - DNA, 690 bp, Zea Mays
caaccgtagtgcctgccgaggataattaatttgactctgtttctgagtgttttgagtctaatggtgaatctgggagttcgttttcctggatggaggagtcctcggatgaaggcttggattattttgctgcattagatgtggctgcagcggagtctccgccacgtgtggagggtgccggggatcttcctagtgcgagtactgggtataggcggcgaagggtggtgccgaaacaaagtgtgggtgagttttcgcgaagtggtaggcgacatcgtatggggatggagcgtggccgtcttcgggtagaccgggttggtaaatgagaattgttgtcctcgtcgattggggcgagcataggtgagggggatctgcgaaatctttttgagggtgaggagttgaggataatgctgttcaattatagggagatgggtatcatcccgaaggttgagccgatgtaatatatgatgccctcgtcgtgtgtatgtaattgtaatttgtatggtaatgtggcttgttggccgtattcgcacgcctgtgcttgatcaggctgcacctgtgggcgacttttgcgcagggtgtcttttagtgagagacttcgattaacgcacttgtgctattccggctacacccttaggtgacttttgcgtggagtgtctcttaaataaaagacttcgattaacgcacttgttatgc

SEQ ID NO: 62384 - DNA, 306 bp, Zea Mays
cgacctctgaacagttcggacccctatagctgatcctgagcccttaggctcttggccttcttatgccgtcctttcgacgaccagcaccatgctcaccgcttctgcagccgtcgcgatgtataaatacaacggctccccaggttttggagctaccagtattggtagggacaccaggtgctgcttcaactcttgaaaggcttgttccacctcttcggtccaagagaatgggccggacttccacaacagcttgaagaagggtagcaccctctcagccagccttgaaatgaagcggctaagggcggctaa

SEQ ID NO: 62385 - DNA, 307 bp, Zea Mays
atccaaatgaacaagactttgatgaccagttttgataacgaattcagcatgctggagatacggtctccattgttcgacagcgaataaaatagctagacactccttttcataagttgacggtcccaggtttctaggtcccaatgctcgactaatgtatgcaattggatgccattgttgttgcagcactgctccaatacctccactgctagcatctgtctcgatggtaaactgtttggagaagttaggaatggcaagcacaagagcctcagctaaagccttcttcagagtaagaaatgcctgattagtt

SEQ ID NO: 62386 - DNA, 379 bp, Zea Mays
gaaaacgccataggaagggaaatcgtgaactcaccacagatatgtggtcccaaagggtgaatttctgctttttgaacctgtcataagcttgattcctctccataattctttcaactcttctatcgagggtttcaacatcacgttgagatttggtccatggtgttctagacctagtattatgaggcatagaaatataaattgatacttcatgcaaagaaatagaggaaggttgtatggaattgcaaacacgggccaacatgaagccatccgttgctagcctaatatgaacaattctcgcatccttaacaaactctagatcaaagttgtctagagccttccatgtgtctccatccgaagggtgcaccatcacttctttgtc

SEQ ID NO: 62387 - DNA, 621 bp, Zea Mays
cggatgcagtgaatataattgctttcgtactaccctagatgtatcgtcccttcgctactacgctaaaatggagtagcccactcactgagtcaaatttgagcttgagatagggagtatgttgtagatagtcttacaaccacctagctcctcctcttacctattggttttggtgggagtcctatcttgttggtcttgatccaactctatgcctatcctttgtgtagagtgaatatcttaactctaagagagatgtcctagatcgaaccgctaaattgagcttctagattggacctctgaaccctctcaaaatgttactctgttcctccttttatataaaagggagaaggatggttacaactattcgaccttaaatcccatcaaataagacctaactatcccattcttaaatccttaaatcctcattgtgtagtcctacgtagggctatgtctttggtcatggcatagtatcagagttgtcctcctttagtgagttatcatacctttttataggggcaagtatgttatattgcatccataggcattggggcctatgtcatttggtatgatgtagttatcggtgtagccttctatagttgatgatattttatggtacatttggca

SEQ ID NO: 62388 - DNA, 676 bp, Zea Mays
gctaggagggtgaatgttttaatgtcttttcctcgacctgattttttttaatccctaggccactatgtcgtctagggacgccccgggtaggtccgccaaccccggagcaccttaagagctctcccctagggtgcgaggtctagttactgcgaggtgaaacatgaccctacgccatcgtagactatccggcttagagcacagaccgtccggagcgacgcagggaaggagtcgctcctgcagtgaggtcgtggaccatccggtctagagccacggactttccgcgtcaccgcagagggcaccgccaggcggtacacccctagtgtttggtaccagatcgacaccaacacacttttggcgactccgctgggaacgagggtgtctagatctactaaaacttggccccaaatggtcggttctaaggatcaaccaaagtctccccaagcaacaccatgaagccgacactacagaacctgtcggctaaagatcagcatgaattcgaggactaccaaaggcagctgatcaagggggctgaggcaaagtacttggcgcacttcaagatggaccaacatcatccgacaaagaaaatgtggcctggcatctcttcgacctactgcactcatccctaatgtaagtaaaacaggcgacatccaatgatccaatctcttaaaaattattg

SEQ ID NO: 62389 - DNA, 322 bp, Zea Mays
acgggcttgccacgtccccgtcgcgacagcaacgcagtcacattggtgcggcgtggatgaacggaagggagggcgtcgatgaccggatatggccggaacgaggagtggccgcgtggcagccgaaattattgctctccaccgcggcgatcttacccagatcaaaaagatcttcgcgcggagatgctcgccgatcgaccatcccgaccccggcgcaaatcgcggcgcggataggtcatcggcggcgaggctgaagcttatccacccggtactgtaccatggcgatgatcttcagttgcctgaacctaccatcatcttccttctt

SEQ ID NO: 62390 - DNA, 409 bp, Zea Mays
cacttcctcttcataaatttgacatagggccctcaatgccttgtagacgacgacttggtaggtgtctcttaatttgtgccccgcaacagtgacacttcattccacatggtgcgaactggatccaatgtatacaatcacgacatacttctctgtgccatgctcagtgaattcacgaccatcgtactctgtctggcttctgattctgaggcatgttgtgcatgatgttaacaacttggagaaaccatcttcattctggcaatagctggtttggcagtgaaccttcatccgactttagagagacggaaaggggaaaccatttttgaaatggagggatgagatcaagattttttaagaaaatagttttgatgatgaactgaagccgatgctctgaagagcatgacacatagag

SEQ ID NO: 62391 - DNA, 591 bp, Zea Mays
tggtgctgttgattcagctggttctgctgaatctgttgaatagttgcagtgagtccttgtagtaactgcatctgggcggcgatgaactgttccatgttggggttcggtggtggtggtgctatctgttgaccacgttggttccggttgttgttgggtccttggcgagtgttcaccatctgattggtcagagattgaaattcttagagaagtggggagtagaaaagattctagaggggaatttcaagtttatgttttataatgctcttatggccatcagatcattgcactcaaacaaaaatccaactcaaacatatcaaacatcaccatcacattgttgttattattatagtactgttttatcgtctactgtgtctagcttatttcaataaactatcctatcaacctaaaggagtatggtgatagactcaggggttccataacaaagccttccaaaaagaatgaggataaggcagagaaagacgtttcttcttcatcatccaaaggtggggtagagggtgctggccgatcttgagcaacataagtaatacttttgtaagcagttcttctgatagcaacctttcgatagatgag

SEQ ID NO: 62392 - DNA, 580 bp, Zea Mays
cttatttgtctattatattaagtatatatatgcttgtttagttaagtacatgcttatttgtgatgcttattaactgaactttgccatctttcaatattagtgatgtgcttatttgtctattatattatgtatatatctgcttgtttagtatatattagtatatatctgcttgttaactgacttaactgaatttttcagtggtgtgcttaactgaactttaacatgttttcccatgttttgccatgtttctgcttgtttaatataatggattatgcaactagcataatctgtctattatattaagtagctagttgttcctcttttcttctcccctcttaccttcatctattcctattttcctcttcccttacaacaatcttaccttttgttcctcttttcttctctccctctttagcctcttgtcttgtttaatttaatggattaatacattatattatgcagttaccttcataactatcttctttttatactatgcaggtagttaatgcattatattatgctgctacctccataactctcttctttttattctgaccatttttcagtgatgaaattatgt

SEQ ID NO: 62393 - DNA, 717 bp, Zea Mays
aatggaaagcaaaagccgtccccagggagcacgggaccagtcagcgactatctcgagatgccaaagtcggggaacggggccacatgtctgcgtcagtaggaaggcgagacctagtcgcttatacgtacacgtccgcaccaccaggctgtacgatctgcagtccttggcgtcctccccacccccgcatcgcctcacgcctctttctttccgattctaaccccgccgaggacacccgccgtaccgtaccttctgtccaatcggattccatacggacgccgagtttaccgtcctacccctgacggcgactttcccccaccagtgtcgtaggggcaaatacggaaaacacaggcacagcccgcgttttccccagtacgacacgctgcaggggctgcatcgtcatctcccctccccgcctcaccacatcccaccgcgtctcctccttgtcccgcaccttctccatctccatcgccggcctccatttcttgcctcccgtgccagccagtcactctcgtccgccgcagatcgagaagccaccaccaccaccaccaccaccgcatggccatggcagcccagcagcaccggcaccacaagcgccgccgcatcgccctctccccctccccgtccccgtccctcgcgcccatccccggcgcccccacgccgccgctcgactcgctggccgacgagctcctcttcctggtcctggaccgcgtggcccag

SEQ ID NO: 62394 - DNA, 869 bp, Zea Mays
gaacgacgtcgtcgtctaggatttggcatggtggggatgctttcattgttcaaggacttggaggatgcacaatgcacatgccagactgcaatacactgctgattacagagccatgtcccagtcctttgaagatctttatcctgattgagcatttgaccggttgtgccctgcgtggctgtgtaatttgtatcttccattcttgcgattgcgttgaactgatgaacattggaactttatttaaattttatagctgggttgtacgcttttcttgtctaggattttttttttaaagacgcggcaagagttgtctaggatttgtcatgaggtgtgaattgtatttaggtttttaatgaggcagttattatactagctcaactatatacttagcatgtgtatctatccgtctgtgttttgcctggttgggccagacgggccatcgtgccattcgggccatcatataccagacgagccaaataaacgtaccatcgtgtcatacgggctggcacgacacgtctatgtcttagccttttcgtatcagtgtgtctctgtggttggtacgatggacaacacatatatatggtacctctaactaatcgggcctgtcgggctcgagtgtctagcgtgccgtgttccgatcgtgctcttgctcctgtatagagctagcaaagccatagaggaggtcaggagatatatagcagaaagctgccgacacttcaccccttggtcaaaacagtgggggcgagcgagacgcagaagcttccggccggcctgggcctggcgtatctattgggcgagccatggatcgatggagccgatcgtcctcgtcgtcgtccccccatgttggaaagcaacgtgccatcatttctcgc

SEQ ID NO: 62395 - DNA, 831 bp, Zea Mays
ctgggcatacccagcttatctgtattgagggctagcggactcaactcgggttaccaacaggagaattccctctgcagacttggtgagccgacttgagatgatccttaggggcaaagtgtcaaatgttggtgctccagtagcatactcggcctggaacctgcctcctcccaaagcctttaccctttttgtgtcgaatcctcctgtcactgatggcagtttgggccttagagtgtgaccctctgctgatgaagttagtgccttggttgcttcgcttggggagattcctgatgatgaacggcaggtccattttgaggtgcccttgaaccctagtgatgcagagataagtgctatgcttgatttgctggctgaggattcttccgatgctgctcctattggggcgttggtagtggcgcccctcccagaggctgatacaactttggatactcagaagcctgtcagtactcgcccgaggcgcccttgccgagccaatcagcctgatccttctgctgatgagcagaagaagaaaagaagacacctccggcgagtatccagtttggatcgggacgctggtacctcggttcttgctaccgaagaagtgcctgcgactggatttactgatgctgaccccaatgggtgtactcaatccgctgctgatcccaatgtgggtgctgcttgtgttgccaatgtggacgacgaggaggaagaaaatgaaattcctttgactcggaaaaacagtcggcagttcgtcgccagcggtgaaagtagtggggttccctctcctgctttgtctgccctcattggtctacaagaactatccctggccaactttga

SEQ ID NO: 62396 - DNA, 272 bp, Zea Mays
attttccctttcccatgctcccgctggcccacacagacgctgtgcaccagcccacgtgttccatcctatttcctttgtactgcactgatgacatgtgggccccacttgtcaccctattcaacccgatgagacagactccttcacgcgctaggctacggacccatcggtcagccttggctcagtcccgcgccactgacatgtgggcccatttaagcaggagcctcttcttccttcgtctgcccgaacaagctatgtggccagcctcgtaccgc

SEQ ID NO: 62397 - DNA, 374 bp, Zea Mays
cgcaaccactgggcaaacggcacgcgatttcgccgcggccggggaaaggggaggtcgttgcactgtttggaccctcgcggctataactccgactcgccagggctacaaatgggaaccgagaccccgtgcttctccctttttcacagctgtccagacaccacccgagaagaacaccggagttctccgccaccgtcattgaatcgtgtcaccgccactcacctaccctgatagcccagtcccagtcgttcgtggggtcgcactgatcgcgtttagggaggaatccgggtgtgcgaggtctcgtgctgacgggaatttctcatcgaagttgaactccgccgcgagcttgcgccatcccgtggccaggagaatatccg

SEQ ID NO: 62398 - DNA, 680 bp, Zea Mays
aggcgcagaaccataccaggttcgcctggccacggaagggctatccacggcggcgcggagattcaatttgggggaaaccccgaattgcagcgctatggcggatgattggagatgagagtgggtgctttggcttggggataacctaatggagctcacagaggcatctatttatagagatcgaccgtgagcacgacaaatttgagcggcggatggctatcagtaagaaacaagatgagtcaccggcatggtgattcgttgccttcactgtagcggcctccccggcgatcatcggacatgcataatactggtgattgcgacatggtaattgctgaggcacgtggcattcggtcgacggcagccaactctggtgatgataatcttggccgaccgcgcggtaagtgggcatgacggccggaccagctagcgatcgaaacttatcccaccactgatcttttcatcgcgcccagtgttatccactcctcatcgagcacgaatctcccaggcgaaacccgattcccggcgcgagctcaccggcgatgggtgcactgcacctacaatcttcttcagaccactgttcattctgaatctcccttcgaagttgcctgacaacccatgtttgagccacaattactccctgctctaggcagtaacacacctaccttcctttgacaaagttgtac

SEQ ID NO: 62399 - DNA, 469 bp, Zea Mays
cgggttgggagtatcctccctactgcgggatgttcccgcaccatcatgtgcgcgagtccgtgatggcatctgaggcaaagaaacatttggaaaaaatataacatgccaacatacaccatcatattacattaccaaaatgtaataattttatagactccaacgtacaacttgacttcattacttattttacataagcataacacttagactatactattctaatcttcttcatcctttgttgctccattttctggtgcaggagaccgttcgtcagcaagattcatggaaggagggggcctaaaaaggtccagctccccatcaggtccatcatttgctgtacccgatggtccgactcccattgcagcaacgtctgaaggcacgtacgggtgcagtcgagcatacaatacatgtacttcttcatgtaaagtattacagtacacttgcaggctttcgagggacgcactaagct

SEQ ID NO: 62400 - DNA, 334 bp, Zea Mays
gatttatttgatcagttgagaggagccagtgtgttctcaaagatagatttgaggtcaggttaccatcagcttagaatccgacctgcagatataccgaagacagcattcatcaccaagtgtggactatatgagttcatggttatgtcatttggattgacgaatgcgccagcgtacttcatgtatctgatgaacagtgtgttcatggactacctcgacaagttcttagtggtgttcattgatgatattcttatatattcccaaaatgagcaagagcatgaggaacatttgaggaaggtacttcaaaggctacgagattgccagttgtatgccaagc

SEQ ID NO: 62401 - DNA, 353 bp, Zea Mays
aaaacctctggttggctagttaaagtcgtccctgcttttgaaaaggctgtcccttgtggtcgtccgatgaagcaactccgatcacccacaaaagcaaaaacggcctagaaggcgacaccacacgtatcgcctgttcttctatctacaatggtgccatggtagtttccaccagcctattcatcgccaatatattatcttgttcaaacatggagtggtgcagcgatgaacaaatattacatccataatccctttgcttatttgagctggggacaccacaattttgtgcttgttggaccattgatcaagttgttattgccaagaaatatgcaatcctaaacgactttatgcattag

SEQ ID NO: 62402 - DNA, 896 bp, Zea Mays
cttgtaagcccccttgtggagtagattttatagtacgtccagattactctgatcactgtaatgaccccgtcgagagaaatattctgagaacgtaacaggtaactaggggtataactgtacttagaggcccattatcctttttggttacctataaataccactaacctgtatacaaacgggtcacgcataataaagctctacagttccccgctcagtgtcttcctgtgcgcctgatcttacttatccactgagtgttgggcccacctgacatacagttccaacactgagacccaattcccatcagcaattgttgcagagtggaatactgcaaaaacttctctgagtgactggtgaccattatttttgggggcactttgtgaaggctggccaaaccttccgaaccatacaactccatgtcataacactgctagacacttctctagacactatacttttctatcttcaacaacatattcactacctccctcatggaaggcctagactggcaagccacctgcgtgcatgaaaccccaaggtccagcaagctcagagccttttcttgctcatcttgagaccaacacgtcatctcctcatccatgaggcttatgatgctgcggcgatctccatgctccaggttagttctcatccatgtcacaatgtcaataccatctccgaacgatgagtccacaggcgtcttcctgcataggagctcaagtagcactactccatagctgtagacatcactcttctcggttaatcttgtagcgtatccatgctctgggtacatacaatagagaatgtgtcaaccctgaagttcattcaagtcgccatggtgatgtgatcgaacaaattacagtatgaatctgagagaacctacctggagcaatgtagccaag

SEQ ID NO: 62403 - DNA, 438 bp, Zea Mays
gaaaacaacacacctaaccctagctctacagttaagggaaagtgtaaggttttgcatgactctcctacccctaagaagaaaaaggatatgagggatgaatacatgaaacgtattgtcaatgctttcgagtctaggggctcttacaagtccataacctcatctagaaatgaccccgtgtgtaaagaggttcctgcccaattggaacaagtgatcaaagatggtgcagaggaaggaagcgacttacatttctttgtgactcatcttttaatggagaaacgttatagagatgtatttgctaccctcaagaccaaagaaggaaggaacgcttggctgcgccgtgcttacgagaagaatgagaggtcaaattaggtgttggtagccctgttatgcttcaaactgtcaggctacgagtcttttttccatcgtccagtgttttta

SEQ ID NO: 62404 - DNA, 412 bp, Zea Mays
cttgattgtaccttacaccactgtaatgaccctgtaggagggaatattctgggaatgtggcagataaccgggggtataacggtacttggggacccacctacccacccggttacctataaataccccagcactgtacgcagatgggacacgcataacgagacgctacagttccctacctaactctcgagctgtgcccccgtgctcccccatctccgagtgtttgtcccactagaccacgtgtcggtggtcacaacatttggcgcccaccgtccgtgcgacgacaaaccaaacccacgatggcccccaagaaggcgacctccaggcccaccacctccctagacgaagccgcaaagacagccctcgccgagaagaaaggcaaggcagccctcgctgatgccgcccctcagggcgc

SEQ ID NO: 62405 - DNA, 631 bp, Zea Mays
atcaatccagtggcggccggaatccgacatcgcgtccggtggtccgccgtaggaagtctagcaccaattagaccgcggcgttcggtgagctcccaattctttaccctttccgtattcttttacctatctaatgccgcgccgtcatcaatcgtgggcgaattgggcacgaatttggcctttgtgcgggggatgtcgttcgggcgccgcccgtatcgcggtcaggggtattcggttgtgtggcgttcggcaaaatcgtttcccaggtgttcgtccatgggctagcttcgtgttgcgccaactcccttcaaggttgatgcattcgtaccccgcggagacttctccggccatggcgtccgccgtggatttgcctccgccgccgctctcgctcatcggtgtggggaggggagatcttggccgttgatctctcaggcaacggggacgattagaaccgaagcaggttaatgggggacttcggtttgggtcgcgggaaccgtccgattcaaaatgggcggctcagattagaacccttcgcgcaatctagttggaccacagatccttgatcggacggcttagattcgtccataccccttcgggcttggcgttttgcttatgagaccctaggttcctttga

SEQ ID NO: 62406 - DNA, 512 bp, Zea Mays
cctcgattcgcgttcccaaactcggccatgatttctgccataaaactgcgtgtcctcctcgtcatctcgtccgccgccattgccgagccgatagagagaaagagagcaagaaaggagggcgccgccgtgagcttaaccctgtcgtgccaccggagttcctgcgcggggtgtccctggggagctcatggttgtctgggccgaatgttccgctctcgtatctagttcgtgtgggaccgattagtggtgagcttagagttctagctcgacgggaaggccagctccggcggatcgcgccgccacattgtgccgcgccacaacacttggtcaactcggggtaggagaaacccgatcgaccgtttgatttcgagggaacgacggagattggatcgggtaccccttcatctaataggatcgtggtcgtccgtgtgttgatgagcgccttagattagataaggggtgcagttcagccagggtacgcgtggtccaaccgatcgtgatcggacgactccgag

SEQ ID NO: 62407 - DNA, 329 bp, Zea Mays
cacttaccggcgacgtggccgcatgtccatcaccagcgtgccgccgttcttcgcagttatgccacgccgtaagccatcttaccatgtcgcagtcgatcgcaacacaccgtccttctattacctaaggccttgccacggggtttgccaccaatcacacgcgccagtgaactttccctcctccgaccactgcgcgtgatcgttccaattcccggccaccgctctcgcttagtataaattgagcccgccgtgagctccgcaagatcatcacgcaccacaccacccagtattgcctccaatcttgcaaccgagagcttgaatttcgaatttcc

SEQ ID NO: 62408 - DNA, 362 bp, Zea Mays
tgagatcctttgaagttggttcgtccacgtcggggatggctgacggaactgttcgcggagacccatgctttatttcttgcggggtcatggcctccgatccgtacagaaggcggaagggagtgaacccggtcgccctgcactcagtcgtgtttagtgcccagactgcctcaggtaacaaatcggtccatctgcccttttttcatcaaggagcatcttcttgacagctgtgaagatttttccgttggcgcgttccacgaccccgttggactgcgggtgatagactgaggcgaaggcaagcttggtgccaatggagaaacaaaaatccttgaagtcttggttgtcgaactgcttgccgttgtcaa

SEQ ID NO: 62409 - DNA, 280 bp, Zea Mays
gcataaagtaacaacaatgtttgcctcatctgcttttgtttttcgagttgaggaaattttgattcatggtgccagttaaaacttagttcaaaatagtgactgtgaacccactttgtcttccctatttctcccccgagtttatacacaatagtgcttgatataactatatgtatggtatttcctacttctgttttagcggggttaattttcaatgatatgtgattgtatgtaactatgaatggtgctttaatctgtttatttttcttcttcttaggctatt

SEQ ID NO: 62410 - DNA, 397 bp, Zea Mays
cccacgttcaagtacttgtccaggcaaattgggtgcctattttcttgatataaaagctgcctagttcctccttgttggtctagttttttttcattgtcttcctggcgaacttctattcagcagcatttagaatttagtacggaagttattggcgcttgacaggagccaacctgtgccccatcctgcactggttcgaaaatcctacaccttcagattcatgcattagcattacactcatctttcatgttcagaattggaaattgttccttcaggtggtcttggatcatattctgataaagaaatattcctacaatatatggagtcatatgtgctcggctgctggcaatatttctagctctgttattccttttgtacttcttttataagattgattaag

SEQ ID NO: 62411 - DNA, 393 bp, Zea Mays
tctccttgctacctcaacaaaaaaataggagcatcatcatcattcttcataacttggaggattcgagccaaatgaccctcgcgcttttgatctgaaagattgtggcattcgaaatgtcacataagatgggtcaagaagaatcaacctcttcaatgccatgtgcctttgcttgtgatgagcacaaaaagatgtttatgctactaatattgtcttcttagcccacttgagtttagcatttatgcactttagttcttttgcttctaaaagtgtagttaatagaattatgtaatgtgtgacggtactctaccttccaaaccaaggagtgtgttgtcctatctagttgggtgtctttagacttatgcgaagtgtgcttgagttagtaatgcgaataat

SEQ ID NO: 62412 - DNA, 507 bp, Zea Mays
gcattaaaaatcgatttctgtgattatttccctattttcccaactctctggatcgggcctcaaatatcgagatgtgcaggggctaacgtgaaagaattcccaagactcatcgcactgctcctgtggacagcgggttggtaacacaaaaccacagggattcttatggagaactaccaggcaaaagggtatggtgagttctgggccattagatcccctttggatggctacgattaggccgaccaccatccgaaaacgttcagcaatgagatcctctagatcccgcaccgacggtgtagattttaagtgactacgatctgctttcacccacacgatcccggatcaacggttaaggccaaccggtacgcagagactaatcgagaccacacacgatcagatcaacggtcaactcctttcttcctcttgctaccgcgcgacagccaggaataggcggcgcacagtcaccgcggcacaactccggcgacccccaattccagccctatggtcgat

SEQ ID NO: 62413 - DNA, 435 bp, Zea Mays
atccaatctaataggttaatctaacctaacgaagtctaaccttaagctgagctaacctaaggacagtcacttaacaagttaacactagtgaaataaattagaacctactcctatcaaacaaacttttgacctacaacatgtagtccatttcatctatatctatcttaaccatattctagaaccccaatgatatacactaacctcgaatcaatgagaccaagactggaaagaaaaagctcaacctcgtcaaggaaggagagcagtcaaactcgaccttcggatgcattaccacccaacacggagttctttctcactgtaaactttcttacccttggctattcttgccctaacttacctatcttttatcctacataataaaatgactatacatatagatacccatgcttccctaatcacccgataatttataaaaaa

SEQ ID NO: 62414 - DNA, 407 bp, Zea Mays
ccgcctcaagcaccaaagctgggacttcacactcattgatggccagctttacaagaagggggttagtcaacccatgcttaaatgcgtcaccgaaaccgaaggcatccagatcctgcgcgaagtccacagtggaacttgtggctctcactcagggcccagagccctcgctgccaaggtgatccgtcaagggttctactagcccgctataatctgcgccgcaaatcgagtcacgaggtcgtgcgaagcctgccagaagttttccccccattcgggcaaccctttgcaattcacaaagccgatcgcccacacatggccacttcaacgctgggggctagacattgtcgggccactacccatagcccaagggaacctcaagttcaccttcgtcgccgtcgagtattttacca

SEQ ID NO: 62415 - DNA, 704 bp, Zea Mays
ccaatattgggaaccatccacaagtgtgtcaagtattgctcaccaatttctcaaatataattgtgcctaaaagtaaaggactaataaatacttcaccggacaaacatcactcgtcagcacaagacacctctttgtttataatttaatatattgagtaggacactactcaatatagattcaacgcagacacttaaatgtatgaaatcaaccatgaaagcaagagcagacatcacactcgcattattcaattgatgcttgcctttcatatatcaaggcataaaaaggtataaaggtggcctttgctaggcaacctagagaatatatggagtttcttcaacgatttcctcattagtgtttgggtccacgctgatgtagataacaacacgaatagttccgggtgcgagttggtccgcaggcctcggggtctcgttcaaattcacatctagtgactcaaagaatgttacatctgaccgttgttcttctattacttcaattgcatcattaatctccttgccaataaactcgggccaactggtcttgtccggcatagacatgatcacgtactatccttagcttttctcacttttgaaactgttataatgccaataagaagcaataatcgagcaacgttagcgtaatgaatagaaacataatctgttgttttgtgctaatgctatcatcttttcatagtaagaagatgtctt

SEQ ID NO: 62416 - DNA, 680 bp, Zea Mays
gggatttggttcaagagaatatagctttcagggtatggccacttgtagagagctgggatatgccgaaggagaccaccgccgattccactgaaggtggcctggtccgattgaagtataccttcagatttagggagaagtttgatgagccaaacgatgactggctgaagtgtatcgaagctaccagtgatgagctacttggggcatactccaaggccgaagacaatgccttgtccgcagctttcgggggttgaagcaagaaaagattaaacagggtattcgatgctattggcttcgtgtaccctgattatcgctactcgctgcgagggcaagggaaaaagtgaaaagatgccgcttcggaacctaccgccttggtcaccccagctaagcgaagagcaaaaaggtgaaggttctgacacaccggtcgcgttacattgaaccggccgtagtacctgaatttggcgcgggaacctcttcagccgccgaagcagagaaagctgcttcgattgtgcagagttccaaagagccaactgtagtgccgaaggtgcctatagtcgggccaaccatatccaaagatgataagactgaagagccacaagcggaagaaacaaagaaaataccagaaatcctgagcccttcaacagaggcagaactgccgaaggtgcaaaaggcttctgccggaa

SEQ ID NO: 62417 - DNA, 668 bp, Zea Mays
caagcgcttccagcgggatcccgctaatgatgagtagtcggatttgcagagggaaagcaagagttccgcagggaagtggcttatcatattttggttttgtaagatacttttaagtactacttgtcaagcaacattacaacttatctgcatgctactttccctttgctatgtgtgttgtcgtcaacttcttccctggtacttggcccctctgggatgtggtctcgacttgtcgaggctggatgccagtatatttaagaaagagttggtgacctggcccccaagaggttatgtcaagtgggacccagacctgcacacaaccttaactagggagtttcagtagtgcacccatcggacccattaactggtatccttcaccctttgacttacgcaacaggacctataggatttagactgggaagccaacccgtgtgtctggaccccctgggtcacggcttctaattactagggtactcgtcgcatggtggtggagtgcgtaggcttacggtacgggaccaggctaagcagccacgctgctccggacctctccatgagacgtgtgtcctttctttagagccggacctcgggtttccggacctacaggactatagttccgggtactaggacacccgccacagagcggtggagcgtgtgggcttagggtactggac

SEQ ID NO: 62418 - DNA, 315 bp, Zea Mays
cacaagacacataagaaatgatattctaaaatacttgcactttaaaagcataaatgttaccatcctttgactttcctccaagttgtaggccttgacttttcggcataggttgattctttattacctacaacatcaacactttcctcgagatgatatgagtttaagatataacaattcaaaataaccttgggtcaatcttggatatagatcattaaagattgatagcttgagttaataaaaattgaattgactcgtttaagcatcccaaagcttcataccatcttcgtctcctgcaaagcttgtcaagcatgtttt

SEQ ID NO: 62419 - DNA, 332 bp, Zea Mays
gcaaagtgcagttgagctttcttctcgtttgaaataatcggcacaaaaataatcagaatgaattcatcaattctcgtatatagtagctagactcaaacaagtttaatttgtaagcgaagagagattagggaaggggcaatacaaagaattgatgagctagggccgggagtgttgacatcccaggttgatgatggaccaataacgacctattagacggaatccaatccattacaatatatggagagctaaccggacagagacttgtatggttagcctggtgactatcaccaggcccacgaaaagtagcaagcaacaaatagctaatggatgtc

SEQ ID NO: 62420 - DNA, 393 bp, Zea Mays
gctcaacaacactaccgtggagtagctccactatagagtttgtaaagtttttaaattgtttgggttgcaggaaactccagctttaaaaatgtcagacttaacatgaaatgtctattgtacccttcaaatttgatcccatatgtcatacactcatttccttgtgttcttctttttcattggttgctaaaccatgcacaccatcgcttggacaacacatacttgacaaaataatcacgacatgttgatgtttgcaccacagatgaataatggtggtgggtcgagtttgttgtgacaactctccatctccttggcatatcgtcgaacgccttgtgcgctactttcatcatgtcgcacatgctttccttgcacaatagttgacgcacccacattgcc

SEQ ID NO: 62421 - DNA, 293 bp, Zea Mays
tgcctcatattcaactctgactgggtaaagatgtacttcaagcttttatgatctgtataaatatgacagatattccccagcagataatgacgccatattttcagggcatgaaccacatcagctaattccaggtcatgagttggataatgttcctcatgccggtgtaactgtcttgaggcgtatgctacaactcggccttcttgcatcaagacacaacctaaaccactgcctgatgcgtcacaatacacatcaaatggcttttcaatgtccggttgagctaaaccggagcagtg

SEQ ID NO: 62422 - DNA, 787 bp, Zea Mays
cctggaatctcgacctgtgtagtcattgtacatgatctcatggttgcatgctctcttggtatttctggactgaggattccaaatgataaaatcagataattttttggacttccaagaatttaatgtcccgaatattctgtagaaatataaattggccactagctgcaaatatggagatggaggagggagtgattgttggtgaaattgttataatgtaagttaagatctaatatcttggctagtgaatgcaactcctacttgcagaccgggtaataccccagtggtgaagatggtgaggacgtgaggtcccttgcaccaggtcacgggttcgacccctggcactgcactaaaaaaatccccttgttgttcctcactctgctctcgggttgcggcttggatgtgcgtcagtgcgtcacccttggacctgtcacctgtgtgggcagcttgacccgacccgttagtgatgggagcaaagggttcgggggtttctcggtcgggactggtaccacggcttggcggggacggcaatgggatagggtggggctagggaccagttccccgtccctgccccgttcccctaaacctattccccgggccctgtttagcctaacggggacaacctcatccccgtccccgcggatgcctgttccccatttgggcccccatggagaatactgtaacaaaaaaatattcactgtatgataacaattacaaatgttagaatcccgtgttaggttatggtcagtccccgtgtaattatctgtatacccttctgtgtaatgggctt

SEQ ID NO: 62423 - DNA, 516 bp, Zea Mays
gtggaaagcgcgcccgcgcccgcgctggcagctttgcaaaaaaaaaccttggcttattgaataactagaatctgggtcatggcaatatttgactgagtcgctgacagattacaagaaaccccctcacgttctattcccttccacactgaggtccccgacgacgacgagcgcggcagagctccggcgagctcgtagaccggccgaacggggcaaggactggcgctcccgagtggcagacaccgaattgaacctcgcccgagcatttcccccaacctaatttcatgaatggtggtctaccttgctctgtccacggtgacagtgcgaagaatcaaaggaacaacacgttcccgacgattggtggcggtctagttcaatcggatgagtcgacgagcatcacgggtatgtgagatcactcaaacgagggagcagaaggtttgaactgacctcaattgcactggccacgacgagggtgttcttgcggtgggatgaaccgatttggggaaaactcgaaaatcg

SEQ ID NO: 62424 - DNA, 1591 bp, Zea Mays
ccgacatagagtaacaggtatatgctgtcagagccacacatgaggacaaatagggacatgtctgacttggcctcgatgaagcccaatgagaccaagtaggaggcaaagaggttgtaccatgtctatggtgtctgtttgaggtcatacaaagagcgattgagcttgcacaccatagtagatgaacggaatcgatgaaactatcggcttggatattgtacactgtctcggtgagtgtgccatggagaaaggcgttcttgacgtccaatttgtgcaccgccgagttctaagagagcgctagggagaggacagtctggacggtgatggacttcacgaagggctaaagatcttatcatagtgcactctaggatgttgtgaagccttgaaggacccaacatgccttatattgttctagtgtatcgtcagtcttgagcttgtaccgaaagaaccacttgttggagaacatgctggtgctagggggcatggtaccaggtcccatgtgtggttggctaatatggtatcatactcctccatatcgtggcactagtgaggtcgaggagcacactatgggcaaggacaaggtaggtagagtggcaggggtcgtgagcatcggtcgatcgatgggacaaagaacaccgaccaatctccttgtgaccatcgagtggatgtggcaagggtcatggtggatggcgacatgataatacacttgttgcttgtcacaatagtggcctaaggcactaggctgcacatgttgctggtagatgcgtatggggtcgacgaagcgagccagaggagccaataaggacagatcagtgtgtgtgccgcggtcggagcttacagggccacacatggcacagtcaaaggcaatggagccacatgtggcgtgggtggtgtcagcgggacgctaggactataggtggcatggtgggagatggtctagcaggtaaaagaagaggagggacgtccatagggtcagcatccaagatggtgtcaaggttagggggcgacgagctggcaagaagatagatgaccatgtgaaacaccacatggtgggatatgatcacatgttgagtcgtgagatcgaggcatcaatacccattatgatcggaggagtacctgaggaaaagacagcgagtggagtggggtgttatcttatggggagcggtggcatatatgttggaatagtaggcacacacgaagacatgaaagtactcgtaggtgggggttatgccaattgccgaagaggacgaataagggaatggcgtggctgactgccttggagggaagccaattgaagaggttggtgacagtgtttagtgcctcaacctagtagcgtgcgagaaaggaggcctataacaggaggcaacatagcatgttagtggtggtacgaatcatgcactctggctctacccgacctttctgcggagatgtgtagggacacaatagccacaaatgaacaccatgacagaggaggaaggaacaggaggagtgatcaaactcgtgaccattgtcacactaaacaacatggattatatgatcgatctgggtggagatccaagcaaagaagtgtgagaacgtggcgaatgtatcagac

SEQ ID NO: 62425 - DNA, 712 bp, Zea Mays
ccaccggggatcttggattgtgttgaagccaaccaactcagctacgaatccgcggccgaagtcaccttccccgaaccgacctagctgggctacaaaagccatggtgctggttcccatcccttcgcctgtatcaaatggcaccatcgccaaataggggagagtgggggaggattgtcgtgtggatgtctcacctctagcatcgctccggcatggcgtgtggtcgtgatgactcgcaggggccgttcgcacatgttagtgaccttcctgtgcggagacatcaacaggaccgcgacgaattgcttaccaaagttgggaaatcaccgccaactgcaccatgccgtggtaaggcttcatcatgtcatcatcgctggtgaggaccttccccatagttttgtactgatctctgcttcgtgttgctctattcggtttcgagtttggggctctaatgcacgaagtacacgacaccggccatggcgccgcagctgatgggctctcatcgtgcgtctggccaccgtggggtggaagatgagccattgaccgtaggatcatatccggatgttccagattagaagcacgttaccggtttggctcctttaaatcaaacctgttcatctcggaacggaggggcatggatagatcatgcatgtggagctttggagctattgatctttaatcctctggttgtgatcatgtattgggtcggatataacct

SEQ ID NO: 62426 - DNA, 427 bp, Zea Mays
caatttcttacccttctatattatcaccgttagtcaacatttattttgactctaacggacaggataaaatggtgaaattatccttgttgttctgaagtcaaaattgcagtcccttaaatagcatccttacgaaattgcgatctcttaaatgctactgtttcgaatcttaacgtatccagtaattttaacacatccgactagagaaattacgtccgagtgacatggatccattcttcttcggatactcttcctcctcctctgtcactactgtccgaaattcaattctgctttgctggaccagtaattttagaaacaaattacctccagaggactccgaagtgaaagtgagtataacgacatagtccaatcagtaccaaaaaaaaggtggtgtcattatagtccatatccgaccgctgtccatgcggag

SEQ ID NO: 62427 - DNA, 576 bp, Zea Mays
cctgtgacgtctctaactactgcacttgcctctcctgcgtcaacacctgaagggtgtgtccccggatccaccgcgtcaacactctatcgcgcatggggggggggggggaaatagtgccgggatcttctgagaatcccgtctctccatcgcgtgccacacacggagtcttcggatccggtgtgtcgtccgtttgtcacgaggttgatacaggtggatcgagtgcgactgttgatcatgaggccacacgtgcacctggagtgcatgatgctgcacgtggcgttgaagctcctgttgtcttgtgaccacgaacgcgtctgcaagcaggtattcgacaacccaaacaatttaaagatggcacggtaaggtatggccttctcaccactacaagtgagcctaacaatctagatgaagcttttgggaatccaaattggaagagagtaatggatgaagaattcatggcattgtaaagcaacaagacttggtggcttgttccacaggttcgaggacgaaatataattgactgcaagtgggtctataaaatcaagaaaaatatcgatggctctatagaacgctaca

SEQ ID NO: 62428 - DNA, 691 bp, Zea Mays
gtgcatcagctctatgccaagtttagtaaatgcgagttttggctagagaagatagccttcctcgggcatatattgactgtagaagggataggggtggattcgttaaaggtagaagcagtgtccaaatggaagcagcccaccaacgttagtgaaatccgaagcttcttgggaattgcaggatattaccattgctttatcaagggatatccagcagtgctagaccattaacaaaactcctcaagaaagacaacaagtttgtttgaacccataaatgtgaagaaagttttcaatacataaagaagaagcttacaacctcaccagtgctgacgttaccagatatccaccagggttttgttatcttctgtaatgcatcaaggcaaggcatgggatgtgtactgatgcaaaatgagaaagtcatcacgtatgtgtcactgctactcaagccacacgagcaggattatccatcccacgatttggaattagcagccatagtgcatgccctcaagatatggagacattacttgatcgggaacaagtgtaatgtgttcatagatcataaaaagtctaaaatacatcttcacccagccggacctcaacctccgtcagggaagatggctggagctgatcaaagactatgacattgaagtattttaccacccaggaaaggcaaacatggtggctgatgccctca

SEQ ID NO: 62429 - DNA, 341 bp, Zea Mays
gtggctgtgctgctaaaatctgtgatgaaatgcagtcagtcagctggctgctactctcgccagctcctagccaaaacctgcgtgcgaatacgccaagtgggcagcggcagccggttgcaagctacttcttcgcccacgcatgcatgtatccatccagcctctctggatagtcgtgactcatacatacttccgtagcttcactggggttggctgacggttgacctcaggtcaccggtgagcggtgtggctctgtgtgcgctctacaggcactgagggaggcaggcaggcagcgccaatattttagggcggcaacggcaagccaggcgccaagccaagccaag

SEQ ID NO: 62430 - DNA, 399 bp, Zea Mays
tttctacgaattaaataagttctaggagtcatttttgtattaaaatgcatttactaattaatttattcattttaaacaggttctagactgggcctcgatttttggaaagtgcaggggctacggggtaaaactcctaagactcaggaaacagtagagagggacggtgggttggtttctgtaatttgtaggggcttatttgccaatcggccgagccgaaggggtatcgggagtctacaaccgtcggatcaccagtttgcggcccagattagatctaggtttttaaatgaagcagtaagcaacgctgacccttagatcagatatcaacggtcactcttctatctaactgagatcgtcccgcgtccatcggattcacgatctacggctgcggttagatgcggc

SEQ ID NO: 62431 - DNA, 540 bp, Zea Mays
cgaatgcgttgtcaaagttgggatccagtcgggcccaggctccacctgggattttcgtccaagaaatatcacagccgagcatcctcacggatcaggtggaagagtgcaacactttgagtcagccagaggcagatccgaatgactggagagagcctatcatcaggtacataaagaatgaagaatagccggatgacaaggttgcagcagaacgcatcgcaaggcagtcgacccactacaccattatagggggcttactgtacagaagaggtgtaggagtcctcatgaaatgcattcactcagctactgggagacaattgttggatgaaatccatgctgggcagtgtggggtacatgctgcatcaaggactctagtcgggaaggctttcagatccggtttctactggccaactgcaaagagcgatgccgccaagttagtccagaagtgtgaggcatgccaattcctgtcgaagcaacagcacttgcccgcgcagcagatgcagaccattcccatgacacggccgtttgcatgctagaggctgg

SEQ ID NO: 62432 - DNA, 569 bp, Zea Mays
tgcaggagcggcgcgccagaagggtgtggcggcggatccacggattctagagcttgccaccagagatgatgtcgagcatggctgggacgtgcaagagctgaggcggcgcggtgcatagggttggggaggacaccgatttataccctagactaagtccgagcaggagggcgttcacctgagatcacggccgatccatggcaactgcgtggtccaagtcatacggggaagaagacccagaacatgggcccggtcagtcagcggcgcgaaggacggccgacgtgcgggccccacacgtaggtgacaccagtaaagaagggatgggccgcacagtggggctcgggagagtgggccgaaaacgcagatttgagcccaaactccattttcccatttttccttttattattttcacttgccaaattccaatctgaatgtgttttgtgtttcaatattcaaataatacgcagcatacaaagactatagtatgaatttattcatgtttattttcatatgcttatatttaattatttgatccctagagcaattgcttccattatgcacatacacatcat

SEQ ID NO: 62433 - DNA, 602 bp, Zea Mays
aaaatggacagcattttatacccttgttggaggataatgtaaacctatttagttatgctcgtagcagttgtaaaattaagcatcatggggtgattgttttgcttgcacctgattatgcccgtagcccgtaggccgcatgaggtgattgttttgcttgcctaacttcaggcaatcaggctcatttatactatctcctaagaatcataatcaggcacgcctgcttgtggcaactgacaatcgacccagactattcattaccctcgagcttgacgcctgaggattttgaatcgatgccgtacgttgatctgctatctttctttacaatcaatctggcaaatcacaaatgccaactgctaagtgctacttctgcctgtgccttcaggctggctccaacagccaacaggtaaaatgggcaggcaaaaagtcttttgccttgcgtatggagaaatacctgccctcttgtttccaacaaagaagacaaaatagctggatggagaggagtgaatgataagagacaaacatgtgaccagatgtcagagtcacaagaaaaaatgtctggcttccaccgcactatccagtttcgcttttctctctcctttgct

SEQ ID NO: 62434 - DNA, 677 bp, Zea Mays
tccctggtttcggtgcgatccagtctcgggcaacccaggagagtggtccacagaggattgtagaagcgcgctcgtggttcgctagtgcccggggcggtgtggtgtacctagaattgctcgtcgaagcagggaggcatcgccttcgaccgccttctaccgtggacagggatctctgtggcataagcagtggtatgacctaccccatcgcattcaccattctttggggatcatgtagatgcacaccatttagctataggggccctggtgccgcaaacctgttgttcgccggttggtgcgccaccgccgagctcgccgctgttgctcggctcgattcctgggaggaaggacgggtctcggccgttggatagccagggagcgaccgtgatctgagctgtgaataacccttcgaccgagagaaccctagccatagatctctgttcggtcggatgagatcgaatcctgtcacattaaaatctggaccgtcagatctagatccgagtgaccacgctacgtaccggttcgctggattatggatctaatcctctccgttgggatttgattggacggtcgggattcatccacactccattcagttgcacaaatgcaaataaaacactctattatttagtattcaacccgccatccacaggaactgttccctgtgccttagaaatgtt

SEQ ID NO: 62435 - DNA, 496 bp, Zea Mays
cgaaggtctgtccttcggcaattccgcagtaggtctcgatgacgacgaagccctcatggcttcaaagataggcagggtgtcttgtcgtgcctccgaaaaggtaggtgtgatcaactttgtagtggtctgaatcctagccatctaagcaaactagaaaattatctagaatgacttagacgaagctggtttccaaaggagtggtggatgggaagcttcagaggcacataaaattttggcagcaggtagttagggtagtaaatgtgatctgcactcacccactcggccacttttatactaagaaatgagcacgaagtggcacgaatctcttaaaatgttcccgcgcattacctccaacttctccccactgatttaactccaagatcacttgcttttcttaaattgatatatcttcttcataataagcttcaagaagttgtttttcggatctttcgcataaggcctccaaattctatttttttcaatctaagctcattac

SEQ ID NO: 62436 - DNA, 642 bp, Zea Mays
tcgaaatcccagagagacctcgttcttcctagcctatggggccgaagactgccttcccctaaaaaacctcatgggctcaccacgggtgtaggcttttgatgaacgcatgcaggaacaactgcagcatgaagacgtggatctcgtcgatgagcgaagatccatggaacctggagcatctccataagctttatctgtaacggcaggacaaggaatgagtttcttcctttataactaggcagcacctatgtgaggttcagtccggtggggtccatcctcatcaacttggtctctggcatacatcgcacaactcaagcctctaaagttataaaagaaatatttacccccagttctgtctttgcggtaattttatttcccatttcaacttacaagcattatttcttctaacccccatgtggttccctactcttgttgctatgatgatattcgaatcgagttagttggctagtggcttagttttgtggccccttactgctgaaaggggtttagaacacaggaagccagatccaaagaaaaggtacctatttactggggtggtccggagtacctgcatccgcttagcctggtcctataccctaatcttgtatacttcaccactctgcaacaagtgctctagtacctaga

SEQ ID NO: 62437 - DNA, 622 bp, Zea Mays
aattgaagatggattgtagctcaacaaatttgatacagaggatggatcaagttgttacataaattctagagcaaatcattcccaaatatgctcgtttaggtgctctgaataaggttcccatggtacagtaagtaaagaagatcttcagatacatcgcccctcgccgccggtgaccgtcgcgccgtgattcgcgtcgtcactacgattggtgccctctggtatggagataatcatggccgcgtaaagatcttggcaccagataaactcaaagttgatcgacggggagttcgccgcacccacttggattgcggtcggccgaattggtcctcgccggtgctggccgcttaccgaccatgcgccacgtgcccgggcgtcttaccatgtcgcagttggtcacattaagcatatccgatgatcaccggtgagtccgccacggtgaaagccactaatcgtttgcgccagtgcccctcctcctctccgaccgctgcacgtctccatcgaattcaccggccaccgctcaagcacgctataaattgcgcacaccctcggctccgctaagtagtcaagcacctaatccagcaactcgtgcctcaaatcatccactagagcgcgccaatttcaa

SEQ ID NO: 62438 - DNA, 895 bp, Zea Mays
tatttgtgaagagattgatggtggttatgcttgcgatggctgaaaggcgatgatggccgagggcgagacaacgacgctggagttcacacccatcacggagtgaggcctccgatacctcggcctagtgtgtatgtgtggtatggttgctctgctttcctggatttactcagccattctgttcgatatggctttatactcaatctccagtcgtcgtccaggtcgctgatctaggtgtcgtgtgatgcagacgctcaagaagaaggcggcttctcaaggtcaaagaaggtgccccatttctactccttgtttttgcttcgacacttaccgcatgaggattgcatgtcgcttgacatcatgatttatggttgtgggaagcatctcattacctaattcgtatgtagagtaattcatatatagaatttacctaacttggggttactttgtgtattatgcggatgatctgagaccagtacttgacagtcttattatatccttgttcccccttattattgtttaatttatttctttactattcacccatttagtatcctctcaaaaataaaatgtatccatccctttactattccacactagatggcaagtctcaccagctggaagctattgctgattcagtttgccctacctgatgctccaaatatttgtagttattgtgcttaggtgtatgaccttaacggcgattttaggtatcttgggatgattctggatgtttaggtctatcccaccgcatgctacacaagtcaattttgtaggttgctctgaaatgttcatgtatagatacaactgttgtctaggccaatttcttgcacttggtgcaaaggtaattctctcatttttaagtagaatttgttagggactttgctaacttattttggac

SEQ ID NO: 62439 - DNA, 631 bp, Zea Mays
cacgcagcatccaggactctagttgggaaggtcttcaggtctggtttttactggccaacaacaaagagtgatgcagtcgagttagtccagaggtgtgaagcttgccaatacttatcaaaacagcagcatttaccagcaccgcaactgcaaaccatacccgtaacatggccatttgcgtgctgggaactggacatgattggaccatttaagaaagctcaaggaggatacactcacgtgctggttgccattgacaaattcactaaatggatagagtacaaacccatcgcttctctgacttcagctaaggcagtggaattcatacaagatataatattcaagttcggaataccgaatagcattataactgacctgggatccaatttcactagttcagaattctttgatttctgcgaacaaagaagcatccagatcaaatatgcatcagtagcacacccaagagccaacagacaggtagaaagggctaatggaatgatattggaagcactcaggaagaaagtcttcgacaagaatgaaaagttcgcagggaagtggatcagagagttgtcgtatgacgtttggagcttaagaactcaacctagccgagctttacatggtgttgggggccttcggc

SEQ ID NO: 62440 - DNA, 1834 bp, Zea Mays
ctcggcttagctaggttcgcagactccagactacataagtcagttctctaatccacttccccacgagctttaaatttttgtcaaataccctctttctgagtccctcaagtatcatcccgtaggctctctccacttgcccattagctcttgggtgtgccacggacgcatatttgacttggatacatctctgttcacaaaagtcgaagaattatgtgctagtgaagttcgatcctaggttcgtgatgatactgttgggtatctcgaatttgaagatgatttcctggatgaactccactgccttggcgaagttagggttgcaatcagcttgtactctatccactttgtaaacttgttaatagccaccagcacatgggtgtaccctcccttggcctttttgaaaggtccgatcatatccaacccctagcacgcgaagggccaggtaaccagaatagtttgcagttgttgggctggtaaatgctactgtcgagacaagaactggcacgcttcgcatctttggactaagttatctgcatctttcttcgttgtcgaccaatagaaacccgctctgaaagccttccctactagagtccttgacactgcatgtactccacactgccctgcgtgaaattcttctagcaaatgcatcccaatagctgagtggatgtatttcatgaggactctagcacccctctcttgtatagtgctccccctatgacaacatagtgggtcgactgcttcgcaatgcactcgacaacggccttgtcgtctggttccacctcatttttgatgtatttgataattggttctctccagtcattcgggtctagcttcacctgctccattgccttgcattcctttattggccatgcgtgatgctcggctgccatatttactggacaaagatgccgggtggagcttgtgcctgacttgatcctagctttgaccgagtatctattgctgtgttgcgatctctttctatgtagtgaaattctaggccttcgaatttatcttcgatcttcctgaccgcagcgtagttgttacccattgattcggaggagcagtcccagtctttgttgacttggctgatgacaactagggagtctccgtataccatcagtctcttgacgccgatacaacaatgttgagtccatgtatcaaggtctcgtactctggtgcgttgtttgaggctgggaataggagttgcaatgcatacttgagctagtctcctctagggtcgatgaagaggatcctgacccctgcttcttgcagtttcagcgacccatcaaagtacatcttccaaacttcaatttcctcggggttctcaggaagtacatattctagtctttgattgcctcggcgacccatcgaagtccattctgatatgaagtctaccagaatcttgggtcttgattgccgtgcgggggtggaattctatgtcatgagctccgagttacatgcccacttggcagtcctccgtattgcctctctgttgtggagtatatcgcctattgggaaacctgtgaccactatgactttgtgatcatcaaaatagttgtacaactttcgtgttgtgaggagtaccgcatatagtagcttctgaacctgagggtatttgatcttggagggtccgaggacttcgctaatcaagtagacatggtgttgaactggatatgcatgcccttcttctgcctgctcgactaccaatgtggtgcttaccatgtgagtcgtgcaggagatgtatagtagcaggtgttcagcaagctgagtagatgtggccggaggggtggcttgagaaccagcggggtggtcaagaattttttgagtgcctctagtg

SEQ ID NO: 62441 - DNA, 444 bp, Zea Mays
cctgaactctacttcagccagctgacatggcgatcctagttgcatgttgcatagaggcctggtcatcccgaagctcagagacaacggactcatgaccatcgtcatcagtttccctctctttttctcatcagctttcatataaaaccattcatttttccagccagtcggccactgtgtacggtagctgaggactggcgccttcgtatccttgcgatacgcaaaattgtaacaaccaaaattttcgtgaagaccatctgctctggcctttgtctgatagtgcagctcgtgcactcgatagaatgcttcggcatctaggctcatcccttggcttcggaggacccagatgaagatgctaagcctaacaatggcgttaggggtcagctgatgaagatatatttcgaaattctttaggacttcccctatcatctcgttcaaaggaaatca

SEQ ID NO: 62442 - DNA, 1478 bp, Zea Mays
aaaataagttctataaatgtttttcatccttcataaaacatatccctttaattttaataaataataaaaaaaacaaatgttgaattatgggagaacctttaaacttacatccaaaatggtatttctcaacaatatgtttacttcacatttgaaatatatatttctaaataacaataaaatactccctacaaatataacttgaatctcatgctggagttttcactgtgcatttataagttgaactcaaaccttgagtgtgaaattgcaaaactaaatttgaattaggaattagaaaagaaaaaaaggggaaaatggacaaactggattctgggctgaattccctccccctcagcccaacctggctcacatccatgcggcccatgagcaccctgctagcccaattcacatcccacacacacacactgtcaccgacttgtggggcccacgattcagccaccggctcagttatctcccacgcagcgctgctccgcggaccgagaactctatcgcgcaaaagcgcggtctttgctccactgccgtgtgggtccactggcaggcccgtcttctccccaagctcgcgcgccccgtgaccgaactccgcgcaacagtcggcggggtcccgacccccttttgtcagatccaatctcgcgaggttgttgggatgtttcggcctccatcggggatataaaagtctgggcctcgccccttgaatcccatgccgcagccatggtcccgtacgggtagagcgaaccgagagagcgagagaagagagaagagagaaattgatcgctggctgtcgaacaggactgggcgggatttgttgaccttcacgtggcaccaggcgcatagcagaaggcgtgcccaggcggctgagtgacctgggagggcgagatttctcgccggggttagatttccgccgagcggtcgctgcgcgatgcgggcagctccaccaacgcatcgaccttgggtaagtgctcctccagctgattccttttacccctggaacctgtaggaccttgcggtagtgtgtgagcatcgtgtgtctgccgaccattgctcaccagagatcctttattagtagaccgccgtaactcgagtattgccttgttctcctcaacgttgcgagcaatatgcacgtactgggtttcgcatgatccctcccatcgattaggaccgatagtagattggttgaagcaccaccctgaggtttggcctcgccggcaatggcgtcaccgtggtgacaagcggcgctgccgcgctcagcgccgggttggtcggggaaaaaaatacctggccatggatctaccaacggacgaccctgattagacataggttaccggttcggggaggttgatcctgggcattggtgttagatcgtgtgatctgcattgtttcggccagcattaaatcgggtccgtccatctctgatcgagcggtcgggattgtgtacctgtttgtgtttagggatggtctaatcc

SEQ ID NO: 62443 - DNA, 577 bp, Zea Mays
gtggcaactgctgctattgagttgcatcctcctggggtgcctactgttctggctgagcacgcctcgcacctctgcgcctgttctcaaacatctgtagaaatcacacacatatcagatctgactctacagtctttcagcataagaaaagatatacgaaaatcttcatagcactgaacaattgatcatcttcactgaaaaattctcaaataaagaggaaagtggaaataaatggattacccaactaaataactcactttattaataactacaccaagttgcaggggatacccacaccttggtgacaatcattacaaagatccaacttcattacatgttcatcatgacaagcatccaacataagataagcaaactaactctaattaagactggctagaataagacactgaattaagcattattacagactcctactccatcgatctatggatctaaatctatccgggtcctgcagcctagggtaccatagtcgaagtgaccatggggcggtgaacgataaaggtgttgaatcccgacaagggcgggagaaccaccatgaagatagtggcgtgccgcacat

SEQ ID NO: 62444 - DNA, 482 bp, Zea Mays
aatttctttgttcctagtttcaacaacaacacgacaagcatataagtaacgtcattagtcatacctaaaattctttgttttgagttttgacaacaacatgacaagcaggtgcacatcatcattagtcatacatgaaatcatttgtgtcaagtctcgacaacgacacgacaagaaagtgcgtggtagcattaatcatacccaaaaacctttggtttctactttcgacaacaacactataataatatgtccaacatcattagttgtatccaaaatcctctttcaagttatgacaagaacacgacaagtaggtgtgtggcatcattcgtcatacccaaattcctctgttctgagtttcaacaacaacacgacaagcatgtacgtaacatcattaatcatatctagaatcatttgttttgagtttcaacaacaacacgacaagcaagtgtgtagcatcattagtcatatccaaacgtcaagttcac

SEQ ID NO: 62445 - DNA, 397 bp, Zea Mays
catgtctctccactatatgtgcatgataaagccaagtcatgactcctaagaggagttgcacttacttaggatcttgatttccaagtttggtgtactttgctcaagttaaaccacatgtgatgatgggcaggacttgtgtagtcttgagtgaagaccctaagtaacaccaggggtgttacataagtataccgcttcgggcgatgggatctatgccgttggatcggatccgagagcttgggtttcatcagggcgtgggcgttttgggaccgcagatctttaatccgaagttccaggtgtcgtatgggtccatttagtgatttgatctaatggcaaccgtcggattgtgatcgggcggtcgaagattgaggataccccttcgcggtgtaacaattgctaa

SEQ ID NO: 62446 - DNA, 644 bp, Zea Mays
gcgttggggtcgcagtcgttaccgactgggtctgatcggtaacagtggtcggtggttattgtagccgtctatgattggtctgaattatttcattcgtttgaatttaaaaaaaccaataaatcaaaaaaattgaaaccactgtaaaaagagggaggttgtttggatttgttcacacactttcgcctttaattctcaaaccctctccttcattcacacacttttgtctccattttgtttcagctattttcaaacctccatttcgatatggattcgaggtggagtctaaactatgaaacattcacgaacttgttgagcgatcaatctccgcaacatcttgagaccctactggtgtggagcaagtatttttcaacgatctttcttccatccaccatcatcgagatgaagctcatgctcatccccatggcctctgcaacctctctttccatacccgtatgctcctcttccatatccatatcgaccatgtatgatgcctctcctactattgagcatccaacaaatgacactcctcatcctcctagcgctaatgaatccctttccatcgatgtttgtcctcgacaacctttcacttatcggtatcctcctccatatgcttttctttgtggtgctcgtgcttcttgttctac

SEQ ID NO: 62447 - DNA, 1145 bp, Zea Mays
taaagtgccatctaaacattgatattcttctaaaatctactagacaactagttgaaaatcaccaaatgccttcatgtgtttcactcccatataatctaaaagttctaaaccgaataagagggtcttatattcggcttgattgttagtgcaataagttttcaatgggcggatcactctgcccatcacgttcgacgacccctccaacttctgcacttaacgacttcagttagaggttgtgaacttcctagggtcctacaacacaatactttgaaggtcgtgctatgccaagtttatggtcgtgccaaaatacacctacctgaagctaaagattctcgggccacacaatatcatcatgacttatgcttctatcaacaccgtgtacacttgcgaatgagctaactgcgagctcgcgtcgacgctggctagtctctaagagaccatctacaaggaccttgatggcgggggcgacacatcatccaacaccgtagataatgctaaacgtgtgtggatcgatgcctaagccagacacgagggagacggagggaagcacacatgaagaatcttagcatacaagtttggtaagaaaaatgactttagtcaaaaccctgtattcattaagagtgggattaatgaaaatcaaaggatgcgcgactctcactctgccttaatgatgcacgacttcaccctcggtcagcagagcgtaacgaccaagttgccaagacagccaggccgacacgctctactcgagaaaggggggggaacctaagctctacacctataaaaagcacactggctagcaccgctactacaagaaaccatgaacacaatgacaaatgaagtgggatatagctatcaaaactagaatcgaaaagaagggcgaagaattaggagcaagagtaatgtatcacacataaatactgtcctcctagagaaattgttacaaagacgtagaaataaaaggaacatctaagcatcaacgggcgacactagtctccaagggccagtcagcaggtcttaacatcaactcggtgagtagtcgagcgtcagggcggacttgatcttcaatggcgtccaactccttattgctctggcctacggcgaaaccttccgcgatcacaacttcgtcgatctcatcaaaatgagag

SEQ ID NO: 62448 - DNA, 350 bp, Zea Mays
tgtcataaggccttcagtactatttgctccttcattggcacaagagatttaattcaagaacatatagcattcagagtatggctgcttgtagaaagctgggaaatgccgatggagaccatcactaactctagcgaaggtggtttgatccggctgaagtatacattcaggtttggggataagtttgatgaaccaaacgacgactgactgaagtgcatcgaagctacaagtgatgaactgcttgtagtgtattccaaaatggaagacaatgctttgtccgcagccttcgggggtcgaaataagaaaaggttgaacagggtattcgatgctattggcttcgtataccctgacta

SEQ ID NO: 62449 - DNA, 433 bp, Zea Mays
cgcatgactcaggtgaatagtgcagccaaggcccaaggacttatgtgcggaagtttttctttttcgaatttcatttcacagatttggtgtcgaactttagaaaatcgtagtaaatcacagaaaaatcgtaaaatagtaaatgagagctttttggaatccttgggaaattgtctatgcagtggatctatatgttggcatattttattagaaacttttggctatataaattcatttttgaaaataggattagaaaacaaatgaacttgcttctctccatagttttaattataaaaatccaaaaatgatgaaacttgttttgttggttagatgttgtcatactctagctaagaaaaatataaaacacatatggtgttcactgttttattggtgtgttaattaaaacatgttaaatagagaaaagaagattgatttg

SEQ ID NO: 62450 - DNA, 758 bp, Zea Mays
aaaaaaaaaaaaaaatcattcagtttgttaactacctctatgatttggcgatagactgttaccatccggcctgtagcatgtagttcgttatatgagtctcaaccatcaaattgcagtgccaaaaaaaccacagagccaaaggctcccacgtgaggggggtctaagaagggaataaactgatgcaaaccgtccttctacatatgctttccttctacatatgctttgaacccgtgacctggtaacttagtgagatagctcttaccactgcactaggctgcccttcatatgaagttaacacagttgccacaaatcccgtttcatatgaaggtattagctgtgcaacaagctaattgctgctctctgcccaataagttatgcagttgggagtaggttgcatccaaggtatacttgttggtacgcctttctttgccaaacctagtagcaggaaaggcatttaacaaagaaacaaatacattgcctgaaatctagaatacaaagtaacataaatggaggataatagttgatggaatcgtttttaatcctcacttaactcatgtttgaaggagatgggaaggttagttattcacataagaaatgctaatagagtaatgtgacatcttttattaaggtgcatggaattattaagtgtcttgacttatttcatagtgtctctaaaaaaagtatgaaggtggtcctatatgtgaatgttgcattgcactgacatccttctagaaagctggttctccaacattggattc

SEQ ID NO: 62451 - DNA, 481 bp, Zea Mays
ttaaggtttggtagtgttggggtaaatctgacagtgccacgcacgctagagaaactagaatgacatagagttttggcacttggtttctatacctacatagaggtggatgttggagtttgagcattagaagacctagtaaacttagcgaactcatagattcttaatagtacatctctattataaaaaaacaatataaatatgaaatgtagtccatattagcatttaggtccctcttttgccacgtgtattctccctttttatttccttcctgttacaacaattgataatcaatattagttctctaattgtatggtcattttcaccaaaacccacaaatagggcatcattgcacttacatgatgatcccgtgtaggaggcttgaagaagaggaagtgagcacaatgtcatcaacatacatgaggagttacatagtttcactaccatgctggcaaacagagatgtgtccaacttagactcaaca

SEQ ID NO: 62452 - DNA, 2740 bp, Zea Mays
ccgagggagtggatacttgttttttattgtaacttcattcaaggatcggtaatcaatacacatcctcatacttccatcctttttggtgacgaaaaggacaagtgctccccaaggagatgagctgggacgaatgtaccatttttgttggagctctgtgatctggagttttaattctgctagttcggtgggagccatgcggtatggtctctttgcgatgggcacagcgccagggattagatctatgtagaactccacttctctttctagcgtcattcctggccattcttctgggaatacatccatgaattattccaccacagatatgctttctgctgctagattaaacaccaatggatccttggtgggtggctgagcctgacaagaaactgactttccttggtggtccatgagaaggatggtcttacttgtgcaacttatgatgcccttgtgtttggttaaccatccattcctaagatcacatcaatcccttgggatggcaagacggttaagtctgccaagaacactaccccacttaaaagaattctgacttgggagcatttgagctggcataaaaggtgtgaccctggggttcgggtgaccaagaaaatttctaggtgggtagagggaatgccatgcttttccacaaaactagtggctataaatgaatgggatgctcctgaataaaaaagtacagtagcgggagtaaattcaacaaggaactcaccgagcactactcccagagcttgctaagcctcttgagcatcgacgtggtttactcgtgccctgccatgatactgggtcttgttctgctggctaatggaggagggtgctttggaggcgggcgctggggcattcttggggccattcaccgagttggagtaagtaggtcctaatgcctttaactgggggcagttattcttgaagtgactagggtctccgtagtgccaacaggcattagctggtggttggttgcttgcgactgagggggcctagaaggagctctaactctgctgactgaaacgtgatggagtgggtccagctggcttgttgtagcttggtcccttgggtggaaacccaaaggatcgagttctctggtgccggtcttgctgctgagctcggaggacttggaatttcctcttgaggttacctttttcttcttcccttgccctctccacttgtatggctttgattgagaggtgcgagaagctgaggaaatcttggctggcgagaatggtcttgagttctggtcttagccctttcaaaaagtgggccatcttcttggcttctgtgctgacgtcgtcaggcgcatagcgagctaattatgtgaatttgtgcacatactcactgacagatcttccaccttgagttagttcctgaaattcatcttccttgagctgaacgatcccttggggcacatgatgttctcggaaagcagtttcaaattctgcccaggtagcatctctgatggtcatgctgaaggtatcccaccaggatagggccatcccgaaaagttgatgagcagccaattgaacacgctgattcttagggcatccaagggcttctaacttcctttttatcgtgcgcagccagtcatcaacatcgaggggattgctggatccagcgaatgtgggaggcttgagcctcagaaaatctcccatcctgtcctgtggtcttccaccattcgggcgctgattctccagacttctagtgaggatttcaatgagtctggtttggttggctagcacttgggctaaatctaatggcagctctggaggtgtgggaggtgggtctcactcccttctccaccggcttctccttcagctcctaggggaaaccctcctccaatcctggaggcggtaggcgtggttttatccgaagccatctgccagggggagagaattactactatgcatatgccaatttttttcaaccaagttattttattcatcacataagttcattacaagcatacagttaccataagccgcactacacgcgagcgctttctaaggtacttccaaagtccctttctaaagtgtccccaaattccttgagaaggtcgtcaaggctagctagggacatatcctcgacgtcggacaagttctctatcctggagggaggtagtgttggaggggcttccttcttccgctcagtctggcatccttggctcttggtcttctttcggattttcttcgtgggggcgagcttctttagcttcttatcataatccatcttcaggttcggttggcttcacgagtttggcctcttcaccttctgctatttcgagactctcttggagggacgccttctccttttaagttccttgacctgttgctctaagctttccacccgggagtttaggtgggtgtagtgggaggaaaggtcatcatagtggttatcgagagtgtggagatatccggccatgtagacgatggtggggtcatcctcagtaggatctcttcctgagagggcctaaagtcttttcctccaggcaggggtatttttgttgctaggtgggaagtaacgaaggggggtttcaaagaccactctgctgtagttttggcatagctgtcggagggcttttcgggcaacattttggcaagtgtctgggaagcggtgtccggtgaaggtgacttggaaaggagggtggttcgagtagcttcggctttctcccaggtagactgccatagagcacttctcagttccattctcgtggtattctttccagacgtactctgac

SEQ ID NO: 62453 - DNA, 1352 bp, Zea Mays
aaagagttagcctaccacctagactcaaaaatctaccctgccacccagcgagccttttttccaattttcaatcatgggcacccagagacttttatttatcttcttattatcaattggcaccccaagatatttcatagggagacaaccaataggacaggtgaagatatcagcatacaaatagtcaatttccttagcttttccaaaacacaaaatttcacttttgtgaaagtttagtttcaaccccgacatgctttcaaacaaacacaaaatgaatttaagatttctggcaccttctaaacaatcttgaataagaaaaatggtatcatcagcatattgtaggcagcaacatcattttggatgatatgaggaatcaaaccctcaatcagaccctcaacttgagctttatgaatcatgcacgccaagccatcagcaaccaaattgaacaagagaggagaaaaaggatctccttgtctaacccctttatgagtggtgaagtaaggccctaatgtatcattagttttaatggctactttgccacctcgcacaattctcattacccaatcacaccaagtactctcaaaaccttttttccatcatggtatagaggacatgccaatttactttgtcataggctttttttcaaaatcaattttaaggaccacaccgctttgatttttcctcttaacctcatgaagaatttcattaagggagatgaccccatccataatgtatttgtttttaatgaagccgtattgtgagtcacttatcacctttgtgatacaactcgccagcctgttattcaaaactttggagataattttataacacacattcaaaagacagataggtctgaagttcttcatgtcaaccacattatcaacctttggtaacaaagtaaccatcccataattcagtctttcaatattaagatttccaacataaaaatccttgaataagttcaaaatatccacttgaatcaaatcccaaaagttttgaaagaattcagcaggaaaaccatccggaccaggagcactattatgcttcatctcgaaaatcacttttttaatctcattaatggaaaaaggagccgtcagaaatgatctgttagtgtccgacaactgattcatattgagattagaaatattaatactagatagaacagaagggccaaaaagatctttataataagaagaagcaattttattgataccttcagaatcattcacagaaacaccatcatgacacaaaaatgggattttaacacgtcgcttccgacctttcgctaaaaggtgaaagaatttagtattttcatcaccctcattgatgaatttctctctcgcagtttgtttttt

SEQ ID NO: 62454 - DNA, 706 bp, Zea Mays
cccgagctcaatccggaccccaagccaagggcagttcgaacctgtcataaggaagggcggtcccagtcactactccccacacaagacaaggaccggtgttgctacgtgttctacgacatgtgacataagccatcggggaaagcctaacgtcaacctctaagtgtgaagcacctctgcattaactggggatgagacatatacctgctcgccccagtggtaggtggtgcatccgtagtacgcaggccacacagtaactcgcacgttaccgaggcatgaccattgactccctgtgctgcatgagctgctgtcattatgactctaattatagcccacacgttaccgaggcaaaaggagataggcgaagaagacaggccgccgccgcctaagcacccctacgagtggtagcgcatcagcctacgccgcaacctacacctgcgccctgctccaattagacggggcaagggcacgaaaagccaagagatctactcgaagaccaagagaagatattcatccaccccaagccaccacttcgccttcgacatacctagcattagatttactaggctaaaactccgtccaccgcaagccaccacttcggctttgacatacctaacactttatcttcaattggttccacaagtggtttcattccacaattggtatcatttacatgtcttctccagattttgattagactatatttcat

SEQ ID NO: 62455 - DNA, 1018 bp, Zea Mays
ctcgccttttggtgagggcaatcccagcatggtcaacctggccgccgtgctcaacaccaaactggaccacacccttgacgagttaggcaaggttcgggcggaggttgcggaattgcgtgctaagtgcgcaacacgccactatttggatggtggttctccttcccctatcgggattcagcacctttaccgttcaccgccccgtggtcgcttcgagtatggtaccgctgactacaggacgcagaaagatttggatccatagatcgacagagtcggagtctataataatgttaattcagtaccttagtctcggtcagtcttagttagagttagtttgcttaccatatgttggaatgcttgtcatgatgaacatgtaatgaagttggatctttgtaatgattgtcatcaaggtgtgggcatcccctgctacttggtgtagttattaataaagtcagttatttagttgggtaatcccattatttccactttcctctttatttgagaagctgtcagtgaagatgatcaattgtttagtgctatgaagattttctatacatctttccttatgctgaaagactgcagagtcagatctgatttgtgtgtgctttctacagatgtctgagaacaggcgccgaggtgcaaggcatgctcagccagaacaacagacaccccaggaagagcagctcagcagcagttgccacccccacccccgatgaccattgagcagatgttcctgatgcagacccaagcagtccaagcaattggtcagaccttagcagcaatgcagcagtagcagcagcagccacccccacctcaacttcaggtgcaagtccagatgccacaggtgcccagagacaatcgggcagaattcatgaggggctacccctgtgtctttgcctattctgctgatcccatggacaccgaagattgtctgcgtaccttggaacgtgagttgcacattgctcagtgcaacaatcgtgagaaggtgttgtatggtccccgacagctaaggggagcagca

SEQ ID NO: 62456 - DNA, 710 bp, Zea Mays
aggagaagggcgtgtaatgggacaacctgccctccccaaaacaatgattcataaaaatgcccaagttactactatcttagtagcttcttttatgatgggaggagtataacaaagtaagtggtttgggcaatgttaaagaaattttgagatacgttgaagaccgctcatgaaggcaatgccatgaccataattaccaagatggagcttatcgaaggagaactggggaggttcgccatgaaaagaggagaagagccacaagagacatataacaggctcaagacattagtgaaccaaaagcagaactatagaagcacgggatggatagatcatgacgtcgtccgactcatgctaaggacgtttactgttttagatcctaaccttgtaaacttaatctgtgagaaccctaggtattgcaaaatgatgcccgaggaagtccttggtaagtttgtgagtcaatgaatgatgaccaaggaggaaaggtacatcgacgacgacgtcaacgggagcccccactacaacaaactgcaacccgttgccctcaaagcgatgaatgacaaggagatgctcccaagcaaggtggcacaagttgaggcgatcgacctcaatgaataggagatgtcacttgtgatcaagcgcttcaagaccacactaaaggggcataaggacttctccaacaagggaaaatgaaggggaagcacacctgcttccgg

SEQ ID NO: 62457 - DNA, 382 bp, Zea Mays
gctttcgtcagtatagcaagggagttctatggtttgaagaccgattggttgttcctaagaatccagaacttaggcagaaaatattggatgaagctcatctttccaaattttccatgcaccccggtggtaacaagatgtatcatgatctcatatctttgtattggtggactagaatgaagagggaaattgctaagtatgtatctgaatgcgacacttgccaaagaatcaaggctagccatttgaaggtagcgggtaccttacagcctcttcccataccatattggaaatgggaggacctcaacatggattttattgtgggtttgcctaacacctcccggcaccacgattctatttgggtcattgtggataggttaaccaagac

SEQ ID NO: 62458 - DNA, 481 bp, Zea Mays
caaccctataatgaaaaaatacaattaataagaaaaacattaccactgaggttgtaggtgttttgttctgtttcgttatatttgtatgaaccagtggatccatatcagcttcatcggggcaactttctaatagtacacgaatatgttgttgccttaacagtaattcatgtacctgtgtgtctgtaaactgcgtatcctgctgagaaactggagtagacatatcgggtacagttgggggggccggacacgtacatccttctgtacgtgtcatgtaaacaaagaaaacattgtttaagataatggcatcaaaacgatatcgataaatgattgcataacttttttatattgacgtaaatacattaaactgactaaccagctgtctggggaagaatatcatctgattttgatgtggttttctgcacatcataagcatcttcgttgtcacccgcctcggcacggaggacctcatcaattaactcgc

SEQ ID NO: 62459 - DNA, 509 bp, Zea Mays
gtggaagatgaagttgcctatcaatttaatggagtgttctctctttcttgtatgggtacctctgcaaccttatatagctgactggagagatattcctttatagatcattgagtccactcgagtctacttcatgttgctacaagtattcctattctttcggtgcttggttgccttctctgggttatcatctgagtgattcggcgctctaccacactcgggacgcgtcttcagagttcaggtgatccctccgtgggacacgcgcacggcgcaccaccggtatacccgtgcagtatccttcgagattttcagctatcacgcgcgccataacttcgattagtttttgtcctacccaggcgaggcccactgtgcgctctattgggcgacttatcacgggcctctcaggcaacccaaggaatgtatgggtgccttagtggcccatgggatatctatctctcacaagcccccatggctcaagcaaattttcgtggacaataggctcgagactccaa

SEQ ID NO: 62460 - DNA, 810 bp, Zea Mays
cgatgacttcgtcaatgacttcgttagcaatcttcattacatctaaatcctctttcataaccgggtcagcttcagggttgtatggctccagtggtggcgaaaggccggctgtaataaagaacataatggtgaattttgaagctagaaacaaacaacaagacaaaaaactttaaaaggatacctataatcatggctcgttcagcagcttcttcagcttgctttgcctcttctcgggcgtcgtgagtttctttttcgttctttttaatggcttcatcgaacatctcacgacctcccttcgtccaaacatcatagtagaatttcccacccagcaaagaggcttcggccgaaggttctttcgtgtcttcagctgagaagatgacttccgcctaggctacggccttaacgtgttcacagccggttttctccaaaattgccgcaacccctcgtgcaccggcgaaggcacagaagtacccacgatcgctgagtatttcttcaaaagcttcggcctcttcgtcgatccactggataaccctttcaggatcaccatggataaatttttgctccgaagagtatgctcctacctttgaaaagctatctttcagtttcttcgtgcattctatcgatgctccgtagcatttttctttggagtcccgaagttcttcaacattcttctgcaccctagccctttccatatcacttatttcttgcttagcctttgcaacttcaaaattttcattcatatctgaaagttttttcttcaaatcttcgacttcagctctatgggcttcgtcgtgggcactaagcttggct

SEQ ID NO: 62461 - DNA, 309 bp, Zea Mays
gatggggcagggcctgggcaagggcggtcatctgaaatatgccttgctgtacccagaataggataaggaggaaaagaattcaggccatttactagctgcgtgtctatctgatgacttgctgtccagtggagatttggccacagctgctactctcctgtacctctatcctacatggggaccatgcaatggaagggtggaacatgtaaactggtgttacccggtgcggtgtccatttagcccagaaactccatccctttttagttgctggccatgaagaaatatgacgcaaaactgcacttcctatgtcac

SEQ ID NO: 62462 - DNA, 608 bp, Zea Mays
ggtcggataatttcagttgatacacaacgtcccctactcgctttaggatcaagaagggtccaataaagcgaggggacaacttccctttaactttaaatctccgcataccccggatcggtgacaccttcagatacacgtgatcaccctccttaaactctaacagtcttctccgggtatccgcatagcttttctatcttgactgcgtagttctcaagttctcccttctcaaacgtacttgttcttgtgcctcttgtataatttctagcccaaagaactacctctcaccagtttgatcccaatatagaggagtcctgcattttctgccatatagagcctcaaacggggtcatcttcaaactggcctggtagctattattgtaagagaactccgcataaggcaaactcttatcccagctaccaccatgtttaagagcacaagctcttaatatatcttctagtacttggttggttctcttggtctgcccatcagtttgaggatggtaggccgagctaaaattcaactgtgtgtcgaagcaccgtgcaacttctgccaaaactgagaagtaaactgtgatcctcggtctaacacgatcttcttaggcactccgt

SEQ ID NO: 62463 - DNA, 1525 bp, Zea Mays
aaaagcataacataaatcgttgtgacacataagaaatcataatctaatgtagatgatatttgcatacaaaaatttggctacataaaacaaacaaaaaaaagtgatatgcttacaagaatgatgatagagcatacgtaaatggttgtagaaacattggtaacgctcctagtatgccacttcttggccgcttggcataaatcatcgaatatgagctggcaccagtccatctcgtggaaacgatccatttcttcagttaaaagaacctcatggttagttattccccagcttgcagtagggaacaacaacctattgaacagtatcagaaagaaggatctgatgcttagatcatcgtcaaatcctttccttaaatgatattgtagagctgcaacaccaaattcttctttggataaaccaagttcagcccttaaattatttgcagcaacaacttcatcaatgcctaatggcttcctcccccagcatttggtaaccccaatataaggtgcaccatttcctttgtaatttttagctacttctctgggccgactcgaattgtcatatcattatggtcaagcttttccatcagccaagataaataagatctactgccaagcgcatcaactctcatatcaagtatactggagaaccccttccgtgcaatagcttgacgttgtctatcatttaaaatctgaatgcttactataacatcttggggattgcatctaacattaagcctctgctgtaaaaatgtaacaatgaataacgtaaacatttacatctgcataatcacaactcagtacaacataatttcacgcagaaaaatgataaattggcattgaccatcaattctaacctgtcgggggggtgatccactgctttcatccgttttgtaactatcttcttcaagatttttggaggactgctatcaaagttacgcttctttgatactggcataaagtcatcgtcctcgtcaccggcatgcattggtttgtgactgacagtattcgccggaacacggggtatgtcgacactaaagcactcttgagtagactgaattataatgtgctttggattagacggaggtcggtctacattcttcatgtatgattttcctatcaaaacaaacaacacatgtacatatcaaacgtataaatacaatcttatggaccaaaaaaaatctgcacatatgcaacagcaaattaatgtagtaagccacgacagcgtacaaaccacaaatgaccattaggttaccaaatacgacatctaggctctttcttgcgtactggccctaaatgacttacgctaaattaacaatgaatttatgctgatttgttttttgatatatgaaacgattgagttactataaggtgacactgatttatgatacaatttgtgtaaatatggcatgcagatcaataactaaaatatatatatatatatatatcaaatgatggtcaatctaaataaccggatgcaactatgtgtgtttttctcatatatttgctgcgtcaaaatcaaaatgtttaat

SEQ ID NO: 62464 - DNA, 576 bp, Zea Mays
cgccatcggtctcgcctgacgctagtggagaactccctagtgatcggacgggcatgtggatcgtgtgccaggaaggaatcgaatgggcggaccgcggtgtggaggagattcttcgccgaagttgtgtcttcgccgcatttccgccgcgcgccgtgggtagcttcattcgtcgttgatttttggtaagtagaccctgcaccatacacactcgtgccttgggttggcatagcaccggtgaatttgggttttggggcgctgtacggcgcgccgttagtgagggcgggggatgttgaagacggatgtggcgcgtcgatctacggtttgacggctgtgattagatcataggttaactcttcgcgatgttaaatctcgcgcgtagattcgatatcgggcggatcaggacggttctgcgttatgctctgtgtgtaccgttcatcctgtatccaacagtgggatttgcatatcggttcacttgtgtcgcgatttaatttgggccatttaaatctaatcgagcggccacgatcctcgcgtaccccttcggccgcaagttttgtaaaagaaaccatgggaaataat

SEQ ID NO: 62465 - DNA, 1161 bp, Zea Mays
gaccctccgctcgttcctcaggcattttcagacaatgaagaaccgcatccccaatgtcacagaggcagccgtgatcgaggacttttactgtgggtccaatgactcggcttttgtctgggctgtcctctagaaggcacccaccacctaggaacaaatgttctgggaggtggacatctacatcaccactcatgagcgagcctaggacctcatcgggaacacaaatcctgcacccccaacgccgaagaaagacataaaccagtagcaggacaagcgctgggacaagaggcctcgggagaaagtgcatgccgctgagctgctggctacccagctccacaccgcgccatgcggcggtgtacgaacactagacgagatcctcgacttccagtgtccgtaccacaaggatatgcgccatatcctatgaaactatcgggacttcaagaactctattggccacgaccaaccattccagctgctaccgcctcccgcaccatgaggagaacctgtcaagcagggtcaaccacaacaacagggaaagggcggtggtggagccttcctgtgcattgacagggaggtcaatgttatattcggaggccacagggcctaaaagaacaaaaggcaatggaagctcaccgatcggtaggtcctggtggcaacccacaacgcctcggccccgtatcggtggtcgaaacacgccatcacatttagtcgagctaaccagtggctcaacttcggtcaccctggcatgtaccctctacttgtcgaccccatgattcaagagagccgagtcaaagaggttctggtggatggaggcagcaacatcaatgtcaccttccccagaatgctccaggctctagaaattttgactgtcgaccttactcagtcaaacactccatttctttggcatcatgccgactgaggggtgtacctgttgggacatctcttcatgccactcacctttggtgccccagacaacaatcggaccgagttcctacgcttcgaggtagctcgatttgattgcggatacaatgccatcatcaggaggcagggactagccaaattcatggccatccagcattacccatacatgatactcaagatgcccgaacctcagggttccatcactgtccactctgactttcaaggagtcgtggaatgctttcg

SEQ ID NO: 62466 - DNA, 323 bp, Zea Mays
tcaggcgctctgaatggagttctgatggtacagtacactaaaaaagatcgcaggttcgctgtatctcgccgccgatgactccgcgcctcgatcctcgtcggcgctgcgattcatgcccggtggagtgcagctaactacacagggtaagaaatatcacacaggagatgaacttggggcactgtttcaccctgtcgccgtgcccacttgcccgaccatgtggccgcacagtcatcgccgtggctgccgccgttcattcggtcgcgccatgccttgggccgttttaccacgtcgctttgagccgtggaggctaaccagtaatagac

SEQ ID NO: 62467 - DNA, 357 bp, Zea Mays
gtgatcaattatcatacctaattgaaatgcatgatgcacatgaatgtgtatagacatgaatagcacacgactaattatcgccataccgaagaggattaaatatttaaagtatttgcgtgcactattcaatacgaagttttcaagttttggttgtaaccggcttatttatattacttatgtttagacactcggaacaacaatcaccatttgacacgagcaatacagaaaacgtctaccactaaaacattcataggatggatagaagcaatttatttaattgtctaaacttcttttccagactcacttgcatatcctacaaactaattataatatctcgatttactaacttcggacacc

SEQ ID NO: 62468 - DNA, 384 bp, Zea Mays
gttcttttgtatgccagataaaatttctccctccacataaattccttaaaaaagattctgcaaacgatctcttaactgtttctgaaatagcaataaaagataaattttgctcctttgttaactctgaaataaatctatgtttaaaagggtctctaaacccatcacaattccaaaacacccctttcatttagactcaaaagaatttgacttaattctcctcatggaaccctttgtgacttcggacatgtcagtacgagacattactatatgtccactttccatgtccatcacctcatctgtattatcctcaaaaagaacacccaagataaagttatccagttccgcctcatctgctctctctcgctcctccttatctaaggccct

SEQ ID NO: 62469 - DNA, 414 bp, Zea Mays
tctagacccagactcctaccagagaggactgtgggttttattctataaaaacataagggctcttatgcgaatttgtcccgcgaagggggtatcgtaggattctggccgttggatcgactacctacggatcaaattagatcttcataactgtgaaccggtacgcaatcaagattctcatatcagaatccaatggtgtagatttcaaataccaaagatccgatcacggctgttcgcccacgatccatcggcccacgattgctatagctgaaacattgctacacacttaatcgccaccgttgatcaccagattaacggtacccggtcgtcttctccaccccggccaactcacaggcggggcgtgccacaccgtgtggcgaagccatagctgctgagctgccgagtactccccacagc

SEQ ID NO: 62470 - DNA, 568 bp, Zea Mays
gggaagggctcagggaggtttgaggaagtgtggcgaacacggccatgggcacaacaccgacataggggcgctgaagggtggaagtccacggcgaggtggcttggcggtggtgcagctctactccggcgagcaattgcgcacgaccgagggtagataaggggaaaataggggcggggtaggttggttacctcgagagaaggctcagggactctcgaacggcgtcgatgtaacaacccaggtgttactcagggtttctactctagagccacaccccgacctattatcacgtgtggattagtggaaccttagacgaccacaagttaacaacaaaagggccagctagtgttgttatcctaagaggcttaccttgaccatatggtgcaaataacaggagaaaaatttcagaaccctaagtctaatcactcggaccatgtgaaacaaaacagaaaataggaaaatagacaattccttatcacaagttgggctaattatacaagttgaagatcatcaaaatatctatcagagatagtaagaaagtttccccaaaacaaggcttgaacaaccccaa

SEQ ID NO: 62471 - DNA, 485 bp, Zea Mays
ggcattgagggccctgtgtaaaatttatgaagaagaagtggccgacaccccgctcagattctttccgcctttccattgaaatcgtctagtttggatggccaggatgtgtggaagggcaactgctgcttgaggacgaccccacagtcatgtatctcactgcatacctgctcaccctagatgcacagtatgatttcttggcttggcaccaccgtcagatgattgcccgagcaaaagatgcagagaagcgcaaccgtcagctccatgtggatctcaccacaactcaagctcgtgcaactgccttggaaagtcatgaagtcattactgttgaagccctgaagcaagccaaggatgagcacgtccagaagctgatggaggcctacttggtcacccataatcaacgtagagccctgtggatccaagagcccgcttcatccaacccagtttaacccatgagagccgaatatccctagattcttgaaggtcac

SEQ ID NO: 62472 - DNA, 413 bp, Zea Mays
tagggttccacacctttgaccatcggttttgtgtgccccccaccgccctacgcctatctctctctcgtcctcacctctactcaccgccgccaccctccaatggacagggatagggctccttcgaccattggacagggatagagctccaccgccgccaccctccacggcttcactgctgccatcctctcctaccgcccagcatatctcgtagcaccacaatctcagagcatctccttcgaccattggacagggactggatctggactgcagtggtagaaggtagcacaccacatctcagagcatctcctagatccacactcgggtgtcccatcgctcctcaacttctcgtcccagatccacactcggtgtcatactcggcgtacggtgagttttatcccctcctctcccatttt

SEQ ID NO: 62473 - DNA, 428 bp, Zea Mays
gcgggacagaggtcggtgtagtggaagcaagcaggcgaagtgtgtagagcggcccggggctgtcacaccgagcgagaagggtcctggtggcaagatccttcacagaaagaccaaacaggtcaaactccatggaacaagagttgtcaatagtaaactgaaggacggaaagaagattttgaataatgtggggagcaacaagaacgttggataaatagaaaggaccgggaaggaccgcgtcaccgactgaggtgacgggaagggcagagctgtttccaaccacgatagaggacggaagggaggggtgggggagaggtggaagacagaatacctgcgtccggggtggtgtggtaggaggcaccggagtcagccacccagtcagagactgaggtgggtggggccagtgtcattgtggagaaggagttggcgag

SEQ ID NO: 62474 - DNA, 359 bp, Zea Mays
aaaaccaaaataacatagatcaaatgataaccaatccgaagtctagatcgccacttgtgcctctgggagaaaaacgctatggccaccctcaccaaggtttgtgatcatgttgcaaccataggtcaaacctccttcctctgtagaataacccaacgtgaaagccaatgtgttgctgataggataacctacaaagaggaacaatagagtttttcttttctaaaacactaaatcgtttctacaaatccaaagaacccaataccagaccgtcgctccaagtagaaacacagatttaaacattttattaaggccctaaaaccatctccaaacatatattcatattatgcgatgaattgatcggt

SEQ ID NO: 62475 - DNA, 585 bp, Zea Mays
ctcaggttaggaatggagttttgtacatgctcttatatggaggagagaggtaggagtgagtatatataggagcccctaaaaggtagctaattgtttgacctttctgctcaaatattggttgagccggtattgatgctagctgagccagcatcgagcagagaagaaaccggtccaaccacatgctaagcagcaaggtgaacagggagagaaaccggctgagcaaggtctaaaaccgcatgagctggtttccaatagagaggaaactggctgactactcgactgagcagggagctgagcaatgagaaaaaccgactgagctgggtttaaaatcgactgagccggtattcagcacagatgatctcgatcgacttccgggatgagtagccaagtggactaggaaaataccggctgagccagcctgaatctcggctgaactaggatttccatctcggctgaacaaccctgaatcctggctgaactaggattttctatagagcaattttggccaagataaacttaaaaatgttgtactacatactttcactaaggattaatgaaagtcgcctagaggggggtgaataggca

SEQ ID NO: 62476 - DNA, 1250 bp, Zea Mays
agacacatattactggaattaaataaaggggaggaggaaaaatactaacatcgaaaatagtggcgtttatattcataaattggatcatatttgatactgggaacctgaacttcaaaataggaaatttgaatttgaattaaatattgtaaacttgaactagagaagagaatagaaatagaaaaaaaagaaaaagaataaatccgtgcgtttgggctgagttccctgattcggcccactagcttcatacgacccaacttcattttacatgcgaggcccacataactcccgcgcttctctccctctctatgtctgcctggtggtccccactagacaggttcccaccgcacggtctgcgcgcttgtggatgacacgtgcgggcccgcctagtcagtgtcttcctttgccacgcaggttgcatctagtggctgtcttgcgggccctctctgccaggtcgttcgtcctcaaacagaacacgcgaactccgtaacaaccctaggcgaacgccgcaatctccgatgatgatctctgcgcgtatggttcgaaagatcagggcaattccgggcttctgtatcggacttcgccgcttggctataaaacctaggccatgagctcttccataccatcttcattaaccaccgttgtgcgccatggtggggcatgaacagatccgccgctgggggtcatagtcgacggcgtgccaccgctcggtctctggcgattgttcggggagcttcgcctggatgcagtggaggcttccgtaaactcgtactggggaatttgtagctcaggtccctggaattccttgttgtcgcatggtcggagagtttccctgctgctttaaccttcggtaataatgcctctctcgagttatgtattacctccgctccctttttcgcctagtggtgaccgatggggagctcggacttcgatgggcgctttccgtcaatgccgccgccgtggcctgcttggtcacctggtccacgccgccgtctgagggttatgagggagaagacgataccaggcagtgtgggccatcggatcgtgaatgggtggtcacgattaaatcgcgatacctcttcacttgatgggatctggaccgttgtaatcggatcagagggagtagatcagatcgcgcctaataaaatccatgacgttgatgttggatcgggcggtccacgtcgcgtatccgttcggttaatgtagatttaatcgtagccactgatttatgatcgggcggctctggatgcttg

SEQ ID NO: 62477 - DNA, 1473 bp, Zea Mays
ctttggaactctgcagatccaaaaatacaaagattttgcctagggtcaacacatcaaaagtctagagctactataggagtacaactttgcttaagggattaagcattgtgttatacaaaaaatagagataattggccctaaagtttggctgtcagataatacagaaactgaatatggacggtcagtgagttttgaagaactttaggcttgattcatgctcaaaggagtaagcaactgaacatgatctctatagcagaattgtagtttgtatatagggctacaagtttgctacaaacagattagcaagttgtcatgcaaaaaatcaagaaaaatgcctctgaagatcctcggtcagaacaactgatgaagcttctaatggtacagtgcactgaaatatcccagggttcagtcccactcgccgatggcgatctgcgtgcctggatgcacgccattcactgcgattcatgcctggcacgccatggatattcgcggggaggtagctttggacgtgtcgcgatctcgtggacctagcccgagcctagtcggagataattcaccggcagccaccgtggctcggtcatttccgccgccgtgtcgtccatgcctcgctcctccctgactgtgtcccttctttacgtggtaaccatgcacgaacggtgtaatccgcggccgtggatcatagctggactaccgcgcctttaaatagccccgccacccacggcgaggtattcacatcttcaccagtgaactcggttgaagcgcaaattcgcggaatcctctccacctctccacatcttcaccagtgaaaccatagtcctttgtgaccgtgtagccccaacctcacctcctaattccacccgaacccgtcgcggtgccattttcccccttttctatcaccgacgagcgaaaatcctccgcgctcagtggccagctactcccaggtctgctcctgctagttttaatcgtgtttcagcacctatatacgctcgtgatactcatcggctccaccctccctgcttggccacgctcaatcacctggaacacatgaacttgtgttcggcattccccgccaccgtggacacactaagccaaggccataaccactcaattaaagctcgttctagggttgtctcatgtccataatacttgcctagtaattaatttgggcagccactgccaatcttggcgggtccaagcagcagagtcgtcgacggtgagcacgccgtagttttggatctatttggagaagaaatagaactagaagggtatttttgtaagatgtcagtgactctaggaatagtcccgggaacactttccaagttgtttaaaacatcaggggccttttcgcaaaattggcagcgcgggcgcgggcgcgcgcgtgctttcccctttctgcaggccggttgggctgaattcagcccaacactgtttatagtttttcctttcctttttctgccagggttagggcatttc

SEQ ID NO: 62478 - DNA, 325 bp, Zea Mays
gtctatatgatatctgagacgaaaggatccctaacccaccttatatagtccaacgtgtttagggttacaagtaagagtccttttcttgtgtgctaagttgatctgccgctgttgggcttgagtaattcggctagccctaaattgggacctctgttgacccatgtgttgaacccacgtcgtgaggccctaggggatatctatcccccgcactgacttggtggaattttgccctaacggtttcttactagttaagccagctgaatcacagtccaagtcgttgatacttcctaaaggtgttgcactgcctataggtgataaacctgac

SEQ ID NO: 62479 - DNA, 298 bp, Zea Mays
tgcgaacaatgaatctgttctacaggggatcgagcagaccactactttgtgaacagtgtatgcccctcaacgcaacacttaatcctagcccgacagccaagctctcgccaaagcaccatagtaacaagcaacagtcatcatgggaagagaactgataaaagagagagatagagcagcaggtagggaaaccataccttttatctaagtcatgtcatcggtattattttatcttaagcaaaatttagggaaaaggcagaattaaaacctgcaacttatatgttgatcgattggaaggccc

SEQ ID NO: 62480 - DNA, 304 bp, Zea Mays
attcaatcccttgcataccggtttgggttgcatgtgggcacccttggattgggatctcacggctaggactggcctcagtttattcagctgcgcaaaatttctaaaagagcccctcgagtctagagtaatcaacccgtggtccggccctggtcaaagactaatgcagcggggtccaaaacattataaaaatagccctgagctttaggaatataacaccccatgtgcaggaaccttataatctaattcttgacttgaattttagtatagatttaatctaaaaagcttaactaattcattttaactc

SEQ ID NO: 62481 - DNA, 317 bp, Zea Mays
caaacacttgcatactgtacttcagagactgcgtgaccatcaattgtatgctaagttgtctaaatgcgaattttggctgaaggagatcaagtttttgggtcatacaatttctcaggatgggatatcggttgatcctgagaaggtgcaagaggtaatggattggaaacctccgaccacaataaagcagattcggagttttctgggactggcagggtattatcgacgatttattccggatttctccagaattgccaaaccgatgactgaactgttaaagaagagagtcaaatttgagtggagccaaaagtgtgaagatg

SEQ ID NO: 62482 - DNA, 628 bp, Zea Mays
ggaagaaacagtaaaaatgccagaaatcctgagcctatcggcaaaggcaaatttgccaaagatgcaaaagaactcccgccgcaactcccaagaggaggaggatggctagcatactagacgctgttatggagattacaaaggccttgacccctgctcctattaagaaggttaccgaagttgccaagggccaggccaaagctgaagctgagcctacaatgcccattgagacgaaggctattgcgcctgaggacaaggatgatcagcaaactttagataccgggatgacagcagggcaaggtatgacagaaaaagcaaaatctcctgcccccgaagctccagttgattacatttatcgacatgctccagggaaaaaattatccgaagaagaaatcctggaaggcagacactatgcccaaaaattgaaatatccgaagggagccttagtgtttaacggcactaacgaagatgatttcctgtactgtctcccggacaacaaagaaatatctgtttgccggaagatagctaaaagtatgggatttccgaagcttgaagaaggcctttcagttatgtcgaaggatgatcttgctgatagcctcgcatacaacagtataaaggtatataagttaac

SEQ ID NO: 62483 - DNA, 441 bp, Zea Mays
gcgactgcacccagacgtgccttccgacgctggtgcaatgggagccggaccatcggggacagcaggtgaaggacctgacggggagttggacctttttaggcctcctccttccatgaaccttgctgacgaatggtctcctgcagtaggaaatgaagaaaccaagaatgacgaagactagactagtatagtttagatactatacctatgtaaaataagtaatgaagtcatgttgtacgcttgagtctgtataattacattttggaaatgtaatatgatggtatgtactggcaagttatatttttcacaaatgtctctttgcctcagatgtcatcacggactcgtgcgcacgatggtgcggggacttcccgtggtcgggaggacactcccaacctgccgcctgtaccaccaacactggtcgaggctatcacttccttggtcaat

SEQ ID NO: 62484 - DNA, 814 bp, Zea Mays
ctccatagtgcctttgtccaactcttaactgtgattactgatggccatgtaaaagatataacaaaaattataataggatggatttttcactattaatataacagttatctacaacattaaaaagttgataataaacctttccagaataagactgcctcatagatattttagaaaacatgttaagttgaatgtagataatgcaacataagtcgaaataatcaaatgcacaagtctaatgaatgtcacataatttggcagtctagttaagggcaatgtctatcaaagaacaggttttggcgaatacattattgatatatagcaggaactttttagaaatatcccaaaacatggagctagtatgcgacaattataacaaaacagtgtgtgcaaatggcatagtgaactactcatcgtttgttgaaaacagaaacgaaatcttcagggtacctgaaaaagaataataactatgatgtataatctttagatggcacagtggttacagcgatgagccatagcaataattagctcctgaggcaaaagcatcggccagttagttacctcctcacagaacacgacgagaataacaagaattttggtacaccaaaaccatgcagtaagactgcaatgaaggtgataagactgcaatgaaggtaatatataacatgtaacaaaggaccaaaggagcgctcatccatgaactcgatccacccatcgtctacacttctaatgcaaaaccatatccttacagccagacacatatcatgacttactgctattaccctatgtgttcaattgttttacacaccaaaacaat

SEQ ID NO: 62485 - DNA, 504 bp, Zea Mays
tgaaagtgaggaagacaacaacattctgagcccaacgaagcctagtcatattgaacttggaagatccaccgtaacagcagaggatttggttgtgatgaagaagcttgtctattttggggaaaatgacgatgagctgatccgttttgctggggaagaagtagttccagaaccaaaggaagatgatgttgctgtgtttaaaagcttcttcaaggcggggcttcggtccccctgtacaatatgataggggaggttttgaaaagatttgaaatatatctccatcagctgacaccgaataccattgttaggctcaacatttacatatggggtctccgaagccaaggtaaaagtgcaaatgccaaagggttctgtcgatcgcacgaactgcactatcagacgaaggccagagccgatggtctacacaagaacatcaggtgctataatcttacataccagaaggataccaaggccccggtgattggctatcgtactaaatggccaaccggg

SEQ ID NO: 62486 - DNA, 391 bp, Zea Mays
cgctgacacacgtcacacaatgcaacatgagtagcaacatctcttttcaaaccgtaccaccaatacttttcctttagatcttggtacatctttgtacttccagggtgaatagagtaagccgaatcatgagcttctctcaaaataagttggcgtcgatgtttgatttccggtacatagattctctttttaaaccataatgtgccttgataatcttccgtgaaatctggggattatcccaaactaatttgtgtcttaatttctttgattttctcatcagactcttgtcctttacgaatctcttcttccaaagtagattcaacttccataaccgttgcttccatattattgagcattccaaggttgagtcactccattcccagcacaattcctg

SEQ ID NO: 62487 - DNA, 414 bp, Zea Mays
gcccgtgcagggacgttggtgctatccaatcaagagatgtctaaagactattcaaaagaaatgtagaaataaatgcaaaatcgaggcttccattgcagaggcatacatcatagaggaggtgtcaaacttcacaacaacttactatggtgacaaactgccggcgtgcaaaatccaccccctcgttacaatgatggcggcaatgaatcaaaccttagcatatttcaagaccaactcggaagtgcaagtggttcgacaaccaagaccctgacacatgaagagtggcgccatatcatgttatatgtattgacaaaccttgaagaggtgacgccatacatggaacaatttcttcatgaattccggtgtcgatcaagggacccaactgcacaggaatatgatacccttcttagaaagggt

SEQ ID NO: 62488 - DNA, 732 bp, Zea Mays
gcactgaccacgacgagcttggttctacggtgtttttgaccgatatgggggtgatcccaaattgaagttctctgggagacaattcaaggcacgagttggtgtgtgggttgcttgactaccttgcggagccaacgacacactcaatttataagagagaagagcggtggccgatgaatttagcgaagacgcgcggcggttagaggagggggagcttactggcgcactggattagtgtcctattaccgtggcagtcactctggtgatcaacggagagcgagagcaggtcacgacgatgcggtggaaatgcctagacacgcggcacaaggccggaatgcggcggtcaccggtgtgcttatccggttccaccgcggcgagctctgtatggtggccggaatactttactggccggaacttatccacggtgatgatctttacacgacttcaagtgttatccagttgatccaatcgcgaatcacaccggcgagggcacgaatcgcggcgggggatcgtcggcggtgagatgcgttggtgttctgatcttgttcaggcactgtaccatgggagtcaccatcagccgacctgacagagcaagttcaggtctagatttctccaaatcttctatggtaccaagcccaaacatctatagcaaagttgttctactagaaaagatctacaactttgctatatcgacttggggcaaattccttgaagttcttgatctgtagagctcca

SEQ ID NO: 62489 - DNA, 1039 bp, Zea Mays
cgatcacgtatcactactaagtccatgcgtgccttatcattgtctttcgttttatcagggaaatccatacatgtatttatgagggcttggcaaaagttactctcttgatgcatgacgtcgatgttgtgcatcaaaatcaatgacttagcataaggaagctcccacaagccacatatgtgagtccagttatgctcctcacaaaaaccttgataccttttcccactattgtctaggacaagtttcctatgctcttctgtaatttctatcccactacatcgcttgggcggtcccttcgtgatgatggtgcccttcctaaagtcgtttctctgccttctgaaggggtgattgaagggtagaaaacatctatggcaatcaaagtaacatatcttgccaccagcactaagacgaaaacaatctatatctttagcacaataaggacacgtcaatctaccacacatgctctatctagagaaaataccatacgccataaaatcatgaaccgagaacagatacacaacacggagattgaatttctgcttcttgaagcagtcataggctttcactccttgccatagcttctttaactctttaatcagtggttgaagcgtcacattgaggcgtacgccaggatgctcaggcctaggtatagcaagacataggaacataaactcatatttcatgcaaagagcaggtggaaggttgtacggtatggcaatgcgaggccaacatgaatacgacgcagcggtcatattgaaaggcgtgaaaccatcagttgccaagccgacacgaatgtttcttgcatcgctggcaaactctggatcaaagttatcaagagccttccatgcatcaccatctgacgggtgcaccattaacccatcttgtctgtccgtacaatctttatgccacctcatgtgcatagcggtcttcctcgagagaaacaaacgtttcactctaggagtgagaggcatgtaccgaagctgtttatgtgcaacctttgtcaccaccttctccccatcttcatttacaagctcaacgtacc

SEQ ID NO: 62490 - DNA, 665 bp, Zea Mays
cctagaatgtacaaggcctttaggcccaaaaaacaggtgtcactgatttatggtagatcctagacgtcatcttgttacgatgtttctgattagctccgggagtattttgatgtggggcagttgggttgaaaatcttatcttcttagctttccaacggtatctagaatgtcgaaaacagaatctgtatgtgtttgggcattcgttttcgcgataaccactcctgcagtacgaacaagatccacgaataaatttgacttcgacttcccttaagcttggaactctatcactggttgggccttgaccatgtagtttacttctatgtactcataaagtaccttgtttctcaattatcgtatagtagggggtacaagcgggtgagagagggatgagctcccaagtctcttatgcatgggtggacctaaagactacgggactgtagtcctgtctaagccttggacatcgtggtggctcatgcctgggctctgacctccgggtcttctggtcttgtcaagcgtgtgtcttctgtcttctgccttccatttggcccctcattgttgcggtcgacatcctccttttataggccagggaggggatcggccatcggtaacttcctcgagaaggagctattatgcccgggtaaaactaagcattttacctaggtgatg

SEQ ID NO: 62491 - DNA, 654 bp, Zea Mays
atgcacgctttggcggttcgccttcttctcctgcaggactatataaacagacaggttgatgagaagttaccacaacattcattaccattgcactgttgtgctgttgaaaattttaaccgaagccgaagctctctgcattgtgctttcgaacaagtgcttcgtcccttaagatcagcttcgtctgaaagaaactgaacactgaaatggccagagtaagatccactgccagggtgtcccatgagggagacgaaactgaagtgactgagacagcatctatatcagaagtgatgaggtgctcaggtctggttgttcaagagggagctactaccgaaggtacctctaatgccgaagctgaacaaactaaagatgaagttgggagtgacaacaaaagtgaagaggacaacaacattctatgcccaaccaaacctagtcatattgaatttggaaaatccacagtaaaagcagaggacctggttatgatgaagaagctaggttattctggagaaaatgaagatggactaatttgctttgctagagaagaagtaattccagagccgaaggaggatgaggttattgtgttcaagagcttcttcaggacggtgcttcggttccccctttatgatatgataggggaagttttgaagagatttgaaa

SEQ ID NO: 62492 - DNA, 451 bp, Zea Mays
ctcatatatggacattttgaccaatccaagggttagtatgccagcatgtacacaagatgtatttgaggaatacaaattttcatataaaactatttagattaaacaagaataaaaaaattcatcaaaaaatacccaataaatatcctagagagcatatttagaattgaaatgcaatactacacatgtgtattcaacctcaagccacgtttgagagatctatcacattcatttcacttcttaatgtgcaaaatctcgtttcatctaatggctttgtaaatatatcagccaattgatcatccgtgccaattgaatatatagtgatatctccctttccaacatgatctctcaagaagtgatgtcgtatatcaattttgctttttagaagaccatgaaacaagagatcttccaagaaattggcaacaaccggaggtgctcttcctatcaactttgc

SEQ ID NO: 62493 - DNA, 277 bp, Zea Mays
aaggttttgattatatcgttagacatgcttcgggaaaaagactatccgaagaagaaatttctgaagccaaacattatgcccgggaattgcagtatccgaagggggccctagtgtttaatggtacaaccgaagatgactttttgtactgcctcccggacaacaaagaattatccgtctgtcgagagatggccagaagtatgggcttcctgaagctcgaagctggcctttgcgccatgacgaaggctgatctcgtagatagtcttgcatacaacagtct

SEQ ID NO: 62494 - DNA, 606 bp, Zea Mays
gtaaaaaccaaagtattagagcaccataaatcatatgtttcacacatttgaagatttgcaagttgaatagtggagtttggagccatttgcaaaaagcaccctataaaccatatgtgacaaagtctgaatttagttgtataaggctgactttggagctctgtatttctaaaaatacaaggaatttgcctagggtcaacacatcaaacttgtagagctataataggagtgcaactttgcttaagtaactaagccttgatcacatacaaagtttggagtaaagggagctcaaagttgagctgtcagactaaggctctgtagttttcaggaaaaacagttgtacagggccgactttgggaccatgtggagctcaatttgaagggtatttgactaaaacctttgtaacaagattaaagttggtttgtaggggagtaactttgatgcagtcgacttactatgttgttgtacaaaaatcaaagaactagtggtgtgaagttgttctgtcataaacaagccatgcgaactgggcaatactgaaagccagatttagagcaccatggtctcagtgagatgcagtcgatttgagagcaccagatctaaaattctatg

SEQ ID NO: 62495 - DNA, 732 bp, Zea Mays
ttgagcttttggacttacgtcgagcgattaaattgtataatgggtactcagacacgctgatcaggctgcgttggtaatcggctgagttatggcattagctgaatattgattgcgccctggcaacacgacgcaatatttgtgtcgttcgaacttggctgcgtcatgtgattgctatgtcccgctctccattaatcggatcgctcccgttgagtcagaccgccatcgctgagtcgcgtattttttgcatgccctgtaggcactgtctgtctgccgcgagccacaattgcgcctgttgtgcatgttgcgtggatttatcgtataccccaattaccgagccataattgtacctgttgcgcttattacgaaggcttgctatactgtcgtagccctgatggccgcacacgcgttgatgccagatacgctagagcttgtactcgcgtggattgtggtgggttgttcaaggtcctgaagtcacattatgtgcaaccttcgtaaacaattttgttttcgttctatattttgtttgattgtgttgtgtggcattatatatttatatatatcgccaagtggccataacaactatattaaatctgagaaattaaatcgaaatacaatgaaacacaaataagttaaatctctgctctctcctcgtgcataaaattttacccgaagtaacctgaagaaattcaatattaatgcatgaaagcctttttggcacagaaaacatcacaa

SEQ ID NO: 62496 - DNA, 402 bp, Zea Mays
ctgcagttctacacttcaccttacacactagaatgagacatactagaagaaataataactatcacgataggcaagctattaattaagtagaacaatgagtcatctactttattcattcgttgtccaagaagaggcttcaagaacttgttctagggtcataatggtggtcttcacgaattcatatgatcattggaaccagttgctgttaatccatggcttgtagcaaatagcaaaaccaatagaattagctaccttgagggaagaagcgccacaaaaaatatagtccaagtattgccttacagtattcagatgattttaccagacccaaatatgagaaaagaacttccaaatgacactcccattgcacttgcaagtcacaaccttcaatgcatggattttgat

SEQ ID NO: 62497 - DNA, 316 bp, Zea Mays
cgaccacaagccataagcgcaaggaatcaacactatgtggagcaggtagcatccgagttgtcacatgtaagcaagccaggtagcctgtgagccaaacacggggagagtttaaatcaccgtcaggttttaagaaaaaaggtgtgttccggctagtcacgaaacggaagctgattcacggcaccgaactcggccacatcaccaccatctcggtttacacacgccagtagagctaacaactcggtgtcatgggttgtggcactgatccgtgttacctcggtgtcacggcccatgacgccgagcaaatagtctaaaaacg

SEQ ID NO: 62498 - DNA, 1106 bp, Zea Mays
ctactgctctccttggcgttgatacctggatcaacaacttatacttaccattaggtgagtccaactgtattgtccgttgcaacgtgttgatcaccgccccatgctgacgaagccaattcatacccagaatcacatctatatcttgattttgaagaactagcatgttggtagggaacatgtgaccaaccaactttatgggtatctgatataccatttctttagtatgcaagagtcctctaggagattgtatacaatacccagtatccaccacttccataggtaactggtgcttcaacacaaatgtccggtttatgaaggtgtgtgaggcaccagaatcaaataaaatacttgccaaatgattggcaaccggaaaagcacccatcataactggttcaccctcaggaatagctttgattttggtataatggacctgacccagtttaagaacaatcttattcttccttgctttttgctggctacttcgagggagattcacaagtgattgccgcgcatccactagcttagagaagcgacaatcctgagtagagcgtcctgacttaccacacttctcacatggtttggcattggatggaatatttttagagcgaatgtctgagatatccggccgatgtgggatgaaaggaacaacagcctgccctacagataactattgggagctaggtaactggggtagaaaaggatgaggatgataaacaggttgataaaaaatcctctgacacttcttgacactattagaggattcttccgcaagtttctttcttttagattcctgatgacgatgaatcttgttatcacccaaaatagcctgactgaccacctcactatatctttcagctgaactagttgccatcaagcactgaagcttcttgttgaggccacgcaggaagtagaactttttcttctcattggtatttacaaaatccaagacgtactgggataggcgagtgaacctctcaaaatattccattacactctcttcttcgccttgcttcaaatctaagaactcattgaatttgatttccatcagggctttcggaatataatgcgctcgaaatacctcacggaactcagcccaagaaatttga

SEQ ID NO: 62499 - DNA, 405 bp, Zea Mays
taggaagccttgagatctttttgtattcacgacatcatgccttctcaatccgaagcaggatcggaaaggccactagattacatccttaatatccctcctttgactcaggttaatcttcacataaaaccactgcttcatccatgaacccgaccatttttctgaaaggttggcacgggatgcctagcatctgacaggtacacgaaggtataacatccgaagttattatgatactgctctttcccagtgaccttagtctggtaagacaactcatgaatattgcaaaagcaatcagcatctggttccaatccctggctccttattgcccaaatgaagatcctaaccttgattaatgcatcaagagtaagctgatgaagaaatattttaaactttttcaagacttcgagc

SEQ ID NO: 62500 - DNA, 341 bp, Zea Mays
atggcttctaacttcctttttatcgtgcgcagccagtcatcagcatcgaggggattgttggatccagcgaatgtgggaggcttgagcctcagaaaatctcccatcctgtcctgtggtcttccaccattcgggcgctaattctccagacttctagtgaggacctcaatgagtcgggtttggttggctagaacttgggctaaatctaatggcagttccggaggtgcggggaggtgggtctcactccttctccaccggcttctccttcagctcctaggggaaaccctgctccaatcccggaggcggtaggcgtggttttatccgaagccatctgccagggggag

SEQ ID NO: 62501 - DNA, 768 bp, Zea Mays
tgtttgttgattagtgcgtgtgattagcattattatttagttcgaggcatattgtatatgtggtatatgtggtttagggaagacatatgtggttccgatgaattttgatgtgcaatgcataatttaattttatgtgatgtattatttgatttttattaattcacttaattttatggagctaatacctttaatgtttttctattgaatagaatgagtggtaggaaaacaaagcacactgctagggggtttcttaatgcggctagcaggatagtccctcgtgcacgttccctgttccaagggagttcttctagccagagcagacagtaggcgttgctgagacaatgccaccttctcgtaggtcaacctgtcccaccaccgccttcaaccgcttgttgtggcgcgtggtcggtgacgaggccgtagtgacggaggcccttgtcatgcacaacgccacatccaggagatattcgaggactctgttgtccccggctcgccgccatatacatgctcagttcaaaagttgaagtgcagcctttcaatcaccatattcgttttgccattttttgttgcagattgggattgtaatccactggtaaatgtacaatatttggaagacacgtaccagttgcatgttcttcctctgaatttgccttttgaagaattgggattgtaatccactgcataagctgtaaggcacggtgctgcatgctacacaacaacctttaccgctggatgcaaggatgtttcctataactcaactgatttgtt

SEQ ID NO: 62502 - DNA, 574 bp, Zea Mays
cttggttgagcttcaccggtgttgcacctccatggtgaccccgttgccatggaggcgccgggttccggtgtctggggttaacgatgaacgcggaccgtcgatccagccgcggacggtcgtgattaggcgatagcttaccccttcgatcgataggattccggccgttcgattcagatcttgtgcgggtgaatcaatggtgctgttttaaaatcgtatccattcgatttggattcggtggcctctattccgtaccggttcgggatggcccctttgtaatcggggtcgtcgatttatgatcgtgcgactacaacacgaccataccccttcgaccggggataattgctaaagagcccttagtttccttttaaataatcatgttgtccattacagggtgaaaaccgttacagtatggtcctgaaatttgcgcagaaacccctgtgtttctgataaatagtggccacagtgagagcacctagagggggggggggggtcaataggtgatcctgtaaaaatcaacactaaatggcacaaacttggtttatgaaatgttagtggaatcaaaaccaaggtgtta

SEQ ID NO: 62503 - DNA, 308 bp, Zea Mays
tgcaacagaccatgcaaaatagctggacatcacaagtaggaaagaaggtaaaagtgagccgtacataacagatgcatatggggccaattagtcagggacatagacatcaaattagttggcgtgtgtcgcggcagccattctacctttcctctcttttggctaccatttttgctgccgcatatggctgcctcgttggaaggctacagtgcggtatgaacaggcaaattgcttttgcatggcggaatgcctggcccgttggagtcagcctgatcgctgaggaggtccattacaccttacacgggcctgtg

SEQ ID NO: 62504 - DNA, 393 bp, Zea Mays
gtctttacaattatttctatattcacaaatcaatttataaatgttttctctgatttacccacactctggattacgcacactatttacagaaaccctaggggctacggcgcaaattgctctaagacacagagaacagtgagcggggacggcgggttattttctggaaatcgtaggggctctttaagaaaagttccacggatgaagcggtgcgggcaaggtcggtcgtccgatcctgatccaatggatccgatagaacgacgaaggggtacgcgctattgaccaccagatctagatccgatggtgaggatcccaccaacctaaacgttatattgcgattaaatcctgagcgcatgatggctgatcaacggtcaagagaagcccgaccgaattgat

SEQ ID NO: 62505 - DNA, 582 bp, Zea Mays
gcattccaatgttctttaccaagattatgcataaatctgctaaccacactaacaacatgagccaaatcgggtcttgtacagatcataacatacatgagattcccaacagcattagaatatggtatgtgagacatgtactctttctcatcttcagtaacaggacattgcctcgacgacaatttaaaatgtgaagtaaatggtgtagcaacagatttgcaattactgggattgtatttttcaagaattttctcaatataacttttctgagatagaaaaagagtatcagcacgacgatcatgctgaatttccatcccaagaatcttttttgctgatccaagatcttttatatcaaattcatgactaagttgagctttcaattcaacaatcagtgacttgtcgtgagaagcaatcaacataaagcagtagatacacaaaagatccattagagaactactttgagaataaccatgtgcaagcataaataagtcaaacctattataccactgcctaggagcttgtttcaaaccataaagagatttctacaaatgataaactaaatgctcttgaccaggagcataaacc

SEQ ID NO: 62506 - DNA, 443 bp, Zea Mays
tccccagcccgcgctggattctgccaatgtcactggggccggagaaccagcaacacagacgcggcctctcctgcaacggcatgacccggtgcttcagaaaatctctgaccatgtgcatcgaggtcagaccaccggccgccagttccttgatcctgtctagtacaggctcgaactccggcacaagggacggtttggccctccattgcttctggtcgagtcttggtccatcgttcagcagggcaaggcagtcgttggcctcagcactgacgatcacccagtcattgcgcctgttctcccacctcgcgctgccaagggtggcgatgtaggcaacggttggatctgacctcatctagaaatagtaggcaccgaggtggtccttgcccttcccagacctcaccagcatgaagatgtggcggaagagggaagtacaggcccccaccccc

SEQ ID NO: 62507 - DNA, 280 bp, Zea Mays
agctacctcagttatcaagaacaattctgtttcagttcagttgcaaagtgcagatggtcctctttggtggttcactagggtgtatggacctcatcaagacagtttgaaatctgcttttctccaagaattaagagatattagaaatacatgtgtgggtccgtggatagttgctggtgattttaatcaaatttacaagccagaagacaagaataattctaatattaacaggtcttcattgggcaatttcagaggccttattggctccttggatttgaaggag

SEQ ID NO: 62508 - DNA, 1497 bp, Zea Mays
ccttcgcaacaaccacttcatctttggagccgattgatgggtaccacaaatcccttcatgtacttcggccatggctaatatagcatcatctgggcccaagcacttaagcaggacgacgttgactgttcggcggtagagttcatcactcattaaaacatacttgaaagttgtacgccgaatgttcttatccgtcctaatattgggatttcataaataattaattatgggtgtcctccaatcacttacatcggcttcattattagctggatcaattaggagaactttcttggcaacctcggaaagtccggagtcttcactcggacggtccgcgacctaggggattggccctgtaccggttatcagattttcagtgttgtgaaatctccatcgctttatccgataacctgatgcatcttgtgccaaattgttagccctatgattctcaactctagagatgtgttgaatactgaattcatcaaaagaatgaattatgccccaacacttttcaaggtaattatttagagtaccatcaaaacattgatattcttctaatacctgttggacaacgagctgagaatcaccaaatgccttcacatgttttactcccctacaatttaaaagctccaagccgaacaaaagagcctcatattcagcttgattattagtgcagtaagttttcaatcggctagagaagtcgaaagatacattacttggtgaaacaagcacgatgtcaattccttgcccttcattgcaaaccgatccatcaaaatataaagtccagggagtaacagtgaggtatgatatgtctagtttatgagtatcattaatccgatgttctacaataaaatctgctacgacctggcctttcatagatttcaatggttcataggccaagtcatactctataagtgcataagcccatttaccaatcctaccactcataatcgggttttgcaacatgtatttaatcacatcggtttgactggcaacggtgcaatgactagacagtaaataacatctacacttggtacatgcataaaataggcacaagcataacttttcgataaaagtgtaccttgtttcagcatccaccagcctccgacttaggtaggtcaccacatgctcctttcctccagtcacttgcgtcagaacagccccaataaccttatcttcagctgcaatgtacaatctgaacgatactcctacttgtggtgcttttaatacgggagccgaagacaaatactttctgatgagatcaaacacttcctgttgttctgccccaagtgaattcggcatcatttttaagccgaatgataggggtgaaggcatcaatcttcccggctaggttagaaataaacctccacaaataatttatcttgccgagaaaacttctgtacttcgaccttacaggttggaggtcacacattccgaatagatttgattcggtcagggtctatctctatgccatgttcatgaatgatgaatcctaaaaactta

SEQ ID NO: 62509 - DNA, 4909 bp, Zea Mays
ggggcgcgaagacagaactaagagcttcgccggttaccctgggacctgtttgatgtggcgccggggacgatgatcgacccgatggcggggaatttctcgccgttgaacaacctccgccatggcgctgctgtacacagtcgccaggactcatcccacctcggtcgcggtaagatgtccatggccgagttctctatatcgtatattttgttttgcacgtttgctaccgatgattggatcgccgcgtgttagcacgtgtggaggagaggagtagcagaggcagagattagaggtagaagaagggtattggggagacggcggcggccaagacagccagcccccaggtactcgtattatctttctgttgtttgatgccctctctgtctcagcgttccccggtttatacgccttattacaactcagcccaacagacctacacaacccactccggcccaaatactttcacgctacgacgctttactcgttgtggacgcgcaacggcttcctcctcggactcgccctccacgtatttgtctgcacgaccgacgtcctggctgttggagctgacattcccccggtcttgaaacgccgcttgtccccaagccggcgcgtgtggaaacctgtcctgtaatgctttcaaatcttcccaggtagccaaggaatcatccatgccggaccataccactttgacttgtgccacggtcacgcctcccttttgtatcagtcgactttgtaacactttggtcggtatctgaagagcatccgtttgagcaggaagggaggcagccaccacctggttgcggctgattgcggctttgagctgtgagacgtgaaaaactggatgaatttgggctgaatcaggtagatagagtttgtacgccgtggcaccaatgcgctggataatagtatatgagccaaaatatctgaaggcgagcttttgattgccgcgccgtgtcactgaagactggacatacggttgtagtttgagatagacacgatcacccacagtgaaaaccctctcagatcggtgcgtgtcagcatacttcttcattcgactttgagctctgaggagatgctgttgtatgagcttggagatcacttctctttcctgcatccactgttccagatctgtcactagaattgccgaattttgatgcagcccaaagtgcttaggaggatgcccatataacacctcaaatggggatcgatccagagatgaatgtgaattggtgttgtaccagaattcagctacaggcagccactgactccatttgcttgggcaggcatgaacgaagcaccgaaggtatgtctcaatgcattgattgacccgttccgtctggctatccgattgtgggtgatacgatgaactcatgcagagttgtgtgctagacagtgcaaacaattgttgccagaaggcgctggtgaaaacacgatcacgatctgagacaatattgtctggcataccatgtagccgatacacttgatccaagaagagcttggcgactttaggtgctgtaaaggggtgagacaaagccagaaagtgtccatacttggaaaaacgatccaccaccaccaggatacagtccgctgcaccagacttcggaagtccctcaatgaagtccatagagatggagtgccaggcatggggaggcactggtagaggtgccagcagtcctggataacgggagcggtctggtttggcctgttgacaagtgctgcatgactaaacatacccacacactgcctgtttcattcccttccaatagaacaattgcttaatgcggctgtaggttactggaaaaccagagtggccgccaataggggaatcatgaagggccgaaatgatttggcgttgaatatctgccgaactccccagccatactcgtcctttatgtcgaatgacaccctgagatagtgtgtacggggcaacagcatccgcggagacagccagttttgtcaaaaggtcctgtgcttgtggatcatccctgtagcttgcaacaatttcttgaatccacagtggagtaccctgagatatgtgcatggcttgcccttctgtcgggacccgagaaagagcatcagcagccatattgtcacaaccctttttataaataatgcggtattgcaaaccagccaacttgacatacaatttctgttgccagacagtatggagccgctgttcatttagttgcaccaggctttgatgatctgtgtaaatatgaaattcagccaattgtaaataggaacgccactgcgtcacatcgatcagaatggccaaatactctttctcatatgtagaaaggccttgattcctgggtcccagagacttgcttaggaatgccagagggtgtccacgctgcatgaggactgcgcctatgccagtgttgcaggcatcagtaaaaatacagaaaggcactgaaaagtctggcaatgcgaggactggtgctgagcttaaggcctgcttaagtaactcaaatgcctgttggtgttccacagtccaaataaacaacacatttttctttaacaaatccgtaagagggcgagatatcatgccaaaatgtctgacgaacttacgataaaaaccagcgagacccagaaaactgcgtaactccttgctattggctggtgtcggccattgttgcacaacagttatcttgtcgggatctgttgatacaccctgtgcactgattatatggccgaggtaagcaatactggtttgagcaaattcacatttggacagcttcactttccagtgatccttccgaagcaagtgcaataccgatgacaaatgagttaagtgagaatcaaaactgggactgtatattagaatgtcatcaaagaaaaccagggcacatttgcgtaagactggagccagggtagtattcatggcctccagaaaagtattgggtgcgccagtgagtccgaaagccatcacgcgaaactcaaattggcccaaatgagtttgaaaagctgtctttggttcttctcctggccgcaaacggacttgatgataaccagccttcaagtcaagcttgctgaaccacttagcttgagtgagttcatcgatcagttgatcaaatactgggactggatattttcctttcactgtgatagcattgaggtaacgatagtcaacacaaaatctccatgtcctatcctttttcttcaccaataaaactggggacgaaaatggactctggcttttttgaatgaccccttggtccagcatttgttgcacctgcgtctcaatctcatccttgagcgcaggaggataacggtatggacgcaccgcgaaagggttagcgcctggcaacagtggaatggcatgatcacactgtcgtgtaggcggcaaaccaatggggtcctcaaaaacttctgtgaactgtgacagcacggcttgcactctgttgtcggctgtgacttgctgtggatcgttggttgttgctggagagtccgaaaacagccgcagctcaatcactgctcccactggtaacgttgacagcataccttgctgagagacataggttccctgataagggatagtaatccacttgtgataccaatcaatatgcatgggactataatgttgaagccaatccatgcccaccactaaatccaccgaagggagaggtaaaaagatgaagtcggacacgaactggtaggtagccatagaccaagttgcttgtggaagatgttgagaacaagtgacgatctgtccattagccactctgaccgccattgggcgttgcaatggttgcgtgcccgtcaacaacgacagaaatcggtcgctgataaatgaatgagtcgatcccgaatcaataagtatcatcaagggatgctgttgaatattgccctgaaaacgcaatgtggagactgcatctttccctgtccatgctgcatcagacagggtcatcaataattgaggttgagtgtcttgcactgtctcactgtcatctggttcatccagcaaatcccacacctcttcaataacttgtagttgcacagtatttggacatttgtgtcccctgaaccacttttctgcacagcgatcacagagaccacgagcacgccggtaacttttcaatgaagccagacgatcagtagatttacccagccgacgagcgtcattcaccggcttgtcaactcctggagtcacgccatcaagtcgatcgtgatcagccggcgcggtgggaggaggccaagccatccggttggaaataggctcgacccgtcggcgtcttgtggattccaacgcctcttcctgcacaagagccagagcgcagacaacatcgaggtttgggggacgttgaaccataattacagctttaatgtcatgcctaaggccatcaatgaaacacatagtgtaatacaatggatctgtgcgtgactcataagctgccaactcgtcaacgagagatgcaaattgttcaacatactcagacacaggacctagctgcctgatatgaaacagctgtctaatgagagattcatgttgctccctaccaaatctctcatgaatgagctcacaaaattcttcccaagacataaaacataatcgacgctctactgactgcaaccagcgataagcctttccctcaaagtgcattgacgccactttgacccacatgtggtattctgtttcgtacatctcaaaataattctcagcttgaacgcgccacagttgttggtgtgaaccgtcaaagcgaggaaaagtaatttgtggtaaacgaccgggtgtcgatcgtgctatgtcgcgtcccgattcatatgaataatactgctcaggcatgaatccagagaggcaattaggatggggagggtgcgtacccttgaccgggccgtgagatggggtaaattcatacccgcactcacgctcccggtggtagtgttctggccgatggccatacggccctgc

SEQ ID NO: 62510 - DNA, 495 bp, Zea Mays
tgccaccaaagaaagcagtggcaactagctccatccttgcaccactcgatcccaatcaggcgaacaaagctctcatcagagaggcaaggaatcagaaaaaggaggccatcatctcgccccctcgtgaggaagagcttgatgaggaaatcagcaaccttgaagccattcaccagcaagtggagaagtgcagggagaagatgctttgcctttcagaactacaaaggaagatcgacgaagcaactgcgcatgaaaatctcaacaacttcagggatcaaggttacgatgggcgagatcatcatgatcttcatcatgaggtgtacaatagccaagatttcctctatgatgaagcctccccattgacactagagctgcaagctacaccatggccaccactgtataggcctcctacactacctatctatgatggcctaacagacccgaagcagttcctcatgagctatgaagccaccatatcatcctatggtggaaactcga

SEQ ID NO: 62511 - DNA, 578 bp, Zea Mays
atgctatcgagaaagcaagagttgagaaaattaccgaagacattttggctgaattatccgaataatctgatggtaggaaagaattcgagtttgaagaggaacatggcgaagaccgaccatcgaaaccatggaacgtatgcttcgacaaatcaaccatgctgaaaggccacattgaggttttgaagaatgccaattacattagtgatacttccattgttaggcttggtggagaagatactacccttccgcctaagaaaaatgaggtgatagtgttctgaagctttttgaaggctagtcttcaattcccactccaaaagatggtcgtggaagtactgaagaaattcaacatctaccttcataagttgacccctaatgccttagtaatacttgagatcttcatctaggtggtgagaagctaaggtgtggagctaaacgcagaatgcttgtgccatatccatgagctccattaatagacgatgacagccatgaaggagcaactgcacaacaactttggttgctataactttcaataccagaaataggcccgctatccagtactagcataccgaagcaagtgg

SEQ ID NO: 62512 - DNA, 725 bp, Zea Mays
gggaactttcagttatctccgttgacgccctcttaaggaggcacgacgagcaggcttctctccccgcacggcctcctctccactgggcaatcggatccccacgtctggtgcggcgattctgctcgcgcgttgaagttgcagttgtcgcctaccgacggtaccctcctgctcgtttgtttaaggcagggggtctctcttcctccgtagctggcatgctggctggctgcatcgccatgtcccgcgcacatcccgctgcttagctctaccaccgttgcgtgcgcatcactggatagatgggcatgtggggacgagttcctttccttccgtgcaccatgaatgttgtgccttttctttcttccttccatctcgctcaactcgcctgctcgttcctctggtctcctctcctatgcctttccatgctccgctgctggcctcctgcttcttgcttaggcgttcttggttagggaacgacaccgacgatgatggagaaggagtaggactactacgacatgctcgacgtcaccttttggttcctacttatttgggggagtattgtatatcttcgagtgttgtactgttgttaagggttattcttccgtttttgggttattctttcgtttttttagaccaggcaggtgcatgcatactgacaagcatcccaacgacccacgcgcagccgagaagttccaggttttcactgcagcttgattcaatccatattcttg

SEQ ID NO: 62513 - DNA, 996 bp, Zea Mays
aactcggaaaacttcatcggggatttgcagctagtcttcaacagccggaggcactaccggtggacgctaaacccagaaaagtgtgtattcggagtaccagtcggaaagctgcttggattcattgttagtcatcgaggaatagaagcaaatccagaaaaatcgaggccatcatgagaatggaagcgccacaatcacagaaaaaggtgcaaaggctcactgggtgcatggcagcgctaagcaggttcatatcaaggctaggcgagaaaggaatgtcattctataaattgctcaagaaggtggtcaaatttcactggaccacagaagcacaggaggctctagaggcactgaaaaaattcttgaccactccgccagtgctcaagccaccacgctgagctacgcccggtcagccggtagaagatccgctcctatatatctcctgcacgactcacgtggtaagcactgcgttagtagtcaagcgggcggaagagggacatgcatacccggtacaacatccagtttacttcatcagcgaagtccttgggccctcaaagataaggtatcctcaagttcaaaagctactatacgtggtacttctaaccgctcgcaagctccgacactactttcacgaccacaaagtcatagtagtcacaggatttccgataggtgatattcttcacaacaaagaagctattggaagaatagtcaagtgggcatgcaagcttggagctcatgacatagagttccgaccccgcacggcgataaaaactcaggcactggttggcttcatattagaatggactgagcaccaggtcccgtaaagcccagaggtcgctgaaatatggaaaatgtactttgatggctcgctgaagatgcaaggagcgggggcaggaattctctttattgctccctgaggtgaacaacccaagtatgcactctagctattgttttcggcaaccaataatgcaacagagtacgaagcactggtccatgggctga

SEQ ID NO: 62514 - DNA, 1418 bp, Zea Mays
caattccgccttgcgcggtggactcagagccttcggctgttctaccgccttcttcagttttggctcttcagctggcccggttttagcttcgataggcacagagtgacttggttcaggaatagaagcagacctttcaattagcttcggcactttggtcgtttcaatgcgtttgggccggtgcgtcaaaattttaaccttctttgacctcggcgcactagaagtcgccgaggtagcagtctttcttttctttccctgctttcgcgaaggataacaataatccggatatacgaatccaatgacatcaaacaccctgttcagccttttcttgcctcgagccctgaaggccatcgtcatggcatcatcttcagcctttgagtaggctccaagcaatacattgccggttgcttctatggcgtttaactagtcatcatttggctcatcaaactgactcctgtatttgaaggtgtacttcaggtagattaaaccaccttggctagagccagcagtagcctccttcggcatctcccacccatttgcaagtggccatactctataagcaatgtgctcctagaccaagtcccttgtgcctatgtaagtgcatactgtattaaaagccgcctggcatgcttgtatatcattcccatcctccctttcactcagatcattcttcacatagaaccattcttgtatccaggcccccggccatctcttccgttatgtgggaacctgatagcttgcctcagagcgaggcacgaagctgtaacaaccgaagttgttgtgatactgctcctttctagtagccttcatctcataagataactcatggatgttgcagaagcattttgcatttggctccagtctctggctcctcatggcccatataaaaatacccaccttgataatagctttgggagtaagttcatgaaggtaaattttgaaggctctcagcacttcgaccaacaatttatccagagggaaccgaagccatgccttcatgaaacttctataaactaccacttcatcagcttcgggcagagggacattattctcccctccaattctcacaattgaaatatcacaaaagtacctccccctcatcgcatcaatcttcccttgcttaatagttgatttcccgaagacaacatagcctggtcttcaaggccgatcttcggcatcttcattcccactttctacattgaaactttcactgtcgctggaatgctcagatatcccagccagcatctcgtttgcaatcttctctgcgttggcttttttcatagctcataaaacccaaacagcgccagatcaataattttcttttcttcatctattaagtcgatgattgttgaaatgccaaagcttgaagtccaattaaattcgacaaaacaagaaagtttaaaatgacaagcgctgtcatt

SEQ ID NO: 62515 - DNA, 503 bp, Zea Mays
gaagttttattctgaagtatggatgaagggtggccgagaaatagctgatgaagccattagaaaaaatgagaaagagtcttatcactactaaaaaatcaccctaatgccacgacagatattgcaacaacaatatttttgttgcattagatgttatttattgccacgacctttaaaagtggttgcaatatatggaccgttttgccactttttttgtgcattgcgataaccatgactttcgttgcaagagaaaggtgttattgcgaccactagaacagttgtagcaaaatcaccctaatgccacgacagatattgcaacaataatatttttgttgcattagatattatttattgccatgacctttaaaagtggttgcaatatatggaccatttcgccactttttttgtacattgcgataaccatgactttcgttgcaagagaaaggtgttattgcgaccactagaacagttgttgcaaaattactctagtgtcacacggatattgc

SEQ ID NO: 62516 - DNA, 855 bp, Zea Mays
aaaattttgggggaacccgaacgcccagtcctagatgtgacaacacaggcgactttgtacgctcctacgcacatcggcgtaccagtctatgctgcaacccttaccaaagccttcgcccatacattgacaagatagggagaaggggaggctggtcaaggaatccgcacgatgaccaagagaagatctttgtccgctgacaacaccgcacaacgaccaagagaagatctctattcgccgacgacatcagttgttccatgcagtatgtttttattactatattcctaggcccacctgtcagggcttagcttccttgtatgtgccccgcttgggctataaaagggagggtacataactttacaagggactaggaggtagaggcacacagactccctcaaagaccctcggacacacgcagactcccattcctgaggcaatacaactcacaatggatgtagggtattacactttggtggctcgaaccactctaacccttgtgtttccgagctcttccagctaatcaggcaaatccctaggctccccatagttcacaagattaggcgggtgcattccgccacctagctatagttttctctccgataaacgctattttgttgaggggtgtatgttgtgaaatcctcatgcttgatcccaatctcatcacaatattatagaatgtttgtgttgtaaaacttgttaccattgccacttcttatcttcttgcaatcaagtttattttgtgctttcatggcaaatctcttgaatattgatgcaacttcgaacttctcttgaatgaagaacacccaagtatatcttgaataatcatctacaatcacaacacaatagatgttgttgccc

SEQ ID NO: 62517 - DNA, 352 bp, Zea Mays
gagccctcgccgcgcccgttccctcggtaaactccgccacatcacccacatctcgggacaccctttggttcgtcctttccccctctggtttgcctggtccacgctcaccggttcactgtcatagctccgccaccgtcgacctgtgccctcaccgtgccccgaccactgttcgtgtgttcctgggacttccctcaaggtaaccgtcctagccccgcccttattttcccctgtctcgcatgtacctgcccgcgattgctcgctggagtattccgcgatccactgaggactcccctccaccgtctggtcgcctcagtcctgttcacacaaaccagacctcgccatagtgttcgcc

SEQ ID NO: 62518 - DNA, 794 bp, Zea Mays
gtgccttggttgcctcgcttggggagattcctggtgatgaatgacaggtccattttgaggtgcccctgaaccctagtgatgcagagataagcgctatgcttgatttgctggctgaggattcttccgacgctgctcccgctggggcgttggtagtggcacccctcccagaggctgatacaactttggatactcagaagcctgtcagtactcatccgaggtgcccttgccgagccaatcaacctgatccttctgctgatgagcagaaaaagaaaaggagacgccttcggcgagtatccagtttggatcgggacgctggtacttcggttcctgccgctgaagaagtgcatgtgactgaatttactgacgttgaccccaatgggtgtacccaatctgttgctgatcccaatgtgggtgctccacctgttgctgatcccaatgggtgtgccgcctgtactgctaacatggacgacgagaaggaagaagatgaagttcctttaacttggaaaaatagtcgacagttcatcgctagcggtgaaagtagtggagttccctctcttgctttgtctgctctcattggcctgcaagaactgtccctggccaattttgatcaggcttttgaggatatggttccagaggatttgttatcggagccagtggatcatggtgtgacggaagtttgtgctgatgtgccagatgctgggttgaggtcatcccgtgcctcgtcgaccttggagcgcgatctcgagggtcgggagactgaattggatcgttctggtcccatggaagtaactgag

SEQ ID NO: 62519 - DNA, 334 bp, Zea Mays
ctttccgtagtgtagtgcacatgctcgcaacatgtcttccaaaatctgattcaccctttctgtctggccatctgtttggggatggtatgctgagcttcgtattacttgggtcccaagggattcttgtagctgctcccaaaagcgtgccacaaacggtgctcctctgtcagatacaatggtttttggaataccatgcaaccgcactatttgatcaacatatatttctgcatacctctctgtcttgtgggtggtatgcactggcaagaaatgagcagtcttagtcaatctgtccacaataacccaaatggaatcatggtgcctgggggtattgggc

SEQ ID NO: 62520 - DNA, 479 bp, Zea Mays
cgccggtcagagctcaccgggtggcgatggcggcgccaccgtcgggccggataggagggagaagatgtggtgactgtcgatccatagatggacggacgagattagtgcacgtgttaccgatttagcccattaaatcttggtcgtgggtcggccaatgtgcgatcaagattagatcaggcgtacccccttcggaaaacgaatcggagccataggatttaatcgagcggctcaggtgtcttggtgggatctgatctaatccagattgtaggttggcgatctaacggtcagggaacgggaataccccttcggcgtgcctagtttgcaaaagagcccctggtgtttatgaaatcaacccaccatcccgagtactattgtctgagtctcgggattgttacgtagtcacccctgtattttccagaaattgatgtgaagtcaagaaaccagtaaaagtgaataaatgaagaagtaaattgattttt

SEQ ID NO: 62521 - DNA, 751 bp, Zea Mays
tatttctctaaattgttttggccctgttttgatcccctataggtatcgaagcaggtgaccaaaagtaccatctgcttcagatgttggaagctcaatgaatgcacaagtatggtgttaccttgacgtatttcatgtatccgggttgttttggtagtatacagtccagatatagatcactagagtggagttatgaatgtaggtctcatgctagaaataaaatatcagtagtctcaaaagattgtgagtacaaagatagcaccttatgaaatgtgtagtgaaatccacaattgtcgctaacattcacaatttgagtttttgtgtggaaaagctccaaacaagcaattgtcagcatgtgatgcaaagacatgataaggcatgacatgaggctaagggataggcaaatagctaagtgaaattatacctggaaatgataatggttgacaacaacaatgaccactcaagtaattcactcctatgacaacgggtcaagtgtgctgccaaacacgttgacacaaagctatatgttgtaaaggagaatgtttataattatattaaaagtattgaacatataagtaatgagcaagtgcgtgcgaatccgcttacgaaaggattatcccccagtgcgttcagagaacacacgatcaacatgggtttatggtatagcttatgttttcttaacaataaaggacccaaagttaaagaatctatttcagaaccaagacatgtatcgtagatgttaagtctatcgatg

SEQ ID NO: 62522 - DNA, 473 bp, Zea Mays
accaagtccttggtgctgatttgctcagccaccaccctgaattctacctttggccagctggcatgctgaccctagctgcatgttgcacaggggcctggtcattccgaagttcaaggacagcgggcacatgaccatcatcatcagtttccccctcttcttctcatcagccttgatataaaaccactcatctttccaaccggttggccatttggtgcggtaactgagaactggagccttcgtatccttgcgatacacaaaattatagcaaccaaaattttcatgaagaccgtctgccctggccttcgtttggtagtgcaactcgtgcactcagcagaatgcttcggcatctgggctcatcccttggctacggagggcccagatgaagacgctaagcctaacaatggcgttaggggttagctgatgaaggtatatttcgaaaattttcaagacttctcctatcatctcattcaaag

SEQ ID NO: 62523 - DNA, 843 bp, Zea Mays
acgttgatgctctctgagctgttgggcttcatgaatgagagcaaaaccttgctctctccaagaatattcatctggttaccccctttaggaatgagggtcattctgctgagggagttgatatatctgtaatatttgtgcatgttggtggactcccaatattttccagactcagagagatgaagatctacggcttcatctttggtaggttggcggaaatcatggattttgatcttatccccagaaatatcattgtcagtgaatccaagaatgtgagcgaaccgacggtagctcaccttgtaccagctgccttcgatgtagaaattaagataaggaaagttgtagggactttcttcatcggccagcttgatcctaagagttgagtaaaactgggcaatgacctcatcattccaatcatattggaatgtcattatattcttcatcttctttctttcacaggccctcaacgcctgtgtcatctccgggtctccaatagcctcacatctttcccagttgatgaaccgctgatgtagtatgggctgatgtttcttgggaagaattattgagttgtaaaatccacatgctggagagtccagaaacggttcccatcaatcctggcatcatgaatgcgcaatgcaggattctgaaagcggatgtcctgaagaagtgcataacccccgctggcagtaaaatcagtaactggctcattgccagaacgacgggcctccgcccggtggaggaccaaccctcgaataataggggcgtgggcagggggaaggtcaatctcatcatctttcccaccatcatcatcacttgttgcttcccatgcttgtggatttgtcatgg

SEQ ID NO: 62524 - DNA, 619 bp, Zea Mays
gatatctctgagtatctagctcttggatatgctcaacctcccttctcgaggtatcagtgtccttttgctcataactcggttgtccgttctttgccttcctgggtcgagcatatccagcctggttgcggcccgagggcatgccttgctaggcaaaccatcgggaggcccatcaagcgtcccatgaggcatttctgtgttcataaggacctaggggatatctatcttccacacttaaaagttggtgggtggagtccaagctaagtcttggcttggcggggctccggcctccttgtccttgtcgggctccttctcctattcgtccttgtgggttcgtgtatgtctgaaggcgtccggttgcccaagagctctctcctttcgatctccttgccctgaggctagcctctcccatgtatagggtaggagaggggttagccaacgatggcttctctgagaaggagtcgtaaggcaagggtaaaactagtattttacctcaggtggagccacacatactcgtggggcccggggctacctggttgtctcgtatttaccatggcggatgacatgggggcggcgatggtcccaggtgtcatcattatggctacgccgacccctggcctcc

SEQ ID NO: 62525 - DNA, 320 bp, Zea Mays
caaaagttctattccgaacaagagatcttcgtattcagcttgattattagtgcaatgagctttgaatcggctagagaagtcaaaagtgtcattccttggtgaaacaagaatgatgccaatcccttgcccttccttgcaaactgatccatcaaaatacaaactccagagagtaatagtgagatatgatatatctagcttaggagtgtcacaaattcgatgctctataataaaatcagctacgacctgacctttcatggatgtcaaagattaataggccaagtcatgttctataagtgcataagcccatttaacaattctac

SEQ ID NO: 62526 - DNA, 415 bp, Zea Mays
ggcttctcatgccagcaggcagcaaatcatccttccatttccttgtcttcatcctacaatgatatttctcctgcacagatataccatcattgcttgctctgagatccttccaaactttttccagtgccattgtcacctttgatgccccctgaatggcaaaaggcaaaagggtgaattcatctgtattaacataaaccagagcaattagttctttgtgctgcacacaccagtgttatgttctccagttgattttgaaccagtgttttaaggtgttggtctagttgttgcctaggtgagaaagtgctaagcctaagaagggagggactgcagaagaattaaatacgatgaggagaaccagcaggcaggcaactctcccttcgcatttcccatcctcgctggctccagtccagtccag

SEQ ID NO: 62527 - DNA, 512 bp, Zea Mays
agatcacattaagtctgcagttttattacaacgtccaccaaacttcgatactgcttgtgctcttgcccaattgcaggaggaggtctcagaaccgtctcggtctgagcaacgcaagtatggatctatgccggccatcaagacttatcaatcagcattgcctctacctcgccctcctcatgccgacacgtcagctgctgatcagtccaggctgactaatgctcctcgcactcggcatactgatgataagttggcatctctgaaggcctaccgtcgtgctcgagggctttgcgacaagtgtgctgagaagtgggctcctgggcatcgttgtgcacctacagtacagcttcatgtcttggaagaaatgtgggagttgatggaggcgccgtctgaaacaacacctattaatgttgagtacactgcttcaggagaattgctgtccctgtctctctcagccgtctctggtaatccctctcgccacaccttacagttgttaggggagtgccagggccata

SEQ ID NO: 62528 - DNA, 517 bp, Zea Mays
tcacagatccttccccatgtagtttacatgagggctccaatatctattatacaatcatatgctaagtacatattttacaacttttctcgagcttccatgcatgcacccatgctaaataaatcgctagtgtggtgagcccttttcctatgctgcttataaacccacggaagtaaaaaccacaccaagtataaatacaatgttgggacacacctgctccatgcacccctcatcctccattgtttttatttttgtccttctctaatgtacaaactactacatgcacgatgcttctctgcaactatatatttctagcttgtcactaggtaccaccaactagacaagataatggtatcaacctggtaccaaaacctttgttatagagaataacatgtacttccatttggccatggcacaagaaacaaaaataggcattggataattcatcattttgataacaaaactgggcttcttgtcatatgaggtaattcacatctgtccactctattcaccactagaa

SEQ ID NO: 62529 - DNA, 400 bp, Zea Mays
ggaaatgaacgctcggagggtctccccggacccctgtcttactgcgtggaggtgtgcctccactccgtgccgctggtaagcgctagcgaagtttgccatgaaccgcgcacagagctcttgccaggagtatatggattctggggcttggttcatgagccaagtacgggctggtccaaacagggctacatagaagtaggttgccaatacgacggtgtctccacctgctgccgtaatggcagtgacataaacctgcaggaattctgacgggtttgttgtaccgtcgtattttttcggcagatgtggccgaaacttgggcagtcacgttgtcgcgcggaggtggtccgctagggcagcgcagcctactccagccaacgggatgctggtctggaatcgagcatcc

SEQ ID NO: 62530 - DNA, 394 bp, Zea Mays
ctacgaagacggacgggcgaggtctctctaataaaaataaaatcttttgctatttttaaactgattttaacgtttcctaaaaaagattttcactagtgacgcctgtaaaaaaattgtttatactggtccctatcagtttaaacaacggtagtgtaaataggtttacaaccgtcggtataaagcttgtgtgtactagtgcccccaagctctttgcgtgcgcgtcggcgtggttgcttctggacatccctaatatagtgctattgttccagtcgcacatctaccacccatggttctcgctggctgactaggtgaacgcgttccaggaggccttcaacgtggccaagttccaggtcatcatcgtcgtcgcgtccaccatcccagaccacttcgtcgt

SEQ ID NO: 62531 - DNA, 356 bp, Zea Mays
tgctcttgtactttgccctaactaaaatgcactcccttcttcgtaagcccattcaaaggtgcatcaatggtactaaagttcttcacaaaacggcgatagaagccagcaagtcctaggaaacttcacacctgtgtgatagtctttggcataggccatccatgtatcgcttctaccttggcttgatcaacctcaattccctgtggagtcacaacatagccaagaaacgacactcgatcggtgcaaaaatgtgcacttctcaaggttaccaaataaacgtgcatctcgtaaagcattaaaaacagcacacaagtgatcaacatgttcatccatagttttgttgtagatcaatatgtcat

SEQ ID NO: 62532 - DNA, 790 bp, Zea Mays
gcacgaatgtcttgacctatgttaattatatcattgtaagaaaaatgaggcagcaagaccatatttcagatcttcaagaaaccttcgccaatttctgaagggctggtttaaagttgaaccctaagaagtgtgtattcagagttaaaagggcaaatttttggtttgcctagtgtcaacgaagggaatagaagcaaacccacacaagatcgaagcaatactttagatggagccactgaaattaaggaaaagtgctcggaggctaggaggaagacttacttctctgaataggtttatctcgatattagttcctagaatgaagcatgtcattcttcgaagtcctaaagtcagcagtggtcttttagtggagaccttctcaacaacaagcctttgaagagttgaaggattacctcataaagctgacaacactctccccaccttcgccaggggttcctctattgctctatgtgtcagcttcgcaatcaaccatgagtgctgctttagttcaagaggtggtagacgaaggtgtaaaaaggaagatggatgtcttcattgtgtccaaagttctgggtccatctaaaagaaactatacagagatggaaaaagttatgtatgtcgtcctgatggattcaagaaagcttcagcactattttcaatcccacaacattattgtgccatcatctcaaccactcaaggatatcataagaaatagagaggcttcgagctgaattggaaagtgggcagcataactcaatgagtttttcatcgacttcgttcatagatcatccatcca

SEQ ID NO: 62533 - DNA, 438 bp, Zea Mays
gtttttaacaagcatataaacacaacactgtcttacctgactaacaacaacaaagtgcaccttctccatcttatttagacaacttccagttctgtcttcttttgtgcgatagattccggtagatcaccaatcctctccttgagtccatatagtgtttttgtatatatatcgaaaatacaaataaaaagacatgatcactgcaacacgatcttgcaataaaagtgcaatagtgaaaactgaaaaacaaaagacgaccattgcatgtcttctcctccatcatgaggtacctcgaaagacttccaggttttcaacaagcatatgaacacaacactgtcttacatgactaacaacaacaaagtgcaccttatccatcctatttagacaactcccagttcagccttcttttgtgcgatagatttctgcagatcagcaatcctc

SEQ ID NO: 62534 - DNA, 498 bp, Zea Mays
cacggacacatccccggtgatgggatgaagccccctgggttaacatccagggcccattggcgacgagagcggggatgcgcggtggccacgagagtatcgcacaacagctatctcactgattctctctcatctcttgcaatggcggaactgggtgcattgggttggggagaacgaggagactgcgacacccgatttatactctagtagcgaagtccgagcgaggcacgaggagcgagatccccggcgaggtaatcggcgttctgttgcaacggcatcggagagacgggtctgacagatgtggcccgcaaactagtggtgcagacacggagaaggaaagaggaagggctgacgcgagggccccacaaaccagagtcacggtgcaaatattggtgagcggggtcgacctgctgtgatgggccgaggggagggaaaggcaatgtgggccagaagcagggagtcggcccaagcgagttttctttctttttctttttattttcc

SEQ ID NO: 62535 - DNA, 457 bp, Zea Mays
ctaatttgactccattaatcgaatatgcaaagagggaagaaatcaattaatctccaagggttccacaaatccccaaaactctaacacctaaatatatttatttatttattatcactatttttctctgatacaatttttgggatttacaggttgtttgaagaggggcccaggcctctaagccgactcgcactagtaaccttatgcatttatttatttatctgtttttattgatatgtctgtttttgctctgaccttgcactttccggtgcagccgatggttcagacctagtggtagtaccacacagtcagcttttcatgactgtgtgcggtgcagctagcgaggacccttgggtgaggttttgttcattagttgagagcggagggaacccaggcagcttcgctttgagtgcggtcgctggcgcggccgtcgcgtctctacgaaggacgatggatgatg

SEQ ID NO: 62536 - DNA, 1251 bp, Zea Mays
gtgatgacaaaaaggttatttggttgattatgattacttaatgccatataaggatcaaaacgtgatgaccttatttgtgcgtgtctgagccgatgcaatgcagagtccatgtttactatttttcctgctgacattatcaccttcgatttttattcctgctgattactttttggcagtgatggtttctagtctgatccttgtgttcctgacactttttgtctactaagggttttgcactattgtttatttattctggtcatgggatggtaattaattcagggtacaaatatccttttatctatagctgacactttgacaggataatatccggatggcctgggacagaaacatatgtatgacctggctgggatgacaaaaacatacgttgtcgattggatttctttgtagtgtcttcgtatggcctggctgggatgacagaaacatacgtttctcgatcctgatacttgattttttttcaaggaccaaactttgatgacctttgtgcgtgtctgagccagtacaaatgagtatgttttcctttttttttaacttgaagttttccttatttattgttacaaggttatggccctttgacctttgtggctatgatgataaaatgtttgtttctcgatgctgagacttgaattattcaaggactatattttgatgagctctgtgtgtgtctgagccagcaccttcacctttgcttgaaaactatgaacctcttttgatgcccatggtatatttgaattctcttggcctgaagtgttggtattggctgtttgtctactgttatatttggagactttgcagattggaacaggttgctcgtgtccgaatcatgaaattgactgtgttgcggtgttagaaataataaccactattttctggatgagatataagcattacctattctttgtacgtaaagtatgcctttttttctgttgtccatggcttatttgagttccgtttagcacatttttgctttctttattcatttattgagttatggtgacaataatatccaaaatgatgctactggttacttgtctgttgtgatttttggcgagttctcaagttggatagattgctggcactgcttcagtcttgtgcattctaaaatgtcatcatagcttttctggatgatcatatctgtattaggggtcatgggtcctcttttatcgagtttaatacatgaacatggattctttgtggtcatcagattgtcatacatgacttgtggctacgtgg

SEQ ID NO: 62537 - DNA, 435 bp, Zea Mays
gcggggtgaggctaggtggtttcagatgtgtcagggtcagaagcacacgtaaaacggacgagttcatcggcatacggctggccgcgaggtgacacatggtcgcgagcgcgctagcgttgtaggacacacaacgcaatggggaagacaagacatgcgctggattccctgccttgtgacaaagcttaggtgggggttacttcgagcaacggtggacgcgagcacacagtgacgaacgacagttctccggcgaggttgcaagctcatcgtgtgcggcatcgaacttgcaagcacgacgtagtctatttgtgcaggggcatggttgtgctctacagtgcataggaactggcgaggcggggttgctgtgagcggtgcagtgagggcgggcaggaggttgcacgcgcggtgcatgggacgttgcatgatgaggcgaggcga

SEQ ID NO: 62538 - DNA, 523 bp, Zea Mays
gttgcacagaccatgatccacggtccagatttaaatatatagatgccgaatcggtatgcaatcatggacctcggattacacatcaatggtcgggatccaaaatgaccgaggcacacgcgcatacgttcgatctccatctaacggcgcgtgtcaaacaatcaaatcgttacgcaagcttctaatcgcaaccgtccactgacggatctacgacccgacgaccatctccttcccctgaccgagcaggacggtggcgtcgacccgcacatacggcggaggttcgccggagcaaaccaattctctgcctgaaggcccccaaatcgattctcgatcggtgctattgcgaaagagcattaaggtagacagaaatgagggttttcttaccggaatcaggggtagttgacaccctaaacgcggcgcagcgcggatccaaagtcgttggcatcaaccagcgaggaattgcctcggacaccgatgtccccacgccagtagattccccgcacaagcaccacgatcctcggtggct

SEQ ID NO: 62539 - DNA, 494 bp, Zea Mays
gcaagggtgactcgtgaaggagaagagaccgaggtcaccgagacagcaccaatttccgaagtcatgaaacaatcaggtttgattgcgatagagggaactactgacgaaggtatccctgttgccgaagctgaacagaccgttgctgaagaagaagatattgaagaggatgaagaagattatagtattttgatcccatcaaaacccagccatctagattttgagaaatatactatgtttgaagctgacatgcccatgatgatgaagttgggttactttggggaagctgaaaggaaacttgtccgatttgccggagaagataccaccccagcaccaaagaatgatgaagtagtggttttcaagatctttttcagagcaggactgcgacttcctctaaatgagatgataggggaagtcttgaaaaatttcgaaatatatcttcatcagctgacccctaacgccattgttaggcttagtgtcttcatctgggccctccg

SEQ ID NO: 62540 - DNA, 650 bp, Zea Mays
ggagagtgtacaagacgccgtggagctggtggccgagcgcttccagcacgatcctgctaacaacctgtagagacaaagcaagggttccactgggaagcggctgtaataacttttgattttgtaagatattctaagaaccactaatgaggtagcattggaacttaaacttatatgtatgttatttgtccttgctgtgtgtagcgtcatcaacttccccttggtacttggccccctgggaggtaggctcgatgtgtcgaggctggataccagtataccaaagataaaattggtggtccggcccataagaggtagtctctacagtttgagactacctactattggactgggacctagacctgcacacagcttcggctttgaagtggagcacacccataggacccatcatctggtatctgccatcctttgattcatgcaacaggacctacaggttttagcttgggaagccaagccatatgcccggacccacaggattacagttccaaatactagggtgcccgttgcagagtggtggagcgtgcaggcttagggtacggaaccatgctaagcggctacacaactccggacccctccaggaggcgagcgcccattctctagaactggtccgcaggttgccggaccccctgtagcag

SEQ ID NO: 62541 - DNA, 784 bp, Zea Mays
cccgggcaccccaaagatcagatcggcaggcaacactgcctccgactcgtacaccatgaagaatggggtatttctgtgcagagcccgaccgggctgagttcgttggctccagaccatgtatggcagctctctgatccacttcccagattttcgctcttgtcgaatacctttttttagtgcatccaatatcattctgttggctctttccacctagccattagctcttggatgtgccactgatgcgtacttgatctggatgctcccttgctcgcagaaattgaagaactctgagctggtgaagttggatcccaggtcagtgatgatgttattcagtattccgaatctgaacattatatcctggataaactccactgcttttgctgaggtcagggaagcgattgacttgtactctatccattttgtgaatttgtcaatgacaactagtacatgagtataacctccttgagctttcttgaatggtccgatcatgtccagccctagcatgcaaacgacgaggttacaggaatggtttgcagctgctgcacgggcaagtgttgttgctttgataagaattggcatgcctcgcacttctggactaactcgacagtgtcactcttcgcagttggccagtagatatcggatctgaaaggttttcccaccagagtccttgatgcgtcgtgcacaccacactgccctgcatgaatttcatctaataattgtcgcccggtggccgagtggatgcatttcatgaagattcctcctgcgcctcttctgtacagcaagc

SEQ ID NO: 62542 - DNA, 520 bp, Zea Mays
atggctgcaagcaatgttgcatttctcaatggaacaaagaaaaaatccatacaaaaatagttttttattatcataataatagaataatggagtaatgaatagaagatgggcatgcatccatccactgatccatgccctcagttgaggcctaaaagttgagctctagatgatagagctaaccctccacaccactcgcaataatcagcgctgcacttgcctttgcgagcaggtactggctggttgtgactgtgcctggcctcctgttccgatggtggtggtgctagtcttacgctgcttgttcagttgttcctcacttccagttccacagctcccctcctactcctccctatagctaagccgacagactgcagattgcagtagcatatccccacacaccactcgcttctacaccacctggccaaatctccttccctctgcttggctatttgtttctctctcctccccatcaggataaactcagcatcccctgctgatctgtggcatttgccttgttcccgtg

SEQ ID NO: 62543 - DNA, 406 bp, Zea Mays
ggttggacggtcgggtgggatgccacctctgcagaagaggatcaggagtagtggggtaggccttgccctattctctattcatcgacattagcttttatccactgcaacgttgcgaacaatgtttcctttatccaaactatgattgatgtaataacttgagtacttttaaattgtggtttcatgctttattattattccatgtctcaccttcgtgtgagaaagtggtactcgatccttgtcaagtggttaatcggacttgatccaacagactgatagtttattccagtttaagtgtatagttgccttctatggatggttgagcagttaagctagagtaatctgggcagttccgccacacctatccttaaaataatttgtcattccttccttgtatcaatcacatttc

SEQ ID NO: 62544 - DNA, 799 bp, Zea Mays
gctcaattaagaagtgagcaaagagagttaccatttgttccgtccatacagttttagtgaattagaataataattaatttacatcgtgtaggcgtccacatcatttctacatcgtgtcttgtctgtgcctgtgtgcctgtatgtagctgagcaatgagctggggctggagcccaggtagatcaggttctggttccataactgccagacacatgccctccctcttctagcccttcaatgtcatattatttaattgtgcagccgtaagtaatatcttaaatatgaaatattaagttatcatacaatatttaattgttttaaaaattctgctaagatttgatgtcatctgtactccaataagattctgatggaaattatttataccagccatcgggcgaatgcacccattgttgtacgttttcaagtaggttggtcaaccacacctccttcagggttcaatccatttagaaggttggtagtgggtgagcactctagaatttgttgaagtatttttgctggttcttgtgtaatcagtcatcactaaggcctccatcaattatggagtggatttaaaaaactagaaaggattttgacttgctatggatttaaactcacatatgatttcggcattgccttcaatattttggcaagacagatgttgtaaaatattttgattgctaccttcactaagactcctagacaattgtgtcgtcatgaaagtttgccataattcagatatggattgaatgacagatgttgtactgtttatgtttccttacccttagtacttgtccttctgtt

SEQ ID NO: 62545 - DNA, 308 bp, Zea Mays
atcgacctccagctcagattggtacatctatcaaggaagaataatatattgtttagctagaagaaggagtatgtctcacgaaaaaagtgtcaagttgttgcccctttgagaaattgtaattgtgctaagtgatatatgaataaatttggagaatcccttgcacttattgtgttttgccttttacaaagagaataaagtatggtgtcatctgctatatgcaaacaatatgatgctctattctagttgccctaaagtcccgctcaagtctttctctcaaattgtgctcaaagaaatactcttggatcaga

SEQ ID NO: 62546 - DNA, 550 bp, Zea Mays
atggattaattaaggaatgatcatgacaaaagaaatacccaagattttcatgcatcttcaccttggaaaaagatgctcacaccctagacaccctcttgagccattggacctccaaacatgggattagtgggaaagctatgcaaatgaccatttcatgacttaaaccctttaccaaagttgaagtacatttatatatctacaagaaatagtaaggaaggtattccaaaagggtcccacaaaattctcaaattcagcccccaagtgaagagcactcaagagcaaccaaattttctctaagttaaaaatcagccctcttctaaagatcagagatgttcacttagttgctagtgccaaatccatatggtccagttgacaaaagggagccaaattacccaaggcacacctctgaaaaatttgaaaccaattcagaaccgtttgacacgatttggcaccagttttgtcgcgggttgaacagtgccgacactactgacttggtgccaccatatctcccaaaccagacccaatcttcccttggaactcacatgaacta

SEQ ID NO: 62547 - DNA, 723 bp, Zea Mays
tacgatgtcatcgacatatacctccaccttgtccctaatcaggtccctgaaagtcttactcatcgcccgcacaaatgttggcaaggcgtttttcagaccgtaaggcataacaacatagcagtaaagcccatccactgttacaaaagtgatatgcttcctatcttccctagacatctggatttggtggaaaccagaataagcatctaagaaagacaaaaggtcgcaccaggaggtagaatctacgatttgatctattcgcggaagtggatacgggtccttgggacaagccttattaaggctggtgtagtcgatgcacattcgaagcttcccatctgccttggggatgatgactgggttggccagccacactgggtgatgaacctcttcgatgaagccgacgtctagcagcttccggacctcctttcggatgaagacatgccgctcgacggactgtctgcgaggcttctgactcaccggcttggcgtcagggttgatctttagatggtgctcgatcacctccctggggatcccaggcatctgcgatggctcccatgcgaacatgtcggcatttgcccggaggaaggcgacgagcgcgagttcctatttttcctccaaatcacccgcaatgcgagtggtctgggaggaacccgcgctgagttggacggtcttgacggggacgtcgtccgctccggatggccgcaccttcggcaccttggtaggcgc

SEQ ID NO: 62548 - DNA, 843 bp, Zea Mays
gttagtgcccaacatggacacaacaaaatatgtatgtttaagcgaaactcaaacctgatgtcaggaacttgcctggcactactgcttggcagacggcactgccgctcgaagctgaatgctcaaaaacacttgtttctgcatgcaacacttagatatgtacttgctaatgcctaatgtcaagtccactaagttcctgcactcataaatatgcacaaccaagtatatatagtggaaagcaagtaattcaattcaaaatgtaaaggagacaagacacaaggatttatcccgtggtttagctcgccataaaggcttgcttaccttcatgttgttcaggaaactaaatcagctttggagtcactttcaactcagtccccttctctaactcaccaccaaggtgatgggttgagatttccactcatatatcgggtaattatagaccctcttgtggctcaccacaagcatgagagctcaccacgcgacgtctaaccatctaggaggcttcacctccaagagtaatgcatgtacaatgaatattgacgaagcccgacaagtgctcaaggttgtcttgctctagatctgctctctagctcttagtcacacagtaatcactctctaacacttgatcaaacattaatcatgcactcacaaagagaggagttagagagggtcaaatattgcttgggatgtgttgggactgttctggacaccagtaggacccctggggcatgggatgggtatatatacaccccatcccaaaactagcatttgggggtcaaaactaaccgtttggggttgtacaggtctggcactgtcgcccgttgcacaacactgccacaacacaac

SEQ ID NO: 62549 - DNA, 692 bp, Zea Mays
cctgttgccatccctaggtgggagtggtcccgatctattgacgaggaccgggagcgctttcgctcgcgcttgtgatccctgtctaggtctccatattgatcgccatctcgatcgtggcgacgatcgatgtcatggttgtggggcttttccttgttatgatggtggtcggacatttcaccaacaagcaaggggaggagatgagatagggtttaaatagattatcgctcaacacgtggttcactcgtcaccggaatcggtcgattggagatcgccgtcggtcgccaaatacttccgtctgttttcagcctaccttttgtttgcttgttcctcaagtatatgttttccttagctattacacacatgggcctaattggaccacgatgggacatagtatttggcattttggacgggttgcacagttgcaacgcctagaccgctgctccaccagaacacgcctcgcgatcatcgtcttcctactagacgtcttccacaattgtagtgcattagaaaccatagacccactcttcacttcatcattaccttcaaaatgactttactaccgggcgaggggtgacacacattgacaccaattccttgttgttctagttgtgtttgtgcctttgcgagttttcttgagtgataacgatagaagggcggcaaagtggtaagctgctgcaactattcccattgct

SEQ ID NO: 62550 - DNA, 883 bp, Zea Mays
agttcagccagtgacataggcaatgttcgtaactgttttaatatactaggactttgtggtcttagctaaaaaaaatgcatactgtttaatattctaagttacaattttgttattatgaaatgtttgacagagcctaagtgcccactagctaagatgcatactggtcagaactcatattattacaacatgtctggtagaaggccgaagtcgataatgcagttgcaggggcgtcatagtgctacagactacagagatgcctatctggaggtagctgattgtagatggttatgttgatccctaaagttctttcaactgagtgctatgtctattttttttctcaagaatcaccaatgcttgggatatcagatgctacatacttggccctgcatttttaagactgaaatatatgtattttagagtttatcagaatcgaccaattaaactcgcgcgcaggggcacgcccttattatcactcgtctcatctcatccccttcgcttcaatcaggtcgggaaacggtgatgtggtctgtccaatgccatccactgcaatgctgatctccacgccggcacataccgccccgtagtgttcgcccacgatgaaaagctcccttcaactagtggtttctgcaagtatcaggtttccaggttaggtcaggtcgcccagactttgcaggagtgaggtgagttcataagggctcaaggcggggatgccactaccgcatgttgcgattgcacgacggtggcgtgcatacgactgcggaaggaaacgcgactgggttgatcagatcaaatagcagcaaagctaactgccttacaccattacctaccactaccaaccgcctaccggttggcctccggtctttatctcctctcgttcttcgtc

SEQ ID NO: 62551 - DNA, 400 bp, Zea Mays
atcaacaaaccagaccagttgcagcgctatgtaaagatacaccaggtccgattacctaatacatgaagcagagtccagtcgcttattttttctaaatcatgctcgtgccactcaagttgtagtgataaatatctctcttaatacatgaaatggagtttaatcgctaactatatacaacttgtatgcgtgattcaagctctagccataattaatctttatttttgcaccaaaaatcctcaacaaccatgccacccaccatcaatcgagattcacaagggcactagtcatgctagcttgtgactcatccaacaaacaatagttatcctctattacacctcagtgccagcactaggtgccaatccacctgtatccacgatgtcattgcttggacccatctgct

SEQ ID NO: 62552 - DNA, 1588 bp, Zea Mays
ttttattagtgttgaagccctaaaactatatggaacttggataagaagtggtccaaagtggagctgacagattttggatttcagatttagtgcagcaaactaaatctgaatttcagtgttgttggtgcagttttggagcttctttgtgactaatccatggagttatgggttgtggtttctatagaagagttaaataccataagttggcggtcagatgttcttaagacaggtgggcttagtcctacaccaaattcgggaaaaaccttgttccaagatcagctgtcaggagggtattgactgaaattttgtttagttacagaaagctgaattgcagtgaaggatgctcggattggagctcttttgtgaccaattcatgaggttttggactaatgattttatagcaaagtgaaagaacatctaaaggtcaacaagtttcatgagaagggttggtctgtctgctgtgtaaaattcggagaagagggtgatgcaatcctatctgtcaggtgaggtgttagtgctgtttcagtatctgaacctgaactctttagtgttttcactctactttgctgcacaataactcttgttctgagtgttttaaactttgaggtgctataaaaaattggtagagctatgtttagggaataacttttgttaaggaagattggtctgttgccttgtgaaattgtgagatcaaagggactgaacagggaagtgtgcgatgtggtagtgatggctgatgcagttgattcagtgtttgggttaggttctgaagatcttccccttcctgctggtttcacttgtgttcttgagttgagaaaaggttggggtgggtaactaaggttctagaggcctcacccccctgcagaaaatatcaagttttgaacctattagtgcttatccacagtggaggtcttatctgctcatttccctgtctgtgttactgaacaaagttcagtgccttgctatgcatgtgatcatgcatggtgttggtgtttggaagccacgtgtgtgagcttatgcagtgctggcgtccttggagtcttttccaccgtggactggatgagctcagtgacgcctgcccctgccttcttatcatgtttgcttcgagacttggttcagtagaaccttttccttgtccttgagttctagccaaagttcatcgtgtgagtgttgtagttcttgtgttcatgtcggtgttaaaccccccccagtcacactggttgatctgctcccattcttcgcgtggcgttttctctgtgtctggtgatcacgcgttgacgtttcatcctcaccgtggtcaggctagtgtgatgttgtttcacgtttttagtgttctagcatctattatcgatggtgaagcttaccgagctggccgttctaactctactgctgtgagttctctagaacgtggttgcgacgtcgcagagcggtgccgtgaaccgtggtctaggtaggtcactggtactcctcgcgtccttagttcgagttctaccgtgttgctaccctgggaacgggcttgccgagccgagagctccatcgttatcgtggccagagaaggattgtgcttggtgatcgtgttgaaaccttg

SEQ ID NO: 62553 - DNA, 433 bp, Zea Mays
ttgtactccaataacagatctacaactttgttatagtggccataagctataactctatggatagagcaacaaagagctccaaagctgcaccaaaacatactgaacatgggacagatatccctgtactagctcaacatgcagtggagatgtgttcacagcgtgccagcaacacataaactagcctacgtggctttcatgcatcagcttcactcaggttatatcccagctcaaacaagggattggatcagccccatagctcaaaatatcccctatgtgcagtgaacatagacaagaataggagtggctagaaactccacctatggctaagcacaaaaaaggggggggtccacggtttgatattttaggagtgaggccactgtatcctttgtttatccggtttattccattaaagagccaacagctaagactgcac

SEQ ID NO: 62554 - DNA, 340 bp, Zea Mays
ggctctgatatcactactgaagaataggcacaccactagcatatctatcatgttcaatcaagataagatgccggtagaggatcataaatcattttctctagatgcacaagacataataagaaaacacatcgatatagtggaagtagtcatgtgtcgtcacataccaacaacatcaacactttcactaatgatcatcaagttcaatttttgtcaacaccagaacaatacaagcaacatctttacggtattcaaacatacggggatgaaatatcgatgtgctagcactgcacgcacaacaagaaaaaagcgacaacgcgttggacatctataatcctagata

SEQ ID NO: 62555 - DNA, 640 bp, Zea Mays
gtttattatggagaatcatggcaagtctctgccccctcggtcagggagacagccggatgttcgtgctccaagttggactgaatcccccacggacttggagatagctgaggccagggttctgcttgccgaagttggtttgttgaaggagagaggtctgactgccaaagctatagttgcagactttgtttttaagaacattcaaccactgaaggacagagcatacccggcttatttgtatagtggtgttactgactcaacccgggttactaacaggaggattcttgctatggatttggtaagccggctggaaatgatccttagaggcaaagtgtcgaatattggtgctcctgttgcatattttgcctggaatctaccaccttccaagacttttttcagttttgtgtccaatcctcttgctagcgacagtggcctgggtcttggagtgcgaccctctcccgaagaagtcgaggttgtggttgcttcacttggtgatctccccaatgatgaaaggcaagttcactttgaaatgcctataaacccgagtgatgcagagataagtgctatgctggatatgttggctaaggattcatctgactccgtccctgctgaaaccatagctattgcaactatccccgagcct

SEQ ID NO: 62556 - DNA, 551 bp, Zea Mays
cttcgtccatgtcgttgaacactaaggcccccttcaggtatttcagttctcgagcatagtgttttgcctctgcaatttcttcttcagatagtctttttcccgaagcatgtcgaataatcagtagatatcttcggacggtgcttcgggagcaggagatttagctttttcggccacatccttctccatagccatgccaacatctggagattctcgctcaaccttatcctcagttgcggcaggctccgtctcagtaggcgttgagggcctagcttcagtttcagcgcgatttatagtagcttcagcaattttctttgcaggggaggagttaatgcccttgtcgtctccatgacagcgtctagcacgctagccattctcctcctcttgggagttattgcaggagctcttgttatcttcggcaatcccgaatccgctgggggctcaagatctttggcagccctatttttcccctagctttggctctttggccgcctcttctttggcctcgacaacaagtttcaacgttttggctggctcgattgcaggcaccttcg

SEQ ID NO: 62557 - DNA, 1117 bp, Zea Mays
ccaatctaaggattgaaataaggggatagatttcccagctaacctagtagtaatgtgtactaaagggatagatgccatactagggatgaattggctacacataaaccaagcaactgttagctgtgacaagaggacagtaaggttagtgtccccatccggggaagagatagtaactgaactgatcatgcctaatctagaagagggagcctatcaccatatgtctatagatggtaaataggccaacctgcttgaggccatcagagttgtgtcggagtttcctgacgtgtttcttgatgagttacaaggcatgccacccgagcgtaaagtcgagttcgccatagagcttgaacctaacactacccccatttctaagagagcttatagagtgtttggaccataattggtggaactcaagaagcagatcgacgtgctattggagaaaggttacatcagatcaagtacttcgccttgggctgctccagttctattcatggtgaagaaagatgggaccaagaggatgtgcattgaccatagagctctgaataaagtcaccatcaagaaaaagtaccctctgccaaggatagaggacatgtttgattggctgagaggaccagagtgttctcaaagatagatctgaggcctggttatcatcagctcaggatctaaccttcgaacataccgaagatggcattcgtcaccaagtatgagttttatgagtatacagtcatgtcctttggattgacggatgcgctagctttcttcatgtacttgatgaacaatgtgttcatggactaccttaacaaacttgtagtggtgttcatcgatgatatcctcatatattctcagaatgaggaggagcatgaggagcatttgaagatggtattacaacaattacgggagcatcagttgtatgacaagctgagaaaatgcgagttctagatcagcaaagtcctgttcttgggtcatattataaactgagatgggttagctgtggatccaaagaaggcggtaaatattttggggtagaaagcaccgagagatgtccatgggatcaagagtttcattggaatggtcggatattatcagtgtttcatcgaagggttctctatgacggaac

SEQ ID NO: 62558 - DNA, 868 bp, Zea Mays
gcgtgcactattaccagggagttcagggtgtatactgtaaaaaccagggcctctgtgcaatgattctataaagggccaggattgcgggttaattttgtaattcaacaggggctcttatgtaaaacaagccacacgaaggggtatcgcgtgaccacaaccgtccaatccatactcgacgcgccagattagatcttcaccttcacgaactagtactcgctctagaccgttgggtcgcaatccgatggacgtgggacggtcacacactgatttaatctaaaccacccattaccgaaccgatgccctagatttaatgtcacgaagaggtatcctatgatctaatcacagccatagacgcccaatcccacactgcacgtatcatctctttcccccgaccacgacggcggcggtgaccgaggcaccacgacagcgccatggtcggtcggtggccgaacacgagcaataggtcactagcacgtgactaaccaaaaaattatggagagcaggctttggcgagtgatctcagggggtcctatcgggatttgaggcggtgacgaggccggtcgacggtgaaccacggttccgagaccaagcccgactctggcgagaaatttgcccaactcctctcggcttccccggactttatctgcaacggtcatgatccgcgtaactttgcgagttgccaagacctcctgtagaccccagaacgcgcggcggaagagcgaatctacggcggcagcctgacttggccttttgcgtcggtggagaaggtgtgaggtttgtatggtcgctggctcaaaaggggtgagaaggtgaggatgcgctggtacttatgcaggggaagaccaaagccacatctgggatctcggag

SEQ ID NO: 62559 - DNA, 446 bp, Zea Mays
catagcttatgcttcaagacaattacgccggcatgaggagcactatccaactcatgatttggaactagctgcagttgttcatgccctcaagatatggcatcattatctgctgggaaatacttgccatttatataaagatcataaaagtctgaaatatatctctacccagtcagagctgaacatgaggcagagaagatggcttgagctgattaaagattatgatttagaaatccattatcacctaggaaaagcgaatgtggtggtagatgcactgagtcgcaaagcttcctgtcattgtcttatagtaaggacctctaacaccacaatatgtcaagaaatggaaaagttgcacctggaaatgatacaacatggaactttgacacaattaaagcttgagtcagttcttctacagagaattattgatgcccaaagaaccgacaagggta

SEQ ID NO: 62560 - DNA, 1056 bp, Zea Mays
atttagagtatgtttttgtctctggttgaccgagcacacttgtcgtgctagggtggacgcgaaccttagagccctcaagcgagtccatcaagccggtcgaggtttatttagtgggacaaccttatggttggacataatgtttagtcatctagttatagatgcttttggcgcactagggcagacacagaccttgatctcatgagctggtctgccaagtcgattagggtttatttagtgtgatgaccttatggttgaacagaatgtatggccatgtggttgccaggtgcacttggcatgcttgggcaggttctaacttctaagtccccctccaagtgagttcattgagtcagtcgaggttcatttagtgggacaaccttgtggtcgaacaaaagatttggtcatatagtcatcatgtgcacttggtatgctacgacaggcataaactctagacccctcgagcgagtctgtcgagttggttaaggttcatttagtgggatgagcttgtggtcagatagaaggtttagtcatattgtcaccaagtgcacttggtgtgctaggacagatgcagatgcctaagcccttgagcaaattcgccgagttgatcaggtttcatttggtgggacgacctctcggtcaaacaaaaaatggtttttggttatccgatggactcatctagtcatatcctatttctaggatcggttaggtatcctttattgttgatatgttttcctagaggggtggatattgtgaagttaccaaggctagcatagatgtcatatccatcgagttgcaaccgggtagtctaagcgagacctgaggatccgaccgatgaaggatctgctctagttggtggtcccatgtggtgggtgtctaacccagtaggggcgtctcgttatatatagcccttccttactctatgtagtctggactcaatgttgaatgagtgggagaggtcgagtggcccaccccctaaggggcctagtagggaagtgctaggtataatctagaatgcacatttgaacgattggctcgtagttcccatgcataagagtgtgg

SEQ ID NO: 62561 - DNA, 502 bp, Zea Mays
ataagtacatgacaaggtagtcaaggcaacagtgttgaatattgaagatgtaaagagaaaggcagcaagatgaagacatgtgaactgcaatccatgcaaacacagtgcacagaagaagtaagaactatttttatgttacctgttttagttaccaaattgaaatctgcaggtctgtagtattaggttcagctaaaacagtgcagagcacacaacaacagtgatgcctattagtcccaactcccaaactgggaccacagtgacaacaatccaacatcatgcatacaaaccagagcattagatatgtagctcctggctattacactgtagacaatttctggagctccactctctgtaagagacttatgagtaggttctatcacataatgcatcagaatggtcctccaaactacataatggatagttcggtgcaaacaagacaggtagatgaaacaatggtgattagtagttccattaagttgcagatgagcagaacaaaatgatc

SEQ ID NO: 62562 - DNA, 321 bp, Zea Mays
ctcccaaggttctcagttccgctccggaaatcagagtggaaacaacaactatcaagcatagcgctctggacaacaaagtcagaggaacaatcaatacctgaaccagcagagaagcaatactcagaccggccaaaggtctagtgggcaatagcagaatcgtcagagaagcatagtgaacacaccagctaagaataataatggaactactccagttgaaccgaatggctgtttcaagtgtggcgaacttggccactatgccaacaactgccccagacgtaacccacagacaccctagaataacaacaactagaggaatgacca

SEQ ID NO: 62563 - DNA, 541 bp, Zea Mays
tgcgggtgggagaagcgcttgcagcaacagcttctcccaattcttcaattttgtcttcgaaaacccttgtaggagcaggagtagccacctttgaaggtttcataacagcgtctagaacgctggccattctcctccctctcctaggattcgtcgctggaatatttgttgtccttggcaactctagcagtactggagaaactgcagcttcggttgctggtcacttttcaaactttcttattttaacttctccagttgagcggtggtagcttcatctgtcgcaaagggtattacctccaaatttgagagggtagctttggtagattcaacagcctctacctttgaactttctacagcaaacagtgcagcagctctctccaaaacaagactttggccgatgagttacaatcttcattcttttgggtttcggcgcactagaaggcctagttgatgcaatccttctcttcgccccttgcttccgagctggaaagcagtaatcggggtacgcaaaaccaataacatcaaaaactctattaagcctttt

SEQ ID NO: 62564 - DNA, 928 bp, Zea Mays
atttgattaagtgcttaagccttggaattgtacaagattaagagttaaaagggtctgaagtctagctgtcagataatgcagagactgaatattgtataacagtgtaattgggcaacctttgagctaggattcgactatgatccagtaaatgtttggctatggttgctatagcaaggttatagctggatcatagggctacaaatttgttaaagacgtattagcaagttcttacacgaaaatccgagatctgggcaccacaaatctgtctatcaggcgctctgaacaacttcccaatggtacagtattcggatcagaacaccaggttcagatgtctcatcgctggcgactgtgcgcccaaattcgtgcccgccgcggtgatttgtgcccagcgcagatggataacgacgaaggggtaagaaatattgcactgtgcatgaactccaaccactattctactccagccgccgtacacgcctgagtcatggccgcttcagatagactcaccggagttagccaccttgcgaccttgctccacgtgcctgggtgctttaaccacgccaccgtgagtcaccttagcccatctggtgatcgccggtgagcttaccatggtaaacgccaccaattgcttgcgccagtgcacccccttttctccgaccgccaccgcgtgatctcaaattcacgggccaccgctcaagggccctataaattgagcacaccctcggctccgctatgtaattgtgcactcaacacacccacccgtgcctccaattactcaccagagcccccaaattgctcagttcccccaaattagttttccgccgccgtgaacaagctctcaccatggctcatgcactctaggtccgatcttgtcctctgctctcttgtttcagcacccttacatgcccctgatgcttctcgacccgaccga

SEQ ID NO: 62565 - DNA, 1021 bp, Zea Mays
tgaggtcggcaggtagcacgacctccgatccacagaccatgaaaaagggagtgtttccatgcaaggctcgactaggttgagttcttaggctccaaaccacatacggtaactctctgatccactttcctgcgaactttttcattcttgtcgaagaccttcttcctgagtgcttccaatatcattccattagccctttctacctgaccgttggctcttgggtgtgctactgacgcatatttgatctggatgcttctttgttcgcagagatcaaagaattcagagctagtgaaattggatcccaagtcagttataatgctattcggtattccaaacctgaatattatatcttgtatgaattccactgccttagctgaagtcagagaagcaatgggtttgtactctatccatttagtgaatttgtcaatgacaaccaacacgtgagtgtgtcctccctgagctttcttgaagggtccaatcatgtctagtccccagcacgcaaatggccatgttacgagtatggtctgcagttgctgtgctggtaaatgttgctgctttgataagaattggcaagcttcacacctctggactaactcggctgcatcactctttgttgtcggccagtagaaaccagacctgaagaccttcccaaccagagtcctggatgctgcgtgtatcccgcactgtccggcgtggatctcatctagcagttgcttcccagtaaccgaaggaatgcacttcatgaggactcctgctgcgcctcttctgtacagtgtatccccaatgagggtgtagtgggctgactgtcttgcgatgcgttctgttgcagctttatcatccggttcttcttcgttctttatgtatctgatgatgggctctctccagtcattagagtctgactctggctggctcaaaacattgcactcttctgcccatctaaggaaatactcgggcatggtacttcttggacgaaaactccaggtgggacctgggtccgactggatcctagtttcgacaacgcgtc

SEQ ID NO: 62566 - DNA, 575 bp, Zea Mays
gtttctcctcgctagcatagtcagcaaactaggataagcttgacatgcatgcaataagctagatctagattgtaattcatcgcacttatctagcaggctagcatacttggtatacaatgtggtaatgtttgaccagacaccaccacaaaagctctagcacactcaagctccttaagtgcggcttcatacgtgatctttcctctcacatgccataagacaaagtaacttgtcttgactagctaaatcagttgtcagctcatctacctcagtggctagatcaccgacaaaatgtgatattttagaagtgaagttgtcgccgatgttcttgtcgtcattgtccatcgccgtcctcaccaagtgccatagtgcgaaggcctcccatgatgtcaacaaaaagaatatagtctattgaacttgtcctcgaccctcatgttgagctcatcgttgctcgaagaagaggaagtgttgtaagagtcatggttaaggtcactgtgggagacaaggatggtgcactccttgagcttggccttgtagaggtacttctgcttaaacgcctacttgtcaaacctcccctt

SEQ ID NO: 62567 - DNA, 500 bp, Zea Mays
tcctacagctccacatactatatcttctgatcaatacaaatttgaccttgcaatcgcggtttcactacctcttgtaagtatcacgaaccagcctccgattgtaccgtcctttgcattgtgttttcattagatactagtaagaacttggtaagacacggtagtgtgtgttccattcacctagagagcgcgtagttgcttattagggataacctttattgtttgttcctattttggtgtttccaatggcaggatccgatgacgagattgaggtagtcattcccacacaattttctgattgtgtcagccgcgaagacttcgatgttatttgcaagcgtatggagaaaaatatggaggaaacggtccacaagtctgtccatgatgcgcttattgcaatggatcttggcaaagtgctagatagggtggagagacggataaccgagcttgtcgattgggttgccatgttggagacacgtccactacatcagcaacctcctccacca

SEQ ID NO: 62568 - DNA, 592 bp, Zea Mays
agctctaacaacttctgggccggccggcagccaagtgccagaaaatgccgtatgtgtgtgccagtttgactgactgctgcaacgcaatttcgtgatgtaatatatcaactcggctctttttatcctatgatgtgcacgaatcagcgacgagaggagctggacaagacaaattgctgactgcgagactagcggaacagagaagaaaccaatgcattccttgtttgttttttggcaagaagggcgcacacgcctggagccccaactgacttccaagctggcacagcagcaggcagcagcacacaaccacaacaccagctcacgcgtccagcacaatccccattccccccgtaaccacgcattaagcatgggtttgcgctctaatccgcacacgcacaatccggactgggaacagtgtttcgaaatctgaacaagacggtcggtggcactgtactgccagccaggctaggatgaggctgctgcggacgttttgaagcgagaaggaagcacagctgctcctgctgcctcagtattcacaaaaatctcacatgcccagcaaaaatgggcagttgctggccagtcgtctcgctctcgc

SEQ ID NO: 62569 - DNA, 649 bp, Zea Mays
gatgttacttaagttgtgagcaccgaacatacaaccctttatacttgcatttagtcaatataaattttttaaaaatgaaacacatgatgaggcaacataatcctagattttggaagcccacacacctagcctatgctatattgtgaagcatataatatctatttgctgactaaacaagaaaaagatgggaattaataagtagcagatatttaaagccgcaataataaataggcgttgaaaaaaatcatgttcatggcaatctgagcatcagtgtttggtatattctttcaccattttaagaaaatttcctccagatgtttgccatggcctgataatggctatacgctgataaaatcgccaatatgtgcatatacaaaaaggtaaaataaaatagcttggaggaagaatgccaaaggtaagtcgcaaataattgaatatatgcatttcaagttaccaattcagccttcgcagctaactacgccagaaatgcattaaaataggcagctctaggtgctaggttatttctgtcctatcatggttggacccaattgccacaaagatggactgttgaaataatgcttcataaaaatgtgccattaagatttctggagtaaaatgaataacaagaactaaacaattgctatctata

SEQ ID NO: 62570 - DNA, 559 bp, Zea Mays
tagggattttaagtgtaaacttttgtctgtgtgatactgaacctcggttgctgcgcaggttccgacgtttgggcctgcgcaagcaaccgctactgacaatactgattttgtggtggcctcaaccgtagtgcctgccgatgataaatcgtttggctctatgtccgagtgttttttgtctgatggtgaatttgggagttcgatttcgtggacggaggagtcttcggatgaaggcttggattattttgaagcgttagatgtggctgtagcggagccttcgccgcgtgtggagggttctgggggtctccctagtgcgagtacagggtataggcggcaaatggcggtggcgaagcaaagagtgagtgaattttcgcgaagtggtaggcgtcgtcgcattgggatggagcgtggccgtctttgcgtggaccgaactggtaaacgagaattgttgtccttgccaattagggcgagcacaggtgaaggggagctgcgaaatctttttgagggtgaggaattaaggataatgttgttcaattacagggagatgggtatcatcccgaag

SEQ ID NO: 62571 - DNA, 606 bp, Zea Mays
gatagatataccctgggtcctcggagcatggatatattctatgggctgcctggtgggcccctgataagtcggccagctgggcatactattaggccgcacccaggtagaacggtttccaccaaagaagatgacgctcggagctaggtgcaatcctgaaggatgtgcacgcggttgttatctatgcgcgcctatcgcagaaggattgcagatgttccggaggcatgctttgtgcacaaccgaatggagagattctcggaaggtaacttgtaagaaagcgaccggactgtagaagatcgggagcgttcacaatgatagaagatagactcagacgtgattagataagtatacaacttgtaaagggacatcccaccagtcggctatacaaggttgctgggtaccccctacaaaactccctctctctcgcccacgaaccattagatcgataggaactttttcatccaccctctcaaccgcatgtaatctatgaactcatagcaatcaaatactcaaacaccgcataggacatagggttttacactttcacgcgacccgaaccagtataaaccctgtgttccgacgtgcactcgcgcgtaccatcgagcagcg

SEQ ID NO: 62572 - DNA, 548 bp, Zea Mays
attcaataagcgattcaagccgcctaaaaatgagtcaggcaactggcgccgtttcgcgtaacatggcaccggttggacccaagtcaactactcaggcaaatgattacatctctccatcatatcaagttactacttcaggacaacacgataaacactctgcgcaccaagacacccattgggcacacccattgggtgtgtcgcccagaattttcaagatttcctgaaggaacgatatccacaaaatatacgcaatgaatgtaccacgacaaaagggggagatcggttgagacgggaagaagtccaattgtggctactgaagcgcaagtccaatcaaaagaagcattgaagcacagagttgtgtgatgtccagctgaaggccatctgtctcaactagccagatgtccaacctatcaccgatcaaattgatttcagacctaacaaggcatggacagatggcatcgcccggttatttagaaaatgctgatttcaaaagcataaaaaatgaagacatttgaatggattatttctaaaatccactaaaagctcgg

SEQ ID NO: 62573 - DNA, 500 bp, Zea Mays
cagaacgcagtgaaggtggatggcgggttgatttaaataaagaacaggggctcttttgcgaaacagacaggccgaatggggtgcgggtaaactccgaccgtctgatctgagatgagcgcttctgattagatccactcttatcccgaaccggtacgctatgccggccgttggatttgagatcaacggctccacgatcccacacgctcagctcccttccgattagatcggacggcccgaatccattcccacgattagacctgagccctataatcacaaccgtcccctcttcaatctatggtcagaagactgtcaccctcctccgacgttggttcacggcgcgcaggtcacctcacggcggtgggttcgccggagatagtgaacccgcccccccccccaagcgccataacccaattcgttcggtccacgcaaagttaatgactcactgaactctttactccaaccaattccagccgaaatcgaacgcagcaaccggcccccgg

SEQ ID NO: 62574 - DNA, 472 bp, Zea Mays
tctgcagactataactaaaattgagatttccaagagtcgtgaaggagttgggaagttcttatgcaggaagagggacgtatggtggtgggttccagatgcagcagaccgcttggcgcccagctggggatgcaggcggacgtggtgggagcgagcagcgccgtggttagtaggactggcgacgggtgacagggaagaactagcgtgttttttcccgatctcgcggcgttctattttgtctgaaacatcagtaatgcttatgttaatttctgaaattatccgtggtatctcaaactagaggtgtttttttagacttgagatagaatgtctttatatgttgctttatggagatagaatctacgagatcagattttctttcctctcctgtattgagtgcttgtccattcagtcagattggttcaagcacatataatttggtcttgatctcttggaggagtatactggcacaaaattt

SEQ ID NO: 62575 - DNA, 277 bp, Zea Mays
aagaaactagatctaaacaacaactacacaagatgtatctaataccactgttatggaatttgttagacacatctaccgcttcacccagttaacttgcaagtaagagaccacagatagttagcactagacaaacaatgtagcagaagaagagttcgagtactgatccaacgtagacgggcgtcgaaagagaagaactagtcgatcaagatcatatccttctccatggctgatcggtgaaacaatcgtagttgtgcttccatgtagtccacaagtatgg

SEQ ID NO: 62576 - DNA, 678 bp, Zea Mays
gaaaactcggttgcctatttttacatttcagtttatgttttcatgaccttcctatcttttgagatcccttcctatttcgttgttaagtcattacctttcaacgatttctattcccttggtcttagtatgctcgtgtccttggagtcttgcatactctcatatttttatgtatgcttatctttcataccccaatgactgttcaagacatttcattcaatatatccttgaccacccttgtttcttaatgatccatgagtgatcattttattttgcacacctgtggtaatctcgttgtttccttgtaactccactcggtaatgaatctttacttcaacccttctgttggaaccttaccgatcttacccttgattgttttctccactttgtcgtttcgcgagtcttgtcttaactatatcctttgttatgcttttaattattatcatatgcacccttgacacctctatatcctacattgatgtttgtctcatacctgccctttaaaatcgcccctctttcgtctcataccttctttctcttggtcgtatcctcttctttggctcacgagtttgtaacctcatcctttgttgtgcttttgtttcttattgcctttacccctctcatctctcaatcttaccatggtgattatgctatgtttgttatctaaaacctccaatctcc

SEQ ID NO: 62577 - DNA, 545 bp, Zea Mays
tcctatcagcgatctattcaacagacaccctaggcgacaccatagactcagcagactcatcaggctgcccccactggcaccccgatgagacctacaggccagggcactgctataggcactacatgcttcaagtgtggcgtggctggtcactatgctaatgtttgtctgacgaggaactccaacacaccggctcatggtaattctcaaggcaagcagacacagactccaggcagcaaccgtggttacatcattgccagggttaatcaaattaatgttgaagctactgaggatggtcccaacatcgtcattggtacgtttttcattaattccgcactagctactatactttttgattctggagcttcacatttgtccatatatgctcgttatgttcatgcaaatagtcaaccttaccttgcactatgtagacctatgatagtcattacacctaaaggggcatatgaagcaacatatatgagtcataaaatagaagtaacaattttgggaaggaaattttgggctatgcctatagtactagaagactg

SEQ ID NO: 62578 - DNA, 659 bp, Zea Mays
tgcaatttgtactctatggcgcgtggataaccgcgagacgtaaaaagatcgaaagggaggtggatttggtctcggacgtgagcttatcggacgcactcgattgcttgcaatgtggccaagcggtcaatgtcgtcgtaggacgctagcgatctcagtcgcgccacgccataggccgtcttaccacatcgtcgcgattcgtggagtgtaaccagggattgccataggactttgccccaatgtgtgccacggtgaacttgccttagtaaaaatatcctatcaccgccatgatcctaactttgatcaaattcggagcaaccgtggccggcttctataaattgagcgtctcccttgctccgcctccttgttaggaacctagcgcaccactcctcgctttcgattatccacagtagcccaggaattcaaaaatcccccgaaatcggtgatccacgccgccacgaagcatcttgccatggtcaaagccctctaaggtaattatggtcgggcctaagagtgttttgagttctcttacatgttgtgatgctgatcgacctgcccgatcgaactatatcgtagccagaaccccgaaacaccgtgtcgccaccgtggaacgccaccgcggacactccctccatcaactcaccgctctgtcccttcacccg

SEQ ID NO: 62579 - DNA, 759 bp, Zea Mays
tttctgcctacgcccaccccgttggtagaatcactagccttcgcagccggatggtcagcttcagcactgccaacaccagtagtccaagccccttctcccggatgcgacgacccagacaactctggtgacgatgatgaagacaacaaagaagaagaagaagatgaggaaaaccccaacgaggaagccaacgaagatcagcaggaccactacgtggggttatggcctgtcattgaacattacacctcaatgttcgagacagggcactttcctaacctgctgtaggatgttctgcacgcgttgggaacctatgtccgacccctgtacgagaccaggcgagtgtatgagcctcctcaggcttgctactacatcactcgcatttatgtcagggtgatggatgcatgtgatagagggttcaggactatgtcagcacatgagtctctgacgccgctatccacctacactgctttggtcagcaacgctgctaggccaactctgtggtctctcagccacacctaccggtagcagctgcacaataagaagtacatgcatcttcctctacgtatttgtggagagaaccagactagcattgttccaggtggagcaaatgaagatcgcctcaacaccttagctggtgtggtggcaggtcttaacaccaacctggatagtgctaccctggacctctctagggtaaacttggagctggaggatgcacatgcgaggatcacagctttggaagcccagcttgatggaaggaatccc

SEQ ID NO: 62580 - DNA, 396 bp, Zea Mays
ttgatctcaagtgcttagattccttgtgtctactttcatgtactaaaaaaccattaggttaggttccatgcaaccataactatcaatcctcatttttccctactaattcaaaaggaataattgaacaacaagtatctttgcactgcttaggaagtttcaggttaacaaaatacaacataagtatttaatataggtaattaagttggaagatgtaatccctaattatgtaaataagttagtaatacgttccaaataaaaccttcatatttctgacaaacaaaactttatgttcagatccggtaaccatagaagctgctaagggaatgaagggcaaaaaacaaaatgtaaatgttgcaaatggaccaaaggtagggtagagctacgatgaagaggact

SEQ ID NO: 62581 - DNA, 410 bp, Zea Mays
gctcatgatttatggaatagaattaaaggaaaatattctgtggcaaattgtgatgctcctactccctatattacttgtgatactaaccattcaaagggagaagaaaagtgttgggcaccaaacgatgaatccacctcgtcgacaggtttgttctccactaataataagtgttttattgctaacaatgacggtggagacaaaagtcatgatgaggaggaatatgaggatgatagcgaggatgaatgacattaatgacagggaaaatgagaccgatgatgtggaagaagatgagattcgtcgtttctacatccatctcaacaaagaggacaaagcactcttggttaagctgttgagaaggaacaaggaacaaggcgagatgcttctcaggctagaggagtccctcatcaaaa

SEQ ID NO: 62582 - DNA, 728 bp, Zea Mays
ataagaattctatattttctaaggcaaatgctaatctggaaacaataattgctaactatttactgtttgctcactcttccatagtcaaacaacaagttttaccttaatccatgtagggatgacaatttaaccggttcaggttcaagcatagaatttgatccgcgggtctcgcacacacctgatccgtaataaaagaaaagggtcgggtacatatgttttgtcgcacccgcgggtatccaacggatatccgcaattagtgaaactatttctcagcccaccataactccggaagctggtccaaagtcccagcagtccatcaccattgtctaaggcatctcaccctagtgcaagcctcctcttcactcccctcctgtgatatcctattcccctccttactgccagctccttgctcccagccccatgagaccatgtcaacgactcaccatgatgccccaaccaccacgcccaacgccccatgccaagccatcggccaccacgcatgaacgccccacactaactaggaggcccgaaccccctcttccccgtgaccggcagcgacgccatcctcttctagtcccgacgatctactcttgatcgggcatagccagcgccacccacctgcaatcccgattgggcattgtcgatgctgcatcaatcaatcctgaccttcatcacgtacggacccatcttcgctgaccactgggagctgccgcctgccagccctagcc

SEQ ID NO: 62583 - DNA, 307 bp, Zea Mays
ggttttacgaatccatggcaaaaacaaatacggagaaaatcacaaaggagataatggcagatttatctgaagattctgatgatagtgatgaatttgctatggagagtggagatgaagattctgaggaccggccctggcgaccaagagataccatcttcggaaatttgacaattaagcaaagtcatgttgacactatgaggggaagatactttcgtgacatgtctattatgagagttggaggagacagcactgcccccgctcctaaagaaaatgaggtggttatttacaaaagctttttgaaggcggg

SEQ ID NO: 62584 - DNA, 400 bp, Zea Mays
gtggcgacggtgatcatatttggaggaaattccgagttctcgggccacaatggatggattgaagtgaggagtggtgcactgggcgtgtaacaagagggcggaatagggagggcactcaatttatagacgtcggctacaggtgctctgaattttggacggagatgagctaacggtggtgaagaggtgagtcaccggagctcgtttaccatggcgctcaatagggtaagaactcagggcaataactggccatccaccacgacttactacgacgtggtacgatagtgtatggcgtggcacgatcggagtaaacgacggtcatgatggcggtggtcacgtgggcacgtcgcggggcaagtgggtacgatgagaccagctgaatccactccccctcagatctttt

SEQ ID NO: 62585 - DNA, 433 bp, Zea Mays
ggaggtcagacagtgtcgcctgggtccgctggtcacatttgcggtctagcggcggtcggagaagcgcgcagtcaccagaaattcctcgccgaggttggaagatccgccgtgcgtcgtgggtggcttcattcggctcccatctctggtgagtaaacaccacaccacgttcgctcctcccttactaatgcgtagcacccaacagaatcgtgtttaaggcgctagaaccgagggctccggatggccggcgatggcgccgccgcgcccctatgtggcgccgccgtcgggacagcctgggattggggagctgatcgcggcccgtcgatcgaatgatcgatggctcagattagaagtaggaaacgtttcgggtcagcaaatctgcaccgtacgatctgaaccaggggctgtgattgaaacttacctccattaaaccctg

SEQ ID NO: 62586 - DNA, 582 bp, Zea Mays
ggaacaggatcgcgccggtctcccacagtgaaggacgtgatccccacgacttcattaaggcctactccccaccacaagcgctcaggcaaggtatccctctcattccccaccttggagatattggtgtgctgtgtagatatcattctgtgctgaaactgactactcatttactcaatggagttaccaatgtctcaaagatagctatctatgaattttggatcaatgtattgtagttacgtttggagaaataaacatatgtagatgaatggttgtattttgttccagtgtcagaatggatattggcctggtcaagcgtcttctgcgttactctaaaggttctgatccatatctagttggtgtagagaaattccttgaatttgcatttaaagataaacctgaaggtatcaagatttattgtccatgtcagacatgtgtgcacactactgttcaaacaagggatgacatgtatgggcatttggtgtgtaatgggatacttgagaattatgatgaatggaattttcaaggtaatgtttcagtgcaacacacaagtagtccagaaccaaattcgaatattgacgaaag

SEQ ID NO: 62587 - DNA, 829 bp, Zea Mays
tcgccgccaagcggtcctctcacccgcgccgccgattctgggttccggatggtcctagcgagtcactgtgtcatcctgcacctattcgtgaccgccacgggtgaatcaatcaactgagctgctgttgatttctcgctgaagtggaggaagcaccgtgacaccgtactttgtcattggcaggactacgcagtactcgaaccagtagtatgtttatgcccccgtcaggttcgtagattcccgtaccacgcgcaccacccttcgggttagtctagggcaccgggtcgtggttgggtgagtcaccggcgcggttccgccgttttggctgggcgctgttgctcgggtcaccacgggagaagaatagatgagagagagaaccggggaggggatgaagactatgtcctggccatcggatgcaccaggaacagctatgattagaagctggcgataccccttcgtgacattaaatcggggtcgttgatcttcgatcggacgaatagaattagatctagaatcctcgccgtcgtatcctgatccatcggttctggttataccccgagtcagccgcggcggaatctaatcctggccacaagttttgaatccaacggctctagttacccgataccccttcggcctgcaaatctttctaaagagcccccgaagtatttagatatgaacccgccgtccatgcctggtgttttctgagtcttggaaacacttacaccgagacccctgagttttctagaaattaaggccaaatccagagagttattaaatcagagaaatgaattagaaaatgagtttttaaaataaaaacaatacctagaatttg

SEQ ID NO: 62588 - DNA, 1255 bp, Zea Mays
aaaactctccttgctagccaagacttcctcagcttctctcacctctcaaacaaggccatctaggtggaaagagctcgagaaaaggaaagaggtcacctcaagagaaagtttcagattctccgagctcaacaagaagacaggcaccagagggttcgatcttttgggtttcctcccaaggggtcaaatctcagcaagccagcaggatcttctctgtcgcgtttcaaccatcttggtcagagttccttccacactcagtccgtcgcaagcagccaacctccaaccaatgcttgttggcactgtggtgaccccggtcacttcaagaataattgtccacaactgaagccgaccgcacctgcctactccaacttagtgaatggccccaagaatgttacaacacccacctccaaggcaccctccaccaacagtcagttaagcaggtcgcagttccacagcacggcttgagtgaaccacgtcgatgcccaggaagctcagcaaacccctagagtagtactaggtgagttcctagtcgaatttgcccctgccgcagtacttttttattctggagcatctcattctttcattgccactagttttgtggaaaggcatggcattcccactacaccattagaagaacctctgatcatccgaaccatagggtcagaccttctgtgccacctcaggtgctcccaagtcagaattcttttaagtggtgtagtattcctggcagacttagtcgtactaccatcccacggaattgatgaaatcctaggaatggattggttgtcccggcataatggcatcataggctgtgcagataagacagtccttctcaccgaccaccagggaaagtcagtttcatttagagctcaaccaccaacccaagattcgatgatattcagtctagcaacagagggcatatctatggtagaagaattcatggatgtctttccaaaagaattgccaagaatgcctctggaaggagaagtagaattctacatcgacctcctccctggcaccgcaccggttgcaaagagaccgtaccgcatggcacccacagaattggcagaattgaaacttcatatcgtagaacttcaacagaaagggttcattcgtcccagctcatcaccttggggagccccagtattgtttgtcaccaaaaaggatggaagcatgagaatgtgtattgattaccgatccttaaacgaagtcagaatcaagaacaagtatccgctacctcggattgatgacctttttg

SEQ ID NO: 62589 - DNA, 537 bp, Zea Mays
ggtcaccaacctctttcatggactgcaagaacacaaatagcattggacgcagcgcgcggcattgagtacatccatgatcatactaaggcctgctatgtgcaccgcgacatcaagacaagcaatattctgctcgacaatggattaagagctaaagtaagcctcttataaacgaccattttttttgtatctactcagatatatatatattgttacctgttgaacaggttgcagacttcggactggtgaagcttgttgagcgtagtgacgaagaggaattcgtggcaactcgtctagttggaacgccaggataccttccacccgagttagttttcttttgaatatgatttgcggtccgacgaccagctgctggtacatgcagtttcatatgcactgtatgaatttaatttaatttaattctgcaggtcagttcttgaacttcacatgactaccaagtctgatgtgtatgcgtttggagtagttcttgcagagctcatcactggactccgcgcgcttatccgggataacaaagaagtcaac

SEQ ID NO: 62590 - DNA, 579 bp, Zea Mays
ggtcgtgttcatctgcccatgttcttgcgcctgcagaggtcacaaccgtgtgaatctcgccaaacgtcttgtgcaagatttcttcctggcacgtagggctagctagtttgtgtaagttccaatggaagatctgccctagcttataagatgtgtgggcgccaagtcttgtctgtctacactgttcaccagcgacaaaactgatgccaaaccatgtcaaacgacctcggtttgatttcaaatttttcaggggtgtgccttgggtaatttggccactttttgttatttggtccaagtggttttggcgctagcacaagggtgaacacatttgatctttggggtagggttggttttgggacttagagaattttgaatggctctagtgtgctccccacttggtgaattgttttggggtttttgttgggcctttttgtaatacctcccttaatacattttgtagatttactaatatacttcatatttggtaagggttcccttttatgatttggccatttacacaattgtttccttctaatcccatatttagggttaaatgccttaagaggggatttagggttttag

SEQ ID NO: 62591 - DNA, 385 bp, Zea Mays
caaatcaagcggaggcactagaggacttggtgatcggatggttgaggaccgacagcgacacaagtcgagatcgtgaagggaatgtatcaaaatacgttattcatagggtttggtggtttaggcctcaaaactatcgggcgaaaagtttcttgggtttgggtctcaaaacctgggtgggtttctagtgggaactaaaggcagcatgtggtgccatcacgaagcttgcatcgatgtgaagcaaagtcataaagaacatatgacttccagatctgaaaatcttgagttagatcataacacccctgtggttaagtggttcagatctaagtacttaggggcaagttagtaatgtttaatagccctataaataagggggatttttccaacc

SEQ ID NO: 62592 - DNA, 466 bp, Zea Mays
gggatagttgttgatcccgacaaggtgcaagaagtgagggaatggaaacctcctactacggttcgatagattcggagttttctgggattagctggatattaccggcgattcattctagatttttctagaattgctaaaccaataactgagctcttgaagaaaggagtcagttttgtatggaatcagaaatgcgaggatgcctttcataccttaagacagcacctgacaaccgcacctatgttagcacatcccgacaacaacaagtctttcgatgtatattacgatgctttgggaataggacttggatgtgttctgatgcaagataattgagtcatcacatacacgtcaggagcacttaggcctcataagaagaattatcccactcatgacttggaactagcagctgtagttcacgctctaaagatttagagacactacttgatgggatcccgctgtagcatctaca

SEQ ID NO: 62593 - DNA, 1030 bp, Zea Mays
ggaagcccaggctagtcaatatgggcattttggttgaaccacaccgagtcaacaggtcccagtcacggtgccgttacaccgtttcctccgtcagccagccacctctcccacgtttcatgtttctaaaaccgtagtcgcgcattcaacggagacaaaccagcgccgatttgaaaaaaaccccagccgcgcagattttcctttcgtcggaggcgactccccaggcgatttccgcgcctccaaaccagcgcagcgccaatccaccgccgctccaatccagcgcccttccattccagcttacatccttcaatctcccatcattggagcccgattcaagaagttccaggtaatccaacattgaaatacaccgagtttgccgtcgattttttgaagcctatcggtcgactgaagtggatttgattgtaacccttattctccagctaaatgtgtgatttgtatccgtttagacatcactataatcgggtcattgcatcgtgcattgcatctcttttttgtttaggagccccgatattatggcatgtgtatttattctatattcccactatcgcccgacattcatagatttagacaaaggctgtgaattaggtatttactgatgagttagcatagagtactcttatacaacccaagtaacacatatatgctttttgtatgtaatatatatgcatatcttcagtactgtttatgcacattcacctgagtcatttgtttacacatttgttttattatatatgcatatagtcagtactctttatgcacatttactttaatgatttgttttcacatctattttattatcaaatatgcttatttgtatttgatatatatgcatatcctcagtactgtttatgcacattcacttgagtcatttgtttacacatttgttttattatacatgcatatagtcagtattctttatgcacatttactctaatgatttgttttcacatctattttattatctaatatgcttattgtatttcatttatatgcatatcctcagtacttttta

SEQ ID NO: 62594 - DNA, 477 bp, Zea Mays
ggttacataacctatccaaaccattcagaagcaaaacaatccaaccaggttctgtctaatcccatttaactcaaagccacctactaaactagctgctccacctactactttatcttaactacatgtccctaattcggataacaacttcaagaacgcgacctcatcaaatcaaggaaggataagattcaagccagatcttaaaaagaatcaagagccacaatcttggatggagtcttttcttatcctactctttcttacccaaacctataaatgctttaaagatatcttttatcctacataataaagtgactatacctacatatacccatgctctcctaatcactcactaatgaaaaaaggactcttgatttttggactaattagaaactaaaagctaaaattccaaaacactcttcctatatcctcttacttacaaatctcgaggacgagattatttttaaggggggtagaatttgt

SEQ ID NO: 62595 - DNA, 383 bp, Zea Mays
cagaatttttggaaatttattaagctatcttgtagttcaaacccaccttaaaagcataaaagaaataagaaggaagagagggaataataaatctcactctaatgatttagctagaaaccttaataaactctcaccaagaaaccaaaaaaattatcagtggaacaccaaaataaacctaccacttagcttaaccaagcttgaccctaaattgctaagtataccacaagaatcttcagtagcaagattaagctctaccctattaatttgatcagtcaccatcaaagtttaattgctaaattgcatatcatgccctgcatatatcttactcattgcattcattagattgcaatctcgctgacagagagtacatgctcatccccgag

SEQ ID NO: 62596 - DNA, 466 bp, Zea Mays
agttatgtagggaaattgtatagggtgaatgattgaacactttctgtatatgatggtatgttttagggagatatagtgaaatacaataaagagtacgtatggggagagaaatattgagaaatggttggaaatggcctcatgtgtgcccttgcgggcatagctctgttcgtgccgggttttgtctcctattcgtttcctcctgtcctggccagggtgccaggcccgcttgctcgtagattttttaggcttgtttctgacgagtgaggagtgagagtgacggcgtcgcacgcccctggccacgaattggaacgtgtgacctccgcgtttctgcaggtagtacagtaccttctcttctctcatcggtggtagtctctcggggggacaggaacaggatctttccaaaaccaggtgacctagacacgcagtagtacaacgtcgatcgacaacgatgcatttgcacggcgat

SEQ ID NO: 62597 - DNA, 389 bp, Zea Mays
gatccataactctagtctagtatgtcaaccaaagtctaaaggagacaaaaaaaagataaaatattcgttaaatgaccaatcaatgcattaaacgtcaaacctaattcgcctgcagacggtgatatctgaacctcaacttttatacttcgtcgtattgtctggctaggcagctgccgattgccactgaccacttgacttatctctaccataaccccacaaccaaagtccaaagaaagtgatcacgcgaagcagcggaatgagcggcaacaacttatatacatactatattagatcttgtggataataaaatctacacatttcaactaaagttgtcacctgataacattatacaatgtttttactatacaatgttttttatagtattgatg

SEQ ID NO: 62598 - DNA, 311 bp, Zea Mays
tcccctcgatcaattgcatagttcgagctctaaatcaccctgtccacggagacagtgcgaaccacggatgaacagaagtgttccttgcgttctagtgcggtctagcttaattgaatgggtcgaggagcatcagtggcatgtaagagtgctgaaacaagagcgcagaggacaagatcggacctgaaacgagctagccacggcgaggacctttttacggtggcggaaacccgatttgggggaagtgagcaattcgggggctcaggtgaacaattggaggcacgagtgggtgtgttgggtgcttgaataccaag

SEQ ID NO: 62599 - DNA, 302 bp, Zea Mays
ctgttgtgtatggtacgtggtggtggctatgcttgcttttgtatagtttattgttgcatgatgcgaaccagtaattcagtccacacagctgatcgatgaccacatgtacaccatttgcccgcgccatccattaattatggatgtaaatggtacggataatatctatcgtcagtattcgaattcagtctatctaagagatttaaaatccgatctgtatccgtccgaatcaggattggacgagtaataacaaatatgaaaccagtaatatccgtccgaatcaggattcgagtacacaatttgcc

SEQ ID NO: 62600 - DNA, 323 bp, Zea Mays
tgttgctgacaacaccggcaactccactaattaaagttgcccatggtgggtaaatgccatcacacaaataatagcccatggtatattctgtcccattaacaatgtaactgatgggaggggtatcaccttttgccaaacaccggtgatcgatggagcacgtttatgtcgttgcatgacccatgcaatccgaaaaaagcatgccatatccacaagtcatgtgatgctattgcttcaaggataattatgggttttttgaaatgacctcgatagctaccgtgccaagcagttgggcatcgttcccactcccagtgcatgcaatctgt

SEQ ID NO: 62601 - DNA, 288 bp, Zea Mays
gttttaggtgtttttctgccctgaggtgtatgatatgcttagagtgtggtttatgagatgaaagagacttaactgaagttttagtttcttaagtatgatgtctcttgctcaattaaagtcacatatgataatggtcacaagttggggcactttggcaaaccctaagtaacactggggtgttacagagacagagttgtcaaatatatgagatattgtttcagatcctcaaaagccttatgttgagtcggtccccattgaaatactttggctgactttaatacttcgaag

SEQ ID NO: 62602 - DNA, 810 bp, Zea Mays
ctccactattatcatgttgcctggctcccgaattgtatgagttgtgtgatactttgggttctgcacccagaagttgtgtgagagagataggtctttaaatatggacatgtggttccacttttccttctcttgcttcctcgcataatctgttgcacttgctaaaacgctcatttttcctcttgcctttttcatcctatattagtatgtgttcactccccatcatagcgtaatcactatggtcatgacctctactttagatgagaatcctcaactagtaggaactagtcaatgtgtgcgacctccttaggcatctaacaacatgagcctagtgtcgtacatggtccacacacctcaagaggatatgggagaatgcatctcctactctcacatgatggtggggatgaatttccagatgtcaaagttctttctccacatcttggtcttctattgtgtctaggttaggtatttcaccccaaaattcatccttgtcctcttgaccttgacatacctgtgtgaagttgtagggtcgagatggcagactagagggggggtgaatagtcctttctaaaactaattacgttggttaacaaaaataaatacaaaattaatactatttggtctaggcaagactatacccttctaactataacaagcaccttacaaaagatcctaattgaagcaactaaggtgttgagatagaaagagctctcatacacaagtctagatagcaaggtcacacaaacctgtccaactataattctaagcacatcgagaactcctacacatactagtgagcaaagcgcacaaagc

SEQ ID NO: 62603 - DNA, 666 bp, Zea Mays
cgggatgagtaacctaggtatggcacaaaaaataagaacacatctagatctatttcctgactctcgtgaatagtcctccccttcagctgatccccgaccttggatccctgactcgttccacccctagccgcctaacaggctaggatatgaggccaccacttttggaatcgactcacccgacccaagggtcgggacatgaaaccatatcctgtggacgaccagctcgcccgaccaggaggttaggaaactatgtctgtcccctcgaagaccgcatgctcttggaggtcatactgaagggcgaaagccatctctaagatggtacaaaagtaccaggacgacgctcgaatgatggaacgagagttgaagagtggacatgcatgctctgacgaacgaacaacccaaatgactactctgaagtgggtatgcgcatacgctatcattatgaaagctggccaaagttcgatcatgccacaacccgagggacaaccgtgtgtacacgccattataggacaagataagacacacctcaggactgtaacacggtaagaagggacgatgctaaccattggacgacggatagcctagagaacaaagaggtaaaaccacaaaaccaaagccccatcggaccggtctgaatgacacatccatgtatataggttgcccctt

SEQ ID NO: 62604 - DNA, 881 bp, Zea Mays
cgacaactggtccaatcggccattaacgaggatcggttgagatttcaataaatacaggtgtacacagaaccttttcctatgaacatggtagattttgatggtaacaaagtcctggttaagcctgacgtggctgataaggccaaaggcaaagaaatcatcatcgacaactctcgagctgccgatgaaaataccaaacctaattgcaggaaagtggttgctaagaagacccctgatggaggggagacagtgaagatcaccatcacgacctccaacgctagggggcaaacgtgtgtaggtggtcaaccgcagctccttgttttacgcaccacggacgatacgcgtcactgacagatagttcaaacggacctcacgaacggtccatcagcacgcaggagcatcaacgaccttgtaccttcagaccacgatgaccagaaataggtacgtggaagacaaatgcagctaaagcgtcaggtcggctgatcaatgttggtccatcttttgatcaattattatctaaatatgtcaaaaaaggattggtccccatggtcggccagcaaagcgacctcactcaccttcccaggaggtgcaggtaaagtcaattggtcatcccaaaacaatatctagttagtacaaaacataccttcatggacacctccatcccagtatgcacatgtgccatatcattatgcatacccaccaccaccctatgcgacaaataaaatgtgggggcatgccaccatatccatatgggaggccataatattctgcttgggggcaccccaggtttcagtgcttgacaggttagcaccaccagtgcaagaccgattgagtttgcctcaatccagtcatcagacacaggaacaacaagattttcaaaacac

SEQ ID NO: 62605 - DNA, 394 bp, Zea Mays
ctttttcagcctttgacaattcttgtccaattaagttttgaaagttgaaattttcttcttctgaagtatcttcggccgcctccttctcttttctaggcactgtggccagggtctcttcggcggctgtagcagcttcttccgtggccatatccagaagcattttatcaatatcagaaaatgtgctctctagatttgtatcttcggtcgttgcagcttcggtagctgtagcgctctcgacatctggtgtctttgacaccgaggccggcggtggtgtttcttcaattgcttcagtcacagtaataatcctccattttttcggcccagcagacttcttcgctgccgagggctccttcttcttctgtaaaagcttcgtcagatgtggccccagtggact

SEQ ID NO: 62606 - DNA, 488 bp, Zea Mays
tggttccatcacaggacacacctgctgccgaagaaacgcaagctgatgtcgaagaagttggttccgaggatgagtacagctgcgggatgcctagcaaacctagtcatttggactttggaaagtccaccatctctgaagctgatcttccaaaaatggtgaagctgggctactttagtgagggaaaaaaggagctggttcgtttcggcggagaggaaattattccgaagccggaaaagaatgaggttgtggtgttgaaaagcttctttaaagctggcctaagattccccctgaatgagatgattgctattgtgttgaagaagtttggggtttaccttcatcagctgacccctaacgctattgttagattaagtgtttatatttgggccctttgtagccagggagtggaacagttcggtgaaggtttctgccgagtccatgaactacactatcagactaaagctagaggagatggtcttcatgagaatttt

SEQ ID NO: 62607 - DNA, 378 bp, Zea Mays
ggatgatgccattcatattgctaacctttttttcaaagggattgttcgtttgcatggtatgccttctactattgtttcagatcgtgatgtaaaattcttgagtcatttttggcgtactctatggaacaaattgggggacaaaattgatgttttctactacttgtcatccccaaactgatggacaaacaaaagttgtgaataaaacattgtctgcaatgttgcgagcaatattgaagaaaaatttgaaaatgtgggaagagtgtttgtcgcatgtggagtttgcatataatcgggcggaacactccaccaccaaggtaagtccttttcaggtagtgtatggttttaaccctcgtgctcctattgatcttttgcctctac

SEQ ID NO: 62608 - DNA, 472 bp, Zea Mays
gtgggagaggggcagtccccaagtccctagagtgattgaggaaagtgccgatatctaagatagagtgagaaggcaagaactcgtctacgtgtgtcctcctgtcccgtggagggaccactgccctatttatacaccaagggaagcgtccgcagtgaagctgggtcctgtattcgaggagggatgtcctggcgtatgacgtgacggggatccatgcagtagattcgcgctaactgattctacgtagaatgccggggccgagggtttgtccgtacgcccgagcccctaaggcagaggccgcccatgccgtagtggctgtaaacagcgtcagggtatgggccaaaggttgcttacagggtgcgtcatcgtcctggcgcgtgatgacgtcgagattccttgcagcgctcattgagatcagagtccctgtttggttgatgcagaagtcttcccgaggcgctgactaagtcgtgcacta

SEQ ID NO: 62609 - DNA, 856 bp, Zea Mays
tcttaattgtgttcgtagttcatgtacttatgtacaaacaagctacatttatggtgattcatggtaaaaaatctttatagtgggttttatacaattgaccatcctaactataaatcctagctacgccacgccctgtagtacctctcctggtcctctctaaggcatcctgcaaaccattcttgctgcctgatgttcacctcactgccatcgaggaatgtgaactagaggttgttgcttctttgctgacagcaggtttgccccgtcgcaaatatgctatagtgctggcggcaatgaccacctactgtcatattaagatatgataggtcgtcagctgcttagtgaataaagagttaattcctttcgttggctcatatattttcttgcttaataaaaaacgaacgctcattcaggatgttgcagtgttccatgccacacccctccttttgtgctttgctcacttcatgttcgcaacaatgattaatagcctaggtaactatccgtattttataaatcttgatgctaacgttagtttattggtttgcttcttcacaaaaagaattattagtttgattgctgcttaaatacatgaacattattgaggagtaacttcagatttcatctgtattaaaatgatccttggttagaaatattggatcatggctctatactctttgtttacattctccttcaacgtgttgctgctaagattaataagcatgaggtgtttatcctcagatgcatagattatataagcaggtgcaagtgacaacccattggaaggtaaagagttcgtgccatatagaattagtaggtctataaatttctatgtgcaatttttcctttatatattattgcc

SEQ ID NO: 62610 - DNA, 450 bp, Zea Mays
aacgcaattgcgctaggaaccctctgatcgccaggaacacactcctctgtccgcaatgttcacggtcgtcatggccagagctaattatttagtcgttgatgaaattaggttaggggaatggatcggggagggttcaattgggtgttagtcgcttggggaccctagtcgttgccccattcggccggtcctggagctcgccggagctcggccgcgctcgacgccgtcgtggacccagcgcggtaaagaattagaaaccggagggtttatgtgcaaaccgtcagcgactctgtgaaacagtaaaagaacccgtttccagttagcaaaaaccccgaggccctttctgtaaagccgccagcgctgccgcggacgcgcgcgcgattccgcgtggacttgggccgcctgggctgaagccggcctagtactgtttaaccttttcccttttctttttca

SEQ ID NO: 62611 - DNA, 664 bp, Zea Mays
gtaaccgtggtgtcggtggggatccgtgaccagcggtgctcgcggaatttctcaccggagctccgatctgtatcggatttcccccttcccgtgtgtggagcacggtgcgccatcaacgtcggtaacaacttccccgatgaactcgtgttaatccctactgcattttaaagtcgttagtcaagctagcgatggctggggtaccgaattagcctatcaccggcgtgttgccgtcacggccatgttgcgcggggagggacactcgaccatcagggggagaagacgaccccacggtcatccatcctggattagatggtgtagattagatctcgcacaacggaacaggtgccgtcgatctgctcacggacaggtccgattggattgcacataccttttcgcgcgatcagatctggaccataggattgaaatcgaaagggcaaggttagattgtagctatttgaatccatgtcgttgatccctaatccaacacacgatatcacgtaccggttcgttcatgtatcggtctgatctagcgcgttgatctcagatcggatggcagatctgcgtccgcactctgcgtcaggctccgatttgcagttaagccctcgaagaaactggaaaccaacccgcagtccgttgcgatattagactgagtctagggtatttt

SEQ ID NO: 62612 - DNA, 838 bp, Zea Mays
ttgtattccaatccatttcagaaaattaagaattagggattgggctaaagttgaagagcgctttgaaaagagccttagcagctggaaagggaaacacctgtctatcggaggatgcttgaccttgattaggtcagtactcagtagcttaccgatgtatatgatgtccttcttccaccttcctaaaggagtccttaggaagctcaactatttccactcaagattcttttggcagggtaatgataacaaaaggaaatatagacttgtcaaatgggatattctatgtcaacctaaggatcaaggggccttggaatcctagagttgaatacgacgaatactgccctccttagtaaatggatatacaaactactcacctctgatggaatatggcaacaacttctccacaataaatatgtaggctcaaaacctttgtctcaggttgagtgcaaacttggggactcccacttctggtgtggcttaatgaaagtaaagccaacctttttttgctatggatcctttctcctaaaagatggatcacatgtaaggttctgggaggatacatggctcgatgggtcctctttaagagatcaatatccaagcttgtataacattgtgagacataaatccataactatagcaaaagtaatgagtgtattccctcctaccttttcctgggggagacaactatttggagctagcttggttgaatggttatctttattgtcacacatccaaggtatggagctatcccatgacatggactccttcttctggagccttgcctctaatggtagattctcagttaaatcacactacgtggccctgattctcagaaataccc

SEQ ID NO: 62613 - DNA, 724 bp, Zea Mays
cacccattggggttaatagcaggaaggttacacccatcgggattagtttcagcaaatgcaggcactagcacttcttcagcggcaggaacagaaggaccagcattctgatcaaaactagacactcgacgaagacgtctcttcttctgtttcttcccgtcagcaggagaagcaggctgattggctcggcgagagcgcttcggacgaacgttgtcagacttctgaatatctaaagcttcgctatcctctaggatgggcgctaccgccatagtttcagtagggactgcatcagaggaatcttcagctaacatatctagcatggcacttatctccgcgtcacttggattcaaaggcacctcaaaatgaacctgcctctcgtcgtcaggaatctctccaagtgaggcaaccaaagcactaacttcttcggaagagggtcgtactctaaggcccaaatcgctatcatcagcaggaggatttgacacaaaactgataaaggcctcggagggaggcaaattccaggccgagtatgcaacaggagcgccgatgtttgacaccttgcctctgagtatcatctcgagccggttcaccaagtccacagtaggaattcttctgttggtcacccgggttgaatcagccaagcctcggtacaaataggccggatatgctctgtctttcaatggctgaatgttcttgaaaacaaagtcaacgaccacaacttctgcagtca

SEQ ID NO: 62614 - DNA, 324 bp, Zea Mays
cgagtgtgagtaggcctgatctttattcaaagactcaaatagggtaatctctactaactattaagaaggtaatgtagaccaaaacgtgcccccctcaccatgcacctactctcccactcacactgcatgcaagcatgcaactatgcaaactaagggtgtccccttattcactcatgctgcatgcatctagcctcagaagctaggccctgtggctccctccgctcacgccgcatgtgttcttgtcgaggcaaatttttacatgtgttcttaactaaaatgaaaattcgaagaagctaaatgtagctcagttggatagtatgcatg

SEQ ID NO: 62615 - DNA, 810 bp, Zea Mays
cttgaaacagggggaggacgcatgacccttgtatctcacatcttaaccgagcagagagtcgaggcctgggctgggggctcagacgcgtacccaagccaaccagatggaggtgtagtccgagtcgtagttgttgaaacagtgataagtatggtgaaaagcgcatggtaatcttccccgtatggtgtaaagcagacttgatgtcgttcccgcagtttcctgtagccatcccgttgtcagcagtcttcaaggaggagttggtggagtcctctcgtcgatgttatctaggccaagaccaagctcgggcgagatggaggttcctcctgaggccatggttgtacccatgatggggcatacagtcgtgcagggagtggtagtacatgtatcggagtggcctcctacaggatgcggggagttgttgccggggcagttggctaaagccaggcttgggcgaggcggagtcctctcccgaggttgaggttgtcttcgagtgaggcggagttccctcctgagagtgaggtcgtgcccagacgcgtgcatgtctcatacggagttgttcgagtacaatggtcagcgtgggggagcagtgactattattcttgggcatgcatcaccgtagttggtgaaaattgatgggattgtagtcccatcgctctatgttgactgtggcatcacatggggtagatatctgaatcgtcgcatttagtgcgcacgtctccatagttcccggggcctttgactaaggctaggctcggggttgtcctcctgtccgagacgggctcaggcgaggcggaagctgtcgttttgtgaaga

SEQ ID NO: 62616 - DNA, 943 bp, Zea Mays
cttcaacttagagaaatcaacagaaaggagttccttttcttctccattgagtaggacaataggtgatatgatatacgctaactcaataaacgacaaccagaaaaggaaatatctcaaattactcaccgaattttgctgacatatagatggctcatcttacaactatagactttctatgtatggagagaaggatattatagaatatctatggtccttaaattgttgatagtgttgaggaagtatagatggctaatcttacaactggctgcatttttgtaaacaatgatatgttaatacaaaaaatgatggtaaaccttgtgacaaataggaagaacaaacactttaccaaagtagattacaaggggacaaacacaaagtagaacaatcatgttacactaaacatgttactgaattacagaatgcagattgtaaaatcaaacttgattgtttttcctaggatcacattttgctacaatgttattttcactgagatgcacttcatatataactatataagacaataaacacaaatgttttggctaggatcacaaatgcaggatcatagaagcatgtcatgaaaatacaatacgttgaacaaagaatcaaggattgaggatggaatttcaagaatatcagaactacaacgttaaaaatttaggagtatggaccaacaaaaaattgagaggctgagatatgcaagcactcaacacctcattctacatccaaatttctttctatgttgcctctctctgcagatctagctaatagcctaagggcacttcattcgatatccctatgtgcaggatatgaattgcatttctaacaacatgctagattaacatgcttcccttctaataaaaagagttaaaagtcacaaagtttcctagtaacaaaaaggaactaaagaggtagagccaaaccaaaaaggcaaggctaaaggatt

SEQ ID NO: 62617 - DNA, 619 bp, Zea Mays
cggctacctaaccctggggtcaatgcgaacatgctggaagcgaggttaccgtggattacgccgtgatgctctctggtcacgggcaacggtggaggatgaaatccggcaaacaattcgaagccgcaccggtggtcaaactcgcacgacgatctcacgtgtggactcccagcaatacggcggagctccctgacacgatttcggggctgcaatggtgacaggattggatatgggccgcgctgcacacaggcagatctcacagcggcagaggtggctacgggtgcacacaccaatgcaagagggtagagggggaggaagaaggggtgcacaacagttatatggcccacggagggcgtccagccagtaacggcgtcggcgagatccctgggagatgctcgtcgcggatcacgcgagcccttttgacgcagccgtgcgaacgaaagggtgacaggtgggccccaagtgcagtgaggtgagagggcgacgtggatatgactcagtggctgtcggatgggccccatttgtcagggtggagcgcgtggaggagtgaagggcttgggtcacgcggtggagaactaggttaatgggtcgaccatgaagtttcagcctaggcgcatttttc

SEQ ID NO: 62618 - DNA, 878 bp, Zea Mays
tttctttatctccctgactccctctatctctctatctctgtccactcctatcctctcttctcaccaacgtgcacagcacgccacttcgccacacatggctcaccggcgcacagcgcccgcacgcacggccacaggcggcccactcgtgcaccattccgttccatagaccctttcttccttcgaatcctgacgtccttcttgtgatcagcaacatccacgacttcagcttcatttgccacatgattggctgtgcgctcagggtgcaggttcgcacgacgctggccggccagaatcagatacggcgttttcggccacatacggcgttttctggcgtatgtgtgggtgcagataaatagttttaaaataacttgttttgcatctgttcatacaacatgtgtcttctacgtgcagtcaaccaaacacgttttgagataaagtcaacgcatatagtggtgcaagacgagacagtacatacaaccaatcaaatacttggatcttggtcagcttccacatctccagcctccttaacacattagcaagaactccagtccgctccccttccaaaataatggaagcacaagcaacgtccccgtcccccgctcgccgcgtgaggacacacacacgcaggatgcagccaagcaaaaaagcccacgagccaggccaggacacacatgcatgtaccgcatcgggggcgtgagccaaggggctccggttcataagctacggcccaacaacggcgacggcggcgacgacgactcttcctcctttctcggtcggtctccctctctcatggcctaattaagaacgcacggcaccgccagcagtagagcttgttagccgctgctgcttgtcgctcttgcccgtcgtttcgtttcatc

SEQ ID NO: 62619 - DNA, 552 bp, Zea Mays
tttggtgcccgatgaaagagaaggctgaacaaggtatttgatgttattggttttatttatcctgactacagctttcatgcgtggaagaagggtcaaaagagaaaaagtgctctaaaaacctcttctagtgccccaaagcaaaaaagagtgaaaattttggccaatcggccaaaatcatattgcacggaaagggcagcagaactgcctgtattttcggctgccgaattaagcgagacgaaggctattgagtcaagtgacacgaaggttatgtccccaaaggtaaggaaattttaatttctacttcatcttttaactatttattaatatgcttaatttggtttgaaattctaatacaaaggacagaacaagttgaaaagaagggagtagctgagacttcgattcgagatgaagtagctgcagccgatatggagccgaaggtgcaggagcaaccgaagctaacatctgccgtaatagggactccttgcaagggaaagacaatggtcaatgtgctgaaggctgttctgaggcctacaaaggtggcgtcacctgtaa

SEQ ID NO: 62620 - DNA, 494 bp, Zea Mays
accgagggcattaattccagagagtacaagggtggctttataaaattctagggcttatcctgtattattctccactgcatacggatggcagcttaatatgacaaaaggacagtggttcatatgtaagtatgctcagccgaaggggtatctttggtttctggccgccagatcacgcgtggacgaccacgattaaatcggcgaggttatgaataagtgtgcgttttcggccatccgatcctacgtgggtggttcatttcaaaatgcaagggcgacgaaacggtacgccccatggttcattggatcgcaaatcagtgatccacatcaaccgtgaccatgtaagcgatcagggtcgtctatctctagatcaatgccccggtatgattaagccggaagggtattcgaagatctaatcctggccgccccatctaaatccaacgactcaagatactcctacccaatttgccaccggcgacgacgatgagacacgcgcccat

SEQ ID NO: 62621 - DNA, 508 bp, Zea Mays
atttctatgaccaaatttacatcttcctcaacaattacaagggatgaagattagacttgaatattaaagacgaaaatgaaaggaacatcatagacacaaagtttggacgcaacaagttcgtcacagattagatttgatatcgtcatcgctaatttggcttgatcggctgacataatgatgaaataaattggtcacagatgagttttagtaaaaaaacggcccacgtgtacacaccacttgacggcgtgggatccttggcctacatgggccacagttttttgggacacagcccccgcctggcgacgcggccccggcccagaactggaagcggcagttagttatttggcaaaaaaaagttgcgcccacggagcttcgaactagggacctgcgcctttcttcaaatcgttgttaccaccagactactcacttgttcttgtatataaagaaagtatctgtctgttaacaggtgttcccatctgttgttatgttaacaggttttcccagccgc

SEQ ID NO: 62622 - DNA, 814 bp, Zea Mays
aaatgtcaccatggatgaacttaagtagcatccaaaccctagaatcatcaaaaaccctaaaaagaaccctggaaagccctagccttaaaccctagggggctaagtgcaaaactagtgcacttttggactaaagtgcaaaaaccatgaagttagggcatcttaactcatgtggttcacaagtatgtggatttgcatcttaaacccaaagttttgggcctatttgcaaaaaggccctatttgaactctattgggattaagtctgaaattcagaaaattggctccactttgaagctttgtaacttccaaattatgaggagtttgccctagatcaacacatcaaacctatagagctatgtaaggagaacatattttattaagaaagtaagccctagtgctacatgaaagtaagagaaaaacaaacctaaagatggtctgtcagacgagcttaaccctgaaattagactgacagtggcctagaactaggtttgagagccattttgagctagatctgttgctcgattgatggttgttgctatagcataattgtaactggtatgaagggctgcaagtttgctactagcgaattagcaagttcttatgaagaaatctgtgttctggacgctacaagttgggatgtcaggggctctgaagtgcatttccgatggtacagtgtcccgatcagatcgccagctcagtccctcgccgcagacgagccgcgcgcggattcgtgctgtcaccgccgtgattcactctcagatcaactggataacgccaggaggtcagtaaatatcacaccacggatatgctccagcca

SEQ ID NO: 62623 - DNA, 350 bp, Zea Mays
cttcgtagggcttctgaaagcattaaaaagtgccactaatttggttctagtgattcataaaaccgacgatgtcgagggattctgaacgcggtgaaagtgagatgtaatgttcgttcgtcagaagtggacagcaagggggacgatttcgtttaatttgcgttggtttctcgatcggtcttattggacatgcattcctagagatgcctaacggtcacatgtgccgcctcaaacgagagctcacgctcacaggtctggaaaaggcgcgacaccaccgtacatacgccccgagcatgcattctcttctcttcccggccgtgacaacatttaaacccacgccacgccatgccgat

SEQ ID NO: 62624 - DNA, 611 bp, Zea Mays
ccacagtgcaggcatcccactagttagatgcaactccttccagatgcataaaggacactttccctatctgtgcattgtgtgatatccagctttttacttatcaccttgagccaatcttctgtgtctaagggataaactgagtgagagaaagtaggtgggtgatagctcataaaatccaggtgcttatctctagcttgggggtgcattctgctgatgttgatcctgttgattttgctgattctgtcggacttgttggactgaagttgtgagatcttgcaatagttgcatctatgcagcaatgaattgctccattgttgggttaggtggcggtggtggcaactgctgaccagaatgttgtccttgattctatcctgaacctaagctggcattcaccatctgattggttagaaagtgaatccttttagataagtgaagaatagagagggattttaggggggctagctttcgaatgcaaattaataactgttcattaattttaatgttcaaaaattcaaataaaacattatgcaatcatcaccatcacattgttattattattataacatcagcataaagtttcatcgtgtacacgagatcgaacttattacaat

SEQ ID NO: 62625 - DNA, 280 bp, Zea Mays
tgtatatataccaaaaatagaaaagaaaataaggaaaaggatcacatcagtcattaatttttgacactttccaaacaaaaaattagagaagacacaacttgtgccttctgcgcctgaacttgatcttcttgtgccttctgcgcctagctctgcttctgccccttcactgaagcagcttgtgccttctgcgcatctgcttccagacgcccatactaaacatccttgcattggaggtaatggtgctacaaacaaagtattccacgacagcataacaggtatg

SEQ ID NO: 62626 - DNA, 527 bp, Zea Mays
tgggttttataaatctctggagtgggcacactaatacaggaaacagcagggactagcgagtaagttatcctagacacagacaacagtactcgggacggcgggttcatttctaaagattacaggggcttttatgctattctgacccacgaaggggtatggatcgattagggccgtccgatcaggagcggtcagctaagattagatttaggtttcacatgaatggggacgcgctatcgagggttggatcccgatcgaaccgtcacgatcaaggacatctgaggttgaatcccagccgcgacattacgatcccagggatcagaatgatcccaccgatatgagcacgcaagccctgatccagagcgctcatttacaaaccaacggccacgagctcattactgcactacccaatcttacacgtacgtatacgattggacgactacggcactcatctaatctccaccgtccaacagtcgatctaccacgtatgggctcctccccatctccgttgaaaacgtgcgacggagcag

SEQ ID NO: 62627 - DNA, 996 bp, Zea Mays
aggtaaggtccaaacatgttgccattttttgctgaagcctgtcattaagtcccctcataaaacaattcttactcttcaagttggtatccacctggtcaatggcgtactaagaaatatggttgaacttattgagatactgcatcaccgtatctcctccttgcttcaaccggataaactcttctagtttcatctggagcactctctccagaacataatgctcccggaatgctagcttgaactccccccaggtaatctgatgtccaacaggctgaattgcggaaaaattcgcccaccaggtactgacaggccctcttagctgttgagctacgaacatgggcttttgcgtctccgtgcatcgaattaacccaaacttctgttccattactctcacccattcatcggcttctaagggttcctcttctttaacgaagagcggcggtcgagtctcagagaattccaaataggtagtatcacgcgatccttgtgggggaactctgcctccgtgctgttggaattggttgcctgccatctcgcgcagaaagtgtgtattataagcagtggcgttgaccaggacagtgatagcctcggccaaagtaggaggtaccggtggcaggttgggagtgtcctccccaccgcgggatgtccctgcaccatcatgtgcacgagttcgggatggcatctgaggcaaagaaacatttggaaaatataacatgccaacatacaccatcatattacattgttgaaatgtaataattatacagactccattatacaactcaacttttcttacttattttacataagtacaatacttagactatactactctagtcttcttcatccttcgtagctccattgcctgctgcaggagaccgttcatcaacaaggttcatggaaggagggggccttaaaaggtccatctccccatcaggcccttcattagctgttctcgatggtccggatcccattgcagcaacgtctggtggcacgtctggg

SEQ ID NO: 62628 - DNA, 437 bp, Zea Mays
aacagcagtagttctagcagtttctagatttttcgtgggtaattagtgggaatcagtgggagaatcatgtagagctttgtcataccttttcaacgagtacttatgcgctcgattcggagttatattttaggagatatcgctgtttgaatccgggtatgttgctgtccaaaaaaacagatttgcaggtgggcgaacaacagtagtattagcagtttctggggatttttcttgggtaattagtgataatcatgtagagctttgtcataccttttcaacgagtacttatgtgctcgattcggagttatattttaggggatatcgttgtttgaatccgggtatgctgctgtccaaaaacagattgcagggtttatcttgtggactgttttggactaattaggctttggaatttaattatcatttgaatataaaacttgtgg

SEQ ID NO: 62629 - DNA, 274 bp, Zea Mays
ggtcacaatttagtcctacatcaccactttttgcaaagctcaagatctaaggaacatgaatgtgtttcctaaaggcatatttgattgttgaccccaaaaataaacagcatgctgtcatttatttaggctaatgtggagacaaagaattgcaaacgaaagttatgacagtcaatgtgttgtagatatttgggagaacaactaggtctgcatatgggtttgcatatgaaacaaattcaagctccacgaattcaaatctgctgggagaagtatcttc

SEQ ID NO: 62630 - DNA, 561 bp, Zea Mays
tcatcacctacttctgccaaagatgtatatacaccaccaaagctatacatacaattctatgtatgttcttgaaaacatacactctagagacctttctaagaaaaaggataactaaattcttctgtaaacaggaattcaagcagatgtcacgttaaagaatttaagcaaaccattacttcagtttcagccctaagttaaaatgcatttctgccctttacaaacatgatagaagagacaggagaggctttcaaccaaaccatacatgtagcatatattctacaaaagtaaaagattacaagaatactgttgaaacataggattaatgcagggacagagttctataccagccttcacaaaatctgtcattgtacattgcggctctcccttgacaccctcgtctgtaacaggggtgtacataaataccaaacttgaattgatatcattgactgtcaactgatattccatcccctcagctccatcaattactacagcattgccgttccacctccgccttaaccaactagactcaaaagagggttagccaaatcagtaacattatat

SEQ ID NO: 62631 - DNA, 1119 bp, Zea Mays
ggcatatgagccaccatcttgcagctccaatctggtctcgaaaccgagcaattgtgaataaagctcaaggatcgagatgggatctgatctagctgtgaccgaggtcacaactggattgtaatcagcatcaaggccattgcagatatgcgccaccacttcttcatcatctagggccttgccgacagcagccatttcatctgcaaaacctttcatcttggcagcataatctgtgatcgacatggtacctttcttcgtagtggcaagggcaagcctcacattcattgtcttggcgcgagtctgcgcagagtacattttctccacggccgaccatgcttgtgccgccgtctgggcagcgacgatctgcgcctgaacttccttcccaatgtttgagagaatgagtccgaggatctgttgatccagagcataccatgtctcaaacgcagggttcggattggtgacggctgtgccgtccgccgccttctcgacgacctcagcatcagggggctcggtcttgccgttgatgtgcccctcgtagcgagcaccacggatgacggcgaggatctgcgctttccatatcgcatgattggtcttggataacttttcggtcacctggaaaacgaagaagggattggtggcgatgcttgaacccgtcgccatggaacactaggctctgattaccatgtgagaatttcagaggtgcttggaaggtggaaacgccggagacagacgtgttgcgtgttgatttttctgagtggctggaaaaggcccaaccgtggcttacatagaggatgggaggagatgattgaggagataaaatagaaacaaactatttctttcttttacaattcctaactaccatatctcctggccttttctatctttggtttacatattctaacaacatgtacatcgatccttgcagtcccatcagcatcgtgacagccatagatgatagatagatacatacacataaaccgacggcacccagtcgacgggggaggaggaaacacgggtagcgtgcgtagccgtagcccgtagacggcagctgtgtgggtctctctcaacggctcaacgcgtcacgtacgacggaacggcaggggctcgtttcaacgccctggg

SEQ ID NO: 62632 - DNA, 796 bp, Zea Mays
taaactaacagggggatataagctatatagttttcattagggcgaaaccactaactgcaatgatattactttggactctatcatgaatactagcaaaacaaacaggattaagtaaacgcactgctactggcataagggaaacatgaagcagctactatgataaatgattagctaccagttttacaaaacaggcagcaactaaggatctaaatgtagcagaagtttcatatgtagggccaaacatagaaaaacaaaagccatataaggagttgatgaactgcttgtacttgaattcttgaacatttgtttgatgtgtatgcaaaaagatgccagcatggaaggcttcagtgtatgtgggataaaactgtgatgaaacattaatgatagcttatttcggttttagaataattatatatcgctatattacttatataacatagtcaaaatagtagtataatgtgagctatcactttgtatactagtaagaacaagataggcaatgagggaaatgagtaaattaggaaaggaaatgagaggtaacgacactaatttcactaaaaacatatatgcatcactactatcaagctgaagtaacaaacattaaacatagaacatagatctatggctttagatccaccatgttgctctagctgggaccacttcgatctgcggtttcagatccaccacatgagaacgcccctcgcgatgtcctcatcattgttgtcgtcttcggtgaacaaccgacgcgcacgctcttgaggttactcaccacgaagcacgctgacggagcctctcg

SEQ ID NO: 62633 - DNA, 418 bp, Zea Mays
tattaaagattgatagcttgagttaataaaaattgaattgactctctcaagcatcccaaagcttcataccatctccttctcctacaaagcttgtcaagcatgttttgatacccatcgcttgatgggtccattatggttagttaacaaagatctaggatccaaaaagtcctttgtgttagcgcttggtaaactcattacctttctagcacaagttgcaattttgggttgcctagttacatgagaattaattgacaagctaggagtggaatagttaccaatgggacaatccttgcattgatgtcccttctttcggcatatgtagcaaaggcgatcttcaagccttgaagatttcttccttccttgtttcttgcttgctacatggttagtaaatattttcttttctagccctatgcctttt

SEQ ID NO: 62634 - DNA, 638 bp, Zea Mays
gtctcctactgccttggaagtaacagaagctagggttctgcttgctgaaatctgtctgctgaaggagagaggtctgaccgctgaggctatggttgctgtctttgtttttaagaatattcagcccttgaaggacagagcatacccagcttacttgtatagtggtgttaccgactcgactcgggttaccaataggaagattcctgctgaggatctgatgtgccgactagacatgatcttgagaggcaaagtatcaaatgttggtgctcctgttgcctactctgcttggaatctgccacctcctaagtcctttttcaatttcgtgtcaaatcctcctgctggtgatagtggtctgggtcttagagtgcgaccctctcctgaatatattgaggtcttggttgcttctctttgtgatcttcccaatgatgagaggcaagttcattttgagatgccagtgagtctagatgatgcagaaataaatgttgtactcgatatgttggctggagaatcttctgactcggccccttctgaaacaatggctgtcatggttataccagagcttgtcaaaacagtggacacccgaaagcctaagggtactcgcccaaagcatcttcgccaggtcagccacccaactgtgcctg

SEQ ID NO: 62635 - DNA, 306 bp, Zea Mays
agaatatgtacacctttgcaatcacacccaagctctttaggctgtcacactggccactgtttaccacatgcagtgctggaagaaccttgtaagagcggggtaagacgcttcataacttgtgttccaccaccatccttgagagtagttgtatgattcacaccttttgcttgttgcttcgtttctgttttgtactaacaatgacaagaacatttcatctaaagctccatgacatgatgagagctatgtgtgatgcactcaacatgaactgaaaggttgaagagagtttcaggacttgttgaacagatg

SEQ ID NO: 62636 - DNA, 640 bp, Zea Mays
gcaggaagcatttcagcaatgtggcaccaactgaggtagtttaagacatgggccagtgtgaggaggaggtgacgaccagggttcacagttttggaaataaaaaaatcggcacccaccgaaattggagaaatttcggaaatttcaagccaaattcaaatgaattcaatttttaaaaattttgacagaatttccttgtaacttatgtctaatacatccgacatcacaattgccacatatataagataaaaatgtgactaagtatcacaacttacaacatccatggcacattggcaccaaaccacaaaccacctagtgtccaaattacaaaatatataccaaatgtagtctcaaatatgataagtgcatatagcatagtttatcaaaataatagcagtccaaaatagtacattttcaagcacatgtcatcaacaaaagcacttgaaaatcaattcatactttccaaaataagaatccccaacaaaagtgatcatgctgtccaaaagtgtgtcatctttcggtggccatttctcttccacatcctacacaacaaatacaagaattttaggaagattagaaccactggcaatcaaggatgttgcacagccttaaactgttaggtaaatgcatccatacactcacg

SEQ ID NO: 62637 - DNA, 369 bp, Zea Mays
gcagctctcggctctgcgtatgcatatccggacggtccgacgtaagaggccggatggtccgtgacctggccaaacggtccgaaggtatatccggattgtccagccgtatgtggtgctacgtgggtagtctcgtacccagaccgtctgtcgtaaaacattggacgatccgcgatcgggccgaatggtccagggctgtacccggacggatcggtcatatatggcatgacttgggcagtctgcgcgtggactcgtgtagagtcggatggtccggcataatatgtcggctggttcatgccatatccggacggtccgacgtaagatggcggacggtccgcaacatatccggacggtccggcgtgatgcaccgga

SEQ ID NO: 62638 - DNA, 1432 bp, Zea Mays
gtctcatatttttgtcatttatctataattttctatggatttcctaagtctgtcaaaaaaaaagaaaaagagaaagcataaatagtaatgggctgaaactagcccaagttgccccacgtataggtgaaagcgcgcccgcggtgttcattttgcacagaggtccctggtcgtttgaaaaacccataaagaatcctctccactatttccctatctcactgacatctgcaccaaggcccctccctttctatttattcgcaaggtgagatcgtcgactgtggacggcggagcattggctccggcgagcccgtacctgccggaacacacaacgattagcactcaggtgtggctgacaactaattccacccctatcgaccataacccctcaactaattgaggagttctaactctaaatcgctctgtccacggtgatggcacaaattgagaacacaccgacgtgttctgggttatccagggcgatctagttcaattcaaagggtctatgagtaccaaagaacttgagggacgctagaacatcaattaaggatgcatgagctaacctgtagaaggcttgccacgacgcggtggttcacggtgtgcggaaaaccgatttggggagagaaagaaattggagctctctggtagctaattggaggcaggagcgggtgctttggcttcgtgatgacccaacggagctgatggcacgcttaatttatagggcccgagggtggtggctcttgaatttggaatggcgcgctaggggccggagagagaggagagcactggtgcaagagatgcgtggctttcactgtggccagaccaccaacgatgaccggatatgctaaggcaagtcactgtgatgtggtattgcgcttaggcacgtggcacccgatcagcaggcggccaactccggtgaggttatctggaccggccgtaaggcaagggggtacgacggctagggcgaaacagtgtcccgagcacatccgcaacacgatatttcttaccctgagcagttatctgcacttcaccgagcacgaatcgcaacggcggcgacaatcacggcttgggatcaccggcagcgatacactgaatctggcgatctttgttatgtcactgtaccattagaacaccattcagagcacctgacagagcggtttacagcgaccagatctccaattttcatgtgataacttgctaatccacctttaacaaagttgtggtcctataatccagatttaatcttgctatagccaccatacttcaattctcactaaatcacgctcaaaatagccctcaaacttggtcctagttcactgtcagtccagtttcaaagttgtactcgactgatagaccaacttcaggtctgtttttctcccactttcatgtagcactagggcttacttacttaataaaatttgttctccttacatagctc

SEQ ID NO: 62639 - DNA, 711 bp, Zea Mays
aataattactgcatgcttatttggtcgtgaagggcgggactggacgtgccacgggtggaggtgaggttccgcaacctgacggtgtccacggaggtccactacggccgccgggcgttgccaacgctcctcaactacgtccatgacattgccgaggtatatatggaggatatgattcgtctttttcttttcttttttacgtgctgggtagggcaaagcgcggatcttctcatgattttaatttgcttgctcggatagcgactgcttcatgccaatgccatcgtgtgattagactgtccacgtcaggacgacctttgatcagcaatagtcctgtgacgcgttgttgccagtttccctttgcacgctatgggtacttaaatctcgtcacgtgtgcagttacggctgacagatgcaactagcaattttgacatgctcacagttttagtttatacatgacaactgtgtacccttttttaatgttattattattacaccagctgcgaccggttgctaatacgtagtaccttctatcctcgtgcagaggcttttaatttgctgccatcttttacgtcctaagaagaccaagctcactattctggatgatgttagtgggcttctacagcctgggaggtgagaaacgatacttgttactgcgcggggctctgcatgaacgcaaactcatctcacacactccgaataacttaaatttatatc

SEQ ID NO: 62640 - DNA, 756 bp, Zea Mays
atccgaagtttcttggggcttgctgggtattatcggcgcttcgtaccaaatttttccagcattgctaagcctttgactaggctcttggagaagggtgttcccttcatctggtccggcgaatgtgaggtcagttatcagtcattgaagagcaagttggtggacgcccctatcctagctttgcctgagagcggtaagtgtttcacagtttatacggatgcttcgcgtatcggtcttggctgtgtgctgatgcaggaaggcagagtgattgcttatggctcaaggcagttgaggaagcatgaggggaattatccaactcatgatctggaattggccgcggtggtttttgctctaaagtcgtggaggcattacctttatggcgaggcttgtgacattttcaccgatcacaaaagtctcaagtatatttttactcagaaggagctgaatttgcggcagcgtcggtggctagaattgattaaagactatgatttgtccattcattatcaccccggggaaggctaatgtggtggcggatgcccttagcaggtccggggttccaaaggtggccttgccgttggtcgctgatctggaccgtttggggatcgttttgtgttatgtcggcaccgctagcgaggagactcagatgcttattcaatcctctcttatggagagagtgtgtgcggctcagcagcaggatcgtcttttgcaggaagctcgaaagagggttggtgatggtaaaccgcgggagttcaccattga

SEQ ID NO: 62641 - DNA, 433 bp, Zea Mays
acgccctaaacaagacgagagacgcgactacgcgagggatcgagtccaacttgagatcaacctaacaagacactcatagcatgtcctaccgtaatcatttatagataatcccaattatgatttaatggtacatcctaataaagaatgaccgcccgagttagaagagtgcgccaattcctgaggggctgggctaaaaacgtgggggccataataagaaggaaaaacaagctatcctcgatagattagatgctctagataagaaggcggagcatactcttctctcccaggttgagatggattacaagaacaatttaaagaaaagactggtggaggcgctcagggaggaggaactgaagtggtaccagagagcgaaagcgaaaaatctgcttcagggagatgcaaatactcaatacttccacctcctggctaatgg

SEQ ID NO: 62642 - DNA, 429 bp, Zea Mays
gaaaaaacctctcaccattttcactcgcataattttttgttcggtcagaatcggtaaacgggaaagtcagaaacggataacggccggtaaattccggtatatcgaaaacggataaattcgagcaaaatagctcgaaattgatcgggaaacggtaactataatcgaaaaagctcacaataaacaaatcctaaccacacaaatgttcattcacatccacatacaagtcttattcacaaaagtacacaaaacacaatcttgtccacatataattggtcatacactcatacatgtccactcttaaattttaacacacaacacataagtcttaaaatacgattgttcattcacattcacatacaagtctcaaccacgcaaatatacaatacatagtcatgaccacacataaatgatcatacatgttcactgaag

SEQ ID NO: 62643 - DNA, 638 bp, Zea Mays
tcaacaaatggctcaacgtggggctcggtctacatgcgacgacgaccagttgaagtccggcgacgtcgatccggcgtctccggtgaggtggtgtccaatccgcggctcgggaagcttcactgagctccggggaagctagccaaaaggtcgaccgaggtggaggagggctggtgtggccggtctacagtggctggggcttgcgtggccactggcacgccgttttctcggcaaacgccgacgaactcgtgctcgggcggggttaggagcacgcgggggtgtacgatagagactggtgtgggctttatagccacgggcacgggcgtgggcgcggggttgacatggagcagagctgcgcgcgtgggccgagcgccgagggcgtgctctggcgttgcctgggcgcgtagaacatgtggccgtgttcatctgcccgagttcttgcgcctgcagagctcccaaacgtgcgaatctcgccaaatgtcttgtgcaagatttcttcctggcacctagagctagctagttcatgtgagttccaagggaagatctggcctagcttagaagatatggtggcgccaagtcttgtctgtttgcactgttcacccgcgacaaaatggatgccgaactatgtcaaatgaccctgg

SEQ ID NO: 62644 - DNA, 442 bp, Zea Mays
ggtctcgggggtaaaagttcccaagactcggtttacccatgtagtggactgcgggttcattacttgattctgcaggggttcatatgctaaactgtcatggcgaaggggtatgggcggctttggcccgcccgatcgagaacctacggcggtgattagatttagatcttatcgaatcgttacgaatcgagagctattggatctagatccaacggccaatatcctacgatcccgagatccgaccctaaccctctgatcatgatcctaccgttgaggtggatctagcaaagggatacgcgcgtcgtctaatcgctgcccttccccacggatctgacagtccgagcgcgtcttcttcctcagcctcaccacggtgaacaaagcgcccagagcagctgcgcagctcgtcggagacacccgctccgaatgtgtcgactcaccaatccgc

SEQ ID NO: 62645 - DNA, 484 bp, Zea Mays
ttctttacgatgctataaatcgtttggggtctaatcttctagtagttcgccgcctttcgtttgtttgcaaatattatcaagacttaatgattgttgctttggttgtagttcagtgcggtttggaagaaccaataacgcgaccgattaaatcatggtaataatctacgatccagtgcatgcatggtgctggattgtagtataataggctgcactaatcattgcttagtttgtcgtcccctcaactcaacctactgtggacgatgcagtgcttacatatatagtgctggattcgccagacaggttgtattggcatgttcaggcggtacgaggtggggaagatcgatgtatgtacctttcattttgtcgatgtctcgtgactttgagtgcatgtctctaaggacaaattaaagagtcccttcaagatgattaactgcagcaagcaagctgtgaatgaactgaaaaaacatttcgagttgtttctact

SEQ ID NO: 62646 - DNA, 609 bp, Zea Mays
tgattatgtaaaaacagagggtctcttttgactatttgcgcctgcgaaggggtatgggagagtctctgccgtcagatctaaaatgcgcgccacggattagatcattcattacccgaaccggtaccggatgtggactgttagattaaaatccgacggtcgatgccagcgcaagacccaagccctccggatctgcccgatttcagatggacggcccggattcaatatcgcgaaggaataagcaatttctaatcccaaccatctactctcaaatctacggcccagagttacacgcgcggaggtggggtatgccatcctccaatcatcgccgttgaataacagatcaacgatcacggtgtgctccatggaaaacagttcgctcactcgatctgagccgtccgttaagatcagacggccgaacggcctgcccccccttctccggtcacggcacccggcggcgccctgcttcccccaccgcagagctcgccggagcacgacgaaactacacagacacaccctagatcccaatccacagcgcgcaacatgtaataaagaacctggcgaacacagggagggagtcctcaccagacatcgatgaccgagcggcgctgg

SEQ ID NO: 62647 - DNA, 395 bp, Zea Mays
acccgagcgatgcagaaataagtgctatgctggacatgttggctgaggattcctctgattcggtccctgctgaaacactagctgtagcaactatcccagagcctggaaagaccttggacactcaaagacctgatagcactcacccgaaatgtcctcgccaggccagccatccaatttctcctgctgaggggaagaaaaagaaaaagagacggcttcagcgagtgtcatgcttgaatcaagatgtcggccctcctgctcttgctgccgaggaagtgccagtggagttttttagtggagttgatcccaatgggcgtgacccggctgatgctgaccccaatgggtgtgaccttgatgatgctgatcccaatgggtgcaatccggccagagctgatccc

SEQ ID NO: 62648 - DNA, 623 bp, Zea Mays
ctccgacatcaacaagggggaggagatctgattccgagacaatagacatgtggttacctgcaaacgacaactggctgttagggtcgatgggaggaatgactaccgcagcagaactctggttcttccgcttgggtgccattgcaatctcgtcggcgggtcgaacaagggcgaaatcagaggaaaacagaatggttcaaggcggaaacgtgaagttagggctcagaactcaagagcgcacgacgacatgagtataaatggggttttcccgggttgggcaccgtttctaaaaagtgccaagtcatcactcgagaaaacgagatttcagacatggctcggtcattacctctaaaacgctgacaacatcaaacaccactcggccgttacctctaaaacaccgacagtatctgccatagctcggttgttatctctaaaacgtcgatagagtcaaataccactcggccgttacctctaaaacgtcgacattacttgccataactcagctgttatccccaaaacgcaaacagcatcaagcactactcggccgttacctctaaaatgccgacagtgcttgccataactcagctgttatccccaaaacgcaaacagcgtcaagcaccactcga

SEQ ID NO: 62649 - DNA, 335 bp, Zea Mays
ggagtctctagatccttgactgtgtacctcatccatatcaccatccatacaaccaagtgacacaatagggagggggtgatcttcttcaaaaactccaacttaacactaatcactgaatcagccaccaccgctccacttcagttctccatattcagtacccttaatctcccaattattcatagcaacagaccactctcccttaaccaaaattattctctacttgtagctctacctattttgtatagcaactcatggttgaaatcatatagaacaaaagttatggtaccccaatttacaaccaaggtcactgaaaattcagtttcagaaatctaaaa

SEQ ID NO: 62650 - DNA, 735 bp, Zea Mays
ggaaaagtttgaatctaacctgcaacatatgatatttgctgagaattttaagtacaaggccacaaatagcagctgtagttcaaaggaagaaatacttacaggaagttgatcaagacgttggagatctttctcattgttcacaggtcgcacaagtgtaaaacattccctgtccggaaaaagtgcacggatggagtcccgtatcttccagaacaacaaaagaagtataagtatagtccatacgtctagttaccaagcacaagtacaaagctacgttcacccatgaaaatctaccataccgcattctttgcagatatgtcccttcctccaccttgaacaggcctcaatgctagctctaggtaatcccgtggagtaatttttctgttgtcttctgccaaatccagataaaagtcctgtagtaaaggaagcacggtgtcatcggctcgtcgcacaccaaaggtgtctgatgcataacagggcctgaggtttatgtttgacggtttataagatgatgtgcagctagggaacagtcaaagcgttcaacgttcagtatacataattagtataggagaaaagggatgaaatatattactcgcaacaaccaaacaaagacaggcgagaactgcccaagttcggatgcagtggaccttccacctgaggcccggacacgtatgtgctttgtcatctctgtgaccagcgagagacgatccaacgcagattcatctatacctcccatct

SEQ ID NO: 62651 - DNA, 357 bp, Zea Mays
aaaaaacctttttggtcatcctaaatgagagttggagatggcaaagaggtaggccggtggtggcggtgtgctggggcaaagcgagcgcttcggtgcgccagtgtggcgtgtcacgtgtcaatgaatccaacacgaaatggtgacggtgaggtgataacaggcgagggttagcgagggcaggcgatgatgcggcggtacatggcagaggcagcaagcggcagccattgccgcgttgcaacgacatagtgagacccagtgagatagtgagcataggtggcatcatggtgctaaggcaagatcctaccgatagcctacccatctactggtgcggactatgaggcaaggtagcggcactgc

SEQ ID NO: 62652 - DNA, 2423 bp, Zea Mays
cataggggaaagggggtctccttgcctaacccctctcctgtgctggatgtttgctccttgttggccattgaggagggctcgagacgaggcggacccaaaaaggatggaaatccactcacgccaacgagggccaaaacccatggtctggaggacttccaggagataaccccaattaactgtgtcgaaagccttctggatgtcaagcttgaggaagagcgcctttttttgcttgtgaagtcttctaactacgttatgcacatagaggaagttgtcttgtatacatcttttctggatgaaggcactttgggacttggagattagagtgttgaggaggggggccagccggttagcaagcagtttggagaagatttttgcgatgttgtgtatcaaactgatggggcggtagtcacccactgtcaaagcatccagcttcttggggataagcatgatgttggcagagttgagtaaacgaaaatctgccccatacatgctatgaagttggtgaaaagcctcaagaacgtcctccttgatgatatcccagaatactttgaagaataaacttgtaaagccatctgggcctggtgctttgtcgctcggcattgagaagattgtttcctttatttcttcgagggagaacgacgcttctagcgatgagaggtcatgttgcgctaaagctagagccggccagttgagggtgatccctctctacggggttgtccctaggtgagatttgaagtgttcctgaatgatcttttctttttttctcatgggctactgctaagtttccaattgggggctgcaggcaatggataaagttcttacgcgctctggagctagcagataggtggaagaacttagtgttcgcgtcgccctacctaatgcgagtgaggcgaacccattgacggatccttgatttttcaattacagcaagtcctagtgctctggatttgagtgccttcaggagatccagttcctcttgggtgagcacacgctcctcttgagcactttcaaatcggaggattaattctttggaaattgcaagctgtaatctcgtgtctcccactttggtcttacgccatagtttgatggcctttgttgcacgcgctaatttgatatgaaggcgcttcatgggtgtaaaggaggaatgaagtggttcagccaggcagcctgaacagcctccttgaatccctccatctttacccaaaaaatttcgaaacggaaagaggggctatgtgtcgtcgtcaattctctctggaggagaaacgaagtgtggtcagacatgagggagggaaaggagtgcatatagcggctaggaaaaagaagctcccattccgttgtacagaaaaatctgtcaattcttgttagcgttggattcacttgcccgttgctccaagtgtagcggcggccattgaggtggatttccttcatctgtaggttgtccagtgctgatctgaacgcgcccatgaggcgccgattcaagttacaattatttttatttcaggcttgatatatgagattgaaatctcctaacgccaaccactttgcccaacgttgtgctgcgaggccacttagttcttgaaggaaaacaagtttctcagcgctcgactgtggctaataaacccctgtgatccaccaagctgaattgtccgccttcatagtgatcatggccgagacagtgtgtgaggtggtgtacacttgcgaaagtgagaaaaagtcattcgaagctgcaaggagaatcccacccctagatccatttgcaggcagcacaacagtgttgtttagaaaattctgacccaatgtacgaaggatggttgcatcgtcgattgtggtgagtttagtctcctgcaagcaaacaatggtactaccggtatcccaaactagttcttgcatagaatcacgcctggccacttcattgagcccccgcacattccagctcaaaattttgcagttatgttgagacattggtagacaactgagacccaagataaaacagaccaagccaaggaagtggcaaattaattccattacactcaaactagatccagaacaaggggtactgggatgaaccttgaagttcccagaacactgcagatagtagacaaacaaacacttgtgacgacgaacgacgactgctaagctgagtggttcagcagaatcgcaacaattgaaggcccctggctgctgccgtgattctgggccaccgaacaaattggttgtgcagatacaccatgacacattcaggacaaaagaacgaagaagtgctagacattgcaaaagactaaggcccccgtagagcgtgccagaccgcatgtcttaaacctatgccgcaggtccctgtggtggaaggatttcgcagaggtccattagcgcttgcagcaccatgggcgacagtggacccttaaagaggttgatgcaggtctcca

SEQ ID NO: 62653 - DNA, 382 bp, Zea Mays
gcggggaatatatatctttcttctggttaattattagaagaccattctgctttcatgaaacgcagggcctgaatgtttacagtatcctccagaatgacacccttgtcagcagaaacgtctaagcgtaactgataactccaccaactgctggcaaggagggttctgtgtcagaccactgtttcctacaaccggcaactgtggttccgtccactcatcgatcgatgaagctcgaagattcccagctgtctctgtgctagagctgcaacatcaactgtctatattctgtcagaagactgaaggtaccgaggtaggactgtaggagggaaatgttggagcccttcttctgtggcttcttgcccggacaatgacaccctagttttgc

SEQ ID NO: 62654 - DNA, 976 bp, Zea Mays
gatttgctagcgaactagcgaaggaagtttgagccgccaccgtcgaccggcgaggagacttcgattcgggccacagaactctcggttgcggttcaatttgcgtgggtggaggttgtgcgtggtgcgggagcgttcgttgcagtgaggactaggcggaattccacgtggatctcatccgccgccgtgcgattccgccactggcgccattgttccgcaattggagctctgtgtcgcgccattgccggtaagaaactgtcctgcctcccgctcgttaccccttgttacacaacaccgagaatcataggtagatgctcgccgtagctacgtgaatcgctcacgggaaccttagcgccgccgcggatccgtagtcggtcgtgttgggggttctctgcgccgccacccccggtcagaccctgcctcgtcgattggcttcacctcgcacatcatttagcacctgaaagcttgagaaatcgagcactagagcatggggcgcatggttcgccggtgaagctccgtcgtagtttgtgggcggcgccgtcggggccagctgggaaagctttggttagcgtcgagcgttggatgagctatgggtgtccgtgattagatctaggtggcacttcgctcggggtaggatcgtgtccgtcggtgggcagatcaacgcttacggaagtttatgactatgttttcctcgtagccataggatgatgatcggacggcggagttcggataccggttcgtcatggcttagatctaatctgcagagtccatttgcgatcgtgcggccgagattacaatatacccttcggccgtggctttttgctaaagagaccccagggaaagacataataaacccgctgtcctatgcgctgttccctatatcttgggagttttactccgtagcccctgagtgttccaggaaatgaggcacagtccagattattaggaaatcaggaaaaagaattagaatatgagtttt

SEQ ID NO: 62655 - DNA, 615 bp, Zea Mays
ttatttttggatctacataactaactcggtttaggtatgccaaaaccctaacgtgggttcttcctataaatacatatgagtgttgtcgtcgataaacaccacaccaacacatctaggttcctcctcttcctgcctgttgtgtcaccacgtacgttacttcattccgatttttagtgtgcacccgcaaacagaagagcaggtgtctgaaaccatcatcctcaactagacagggtcaataaggtgtttgcctttttgggaagcgctctacataactgctcgattgattcttcaatttgtcgtctataactttgtcaccaaggctcatcttcctccttgtcccgttagtgttttacgtcgtcggcaagaatgaaatggtattgaacgtcagtgtcatattctctaccgatcattatcaagaaagaagcgtacatttatgtctctttatccatatctttcatactagtatgtttagatatggtcttgctattgtgagtgcatgtttagatcttgcttagatctagttctttttctatacatatatgtcttcttggtcttactttatttttggactaaattaaaactggttatactaaattttccatcacttttatcctc

SEQ ID NO: 62656 - DNA, 928 bp, Zea Mays
atttgtcgtgcttttagaaccagtgggacaatataatttgtgttcgggaggggatgttaacacagattcactctggatggtgaatcgctagggactcagagagagggtcgagatagagggttatactagttaaggctttcaccctagtccagtgtagtgctgatcgtattattgctttgagagatgtgttaaagctgatgcatgtgtgggaaggagggggtcttgcccttttatagttcaagggtagggctttatacagatgacttgttttctactagtaaggacacaatttgtagtagtgttgtctttaattgcctcggcgtagccttcctgacgttgtcttcgggatcgtgcgtagttgttcaccagtcatggcgtaccgtcttctacacgggtccctgaagcgacgcccgttggtccccacaaggcagagacagggcaagtcttggtgtcgtgcgcgttgtgaccctgccttttgtcatttaaccatgtgtcatcctcctagcgtgcttaatcgtacactcgatatgatgtattgatgtgtcctactcgatatgcatgttactatggcaacgccgatgcttaggttccctaggactggtggtcatccgatcccaccaagcagagaccgtatgcggtgacgtaccgtcacgttgatagatacttcccgacacccctttggtaatgccgcgtcacatgtagtttgttaataccatgtcttatcgtggctgacgtgggtcaacagtaccggattggggtctccgcctcgctgagctgcttggtaaggatttggtcgacacctccacctcgcagggttgctcgacatacacttggtcggtacttcagcctcgtagggtaggattgctcgacagagacttggtcgctcgcttcgccccgcagggttgctcgatagagatttggttggtcg

SEQ ID NO: 62657 - DNA, 652 bp, Zea Mays
aaagttcagtctttttcaagagcacctattttgatgattatatttattattattatttctatctaaaggattcccttaaatctcaagttaagattgagtgttacaaatcctacccccttaatagaaatcttgtcctccagattaataagaaagggaatgcaactagtttggtttgtagtctatattttagtttctaattggttttaataccaaaagtttttttacatcacaaattattaggtgattaggaaagcaggggtatatatacgggtatagccacttcataaaagatgtgtttaaagcatagatatgtttgggtaagaaagagtacggtaaggaaaggctccatccaagattgtggatcttgattcctttgaagatctgacttgaatcttatcctaccttgatttgatgaggtcgatcatcttcgatcttcggccttagaatcgtcaccaaagttagggatatataattaagatgacttgtagataagaacagatgattagtgggtaggtcatatggaatgagtgtactatggcataatctagcttcctttggggtctagcgtgactcatatttctctttaataagattgatctcttcctacttgagctttggtgtctccatccgggtttgggacaaaagattaaga

SEQ ID NO: 62658 - DNA, 421 bp, Zea Mays
gtgcgctgccattgacgaccgaaaacgaccgacaccgcaatcatgtcttcctctacgtttccttgacgataattccctcccctcgcatgcagaaccttctttgatcgatagaagttcacacagcaccgtagtcgaatcgtagaaccttagtaattgcttgccgaagtattcgtctctgccatgaacttggttgttccgtgggtcgggggtctgcgctgtgtcgcggctggaattgaggggcgaaataggttcgggctgtcgtgaatctcacgagggtcgagtgaatttgagattgggggctagggtcggtcggaatttcgcgttctccggtgaaccaccgccgggcgcagcgtcgggtatgcaggttgagctggattgggacgatggagcgctggccgttgatctcctgcgcagcggccag

SEQ ID NO: 62659 - DNA, 294 bp, Zea Mays
gtcgtagcgaaggggtacgaggagaccagagtcgttggattataatccgagggtccggattagatcttcatcacttatgaagcggtatgacacgctaaccgtaggatcaaagatcgaccgtccagatttttaaacactaagccccattcacatccgtccgatctgagatccacgtataggatgtgatttccccgaagcagtctcagggatctaatcccgaccgatcagaccgagatcgatggctcggatacactccggacgaccaggtacgctcaccaaatcccggtcgctagc

SEQ ID NO: 62660 - DNA, 1382 bp, Zea Mays
cttttggacccaagtgcaaataccaaagtaatagaacaccacaaatcatgtgtttctcacatttgaggatttgcaagtcaaatggtgggatttgggcttatttgcaaaaaggcaccccatgcatttcatatgcctaagttcaaattcagttgaatagggctgactttggagctctatatttctaaatctacaaggaatttgcccagggtcaatacatcaaacttgtagagctactaaacgagtataactttgtttaagttatcagacataagtgttgtacaaaagttggagttaaatggattcaaagtattgctgtcagtcaccgatatagtctgatactggtctgacagtgagatctgctaaactttggactcgattcaagatcgaaggagtaagtaaatgagccaggtctctatagtcgatttgtagctgatttatagagctacaactttgatacagatagatgtttaagttgctacaagaatcttggagtaaatcaaccccaaatgtgtcctgtcagatgctctgaatgacattccgatggtacagtaactgaatcagattacaggttcagcccctctcgccgccggtgaccctcgcgccgtgatccgcgccatcaccacgattcatgctctctggcaaggagattatcacggagggtaaaaattttggcaccagataggctcggacccggtcgacggtgagctcgccatacccacttgggctgcggtcgggcaaagtggtcctcgccggagttggccgcctatcgaccgtgcgccacgtgtcttagggcgttaccacgtcatagtataccactgaagcgtgtccggtcattgccgttgaccttgccatggtgaaagccacgaatcctttgcgccagtgctctcccctctctccgaccgctagcgcgccattccaaattcaagagccaccgccctcgggccctataaattaagcatgccatcagctccgctaggtagtcacgcatccagcgcacccactcgtgtctcggattgtccaccagagagctctaatttgggatttcccccaaatctgtcaagaacaccacattgtgtgagctcgccgtggccagctctccacaggtccgatcatgccctcctcgctctttttttagcattcctgtgtgctcttgatgctgctcgacccggccaattgagctagaacacgtaggatcaccaggaacacctcggtttgcccgttgatcgcgctgtcaccgtgggcagataaattaggagctaaaactttgcaattgatcgaggggtaatgatcgttaggagtagaattaggtgtcagccacaccggagcaccggtcgttgcgtatttcggctggtacaggctcaccggagatcggcttgtcgccg

SEQ ID NO: 62661 - DNA, 480 bp, Zea Mays
tgccttgcttctctcccactcgcggtgccctttctccttcgagctctctacgcccctttgccttcaaggtttctgctttgtgtcgccatagtttaccatggccttgtaagtctatctcgagcatgcccagactgagtgggtgctcgacatggtgtgctgcctacttggatgggatgtgccggtatttgccgaaaggacttgtgctggtgtctctcctctcgacgacctttttgccgaagagtttgtgttctttgtttccaaactccccagcggattggctctgccgatcccatctttcatcgtgcagctgctggaggggcttggcctccagcctctacctgtggcgtcctgctttatcttttaggcgaccatcatcgcctacctccgcgggatgtccgtggaggcgacgctccttcctgcttcttcctccagcattcgggggaaggatgatcaccagcctcgtgaaggtggacagcgggc

SEQ ID NO: 62662 - DNA, 428 bp, Zea Mays
gaaaacaattattggagttataaaaccaaacccaaatttgttaataaaaatccagtggacttgtaaccaccaaaaccccactgcaaaaataataaacaccctagcccatcattttaagtagggtaaataaatagaacatgataatgagtcatatttcaaataaatcatgagtaacccaaaataatgcaataatgggcaaataaaattttgctagatcaataatgagataggccaccagagaaaaatgcaaactcatttgaaagatgcataataatgcctattaccaatacttcatgaaaaaggccatttaatccaagtaattcctaccaccccttcccttaagcaaaaagatgccaaacttcagaatgattgctcttgcacaaaatagaagctaggaaaaatcagaaatatgttgtttgatatttttc

SEQ ID NO: 62663 - DNA, 585 bp, Zea Mays
gcggcttcgaccgtggctgccgatgatgattcgtttggctctgtgtctaagtgttttgagtctgatgattctgggagttcgattgcgtggacggaggagtcttcagatgaggacttggattattttgcagcgttagatgtggctgcagcggagccttcgccgcgcgtggagggttccgaggggtgcctgggtgcgagtactgggtataggcggcgaagggcggtggcgaaacggagagtgagtgaattttcgcgaagtggtaggcgtcatcgtagtgagatggagagtggtcgtcttcgcgtggacgggactggtaagcgagaattgttgtcctcgccgattggggcgagtgtaggtgagggggagctgcgaaatctttttgagggtgaggaattgaggataatgctgtccaactacagggagatgggtatcatcccaaaggttgagccaatgtaatatatgatgccctcgctgtgtgtatgtgaccgcaatttgtatgataaggcttctgcacggagtcttttgggaaagacttcaattttgtatgataggtcgatctttacgtatttgttgtgctgttccggc

SEQ ID NO: 62664 - DNA, 366 bp, Zea Mays
gttttggagaatgtgttgtggattggcaaatgccatgactactagaccttgctggtggaaatcatcaggtaaaggaatgcaactttgactgaggtagcacagctcagggcaacgcatgtcaacctaatgcagcagctgaacaatgcagaagcttggaacgctaatctgcatgaggaggttcaccagcttcctgcccagctcaatccaatgaactcgccagaactagaagaaccagatgtcgccacagccgatgatggaggtgtagtctctgagaccggtagtgtgcaggtgtagttgttagctgtcgctagaggataggctaatccttttggatagtgttcctaggagtaggaacaagacttatgg

SEQ ID NO: 62665 - DNA, 362 bp, Zea Mays
ttttgtttgagccatccttcagaaggtgcctgtctccttggaacaactattctgggaggcggacatctacatcactgcagaagagcgagcccaagaccaaatcggggatgcaaagcctatgctcccagcacccaggaaggacatgaaccagtagccagacaagcgctgggacaagaggccacgggaggaggtgcatgccgctgggccaccggctactcgggcccacatcatgccccgtggcggggtgcggacactggatgagatcctcgactcctagttcccattccacaaggagatgcgccacactctatgaaactgtcgagacttcaagaactctctccggcatggtcgaccgttcccac

SEQ ID NO: 62666 - DNA, 418 bp, Zea Mays
cttggaatccttaaacatcatctcatgtctaaggaacttcccaagcacctccttcggagtcaacacctcatacctaagattttcaagaaataatgtaacaagagtagcattacgtgaaactagggaccttagcataagtttaatgacttcatggtcgttccacttggtgttgctgaggttgtggatttggttcaccagcatcttgagtgggttgtacatctctttggcccttctcctttgttgatggtgaaccttctgagcactcgtttgatgatctccattcttgtaatcttggtgaccttatcacctttgagcaccatcttgagggtgtcccaaatctccttggccatttctatcatgttcaccttgttttaatcctccatacacgaagaggaaagtagtactgtggtcgcttgcg

SEQ ID NO: 62667 - DNA, 641 bp, Zea Mays
ttttgaagctcaaaccaccaaatcccttgtgaataatgtatctcacatgctccctctacaatctaatcatatttcattattagtcctcgaccatccgatctccatggtttactcctccatgtactcttgccagaaaaatctaaataaggagtcaaagaactgcaccatgatagatttaccacaaacgcaaagtacttttttactcaaactttgaacaccctccctctattgttctagaacatctagaagatgaagagaacttcgaggtatttgctactatccctactagcaagcactcaaccccctcaatgcgcaaagccagtcccaaagcaagtgtgcctctttcttaaactgatatcacacacaacacaagacttaagaagcttaataatgagttcaagtcttcttcttgcaaataccataattatcttgttgttctatgtcacctcccaacatctctctaaaactcactcgaacccttggtgcttccttctgtggcatgagtctgacatcctcactccagccaagctagctcgatgccaagccaaattgaaagaaagcagagggaaaaaacacgccaagcccactcctgccaagcaacactccaactctaaggatggtgctaatgcctttggttctca

SEQ ID NO: 62668 - DNA, 545 bp, Zea Mays
gttatgtagacgatatgtatataattaaatctagctacattgcatttaaaaatcataatgtacataagatgtgttttctaggtgaagaacattacttcttagattgtgatgaaaatgatgattgggtttgaatccaacatatcaagatagttaggggtgttgttgagtccctcaacaagatggagaagctggttcaacaccctccttcttttgatcctaagtgcaggaagagatgttccttcctcttaaatcccttgtggccatcatcttcacttgatctccatggtcttcttctcgatgattatctccttcactccttcctcctcctccctcacttttccttccccttgaggtttatagagagaaagggatgaactagagagagagtctgtgtgtgagtgagagtgaggagagaatgtgaagtgtgttaatgtttgcttcctgcatgagatggaggcaactggcctgagtagtggtatcaagaagctccagtgatgatagttcaactttgtacatgaattgttttggtgaacggttcaagtaat

SEQ ID NO: 62669 - DNA, 616 bp, Zea Mays
ggaaaatttgttatgcttctgtactaaacctaagaaaatttgtagatgttcaaaccccatttaagcactgtttaaaaatagtgagaaccccagtattgaaaaatttagtgtagatatctattaaaagtcatttctgcccaaaccttaggaaaatcagaaaggccttagaacttaatgaccagtggatgaaattatttttcctagtttgcttaagtaacagagaacctaggaaaaataaagggatctctagtccagatcagttttaaagtgaaatgttttatttagcattattccaactagaaatcaattattagaattttaaaaccatacccaaaattaataataaaaatccagtgaacttgtaaccaccagaaccccactgcaaaaataatggacatccaaacccatcattttaagtagggtaaataaatataatatgataatgagtcatattccaaataaatcatgaataacccataataatgcaataatgggcaaataaaattttggtaggtcaataatgagataggccaccagagaaaaatacaaccccattagaaagatgcaaaatattatctattgccaatattttataagaaaggccatttaatccaat

SEQ ID NO: 62670 - DNA, 606 bp, Zea Mays
cttgcctctcttttagggagtgaggaagaagaggatgaggagcgcatagctatagtaatgagttcatttttctgactttgacgaacatgaggatgacaaggaagaagacactgctacaactgctttagcggtgaaggatgctgcgttgcctgctgcaattgaaaggaggccaatgagctcgaaggctgagccaatgctcccaataacaactccctcgatgatgatagtggccaaagagaaaagttttctctaccaagcttgttataggagaagacaaaggcaaggggctcgcgattgaagagggtaagatggtcattgaggatcacacgccacttggcaaagggcccttcaatcaagagttcagggggcaaaaatatagagttcatcctgcagctgtgaagatcacgggtgcgaagaagctagccaaagccattggctttgctaaacaacttggatacccttccgggtccaccatctttggggagggtcagacgattatctatattactgccgggataatctagagacagaagtgtgccgccacatggcgaacaatattggttttccgatgctagatgccatgctttcaaccatgtcctccgaaaa

SEQ ID NO: 62671 - DNA, 591 bp, Zea Mays
ctgggttgaaactggcccaatccggcccacaaccagatgaacgcacccgcgcacgcacctacgttgccggatttacacagaggcccatgatggtttggataactggttaagagccatgcatcctatttcattgtgtcactgacagtctcaattagccccctgcgttcttatttctttacaacgccaggtacacgacggtggacgacggatcaagatctccggcgagctcataccggccggataacttaactaccggtgctccgatgcggttgacaccaaatttgacccctcctaaccatttcccctccatcaattgtagagttcgagctcttaatcatactgcccacgttgacagcgcgagcaatggaccgaccgagatgttcccgatgatccaatggattctagctcaattgtatgggtcagagagtatcaaaagcacctaaggatactgaaacgaggaactagaggacatgaacggacctaaaacacgttggccacggcgaggttacttcacgcggtgttctagaccgatttgggggaaatcccaaattggggctctctggtgggtaatcggaggcacgggtgggtgcg

SEQ ID NO: 62672 - DNA, 533 bp, Zea Mays
tatcttgatttgggccatttgtaaaagttgtagcacactaaaatatctacaaaaaatagtaagaaagttaccccaaaaaggttccacaaaagtcccaaaaagattgctcaagtaggaagctcaaaagaaaatcagttttttctctagttcaaatttcagcccacttgtaaagatcacacgtgttcacctagttccaaaacccaaaaccacaagacccaattaacaaagtggcgccaaaatactgtaggaacactctggtaaaggttgaaaacaaacaaaatccgtttgacatgagttggcatggattcttcctcgggatggagcagtcggacagacctctctctcccctcccatatctcttcactcagtacacaaaatctttgacctcccctacaaaagaggttgcttgtggtaaggagagcacggcaggtgaagaaatcttgccaaaatcaggcttggaacggcgtctacacggcttagaactcgggcagatgaacactgccacgtgttcgactagggatgacacgccagcg

SEQ ID NO: 62673 - DNA, 318 bp, Zea Mays
tgctagtcacatgtagactagatgaaacatgtacagtaaggtcatggaaatgctcaagaaactctgccatcttctttgcattctcccaatcaccttcatcagggtaaccatcacccttcctttcttcatagctttaagcatgagataggtgtagttccatctagttgggacatcaagctttagaaatgcctttgtgttcaacccctcttcctcagcattttctttgaacttaaccaatcttgaagtcccatctttgatatatctaatagcacctctaacacgcttcactgagatgtccacttctttcaaaccatctcg

SEQ ID NO: 62674 - DNA, 1474 bp, Zea Mays
ggagccactatatcatggtaaaaccaagtgttttatcctggtgaggtcgtgttgtctgtatacgtcttggtcgcctggtcgtctctgctcgtgctcattatggcagacgacatggggcccttctggggatagatatcccccgggccaccacaacccgaagacgtttcgtgggccatccgaaaggcccttggtgggcctcggtcgaacgtgagtcgttggagtccgaggaaggtgtaggtgcacgtatgtgagaaaccagtcgcgtcttgtaagtgcagcgcgcggaaatcggtggacggctcatttgactgtagcccaatgcgacgagaggcaaaacaagcacaacgtgtagatcgtggactcgtagtagtttctctttaaccccaattcagtcagcaataaggctgaaggggggagcctacgaaatcgagatagacacccataaacctcatcttcttcctctagacttcccctatacttcagagagaactcaaccgcacacagacagaaaccacaagacgcagggtactacgccaccgagtggccaacctgagcaatcgcttgtgtctccgacgtgctcttcacgtaccatcgagttgcgatcgtcatcgcctttcacagaaaagcgctacgcggccaactccgtagcgtgttgtcagtattaaaaccgacaaccatggcaccatcattactacctctacgccacgtcgacccctggcctctatagcctaggtatcggtgtggctcgtcatgttgcggaccccgtagatggcctgtgcgctcaagcctagtctcgattggccatgagtgcgtcgctgcccgaggggctcgtaggtcatgagtgcactgcaggccgagggcctttcacatgtcatgagtgggaggcagactaacccgctactgtggttcggtgacatgcgtagttaatgcgatcggtctcttatggcgggtcagttttgtactaggtaaggaatccactcgagtggcttcccttcggttcgctcacccccccctccgtctagctctgccacgctcgattcgaggctcagtgcctcagggtttatccgggggtgtgcgcttctaggggagatagttcccttattgccccactgatcggtggtccccagtagtctagaggtccttatcctgtgcactatttctggttcagatgttatttgctctcatgcgctttgacttttgtgctttagggtgcgtttgatccaagttcagttggtaggattcgtgagactttccattagccttcgggtggccagtcagtcgctataggtaaagtgtccttccactctctttcgttattggcatcgtgtgtcatctttttgtcttcctagaaacggcaacctatcggaaggctgcaccgcttgaaccctttggggatcccttgtttgaccatggaccatggcgagcgtcctgcctcggagtgtccccattagggacgacccaagagtcgcccaac

SEQ ID NO: 62675 - DNA, 1185 bp, Zea Mays
attgtttcgacttctttgcaagttcccttccagaaatgacattgtatctcaagtctatgtatgtagcaagccgtctcaagtctatgcaaatatgttttttttcttcgaacaacgcaggagggcagttgcatgtaattttattaagaagaggaataatacctactcctagtacaagagggactccctaacccaacattcacaccactgcacactaaaacagcactcgtatcttagtagttaactgaagatgcatctccttaagagcagaagctccagccgtgcagcacagaacaccctcattatgctggttccagcgctaatatcctatatctaacgctacatcagctatcgtttggtctgtatctacatcgtcaaactttatctaccgcaacgctccggtgcatagcctttactgtcagcctacagccacctcactctttttatcgactcttattagataaaatacgtcgttttattgatacaaaaattcatttgagtatataaataagcaaataaaaaatatatggttcataaaaacaaatacaaattacatagtttataaaccatagacaaatttgacataattcatcaaacataaaaaatatgtaatatctggaactagaagttacatagttcataaatatattttttggatttttttgaattctttgggtatcaaaataacgtggaccaatataagaggccacgtggcagcaggtggtcagtacagaccggtttagatcggtaccgacccacactgactatctaggcgaaccgacccatgctgacaccgtggcggtcgatagcgacacatggtcagcgagcggtatcgccccgtgctggccctggccttagctacagcttgctgaaccaattggacatttggaggaactccttcaagcacacaagcatcgtgatgtttacatatttcccaagccaccaaggtgattaaaaaatcgagtcattttctcatcttcttatcaaaccccttgtttgcttggcaccaccatttggaaaagcaagtagctctagaccgaggagtaattgtcactttgtcagtaatcctaatggattttgtataatatatctagaggtttgttcttttggccatgttctcattgtagaacatgcattactgacctatcaaccaattggtaactgccttctacggaaatcatttttggt

SEQ ID NO: 62676 - DNA, 743 bp, Zea Mays
aaaatatctaaactctactatgagttctaaactattttttactacattactattttatgaggcacgtagtcctaactagatttgggaacacacaggctttgtcaccattctgtacttacttagtactaatgtttttacttaagaggggtaagttgctcaaataagaacatgttattgtgctccttacctgttagcactgtcgaagttttttatcagtagctggaaaaaaatgtgtatagcttctgcatatgtagcagatataactgtgatacattcctttagatttcattgtattcttgtgatccatcttcaagccacatacaacgctagcctttaaggtccaagtgagtagtcgaagttaagagagtaacagactaacagcctaagtatagcctaagtatagagggggttcaattttggtgatagtaagctatcattccaccaatccatgcatcacttgaagcaagcaagaaaatctctaaccctccaggccccactaccagtcccctgccacaaacaccccggatgtgcatctcattgcgcgcataagcataatcaaacaaccaaccagaacacccttgctctgctcccgcggtacacatgcaaatccagtcaacgaaacacttctcacaaggagcgagggcaactgacatcaagtagaaccaaaacaatcgatgcggatagcggacatgactagtgggatagcgatgcttcacctttggagcgcttcccggcggcggcag

SEQ ID NO: 62677 - DNA, 377 bp, Zea Mays
ggacccgactttgttaaagaagccgaagagaaaattgccttgatccgcaagaggttacttgaagctcagggtcgacagaaaagttacgcagacaacagacgaagagaactcagatttgaggaaggagatttcatttatctcaaggtctcccccatgcggggtgtcaaaaggttccaaatgaaaggaaggctagcaccacgtttcatcggcccctaccccgtcattagccgagtgggacccgcagcataccgccttgagctaccagaatccatgtcagacattcacaatgtgttccatgtgtctcagctccgcaaatgcctaaaagtaccagaaaaccacatcgaggcagaggcaattcagatccaaaaggacctcca

SEQ ID NO: 62678 - DNA, 290 bp, Zea Mays
aggtgtagatcaggaggtgatttgaactgttcaataaggcagagttaggtttcttgcattgtacagttaatcttgcatcgtgtcatatatgggcgcctgtaagttaggtggcgccagaatagtaacagcttagttaatgggcccattaggccttagattagatggatctgttatcaaatctttgttagttggatttgttagggactctttgtaaacagcctatatatatggctggtttggttcagaatcaataagcaagatttatctcctagttcccatctgctaattcc

SEQ ID NO: 62679 - DNA, 799 bp, Zea Mays
cgcgaggacgtggactcaagcgacggactcaggtgtcaagttccaacccgaaatgcacatcgtaaccaggcgcccaagtattatggccgacggttcatgcatagtagggaacccagggtcgggacctaatcctgcggcaaagtactaaaccaagaggggatccgcaacctctcccccagcagggaggaacccctcaaggcgatggaaatatgccaaaccgagggatgccaactttgatatagctgaagaagtacccctccctatttctgtaagttcagtccatagaagcaactctgaggggttaactttttctcctttcataattaaaattttgcataggtgtacaccagcccggtgaggtctgatggttcacacccatgcatatcaagttataaagaggaaattcaccccctcggacgcgtttctatgacaactttatcttcctgctccatggatttggcctacagtttttagataacaccttttatctaacccacccgcacggttccccatttgtcctgacatgacgacatccgaattgagcagacaggcttgcagtttaggaccttctttatgaaagcagggggtccgacagcctgggggccggttccaaagaatgggagctcgttccatggaatggttcggagcagtgtagccgcttagcctggtcccgtaccgtaagcctgcacatcccaccattttgtgatgggtaccttagtatttggaactataagttctgtgggtccgacaacctggggtccggctcaggaaaatgggcacttgtctcctggggtggtcc

SEQ ID NO: 62680 - DNA, 509 bp, Zea Mays
tcccgttctctctctctgcttcctttcttctctctcgactgcgcgaatacatcagcgcatactcgttggtttttcttctggtagacggcaaacccctgggggcaatcaggtttatagggcgagcagggcgctagtgccggggattacggcaagccgttccgatcaacgcccaagaccaggaagcaagcgtacacaaatgcttggtggcccagtcgtcagtggtaaggcacccgcagagatgaggtcattccggacgtcagcacgacctcactacccgagaatacgttaaattattccggcggctggtattgcatgcgtgggctgcgagggcacgatttccagcccaggctgactgggcgatccgagctggagcttcacggccaaggtaacgttcttttcttttttctcctttttgtttgatttcgaatttaatctcaaatttatagtgaaattcctatttagcttaactgcacaaatctaaataccagtagaaaaaaaatatatttatt

SEQ ID NO: 62681 - DNA, 403 bp, Zea Mays
ggtgttaaagatataattccttatctattctagtaaactaatctcctcatattagggagctgcgcctccgattgttgcgtcaatcacgcttgtaatctgctgccaaatatgtaaccatctgctgctataaatacaagacgccgtgccgtgaccctttgaggcaggcaattcatcccaatcaacactacgaacagtggaacaccatccttaaaaccttgttttcaccacgtcgttttctgccgagctggccaatgctgcgtgccaccgccacccaaaagcctgcttaatccagctagggccccttaacctgtccgcgcaaatcatgttggccacacgtaacataaccaggtgcgtactaggacggtaggagacatgggcactgtcgttcacttgtttgtttggc

SEQ ID NO: 62682 - DNA, 350 bp, Zea Mays
ctctaaaactccgatatcgtcttcagtcgctcgacagttatctctgaaactccgatgtcgtcttcaggtcgctcagcagttacctctaaaactccgacgtcgtcctcagtcactcggcgttacctctagcacgccgacgtcgtcctcagtcactcggtgttacctctaacacgccgacgtcatctttattcgctcggcagttatctctaaaactccgatatcgtcttcagtcgctcggcaattatctctgaaactctgatgtcgtcttcaggtcactcggcagctacctctaaaagcgtcaatatggtgcctgagttatttacttactattccaagagaatcaacttcac

SEQ ID NO: 62683 - DNA, 347 bp, Zea Mays
cgtccgactaatcacgattagtcggtcttatcgctagagcgagcttgattagggtctccgactcgactagagcgactaggaagcgattagtggtcctagtcgccgaccaatcgcgactagtcgtccgactaggcgtaatggtcgactagttgtgcctgttttggggcactaatctggtctctgttacatgggtcggcccactatttgtgcagcacaaacattgttttgccctacctgtaccaatacggtacacacattacacagcgacaatcgcgtgtacgcccttctccagtgtgccatcccttctccatcgccgccaccttcctctcctttttttctcgaacgcg

SEQ ID NO: 62684 - DNA, 409 bp, Zea Mays
aacatgtgcatgtgctgcttgcttttcatcacaagctattagatgttgaaaccatttctgccgtggaccgcattgtgcttgctgattgctgcctcttgggagaagtactgtcaccaaaatcccgggccagaagtgctaagatcacaagttaaggctgcatgcaacatcagcctattgttctagatttcctgctacagtgggatcgtaacagtgacttataggacagtggacagtgatttgcacattttttgtcattgtgctgttggctttcgttttgatggtggatagtgcaattgtctaagttgcagcatactacagactgcacagcaaatatgtccatcttttataggacatcttaaactcacccgtttgctattttttcccctatagttctgttggcagaattaaa

SEQ ID NO: 62685 - DNA, 374 bp, Zea Mays
ctttgtataatattaacttatcatatgaaccattaacatgcccctagtattatagaaaatacacaattttactctcacatgcttaaatacaaataaactttatttttattgtaagaatcagtatataaaatctggacatgtgatttttatacagtagtcatatttcgccatttcctattaccaataaaaatcttagctccaaacttgatctttgccacaccactaaaaaaatttataccgtatatttttttctcactaacaggtaagtctcgcgtataacaatatgggttgtgattgactgctattgtgtcgcaattggctgtctattgggccagtccaacacctccaccatggagctcttctatacatttttt

SEQ ID NO: 62686 - DNA, 604 bp, Zea Mays
aaattatcgccactatgggaagggccattcatggtagcataactcactcggccaggatcataccgtcttactcaaatggatggcacgaaaatagggaattgatggaatatagagcatctcaagaagttttacccctagccagatttcaaaggctatcggggcagcattgtattctgtaatcggaaatacatcatcaataaaaataattcattctcaaaggcactcgaactatttattatcaatctgcatatttactcgactcagggtgatcattataccctactaacgaagcaatcagcttaagtcggcagtgacttaagacggtgcaacatgctcacgcttacttaacttagggtgaccactataccctactaacggagcaatcgacttaagtcggcagtgacttaagacggtgcaacatgctcacgcttacttaacttagggtgaccactataccctaccaacggagcaatcgacttaagtcgacagtgacttaagacggtgcaacatgctcatgcttacttaactcagggtgaccactataccctactaacggagcaatcgacttaagtcggcagtgacttaagacagtgcaacattctca

SEQ ID NO: 62687 - DNA, 327 bp, Zea Mays
tgaaagataaggctcaaagggaaactaaaggaaaatatggggctgggggagtcagtgcgagtagctctcagaaatggcagagccctgaggccaaagaacccgcgtcgagatcttgtcatagacgccaccaggtcatcgaccattctttgctcgcaagaacactagatggcactgctcatgagttcatcgtcgtactcttgccacattaattacttcgtcgtacaaaatatggataccgcaacaaattgctggcgatcgaggaacacggaaattggtggcgcaaaccgagaaatcaccgcacaatgtcacctgcttgacgctcaactc

SEQ ID NO: 62688 - DNA, 914 bp, Zea Mays
gtaggttggtcgtcagcctcgccttgccaggttgctcgacacgcaggttggtcggcagcctcgcctcactgggttgctaggtggatatttgtttgggctggtcggcctagcgacctatccctaggaggtcttctggacctttacgtcgagcagcttggcaggtgggccgcttggttgatgggtcgtatttgggaggcctttgggccctctttaggtaccatgttcctaggtacccaacacatttttagacttgttatctcagttagcagggtagccgccttagtggtctcttgatcagttgatgcctcttcccaacttgccagtttgttgttagggtgtttcctaattgagcaagtagataattttgacgattcatcatggtaaaccattcggcatacgacatgccacactctattactgtccttgagggggatatcaaggtacacagattttcgtccacgacgtagttcaagacttgcaccgccaacaactttcgatcgtccatcccttatacatgggttataatggtacaaatacttccataaacgaaagtgtgggacaatcctgaggaatactttaagagatggatgaaaatggcaatttggagtattgaattaggattcaaatgagtaagatctatcgaatagaaatcaagcaaggcgcagacaaatgagcagattggtaaccctaacccacgaacaaagaatgaagcgaaaaccacttattcatgagtatcttcagtaggggtcccaattctcttccaactcttccaccccttaattcatttgggagaaggacacacatctcaactagttttatgagatctaatccagagatagttgacttatggaaagcaagataaggattggggatccgcgggctctcatcatatggacgaaattcgttgcagtccc

SEQ ID NO: 62689 - DNA, 788 bp, Zea Mays
ctggaacacctaagacaacatagaatagagtataaccgtagtacgtcgtagtggcagtcaacgaagttcatcccacgctgctctccgttggaggaaacacccaacacgtttgcatgcccctgaacaacgcacccatgtttgtgctgaacgaacacacgtttcgatccgtgtgatacactgatacatactggctgttttgcatcaagccgtacttacagcatctaagtctagtccaggtagacatgtgtaggtcaatgccatgcaatgctcttgtgatttggtcggtggatttgtggtgactttggatttggaacagatcgagacgagaccgacgtaagtgaacagtgaatggagaaaaaggaacacgcgcgctttgggggcactcaaatcacatgcatggcccgggaccaggacaaacaagtttacctgggagcagtagtatagtaagagaagagcttcggtttatgacttttgtgggcatgaattgaataaactctggcgatttggcagggtgtcgtccgtgccgttccatgcacacacaaggacggatatatatcgtcgtagcatggaaatgtgcgtgtgcatgggttctgcgtaggatatgcgtaaggttttttgtccagcaaaagcacggtccaaaaaaggtagcataaagtacggtccgacacgaaataatataagtgttggactagcacggccagaagccgggtataggttgggcctcaaaattcagcccatcgtaccccgacacggcccacacagatgagtcgggtttggattggcacggt

SEQ ID NO: 62690 - DNA, 487 bp, Zea Mays
ccggtacggattgcagtccacaggatcgagatctaatggttacaatttaatgaaacgcgatctacttcgagccgtaggatatcagatctacggtcagccctaagggactgaaccggtacgcccaacagccatgggatctagaatatacggcctagatttaattaactcagatccaaccatgttcgtgggatagaaatctaacggtccggagccatccttcctatagttctgatcttggtcgtcagcgcgaagatcgacggtctgaaaccaccccctactcccgacgacggagcgcggccgcgtactccgagcacggcggcgccattgctggccaggcgttcctcggattacgcgcgctaaacatcactccaaccagctctaaacattacgacaatgaagacgaactcactcgaggaaaccgtaccgaaagtcatgcgtggtggcgggctgtcaacggcggtcgcggactccgatcgacgcacgaacg

SEQ ID NO: 62691 - DNA, 1966 bp, Zea Mays
gtttttgacatagattccattatgcagcaacaaagagaagggcctatatgttgaatatgagagatccatggtgcttcaggtgcactgagtctaatgtgtcctattaaactcttcgcctaaaaaagtcatataaatctattatctttgatatgcaggaatagatactccatcttgcttcacatcttactgtgattttgtatggttaatgttggtgtataaatatgcctaccttcttccaacatcttgcttcacatcttacttggtagtttaattcgctagtccctctgcctatgcttgtactatagttttttttggtactctgttgcctggcaggggccacaagatgcatgagctccttgctaggcagctcatcctagatcgttaatgggctgagtctgtttctgtggtcggtgtggtgtgtatttttttcccgttgtgtatgcattgttgtttggagggagtaatcccttctgtgtgtcctatttattcttcttaataaaatgacatgcagctctccgttgttcaagaaaaaaaatagagtacacatataaaaacagtagggtccactcctaccttatttccccacaaaatgtagaagtttaaatgtataccaaatttatcagtttaacgtaacacatttaataatttcaattttcaaaaatataaaaatactatatgactatcctcttgtttttgagaaagtttctatttcgggtgatccacagatgtgtgggagggctggacgtccaccattcgatgatactggaacaattataatcatgacaagaaaagaaacggtaatcatcatgtgtttccactcttattaactttgtaagttgacaggatatatttcctggcttattgaactaacatgttttagatttttcttttaggttcatctatatgagaaccttctaaatggatgtgaaatggtggagtctcagtaagtgcttgatttctaatcagaaactagtgtctcatgtgattttcacctaaaaatagactgatatgaactgcatataattttgtacttctgaccaagtatatatactacataactaccaccaggttgctgtcatgtgcggtggagcatctaaatgcagaaatcgttcagttgacagtatctgacatcattctggcggttgagtggatcaagtgctcgtatttgtacatcagaataaggaaggtgtggatgcatactctcgtttaacatttaaatttaatgcatgtcataactataatgaaataaattgctagaatcctgagaactatggagttaagagggggactcctcaagatctccttgaaaagcaaattcaaggtaccttattttggcatcatggttctgttaggatgccttatgctttgaccttaagcaatcaaatatacagatatatgtgtcgataagattcatgagttggtggagtatggactgatttggacagatgaaggagctttcgttttacaaccgctaggtaaagttttcttctttctaccaatatgaaaatgcagagatcacaatcacaagatgctgtatggtctagcgctcaatctgcagggataaaacactagaacttatgggttggatgcatccagcccacactgcaaaataaagtagactgtagcttaaaatcatatgttatagatatcaatcagccagatcctgagatccatgaagcttaactcacattatattggtctagatacgctctccctacccccatccagcattttaggattgtggaccaatgaatagtatcccttgagctgctgttgttggatttgtatgtctaagttcctatggctccaatcgggaaatatcgccctcctatttcaggaattgtgttgtgttactgtgttatcatctaccttttaaactgtgcatggatcaatttcacataaatatcatgcattgcatttgtgaatctgtattgcaatattttctgcagtgactgccatgtttctt

SEQ ID NO: 62692 - DNA, 410 bp, Zea Mays
cttgactagagtcgaatctagttcaagtgaccagttcaacttgcctaaccctgattgaacctgggtacaaggccagttgaaccaaggttttcttcgttttgacttggactttttcgagagcttccctatgacttagataaacattgttagcacataataaaatgaaccaagtgttggaaactcacctccttctcaacttttaacagccttttgcttcacctcaaaatgagccccaaatgacactttctctacaaacatggttagagagcaaaactaaagtgccatatgcatagtagaaggtgtatgcaacttaggtaaatgctcaaaccttgcgtacttaactttcttcatcgttttgccctttttgacctgtttgaggtctgggttggaccccaaaactccaagtctcc

SEQ ID NO: 62693 - DNA, 374 bp, Zea Mays
ggaaaagtaatgattgtagcaagaagataccgacggtgtgcaaaaatcaccaaaaatcacatcagagtaatatcatgccattattgacgacatcatccttctagctgcctacgtcgaccacctccatcgactccatcgcccatgaagcaccctcaacccgcaccaggaaggggaaggaagagaaggtgcatggaagcatgtcatacctagtgtggtgggttcccatcgccggcgaagggcctgatggcgcgatgcgtgtgtcgagtactcggctccttggcgacggtggattgctcctcggaggatgaagatgtcggacacggtgaacgactccgggctccctgtcatgaccactacaactactgaaggggtct

SEQ ID NO: 62694 - DNA, 539 bp, Zea Mays
ccagtttgacgaataatctttaccacgcccatgcatttgtagtttatcataattgttgtcaacaatattcttggcctacaaaatgataaatatttgatattcgccatctacttagaaaaggcaatttagtaaccaagactaaattctatgaaaatttactgtccaatccatagtcacaaaatagggccaaaggcatcaaccctcaacccacaaccctaataaaaaatattgtggagacttcaatttcttacagtagacttcagtacgcgtaacagtgcattccgtcccatacgaacattccattccagtgataaaattatcagcacatacatgacaccgaatgaactatagacagctaatgtatgtcaccatgtagaaaactgaaacaaggataagacttactcgtgagccacggagaacatcaataggtaaattgaggcctcagtgtcctccacaagatttgatgcaggacagcaacaaaaagacttcttttgacaaatccctctcatttttcactgctgtgcaattatcacaattac

SEQ ID NO: 62695 - DNA, 673 bp, Zea Mays
gaatcctcagccacaaaggccgaccaatcctgcagggggacatagggagcaaactcccacatttgcagtgcctaagctatcgacttttatttctaaaaaactggagaggatgataactggtcatgttattaaggttggcaccatagatgtcgttatcaatgctaacaatgaagggccaacaaactttggtgaatcgaccaaggggaatgaagtttctatggctagtaataataaagtcgataacaaagtacctgaccccaagtattctatgccctgatggtgcccataatgactgacacgttctcaaaagcgcaagcttcaacgtttaagagcaaaataaaatagagaaaaggaagttgagcgggtattcaacaagacacatcaagagtacctatggaagcaatggaagccaaaggatgctaaagtgcagacacaagcggtcatacttcataaggcacctacgatgtaggcccctgcacagcccacgaatcgtttggcccctctggccggactacccaaacccatcgcagatagtctgacccctataactggatcattagaccctaactaggaaacacctaaagacacatcagtcaccatggatgaggcagatgggaaagctacatgggaagatgtggtagaggatgagatgatggattacgaggcatctcaa

SEQ ID NO: 62696 - DNA, 435 bp, Zea Mays
gattttatcaaaggtcttccattatctgggtctaagaactgtgttatggtggtaagttgaaaagttcttgaagtttagccacttcatcgcactaaaacacccttcactgcactaatggtcgccaaagcattcatgcaaaatgtatacatgttacatggaatgcctctagttattgtctcatatagtgatagagtgtttactagcctgttgtggaaaaccttgttttagctagctaatgtgaagttgcaaatgagatcttcttaccatccccaatgtgatggccagatagaacgtgtaaaccaatacttagacacattcctcagatgctttttgaatgcctgccctcacaagtgggttgactggttattcctcgttgaattctggtacaactccgataagcatgaggcgttgggattctccccttttgaagtgcta

SEQ ID NO: 62697 - DNA, 332 bp, Zea Mays
accagctttgaagaaacttttataaactactacttcatcttttcctggcttcggagtagtttcctccccacaaaagcgaaccagctctttcttttattcattaaaatagcccaatttcaacatcttaggtaggtcaccttcagagatggtggattttccgaaatccagatggctgggtttgctcggcaccgtgctgctataatcatcttcagactcggtctcctcaacatcagcttgctctgcttcagcggcagggacgtcctccgatgttaccagcctagaccgcttcattgcttcagaaatcggaacagtctcagtagcttcggtctcat

SEQ ID NO: 62698 - DNA, 897 bp, Zea Mays
ttgatagttgtttcttacaaaaatgaaagctacatacaaggacactaaactctcaaatatatgcaactttagtcatcttttaggactttgtcgacagcttcgtttagcagcttgtcgacaacttcgtcaatgacctcattagcaatcctaatcatatcgagtgcccccttcacagatggatcagtttcaagattgtatggctctggagggggagaaagctcagatgcattaaaatacaaatatctgttagtaccgaagctacaaaaatttacaaagttaagctataaaggatatacctataagtctggcccactcagtagcttcttcaactcttttagcctcttctaaggcgtcatgagactctttctcattttttctaatggcttcatcagctatttctcggccacccttcagccatacttcggaataaaacttcccacctagtgtagtagcttcggctgaagggtttctaacatcgtcagctgagatggcaaaatctggctgagctacagccttggcatgatcacaaccgaccttttccaaaatggacacaaccccgcgggcatcggcaaaggcacaaaaatccactctatcactaagaatctcttcaaaggcttcggcctcgccgttaatccattgaataaatccatcggggtcactacgaatgaatttctgctccaaagagaatgcaccaactttagaaaagttgttcttcaaattcttagtgcattccatagccacatcgtaacatttttctttagctgcacgaagctcgtcaacatttgttagtgcccttgatcgtacgatttcacatatttcatgttttgttagctccacattaaaattttcagttgcttcggcaactttctcttctaactcttgcacttcagctttgtg

SEQ ID NO: 62699 - DNA, 572 bp, Zea Mays
gtccacacaacgtggccaggcgaagatctggtgcggccaagcggcctactgtgcgtgacgtaagcttgcgggatgggcctgacgtaagaccactgggccacgctgcccttgcatttattgtggagaagacacgccgcctgactaccccgctgacaggcgatgtgtcccttcggcatttaatgcgcaatgtccactcaactggtaggtgacacctacgccatcctgcaggcgacgtgtccgactatccccgttgggcaacagtacaccggtgccatggcatgcaccgcatccatcataactcgcgcattaccgagggcgttgtagcaagatatcaatactgtacgcactatggatattatggtgcacggagattacacgggcagggcaagcagcagttccatccttccatttgtccctgggcccgtgtgtcggggctgaaaacccttgtacacgccccccttgaactataaaaggggaggcatgcaacattacaacacaagctcaatctttaggcttatatccaagtcatccaagacaacgttacaacacaagctcaatctttaggcttagat

SEQ ID NO: 62700 - DNA, 530 bp, Zea Mays
agcgacacaacgattcgcctaaggtaccaacagcttttctcctaagaagtgaacaaggatataactctaagctaagcaaaaatgacacccttggtagaggatttgttccatataccactgtttgcacaagcttactcctaaaagctttcgctggtcacaatgcttcaaaatacagaactgatcgatacataagagagatggagatgtgctagtgtggcaggcaagtactcatctcaaaagatatatgaactcatatataaagtccccatagcgccagtcacttttgctctgatatggaaaacaaaatgccagcctaaacaaaaattgttcttttggctactcctccatgacaaattgaacaccaaatcagtgctcaggcgaaggaatatggacctagattcttacacatgtgaaaattgcatacaacagaaagaggaaacatgggatcatctctttctgaaatgtggattcaccaagagatgctgggaactagtcgggatcacgccaacccaatccttgaatccacacaa

SEQ ID NO: 62701 - DNA, 378 bp, Zea Mays
tttctttcttgtcttcttttcaagtacattctttgctcttctactttttgcatatttcactaccgaactgaggaactctaaatgatatggtattatttactgtacctatagtagcatatgttgaaaccataggaacatcatttttcgcatctttcttagagaataatttgcttctaattctgacttctgcaatgctttctccaactaaacaagtagtgatttttttacactcaacacttcaatgcaaaagatgttgccattcgagacatgcatgtagcatgtactttcaagtttccattctcactccctttcttatcaatataagacatcttttcgcataatttgtccatctattcaatatatattgtgatggtaaaa

SEQ ID NO: 62702 - DNA, 773 bp, Zea Mays
attagtagtaaaaaggatcattttaaggtttttggcctcaatataatacctcaaccgacccaaattaaaagctaaagtaaatactaatttgagacggagggaatgaactgtaaccagaaactaattgaagcaaacattttctcagtagtctccattcatcttggatatcacatttttcagtttttcaatataaatatacatacaaacagccttaaagctagaaatccgaccagcaactttccctggtatcaaccccttgttacaccacgtccaccacgtccaatgatcgtgacgagcagagcttcagctcaccatgtacctgccactactaacattttcagctttaagtattagctaataccaatatttctaagcacttacccagttctttcttctttcccatgtcgtttgcacttcactggtatatgttttggctaagcttatgttgcgactcttcaaatttaagtttagtttcagcatactaacattaaatgaacctggcaaagtagttatccgcgttccaaattttgctgccagcaacacatgtggtgatctgtactactcactatttttgttcttttgccttgcgtggctgatcaattatggtgtcctccttcctgaaaatggatcttttggacttcctattcctgaaatcaaatcgagcttctgcactttagttaatgagacataaatcatattgtttatatttatttgggataactaataaataatatttacttttcaaatcaaatctaaaaacatgtggtgatctg

SEQ ID NO: 62703 - DNA, 379 bp, Zea Mays
ggcggcagcaggcagtgtgtgcactgtgcagtggcgtttggcgcgttgcttggtgtcatggcgcgcgccagtgtcgagctctctcccatgcatgctacggcggtctccactctccactgaccggcaaaggctctgggaccatgtactctcttgccgacagttcttgctcagcgatggatgcttaattcggcatgtacctgctgctggcctgtacaagtatgcaactgcttggtcagacatttggttcgaactcccagtgtataagcacaataatgcaagggcttcattatttggacacctttgtgttatcttttttcacatgttggtgtaatccaacacaacacgtggattcatggtattcaaacaaactcaacccaac

SEQ ID NO: 62704 - DNA, 442 bp, Zea Mays
atggaggtgccgcgttgtcgctaggacatagctccgctgagctaggatgaaaataaaaggctgaaacccaaattggtttgcctggttctgacccttttcgcattaaaatactacggtgattctgtagtctactcctgtctcccttttccggaaggaaaaatactcatttcacgctttacacaggatattacttttactacaagtacagtacttcacactactcccacgataggtcatatcagacgaacgatggatggacacactgccccctgcaactcgccccgagccgtcggttcgctttcgctgcacgtctgcaccgccacgattccaaggctacctctggctagcctacaagagcagagcagtcagtcacacacgacgcctggcgccctggccctcagttttcatctcactgttcgccacgatcttggcacggcaccgc

SEQ ID NO: 62705 - DNA, 483 bp, Zea Mays
gtcccagtccattgaaccctcggcgattcagtccagttcaattcaattagttcaatgtgcaagctcgtcatgttgttttttccttctgaaattggcctcctacttttaagttggagagacacgatgcagacgtaacatcaagcgcacactaactaacgaccgcccacccacccttctggcctacacccttcgaacgccacacagattttcagggtttattgaccgcagatataggttttatctgaaaggtgatgaatgcatttggtggtgcatcaacacatggttaaggaatcttagcaggtggaggttgttttcattcgctttaggttgccaaaggtaaaggcagcacaaatggggaggaaaaggcaaagtacattaataactagtaggcttgtaggattccctaatgttgagattgttgaagaagataaggttaggatttgttctttcagtctgctttctcacagattctgtgcattatct

SEQ ID NO: 62706 - DNA, 418 bp, Zea Mays
gtggctaagtggagaagatatagagatgtggattgactacgatggagtgggttgcaagtctgaaggaaagttagaggctttagagcgacagaccacacgtgacaaagaagcataagcaatgacttagtgtggatgaaaccgatgcaaaggtgaagagcatgcaaagttgtgattgatgaacaaataagaccatgtgatgacatgaagtggatcttattattcaatggagaataatgaaggaacttcatgctatgggcaatgatcaaaggtagtgtggttggctatatctatggatgatcattattcataatttgttgaaggtgaaggttggatgctgtgtaacatcaccaatgaaagaggtgaaatgaaatgcataagacaaagatacattttgtaaggcattcgatttcacggatca

SEQ ID NO: 62707 - DNA, 750 bp, Zea Mays
gccaattctcccaagtgtgctatgaattggctaatatgttcgtgtgtgcttttcccaccttcaccagaaaatttagagaagtctggtattctagttccctgtggatacagcacggtgtcgaatcggtggctataaggcttctgatacgattgccctgtacctgacacactaacaccgagtttgtccctgaacatcccggctacctcgtctctgatcctctccgccatgtctggcgaccatccattgagtttgtgggtggaaatctcaggttgcctgacatcactctgtcgactttcctcccagggatgtttgatgtgtgtgttaggtgtcctattaatgtcaccagctcctgccctatacctctcaggctctcttgtggccgaacagtattcagccctatgtccatgaggtggtatggtatgattataatgtgttgctggtggggcaccataatgttgttgcgatgaatgtggaaattgtgcgtactgcgcagctctcggctctgcgtacgcatatccagacggtccggcgtaaaaggccggatggtccgtgacctggccaaatggtccgaaggtatatccagattgtccagccgtatatggtgctacctgggtagtctcgtacccagaccgtctgtcgtaaagaactcgacggtccgtgatcgggccgaatggtccaaggctgtacccggacggatcggtcatatatggcgcgacttgggcagtctgcgcgtggactcgtgtagagtcg

SEQ ID NO: 62708 - DNA, 640 bp, Zea Mays
caaagcgtcaaaagagcctcttcacgggcacactgacatgatcgtcctcgaattcgtgacccgactgatgtcaatcaagtccaagtttgcattcaattaattgttacaaggagcttgtggatttgattagcgaggttcttcctacgggtcacaagatgcccaaagacatgtaccagtccaagaaattgcttgaaggtcttggtatggagtatgagaagattgatgtttgccaggacaactatatgcttttttggaaggaacatggcagagagcagaaatgcttaaaagtgggaagtcgaggtacgtggagcttgtaaatgaagatggggagaaggtggtgacaaaggttgcacataaacatctttggtacatgcctctcactcctagagtgaaacgtttgtttctctcgaggaagaccgctatgcacatgaggtggcataaagattgtatggacagacaagatggcttaatggtgcacccatcagatggtgatgcatggaaggctcttgacaactttgatccagattttgccagcgatacaagaaacgttcgtatcggcttggcaactgatggtttcacgccattcaatatgaccactgcatcgtattcatgttggcatgtcattgccataccgtacaac

SEQ ID NO: 62709 - DNA, 495 bp, Zea Mays
tgacttgcaagcattatgtttgtgctatatgatcgtttgttactaaatggtatgtgtcgcaaacattatgtttctgctaggtgatccttggagtcagtttacttatagcaatccagacaagactattaaaaaatgacatggttccttttgctctgttcaatagattgaacgctcccgctgtgggttggatccttttgccgttgctgcaattcctacaatggattatagttctgaggccttccattcaaaagatgatgcccagtaagtacataatgcatgatctatagttagtttacctccatgtttgtgaacgtaccattgctccttcaaccaaattgcctattctcagaggcagaggggattacttatatgataacccatttgtacgattgtcaatgaaatttgatgcaaagaatatgtggcatatcatttagtgtccacacgatatcagtctttttttttctcttttccgcacacagcctttttctattcatt

SEQ ID NO: 62710 - DNA, 487 bp, Zea Mays
tgggaattgaaggcgtgacagaggaaacgacgaggcagttcgcggtggtgaagtgcgcgacaagcagctggttttttaaaagggacatcggttgcgctccagaacgtggggaagaggagaagaacgacgcgagctttataggcgagggaggagagaggtttgcagccagattcaatactccattgaagtggattgaagaatagcgttacctactcgaagaaacagccgcgaccattaatgacagttgcttgatggtgagaaattaacgtggcgtgaactgtgcgggctcggctggcagcggctattcgagttctagaggcttctgtgtttctacatttcgtttcctgctgttggtttgagaagataatccttacaagtgggcccaacacggaatagacagagggtgagggagaggggttgacttgatggacccacatagaagtgaggggaaaaaggatgtgaaaatgggctagccagctgctttagc

SEQ ID NO: 62711 - DNA, 498 bp, Zea Mays
ataacctaacgacatgtacagcctcacgacttggatgatccacctgtcgctatgcaaacaaccacctacatcccccatttggccacatgcaaaatgtgaacgataaagagatggcggttaggtccactaggatggacaggttctcggcggagcgggggtgctagagtcggagtggtacctgcacccaacatttcatcaacctcgatgacgcgcctggcccttgccagcgctagcgaacgatcgaaagaaagcaaggcgcagatcgagtgagggtgataatggcgtatgaccctaacgacgacgctgaatgcctctttgtctgtttcaaatgtggtgtctcccctcctaatatactgctccttttcctcaagatctgttgtcactgctgtagagtcgagatggcagactagaggaggtgaatagttatttataaaactaattgcaccacaagatggcggactagcaaaactcactaattgcactacacaagcacaacga

SEQ ID NO: 62712 - DNA, 539 bp, Zea Mays
gtttttgtggtcttgcaagaaaagtcaagcttgatggtgattgtgagacaacgatttagccatattcaaaccactaaatagcatagtactctatatcttatatgttggattgccttgtgttgggttgttgaatatagttgttacaactagagtactattgcctctctttatttattccaaagggtaggtgcatgattctagtcatagtatgattggaaccagtgccttcaggttttgattgcagttttgcatagaccgcacccaattaaatatttagacttgacaattcgtacaacctcccgtactcatatgctttgaccaaaacttgtgtcatgttgtaaattctgataatttgatgcagtacaagtttagttttgtctctggcatgatgagtgaccattttatggggtagttcaccttgtatgtttttagcacttggttgatttcctggttacaatttaagtgctattttagtgatgattacctgctttgaaaatgcttaaaactgattcaaatgcttgtactttacaatattgtgc

SEQ ID NO: 62713 - DNA, 462 bp, Zea Mays
aatggataagatcacggattggagattatcaccgtgcttttagccatggcaacgtgcccggactaccgacgtcgccgtggaagcgccggtgacctcggttgcgccatgccctagcttgttaccatgcggtagtaatcgtggcacccttaggagtattatgcttgcgccgttgcaccagtgaacgccacggttacagccaccgtggtcttccctatctccggccgccaacacgatgtgatcaaattgagagccaccgcccccggagtctataaattgagtgcaccatcgacttcgttatgtattcaagcagctagcgcacccgtccgcacctcaaatcctccagtagagagcttcaatttcgcatttcccccaatccacccaagaactccacacggttttccctcgtcgtgcccagcttgccccaggttcgttcaagcgctctggtcgattgttctagcgtcc

SEQ ID NO: 62714 - DNA, 287 bp, Zea Mays
gttcagaagtacaatgtttctatcgtgccttggttatgctatgtctggaattggcagataagatttgcctgtatcctgtttgtatgtgttatttgtttgtcttccgtcggataagtgagttttcttggaacttaggcatgtcaactccaaattgatctattttgatcagatatcctataggtttagcttgcctactgcatgactctcttatgaccaattagtgatttgtgaattatttgataaatctaaccaaataatccctttgtggtattgtttgattatgaagc

SEQ ID NO: 62715 - DNA, 466 bp, Zea Mays
attttatttcagttcagcagactgcaagggctattcataggcaaaaggtgccccgtatcctgctgaaattggatattggaaaagcttttgactcggtatcttggcccttcttgtttgaaatcttcaggcatttgggttttggtcctgtttggtgcagcatcatttctaaaatgttgtactcttcttcaacaagagtacttgtgaatgggggacctggggagattatcaagcatcatagagggcttagacaaggggaccccttgtcccctatgcttttcaccctggtaatggatgccttggattcacttattttaaaggcacaagaaaggggactgttgctgcctctattgagacatggaaatgggcaacagatttccctgtatgctgatgatgttgtacttttcttacagccaaacagaagagagatcacagtgatcaaggagattttaaggatttttggggaggc

SEQ ID NO: 62716 - DNA, 441 bp, Zea Mays
ccgcaatgcatcccaatcccaaaaccccataattttgaacaaatcacaaccccccgttttccaacccaagccaaaccaaagccctggttcgtcggtagtccgtcagcgtggagtgtactgtagccatgtaggtgtgcaatttgatactccctcacacactcccaggcacacgtttccccatacacgcccacaccatccagtccagtccagtccagtctagtccgcctcttcatttcatgctgtattttcatagcagcagtagccagtaatagatgctgccttgcgcggctgttactactactcactctactcctaccagtggagtgtgtagtacgtggtcacaccacaccacggagaatcagagtatcagaccatagtataggagagcagagcagggcgcctttgcatcgcaaggtcactcgtgtccccactcgcctccgt

SEQ ID NO: 62717 - DNA, 769 bp, Zea Mays
ttagcaagttatcacataaaaattggagatttgggcactgcaaatcgctctgccaggcgtcctgatagggtttctgatggtacagtgaactgaataagatcacaggtgcagtgcacctcgcctccggcaaacccacgctcggattcatgccggcgttgcgattcacgcctggtagcacacggataactttgcggggtaaaaagatcttgccgtggatgaacttggaggcactgttgcgctctgtagctcatccacttgcgccggcgacgtggccgagcggccgtcaccggaataaacaccattcaccatggttgcgtcacgccttaggccatttaccacgttgtcgagagtcatagtgactgcccagtaacctccatagctcattgcccagtgaccgccacggcagaccgctacgacgactcactctctttcccggccaccgtgtgtcttctcaaaattagccgccaccgccgatggaacctataaattaccaccaaatgagctttgttaggtatatacacatccaacgcactcgcctatgcctcagattgtccaccaaagggctccaattttgaagtacccccaaatcagttagaactccactgtgagtgagctcgccgtggccagacatctacaggtccgttcataccttccttgcccttgtttcagcacccttgtgcgcttgggatgcttatcggcctagtcaatttaattagaccgcgttagatcgtcgggaacacctcgggttatcctcagtgtgcgccatcac

SEQ ID NO: 62718 - DNA, 359 bp, Zea Mays
aacgttttcacagtgtgaaagatgcaagagtaaagttaatgtgtcatcttcactaagaagttaggggatgacatttttcacaacataaaagattgcaagagcaaagttaatgttgcatcttcgctaagaagtgaaggaacattgttttcataatgtaaaagaatgaaagaatgaagttaatatgttatctttgctaagaactgaggggacgatgttgccatatagtaaacacaggaacaacgataatatgtcatctttgctaagaagtgaggggacaatgttgtcatagcttaaaagaatgcaaggacaaaaataacatgtcatcttcacaaaatgagaaatagaaacatcaataaagc

SEQ ID NO: 62719 - DNA, 805 bp, Zea Mays
tttcaatatgttcaagagctccgggaatatcttcggcaaaaggggtaacttcttcagatgcagctccgacagaattgaatatccccttcaaccgagcaatgcattgagtacaaagccaaagcatctatcctaaagatttgtgattgtctcgctcagtttaacgttcttttcaatttctgcttcaactcttgcattcaatgctttggactcatggtcggagaaatcggagttcttttccaaagttgatcgagcttcatccagctctctgctcgatttttcattctgagaacgcgcttcggcgagtgagtcttcggctgagcgcagcatgctatctttttctttcaaggaatcttcaagtttttttattttatcttcaaagctttcgataacgatttcattttttctgtcatcgacatcctgctgcatcttcagggccttgctcagtagcagactctgaaaaacaagtcgaagttagaataaccaaatcaccacgaaggtaccaatagggagctgtagagaagtcttactttgaagtttgagtagaacaagctgccaataatgtgttgtcgcctatagcaactaatttccttttctagcttcggaaatccaacactcttagataaagtaattatgatttcagctccggcgcggtcacgaatgcatcccaaaatctcttcgttgaccccgccgaagagtatggatctgggcttgtaaccgcaggatatagcaaactctttcaattctaatttgtcatcttcggaaagtagttggccacccaggtgccgaaggtcaaaatccttatctt

SEQ ID NO: 62720 - DNA, 352 bp, Zea Mays
ctatgtgggttggagggaaaggtgctagaatgcctattagtgccagcaccttttagctagcaaagttacaccgaaggaataagtgagataaggtttcatcttcctgcagaatgtagttttcacatttgtaggaatctaaatccatatgccttctccaaagcatgtcctaggtattcagcctgtcctttaggaatagccaaaagaagaattttttgtttaggttgacatttggaattccacaaccattagaatctcgaattgacctgtattgacctaatcatgtgcttacatgccttgcatgaggagaagtggtgattccctagatgctacatccactaatcattatgctctg

SEQ ID NO: 62721 - DNA, 675 bp, Zea Mays
ttttcctttccttcctcttctcccaagtgtacgatttggtggatgttgtacatttgtgtggatatgtatgtgtgaattgagttggtggagaagaaaatggagtggaaaataattcgagtgttcttatgtttctaattgtgttaagagtatattaatgcgaaggttagattagaatgtcggaactttgtgataaatgcttttgtttatatacatgcatgtgtgattgtattggtggatgcagagtaagatagtgtttcgaacggttagttggtagtatgtgtcaagtgtatggtgtcgatttttgttgtatggcgaatcgatgctttgttaaaaatagtccacacattctatgcatagtgggtggataatcatcatgttaattgagtcgaggttctaaaagagtattatcgctgccccaaaattaattggaagcgggtagcgtcgatacttcgatttctgttcaagtaggagaacgattcgataaagtgtgcatgagaatgctttaggtccataggtgttaaagagtggctttgtggagttctaagcaatgtgataatgttctatgtgttaggtgaaaggaagatgtgatgtttatttatgcattaagcaagtggatctagtaaaatgaattgacttgttggttctcatttggttgttttaactctaatgaattat

SEQ ID NO: 62722 - DNA, 846 bp, Zea Mays
gttggcgtcgtagcctcgacaagaagggcacgagatgaatgcaagaggaactccagacgcagcacaggtgtgacgcggaacaaggaagtcgagggaagtccaatgaggtttgacggcgtttggcgcatagcaaggagaggacttcgacgagctccgacaaggaacaacaacgagcagtaggcgccacggcgaaggagcagacagaccctagatgcggggtgaagtcgcgttgtaggggttcagacatgtcagacagaactctagacttggtcggtggtgctgtagagggaaatactctaacaacaaggcagacgtgcttcagcgaggtggagcttcggacacggcgtagagactctggtaggcgtggcgtgtcgacgacacgagatctggcgaactcgacatgggacaccaacgataggtacagtcaatgccgaggatgtcagcaatgctccatcgctgggtcacaacacagccaccgacactggttcggtgccttctccgtgcttggtaggccgtagagtaaaaaggccgaatgctcgatactctggtccagagtggatagtgtaagcggatgggtattaaccctacgcaggaagtctgtaaggtgaggggaaaaacaaatgctaaactccagttaaaacttccttcctcgcctatcctcttcttcctcctcgatctgttcttcccattccagtaggctgctaacaaattggtatcaaagactactgatcttggcactggagttccccttacttcactcgctcggcaaaaatggtgtgcgcctccgatcccaacctggcggctgctcttaatgcccaatccaaacagatcgaagcccaatccaag

SEQ ID NO: 62723 - DNA, 669 bp, Zea Mays
aaacacaagactttaatgtatataaatgtgtgatagaatttaattcaatgttgttttcaatatgaatttcaatatatatataatttagttttgttttgaatatttggaaatggcggggaatctaacactggcggccaaataaagaaatccgctagtggaaagtgcatttccattggcggtttacttaagtgaactacctatcacaacaggaatcgcgattactcccgtcggccaacataattctcgttggctgaaaacgaaactgacaggagttaacttattttcttggtcataaaggaactgacagtggttaacttaattgtcgtcggctaaaggctggagcaacggggatcacttaacttccatcagctattcaataggtcgatgaggattagctgtgatctaggccgcgtaaagtgctgatgtaggagaacaataactcccatcggctattcaataggccgacggggattatgggccaccgccacccgaggagagacctaggttttgaagaactcttgttcgcctgtgtacgtagccgacggcgattaccttactcccgtcggcccgtgtacgaagctgatggggattagttgtttatgaggccacacgttgtcacgcgtgctcactttcgtttctcggccaacatttctccactgtgtcatcgcc

SEQ ID NO: 62724 - DNA, 335 bp, Zea Mays
gcggaggcgagcggacactggacgacatccttgatgcccagtgcccgtatcacaaggatatgcggcacaccttgcggaactgtagagatttcaagcatcccgtcaggaatggccgacccttccaacctctaccacctcccccaccgcgaggagggcccagtgaacctcgatgaccttagcaacaggaagggggaggaggtggagcattcccacgtgtcgacggagaggtcaacgtcatcttcggaggacatgggtcgcaagaaaacaaaaggcaacagaagctcaacgactgacagatactggtggcaaccaccagtgcccctgccccctatcgg

SEQ ID NO: 62725 - DNA, 364 bp, Zea Mays
ccagaacgtacgacgtcaccacgcgaccagagaacgggaccccacacagcccgtctctcgggacgaggcgttcgaagcgggggaaaccctaaacgaggggacgttctacgaacagcggaactcccgacgatgagaccgttgccttgtctaggatcgcgagcgagaactggcagagcacagcgccagacatcgacatgaccacctgcctcttccgcaaaacctgatgctcaattttgctcgagccatgcaaacaccgagcaaagttggcggagtcctgacttagatcgctaatggtctgcaccgcatgccagacacggagggttaccgataagtcctcacccgagcggcaaaccacctcctccct

SEQ ID NO: 62726 - DNA, 389 bp, Zea Mays
ggggagagaaccccattacagcacacacaccgctagagactaactaaggatcaccgactaacatggaggaaacacgacccacaacgctgttttaagccagcaactcatcgacttggaggaaggacagggccttggctctagtcaaggaccagagcaccgcctcttccctagccaccataagggctgtgaccaagctaggattacaaccataaaaaacacatctattcctatgcttccaaatggtccaagcacctaggatcactaaagaattgaaaccttttctcaaaagatcagatgcccgagagctgctagacttccaccacgactcaaaggaatcctcatgagctggacacagctcctgcagccccactgaactaaggaaatcaaac

SEQ ID NO: 62727 - DNA, 373 bp, Zea Mays
gtctgcattagcttaaatattctaagtttggtcctgtttttacagagtttactacagagcaaagctttgaagatgcaacaagacgacgaagacatgaaaatgaggtcattatcaagggcttagatgataaagtcaaagaggttgaagattctttgaaggaggaagaaaaaaatgctatgttcagtcgaagggtatcttgccgaagcgcaaattcagaacaaaaagttaagcgaagacttgtcaagcgctcaagcactttcgaaggaaaattctactcggctcgaacaagaaaaggaagctctgagagcaagacttaagcttgaatctaagaataattcgaagcttagtgaggatatgaaggcttcgaaagaag

SEQ ID NO: 62728 - DNA, 353 bp, Zea Mays
gaacatgtgaacctgtgaatcaaagattaggcaaactagttagtctaaaaggttgtgatggtcatcaagtaccaaaatcaattagaggaaatggtttaaggccatttccatttcaacgttgtgttggcctgagcacccactgcatgctcatgtgtcgcaagtgtcgagacgttagagaagaccctcatgggacccacctgcgtgcttcccttcatgcctgtaccccctcctggccatgtgttgtcgctcgatgggccgcacagacaaccctacaggctggagtcatcgcaccaaatcccgctgcaggcacacaagatccaatcggatcttctgtgacctagccccgtggcctt

SEQ ID NO: 62729 - DNA, 692 bp, Zea Mays
gccctacccattttatatggcacccgtatgaccaggggccacaacctgataagtgtttgcacaacatgctagcggaggagtatgctttcctccacgcgctaacatggttcttgccaatagttgtttttaaaatacgttcgcaccagacatatctagtgatagcaccaaacatcacacataacttctgacaattcaatgttgaaatttactgttataatgcattttggaagcatcaaatatattcagtgcttcaataggggtcacctttatatcctatgtacaccgaatatgtgtacctgataggtccaccgtacacgccaggtgttgtttttttagggtggtaccgtttcatatttctgacacaattttagctttgaagtctattttttataatcattaacttatttacgaagctaatgaaacattatatagcttagagttgtagtcatctcaatttgagtagatccataatcatgagacactttcaatacaaccacctctttttatctcaactttagtggcttcactttcatttgtctctgcgttcgggctttcacttcttggtgttctatactctaggtcatccctggggtgcagactgtgtggtcccgctgccctctaaaatatttccctccgaacgagcctaccataattagcgaacctagtcccaaactataattatgctatcccaa

SEQ ID NO: 62730 - DNA, 499 bp, Zea Mays
caaaggtactaactcctacttctatagaagtacctagcatgggtaaaaagaatacaaaggaatctgccgaagcccgggttgaagctaaagctgggcccagagttcctgcagaaacagggcctacgaagcttgttgaaaaatatgctaaacaaagaccttcagaagctgcaaaagctccgttaccgttagaaaaagagagaaccagcaaagaatctgaattccatgccgctgaagcttctactgagagatcggaatttatagtgcgtcacgcgggagggaaaaagctatcagaggagcaggttgccgaagctaggcaatatgctaaggatctgaagtatcccccaggatccttggtgtttaatggcactaaggaggatgattttttgtattgccttccggacatcaaggagatatcagtttgtcgggagatgacagaaaatataggtttcccgaagctagatcttggcatgtctgcaatgtcgaaggatgaccttgcaga

SEQ ID NO: 62731 - DNA, 800 bp, Zea Mays
tgcccagtgggacccgcaccatcggtcgctcaacactcacacacttgatggcgagtcaaagacatcgcaagtccgcactggcaggggccttcttctatccgcacacgtgaagggcggcgccgtaatagccacgccgaggttcgtggctctagctggcacaactacctcccctctctccggacctctcctctgtataaatgagggcctgagcactcttccctttgccaccagatcaggctacgcagccgccattgtcatggagggggaagcaggggtgagaaccaccgtagggttgtggtcgccctggccgctcgggctagttctcggtcacgacgtcgctcgggggctgatgattggtctggaaggtgcgctaggtgtcaaggaatattcgagtcgcattagcatgggtggggagtgaccgagtgacgatgaattgctcaccagagcttatcgttaatgcggagccgccctccaccgtggtctgtgctcctacgtcttgcgatccattggtaagaagccctcatcgagttcattatgtccttagctgcgtttagcaagtatcggtagacagtttggtacgcttgggcattgatcccatagttgccgacgatggcaccactgtcgcgcgagagcgccgttgtgccctggtgtgcggtgggagaagatggccactggccattgatttccctggggcagctgggactagggtttgagtgccggttcggttgggccgatctagcgcgtccgatcgctatcgggtggaccagagcccgtctcacctctttaaagccgccactgtc

SEQ ID NO: 62732 - DNA, 550 bp, Zea Mays
gagaatttaaggggttaaacaggatgatgtgcagggggcaatggcgtgtgggttcagtgattcagggtttaagtggggtaactgaagaagattaccttgtcactgctggtttccctaataggtgtgagttgatggtatggaggtggtgcatagccaaggggctagagatctcagctctgctggaagtatccaagttgggattgttttggtgagctgtaagtagtgaagccctatttgctggctttggctggagtgaactgcacaacaaaggttgtagtggcttcaccccctgtaaaatatcagacctgggacttcccttgtacttagccacaagtggtgtttccagctacccttctcttatctgctccttctattgcctttgttcctggataaaagagacatttgggtactatgctgtgaaccagtcttggttcattgtcctggctgagtttatggactgatgaggtgtatgtgcttgttttccacgtgttggagtcatgcagtgctgtcaccataggagtttctctccaccagatgttgaacaagttca

SEQ ID NO: 62733 - DNA, 449 bp, Zea Mays
cggtgttcttgagtgggttgggggaaatgcgaaattggagctctctggtggaggatctgaggtgcggctgggtgcgctagctgcttgaatacataatgagttgatgatgcacttaatttataggctccgggggtggtggttctcaattttatcacggcgtgctggcggccagagatagggaagaatacgggtggttgtgaccgtggcgttcaccggtgcaacggcgcaaggataacacctaagggagccacgattactaccgcacagtaataagttatggtgtggcgcaaccagggtcaccggagcatccatggcgacgctggcggtctggccacgtcacaacggctaccggcacagtgataaacttcaactcgcgatcaaatccattcccccatgagatcttttaccttcccgtggatatcctctgcgtgccaagcacgaatcacggc

SEQ ID NO: 62734 - DNA, 481 bp, Zea Mays
ttattggagttattccgcttcagatatgggcagtctttgatgaagtgtccagacttcccataattgaagcaaccagtggatgaactcgggagtgcagggaaacgagtaccaggggcactcggctaatttgttgaggtgggggcagtggcagggcggataaagacaggttgtttaaaggggtaggagggtggacgtggtgaagaacggttttgattaaaagatcggatcaccaacctttgtctcttctcaggcccttggttggacctgtcacctccataaccctttgacttgcttgggcctgcacacttggcttcaactgccagcgctgtgctgacagccctgctgtaggagaggtcgaggaaggtggacattttccgttgtagccggtcattaaggcccctcataaaacaatttctgttcttcagatcagtgttgacctgatcaatggcatattgggacaaatggttgaacttgttgagat

SEQ ID NO: 62735 - DNA, 283 bp, Zea Mays
cgactctggagagtaacaagtgattgccataggactttgccccatcacgtggcacagtgaacttgccttagtaaaaatatcttgtcaccaccgtgatcctaacttcgttcaaatttggagcaactgaagctggcttctataagttgagtgttccccttcctctgccccttgtcatgaacccaacacaaccccaaccacaccctgccatccactgtagcccaggaattcggaaacccccaaatcggtcatctgcatcgccgcgagacatctcgccatggctaga

SEQ ID NO: 62736 - DNA, 635 bp, Zea Mays
ttaatgatgaggacaagagcaataacaatctaaatagagctttgatgggtcgatttcggaagttggtgaatgatttaggtcttattgatctcccctgcatggaagaaaatttacatggtccaatttgcaagactctcccactcttgttaagcttgacagagttctatgctccattgattgggaagggcttaacccaaatgcttttgttgtagagtgctgccacatatgactcagatcactacccactcattttttgtttaaatgatattgtccctagtaaaagaagatttcactttgaatcatattggccgagatcggaaggatttctagacactcgtgcatgagtactactcttcgttgttgggttgttgtttggacagatctactaccattaatgttgatgttctagggattcaggcccatgatcttgctactttggactctccttttaaaaagcatgagatttgggagggaattaagggactgccatccgataaagctcttgggtcgaatggtttcactggcctcttttataaggtgtgttggtctattatcaaggatgaggttttggcagctatttcaacagtttggagcagaaaatttgataactttggtcgtctgaacacagcctaagt

SEQ ID NO: 62737 - DNA, 918 bp, Zea Mays
tctgatgcaagtcggccctgtttggatgttctaaaaaatgtacgtacttgtcgctgttttgacacgagaatcctaccgactagtgaattagtgctacgtggcctggtctatatgggtgattcaagtagacacaagtctttatcctggttcgggcaggagaagtccttatttccagcagaaggtggtgagatttatattacttgtatataagtgcttgcagtagaaaatacaagctggttgaaagagagaaaatgatctcaagtccccagggttgattgaggctagtgccaatatccgcgtggaggtaaaaaacagtaaagtgttcgcctccctgcatgaagacctgggctcctctatttatagcccacaagagggccaccaggagtgccagggtttgtcgcacatgggagaggggggtgtccgagcccctgtagcaggtatagcccttggtatggcctttgtacttgctattgacttgagccaggtggggaatgtctggttcctgtatttgcatctttgactaagcagagagccgaggctagtgcctgtgctcggtcgcatgcccgagcctgtatgatggaggagctgcccgagtcgtagtggttggagcagtggtaggtatggcaaaaagctcttgtaatacgtagggtatccgacgtcagctctgcagttctggtgatgtcaggcgtcctttcatcggtattatcaaggccaaagccatgctcgggcgagtcggaagtcttcccgaggctgtggccatgaccgagcctgctctagggctcgcaaccgtgcaaggcacagttaaaggagtggccttccgcgggattcgtgaggggcaggtggccaaggatgagctcgggcgaggcagagtttgttcccaggctgagaccggcttcgggcgaggcgtagtttcttccc

SEQ ID NO: 62738 - DNA, 403 bp, Zea Mays
gcggatatgccgggactcccgagagaactggtcgagcacaacctgaaggtctatcctcaagcaaggccaattcgacaaaaaatttcgttgtttcacgcctgacaaagagagaagctattcacgccgagttagctcgcttagtggcagcagggttcattagagaagtactgcatcctgagtggctagcaaatcctattcttgtactaaaaaagaataaagtggattggcgcatgtgcgtcgactataccgatctcaacaaacactgtccaaaggatcccttcggactccctagaatagatcaggtggtcgattcgaccgctggatgttctatgttatccttcctagactgctattctggataccatcagatcagcttggcaaaagaggatgaggagaaaactac

SEQ ID NO: 62739 - DNA, 335 bp, Zea Mays
ctccctgtagttgaacaacattatcctcagttcctcaccctcgaacagatttcgcagctccccctcacctacactcaccccaatcggcgaggacaacaattctcgcttcccagtcccatccacgcgaagacgacctctctccacctcgccatgataacgcctacaacttcgcgacaattcactcactctccgcttcgccaccgccctccgccgcctatacccagtactcgcgcccagaagttcctcggaaccctccacgcgtggcgaaggctccgctgcagccacatccaacaccgcaaaataatccaagtcctcatctgaagactcctctgtcc

SEQ ID NO: 62740 - DNA, 273 bp, Zea Mays
gtcggttgtacatggcttatggctgttcacctttgttgaggacgaaacgaccaagttcaccctcaattgtttcccgcttggtgatcttggcgactttgttgcctttgtgtaccgtcttgaggacatactaaatttctctagcactctttaacccttgcaacttgttgtagtcttccctacacaagaaagcgaggagtatggtggtggcttgggagttgaagtgtctcgcttaggcggcctcatcggagtcatagtcatcgtcggccacctgtg

SEQ ID NO: 62741 - DNA, 1285 bp, Zea Mays
aagtgctctaccatggtaaactgacaacaacatgggttgataatggcgagcgattatgggatgaaggtacaacaccactatgggaagccccacaaccaagagttatcctcccatggagtgagttctacaaattataattgcaaggcaagttgaagcctagaggatattatggagaactattgttgagaagccaagtgatttgatgaccgttttggaatagccaagcaaaatggtcaatgctttcccccattaagggatgcctcctagggacacatttggcgcatgaccatgaatgatggacatagctctagggccacgaggacaaggataccatcaccctgactcccacccacaaaacctctgaagggtacttggtgggacatataacttttcgagcaaaggttcatcatgcagggaaggatagccatcatgaaaggcttctagtgcctccccctcgccataatcctgtgtgtatgctcttggatttgtcatcacttggttgtcaagttgttctatggggatgggaatgctcaataaaattgtttggacctccttgccctagaactcctactaggaacatcttcaaggggagaaactaactacccagaagtaatggatcacctttggacctgtcacgccttactcccttaggcgatcaaccacaacaaatatggaggcagaacccctagctctgacatggtgaaataatcgaccatgatgtagacgtttcaccaccaagttgggtgatagaaaaagaaacaacaccaaaagcacattagaaaggtagagcaaattctcctcccaccccaacctcgcatccacgtctagttctggctaaggctcaggtagtgccccaccttcttaggatggacttggatcaatgtgcccccatctgagaaggcatacccctggacgcttggcgaaccaccataaacaaacaccgccataatgcaaaatggagagggattcccacaaaggcctcaaatagaatgtaatagaccgagatgtggaggatcccttctgggatctggtcatggaggtagagcccgtagtagagcaaccccataaataaggggagcttgaacacacaaaactcgtaatagtaaaaaggggcagaagaggcaacttcactcatagttggtctccgcttcacttggacctcgtcacgaggatccactcgattatttagatgactcctagggtcaccatgctctcttgcaactcctgaaactatttccaatcgatacacgacctcgagcactgcgtcatggttcactttgttaac

SEQ ID NO: 62742 - DNA, 289 bp, Zea Mays
cgccatcttccccggctaaggtatacatttctaatatatgcatatggttggtacataggaaattacatgcgattgattatatgtggttaaatgtagtttgcatgtgattggtctataggaaattacatttctaatatatgcgtatgattggtctataggaaattatatttctaatatatgtgtatgtggctatggttatatgtgattgccggccatcgtgtcgttgaattatgcgtgtatgtcagccatcgtgctgatagttttatttgcaggatttcgaaacctcccc

SEQ ID NO: 62743 - DNA, 703 bp, Zea Mays
aaaagagggatgaaattggctctgcagtcgaactgaaggagattccaggcagtgccaaaatatctggggaaaaaatctactcccactagctgctctagttggttctagggggtgataagcctgagggagttgtcttgtgggagggggataacctggcatccatgcatcacacagggaagggggtgaagaggtggaaactctatcctaactgctgactgtgcagtgtgtctgttgggtgttggcacacatgcagtgaactgaatcacatagttcctgtgctttgcctcgacgtggtaaccatgcagcaaaggagtagtacttgttagctcatagttacctctgtgttgagtccagttaagccacccgaggtctagtttccttttggacttcatgttggggtagttaaatcctcactgtgccttgtcaagtccagtgacttccagggctggttctttgtgtcctgccactccttcacacctgtattcactctccaatcatccctgaccccggttgtgttgcccaagtctaaactcgggcctgaagcatgctggtggtgaccaccctcgctgtgatcctcggttcaccgcggccaaggttgctcggcaccgtttcatgccttagttcttgtgttcggactctttttgcttatggtgaagctcacagacctggtggtttgaactctactatgataggtagaccgaaa

SEQ ID NO: 62744 - DNA, 1469 bp, Zea Mays
ttttgaggccttgctaagggtagaactttctaaggtgttctatgttccatgagttccccacttctgcgccgttcatctgggtaagtcgatatgattccatccctatgacctctgatacgatgaacggtccttcccatggtggcgatagcttgtgtcatccctcccccattagaattcgacgaaggaccaagtctcccactacgtaggatcggtgccgcacaactttgtcatggtagcgcctcaaggtctgctggtacctggccaactgaattactgtgtccaatcgttcttcctccaacacattaatgtcttccaaccttgttgcttctgcgtcagctaatgacctcagatcggcaagggcactgcttcctacccataaaccatgaagaatgggatatttccattcagaactcgactgggttgagttcgcatgctccagaccacgtatggcagttctctgatccattttcctgcaagcttttcactcttatcgaatactttttttctgagagcttccagtatcattctgttggctctttccacctggccattagctcttgggtgtgccactgatgcgtacttgatctggatgctcctttgctcgcagaaatcgaagaactcagagttggtgaagttggatcctaggtcagtgatgatgctattcggtatcctgaacctgaatattatatcctagataaactccactgcttttgctaaggtcaaagaggcaattggcttgtactttatccattttgtgaatttgtcaatggctaccagtatatgattatagcctccgtgagccttcttgaaaggttcgatcatgtccagcccccagcatacaaatggccacgttacaggaatggtctgcagctgctgcgcaggcaagtgatgttgctttgataggaattggcatgctttacacttctggactaactctgcagcatcgctcttcgcagttgggccagtagaaaccgaatctgaatgccttccggaccagagtcttggatgcagcatccaccccacactgcctggcatggatttcatctaacaattgtctaccagtggccgagtgaatgcatttcatgaagactcctcctgcacctctcctgtacaataagccccctatgatggtgtagtgggctgactgccttgcgatgcgttctgtcgcagccttgtcatccggctcttcttcattttttatgtacctgatgacaggctctctccagtcgttgggatatgcctctggctgactcaaggcgttgcagtcctccacctgatccgtgaggatgctcggctgtgatatttcttggacgaagatcccaggtggagcctaggcccgactggatccccgcttcgacaacacatctgctgctgcattgcgatctctatccacgtgatggaactccaatccctcgaacttgtcttccagttttcgcatagctacacagtacttgctcattgaatcggtc

SEQ ID NO: 62745 - DNA, 569 bp, Zea Mays
ccggcgaccaaggttcgtgccttcttcacacgctgacgacgcccacttccccctgttccttttctctgtctgaactgtagccgccgccctgctgctttgggttcttctccctcccccaccatgccttcaccagtaccctcctcgccttctctctccctctctctcctatcagctgttgccttcccgagttttcttttgcccttttccccttttccggttatcgtgagtgcgtgacgaaactgtccctagtggtcagcaaaaaatcctttcccttcgtcgctccaccaccaccaccatcttcgctttccttctctcatctcccaactctttccctctcaaacacacacttccaaacgagccatccgctaacctcgcccctccatttttttctctctcaatgctaagtttgcttgacgcggacgtcaagtcccatctcacgtttcgctttacagatccgcattcacattcctctctcttttttctattaccttcggaatttccaaattttgcgttggattagacatttgataagtacttacaaaggaaaataggttcttcgcttttttttt

SEQ ID NO: 62746 - DNA, 752 bp, Zea Mays
tgaatttcagaaattcagaaatctgaattcctccaagggttcatggttcaagggctgatttgggaatttacttgagttattttggctaagctttctcaacctttcttgttgcttattaaatatactttaatttttataattggctcaagtcataattttaaatttttcatacccttttccttattttcttgaattttgctcatggggcttacttagggtttttattagggttacacattcttacctttttgaaagacccatttgctttgatcatgatacttttaagtatatgcttggtgaattctttattcctaagttaatttgatgctcatgcttactttggttcacataaaataatggttcttgatttggcatttgtaagagaaaccctaggtgacactggggtgtcacaatatatatatatataacagggtgagtaaaaattatatttaaatgaatcattcgactccctaaaatctttagaatggagccgcttcttaaatgaagccgaatcaaacgctaactaaatctaagagtgcaaggtcatccgacgaaaatgaaggattgtatagctgcagtctctaccttcgtgtacccttggacaagcaaaatattatttatgtctttactcctttgtaacaacacccacggccgcagcaagtgccttaatgtaaataagacctacgaaatagattttggacggcattttataaatactccctccgtctgttttttctagcccaatttttttc

SEQ ID NO: 62747 - DNA, 595 bp, Zea Mays
ctgttatgctctagcgaatttgggtatggcgctcgggaggaccggatttcgcgagctccggtgaacccgccaccgtgcggatgctacaccactgcgctgtcggctctggcgatggggtaggttggccgccgttggtcctagttcaacgtacgagatttggtccaacgtaactattcggtggagtgaacggtggaccgatgatctatgatcgtacggtcgggcgccttgagcgggatttagaagttagtaacagttagatcatcatcttggggctctggttgcagaccgataagttgcagcgatgctctaatcagagccgttcatttgtaatcataaggatctcggcgttgggtactccttcgcagggacattttgcttaagaaaccccgcactttacatgaataaacccatcgttctgtgcatagtgcgctgagtcttaggaactcttcggtattaacccctatctttcctggtaatcgaggcccagtcctgagttcataggaaatggatagttaataacaggaaacgatttttaatgcgaaaataaatcctagaacttgtttattccatagaaaattcatatgaactccaaaat

SEQ ID NO: 62748 - DNA, 912 bp, Zea Mays
caaagagaccaggcttctactttgtctctggttacggtggtacaggcaaaacgtatctatggaactccatcataacattcttacgtagccgcaaacacatagtgttatctgtcgcttcttcaggtgtggcttctttactcctaccaggcggccgaacagcacattctcgtttcaaaataccatgtgaattagatgaaggaacaatatgtgacattaaacgtggaacaatgttgtgtgaactgattcaaactacatctttaataatatgggatgaagctttgatgacacataaatttgcatttgaagcattcgatagatctttacgggatatcttagcatcttcgtctccaatggctaccaatttaccctttggtggaaaagttgttgttcttggaggagatgtacgacaaattttgccagtaattgaggggggtaatcgttcacaaatagtaaattcagcaataatcaactcttctctttggcctcatgtccatatcctacgtcttacacataatatgaggctttcgtcaccatcattgtcacaagaaaatcgagaagaactatctcagtttagcaaatggatgctcgacattggagaaggcaagatacatgctacatcacgagaaggcgaagatgagccaacatggatacaaatacccgaagaattccttctaatgcctcaaagtgataaaactgcatgtatagttaaaaaggtatatgaagacttacaaactaattacatggaccttcaatatctaaaagatcgtgccatattaacacccacaaatgatgttgttgattccataaatgattatattgtttcccttatccctgagcaagcaaaggagtacttaagctgcgacaaagtaatcaaagcacctaatacacatgactcttatgatcttttgtacc

SEQ ID NO: 62749 - DNA, 271 bp, Zea Mays
caaagttggtgcgaagctcattgatagcatcatcttgctctttcatctttaccatatcatcattatgtacattttctgcttgcttcgtctcttcttttgctttggctagttggctcttcaaagatgttatttcattttccttctcttccaaagaattctgaagtcttgctacctcgtcatcctctttatcttgctggattttcaaagccttgcttagcataagtccctgcattaaattcacaaaggtaataagttagatggatgcaatttt

SEQ ID NO: 62750 - DNA, 370 bp, Zea Mays
tagctcgagttgataggccatcactccaacttgcctaaaaactcagaatgtccaatatagcgaggggacaatttgcccttaactttgagtctcctcattccacgaagtggtgaaaccttaaggtacacatgatttctttccttaaactccagtggtcttcttctattatcagcgtagctcttttgtctggtctgagataccctcaaattctctcgaattatacgaacttgtttttccgcctcttgtataagttcaggtccaaagaactatctttctctagtctgatccaatatagaggagtcttgcacttcctgccatataaagcttcgaatggtgacatcttcagactggcctgagaactcagcataag

SEQ ID NO: 62751 - DNA, 537 bp, Zea Mays
gcaggaaagacacatgaacaagatgagataaagattaaggagcaagatgaagctatcaatgagcttcatgcagatcctgaaaaggaaaagaataaattaatgccaagagcgaagaaaatgtgaagctactagagtccttaagacatcttcgaggtcactgcttcagcatcgcctccctgtgctgtgatcgcctgagaaaggttttcttctctaccgacgacactttaggcgagaattcttatactagcagggatgttggcggagttcttgcttgggtggaaaaagaactggggaactcgaaggtgttatgaatgtctgaggcgattattacgcaattgttggatctcgcggtatggcctctatgctagagaagacatgctacgatcacatcaaggcaatcagcaaaatagacttcaacatggatgttgaagagataaataagccttcgaaggaggtgttcaatgctataaagtggtcctatatgaatatttgggacaagggtggtccacaaatagctacttctgaggttgaagctta

SEQ ID NO: 62752 - DNA, 422 bp, Zea Mays
gcttggattgccagggtggccgaggtcaccacatcggaatttggaacaccagcgtcgttcgtcgacgacgcatggcgcctcgaggttatttgatccctgaaccaggattctcgtgtgcatggcggagagctcgccgtggcgagtagaactttttacttcatctagctaagctcggttttgttcctcgccacgtaccaaacgccaccgtgggccatgccggtgtgagggtagacgagagattgaagtgagagatgggagagagaaagaaaggcaggagcgcgtgaggttgaagaagggtgcgggacattggatcctgagcgtacggccaggattagggcgacggaaaacgattcgttaagtcgatctggacccttgatctctgatcgcgcggccaccattcgcccataccccttcgactggag

SEQ ID NO: 62753 - DNA, 447 bp, Zea Mays
ggaaggcttaaggtttcatctgatgttgtagatgctaaatgaacaagaaagttgggagtgaatataaaggactccccttgccttggattaaatagttgtgtctatatacagaagttggaagccaatggtcaagattcatgactcatgaggttacccatgcaagtcacggccgcaatagaaggaacaaggaagataaagtggttcaaattccctagcacatttcatcattatatataataggacttaataacgcacaatatgtggtggaccaaagaatgcacacgtaggtatctagagaacattctattacctgaagaccctcgacacatgatgattgtttggcacatgaagaagcaagtcagtcaaataccctcgacatctaatgaacttatatcgtgcaaagaaattgactgcacaaaatcccttgtaactcaaagagtatttggc

SEQ ID NO: 62754 - DNA, 610 bp, Zea Mays
agtgcctaaaaaaatgtacacggcaaagactcgagcactcgacaaagagccaggttccggtagtgcatttagatacgctactatagaaaaggtttctaccaacactagatttaccactgcatgcttctgtgaaaactaaatataaataatttcaacaactatttgcagtagcatacaatgatggaaatcattcttattttaaatctaggccattatatgattggttgcgaaaatagattttacgtcttggcgaggggttaaggatgacaaggtgaccccacaagttagggaccgagcgtgagggtgtgcgtgaaggcggctaacgaggaagtcccacctgtcagcagctacgagagggtgaaatcgacgccgcgctgctgcacctaatggggtggtcccgcctgtcagtgattgaagagcatggttatgctggtatgctgtgcttctaggccgaaagccacttggcccgcttaggggcactattttatctttaaaatttatgagaaagagattttgagtttaaaattcaaattcaaatgcaaatgacttcatataaatttgaaacattgtcagaaattcgtttatagccatacaaacatcttggaaaaat

SEQ ID NO: 62755 - DNA, 1179 bp, Zea Mays
gaaatattagagttattgatgcgtgtggagcctgatataggtactggtgagagttgtggcacaagtgctggcgatgacatccaggtacgcacatcgtgttattatgaatacaccattattacatgtcgataatgatccatgtatgtaatttaaatgatataggtcgaagcgtatgaaacagaagacttagttatagataatttacgcaatttagatgacgggaacgaggtatgcaacagaattttataatttattatttatgctgctctataacatttgtgtcttcactggagtttgtgttatttcacaggaaattgtaatggggtctaatacaaatgaatgcaatgctaacagtgatcaatgtaatatgccgatattaacattggaacataatactgatatgcgtctggttgatagtaatgctacggatgtggaagctagaaaggtaataacattgctatagtatatgatgaatatgtgaatatgaaaactgacttaatatctttgatttgtagaaactggagtttcatatggaaggtgtgaacttagcaagaccagataaggccaagcctaagggaagaacgatcaaaagtagtgagcaacaagttcttaaattgggtgcaaaaggagctaagaagatgagcaggaagtgccaaaaatgtggcatagctgatggtcacaacagtcgtacgtgtttaactgtggaggataatagggttcgattggcttacctatctggacgtaagcgaggacagcctcctggttcaaggaacaaaatcataggtgcagcacaatagtggaatgagccatcaacgtcaaaaaacgaacggtgtatgtcggagatgatgattcatctggtagagactagaataccattagatttatgagaaaaatatattctggatgtaaatgtgaatcgtatgttaaattgtcaatgcacagacagcgtcataaatatgtacacataatgtcataaatgtatgtgaaatttatcataagcatttaacaattatgtagatttatgaatgtagcgagtttttttatagcatagaacgttgtcgtatgtagcataaatgtatgttcaaatatgcataacatggggcataaactgttcagattgtgaagcttataaagcatagaacgttgtcgtatgtagcataaatgtatgtgcaaatatgc

SEQ ID NO: 62756 - DNA, 628 bp, Zea Mays
agaaaatcaccatagcccaacgaaggtttgtccgagtccatgatgtcggggaagaagctacaaacgttgatagatgagatggggacaaagaacaagaactcgggaggaaccctagcaagaggcgtgaattgaaaatggagcccttcagcggaggaggggaagaatagagccccatgcccccatccgtttggtgtcacgggaaccggaggtcttcaacgcaaaacgaaggggcagcttggtccaaattgctctggagaaggttgatgcaggtcacgagcgctaaaacctggcgacgatatcaaatttccaaggaaatggctgttataataataatactacaaaagcaattgcatcgttccgagtagcacttttccaaagctctaccaataaggaaaaaaaaaaactcttctccacgcgtccttcctattctcctcgtcatcttcctgctgcgcgtccctgccagcacagcgccgcctcccctaacggccccaccatctcctcacatcgttatcgtgtcacggcctctcggcctcgcgcccttctgagctgtcgtcgtctccccctctctcgctcggctgtcgccgcggatctccctgcgtcggccgcaacgatggcctcctcatccgcc

SEQ ID NO: 62757 - DNA, 726 bp, Zea Mays
ctactactattaataagaatgttgtagaagcatccgaacaattagttaggtctgagaagacgactagaatgagcatgcatcatgattgtcgcattataattttctcttgtgcatcaacatgcttctctcatctttattccaataatgagaacttgtgaataatgtgatgtactgttatgttaggaactataagaaatgttttaccttgtgccagattggtaagtcttgactaggtcgtgttatgtgtttctcttgccttgctttctaggaggtacgataactatttagtccattttgcctctaaccaataaaaattgttgcctgtttttcccataaaagaccccccattttaaacaaccttgagtttagcaagtgaaacctcaaaaaaaattcattcttgtgttggtattttctagcccttgtgtgttgcactattggtgatgcacctgcacaacgtgtaaccccccataacttgaccgctagaccgacccaagtctccttgtgcacttgttgtgtcaattttttttttgttggtatctagtggcgcaaaccctatcaatgccatgtttctttccataaatcattgcccctaaaacttcatagcattcctgttgatcatccagctgatcttgttgcctacctctcctttcacctggatcctgaaatccttttcctcgtaaatcatgctggctgtctcatccaaatctctggatcctttaattattc

SEQ ID NO: 62758 - DNA, 527 bp, Zea Mays
agaatcagtggcacgctacctgcaaaaattgcagagagttttgacaaatcaatcaaaagcggaatcagcatctcgtggagtacgcacacggtcccaaatagacaatttcgaagtatgggaagaagatggaatgattcatacccgagaatcattacgtcttaaaatcaatatcccgatatacaaggaggaggttgttcctcctaaatttgtgaatgggaggccgttcttgacgacggtgcaactttctaagttgtcgactctggagattagaatgcatgagtggtacatggtggctagcaacaaatataaactcaaggacttcacatttgttgtgccagaagatgcattttggagcaaagataatatagatcctgtgcggcatttattctttgtcgatctctagtcgttgtaccaccgacaaaggatggaaaccaactacttaaccctcttttacttgtaagtacctctaaactttcatatttgttagttttgtacacacacataaacgagagtctaacgattaacac

SEQ ID NO: 62759 - DNA, 625 bp, Zea Mays
cccggctgaaggggatgagcctccaaagtcagccagacccgacaacgaggtacccgatgctcctcatacagctgcaccgtgtacaaagggggcatagggtaaccggcggagttaagcacttcccacaagatggaaggaaaaccatcgtgagaaaggaagtcagagctgaaacgagtgtctcctccactggctggggtgggtgaattcatctgcggaagggtatcaaaggtaaagattatggtggaaggaagaaaaataaaagagtctggatggtttttaaaaggaagcgggttagctcaagttttaattcctttttgtgtttataatgcatgcatgatgaaggtaacgtctcctctccgaatataagggtgctttaaggcatccttaaaaataaaatctaagtactggcccacagggccttacttaattagccacctttttctcccactatccctaaggcctttcgttctaggtctagcggtctagtcctgacgattcttagtagtttctaagcaagttttagactttgaaaattggtattcatggtttatcgtccttctctatggtggaatttgctctgataccagctgtggcagaaccacccgaattattccagcttaagtgc

SEQ ID NO: 62760 - DNA, 724 bp, Zea Mays
cttaaatctgatcggtcctacacgattgtgccgaggaagcgaagagatgggaatagctttctctgagagcatccagcacctaagtacttgcccctagcccagatgctccgcggcggagcatcgatggcgatgcccaattacgcgcaccccgacgaccgattactggtacggaacgattctacacatggcggagaatgctaattagggttctagggctggtgatttaccagtgatgaagagaatcgtggtcgatgacagcggcgcccgcgcttgactccacggcgacagagtgttccacgacggcgcgatgaatggctcagagatttggtggcgagaagatgggagcgagagcggcgaggtcgtggggcccgatacttgtaggcgaggaggggtgctggcggctgaacggctccgaagctcgtggctgattacgcgacatgcacgggatgggcgttgtgcaggggaagacggcagcgcgcggtcgcagagggactgcccggtggccccgtggagcagccacatagtgagagagccactaccaaggggccccgcctgtcggagtgatagcgtgcacagggagacaaagctgggccggcgcgcgcttgagaaaagatggatgggccggcacggattcagcccaggcgcaagtttcccattttcctccctttttctttttatttcctttttcttttctttattcccaaattccactttaacttcaaat

SEQ ID NO: 62761 - DNA, 883 bp, Zea Mays
atcactaggagcatatagtcgttcacgaggattaactttgtacactaccctccaatcaaccaaaccctttttcttagatggatatgtcatataatacacctgctcgcattggtgggcaaggattatagtgtcgtggccttttaatctatcgttgtgtttgacttccaccatgccatattggtataactcgcgttgtatttggagaaacccaatcacaatcaaagaacaccactttgagttgtttatctccaaaaaaacttgtactcgagtatattattaatgactccataataattagtcaccttcccttcatcatcgacagctctagttacaactccggaatttgtcgtggctgctagaggatgatcatctttgaaccttgtagaacggaatctaaaaccattgacatcataccgaccataacgtttggcagttactgctcctagggataattgtcgaaggtccgattgtatattgtcatttttatctacataatctcgaaaccaacacaagaaattaggtccccccatcttttccctctcaacgaatccgatcacgttcacagccagagatgcaattttgagaatcaaattcactattagtacaaggaaacaaaccttttagtataacaacaaaaattgtagtggcaatgactaaaattaagtttacacttacaggagaaactgactcatctcttccatgttgttatacatgtagagtaaagcagtcttccattcatcattggtgaaacagtatgttgtgctgggtcctacagttttgcccctccattgaaaaatttcaatatcactgatagagggctcatcgacatgataccgcaacgcaggggcattgacattgtgttcctctgcaaagtacaggcccg

SEQ ID NO: 62762 - DNA, 726 bp, Zea Mays
ttcgcgggaggccgtcagctatctgggccagcacccctccgacttcactcagcatgttcattgcacgagtgaagtcggggtataggttctgagcaaagagaggattctcttggtgcagccttgcaccttgctcggcttgctctcgttctcaatcctaagcttgtcggtgatcacgacggtgagagttccgcctttctccgtgtactcgctcgtcgggagtttctcctacttttgaagcttcatcccgggatacgggttacgcatgatcctgtttcctagtctcatgatgtcaccgcacgttccggcgtttgttcctccatcgtcgtgcctcacgctagggaggttcttccccttgcatggttggcttatcatcggagatgggtgctgactccaatctccccccgatgaagaggacatcagggtagaaaggagtcggcgcgatggcgctcttctttctgtcctcctttgagggcgaaggcgttggacagatggctcgtcgtgttctcgtcccttgactcgggacgtttgcttccttctttcgagtgatctgtgtccactcctttgtgggcgaggtggacagtggagtttttcgggtaggtgagctttcgaccttcggtttgtaagaggtcatcttcgattgggatgcgggtggtggtgccacccgctgctctgctctggctcccctcgggatttctgaggaaagcttcttctccggtgggtctgcta

SEQ ID NO: 62763 - DNA, 456 bp, Zea Mays
ttgaaacattagggttctaaaacattttggatatgaaagtactacataacaaactactagcttgttcaatcataatcacaatctataagtaactcatctttagagtcatccatcgcgcaatcctcaacgacaacctcgttccacttgctgcattgtcctgcatcacacttttccacagttctcttgtaataattggattctgcttcatctgcagcttgggagaatagctgatcctcagcctcagcctcatcacacttctgcttgtaataagcggcctctacctcttcggcagcctgagacataaactcctcctcctcctcttgagcacgtaatcctacctcagctagtgcgatgaactcactcaaccttgatatgtcgttctccccttccccatgtaatcctgcctctgcgagagcgataagctcactcaacctaaatgtgtcgtcgtcctcctcc

SEQ ID NO: 62764 - DNA, 357 bp, Zea Mays
gggcaaactcggcaacccttcgatatccccgggagctacataaaaccaaaagtcccaccaattgccccacttattcctagcatagggaacaatcttgacaacttcagccgaggtcttcccagtccttggcgtgaaagtgcatgatccaaattgggctaccttatcacctatttttaacaaagacttccacatatggctgcccgccgtatgaggagatggcctagacgtgcttcgcaagcgccatcactgcatttggtgtcaactgatgaacttgtacctcgaacttccacaaaacctctactacaaaccgatgcgtcgggaggcgaagaccagtagcgaaaaaggcttcaaaaacaa

SEQ ID NO: 62765 - DNA, 703 bp, Zea Mays
aataaactcaaaatgcccatacctggtgctaaaagttgtcttctcaatatcctcctcgcgaatcctcaactgatgatacctagagttcaaatcagttttagagaacacctgagcacccatcaactgttcaaagagaacatcaatacgaggtagcggatatttattcttgattgtcacttgattcaaagcacgataatccacacataacctcttgcttttatccttcttctcaacaaacaataccgggaaagcccatggtgacctgctaggcctaatgaaacccttagccagcagatcgtccaattgccgcttcaatttaacctgctcctttggagccatccgatacggggccttgtgaataggctgcgtacccggaatcagcttgatttcaaaagccgcatcacgctccggtggaatgcctggtagctccactggaaacacgtcagcataatcacacaccacacggatgtcctgcacccgcaaggcagtctcactctccaccaccatggagaaaaaaatttctgacttccttgaccgacgatccggaagtaattgggacaacaaggagagagtgaactttggagagcttcccaagaataccacctccctacccgacggcgcctgcaataacactgtcttccaaaaacaggatataactgcgcgatactgagttaaccaatccatacccaagataacatcaaat

SEQ ID NO: 62766 - DNA, 454 bp, Zea Mays
gctcatccattcggcgttcattgcttttgtgatcacattatccgtgtgtttcttctacgctgccattgtgtcgaagctatttctgctatatcaaagtggatttgtggctgcaacattatgcatattccttcttaattcttatacatgtttgttcatctccggcttcaggaggacaacttctagcacaccgctcaccaagcagtggaggaggaggagcatcacagtgcacttatcactcggcgaggcataggaacagtagtctggtgagtttacattatgcatgtgattatttttttctattcagttatagcatttgagaatattatgcatgtgattctttttttcttgtgatgattggtatgattgaaatgttttattagtatgcacaactcttaatcaattctttcgtggcttcatccacctcatcgttgcttctttgttgcttaataataag

SEQ ID NO: 62767 - DNA, 525 bp, Zea Mays
agactattggattcaagtacgacaccaccgaggcgacagctatgaagactctaacgactttctgcggctaccatgccttggagattatgatgcacccactgggactcttccccgctaagaagagggatgaccccatgtggtgcaaccatgtgagccatgtgaaggacgtgtgggctatgtatcccgaccaagttgggaggatcactattcagtgcatgagcgcactgccttcaggccctacaaaacaatgacatggcccacctcactaaccttgctcagaccactaagctcaccctcgacagccgagaggacttcgtgattgacttgtcttcagagttggtggagaaggacctacaggtggaacagttgagccagcgcattgccacctttgagcagcaggtggagatccgagacaacaccattgatgtcctggagaaccagctacataatgtgcaggaggagcttgaggaagctaacgaccacctagacatgcaccacctgaatatggaggtaaaagaggccaaa

SEQ ID NO: 62768 - DNA, 376 bp, Zea Mays
tcagcccactataccatcatagggggcctgctatacagaagaggcgcaggaggagtcctcatgaagtgcatccactcggctaccgggagacaactattagatgagattcataccggatagtgtggtgtgcatgctgcatcaaggactctagtgggacaagctttcagatccgggttttactcgccgactgcgaagaatgatgctaccgagttagtctagaagtgtgaggcatgccaattcttgtcaaaacaacaacacttacccgcacagcagctgcagaccatttctatgacatggccgtttgcatgctgggggttggacatgatcgggcccttcaagaaagctcaagggggttatacccacatactggttgcca

SEQ ID NO: 62769 - DNA, 1254 bp, Zea Mays
caagtttctaccattatttttgtattaaaaatgaatttagaatgaatttctatgattttatttattatctggactacgcgtaataatacaaagaactgcagggtgctatctaaaaattccagggcctcggtgcaaggttctttcaactgcttgggactgtgggttaattcgtggagatcctaggggttcttttataactcggacacgacgaaggggtatggttcactaagagtcgcccgattcccatccaacgggtaggattagatccacagtctgttgaaccgatatgcaattctggccatcagatccgagatcgacgatcccgattttatgattgccagatttgcccaaaccatcggatagaagatctacgacatcggtacgatggaatgaatggctaaataggatctaatctcgaccacccgttgtgagatcgaccgctacctatgcctctcctacctccggacaccatcttcagtggcaagaaataccaccgcgacgactgccattagaggtgcacgatccccgccttgctacgcagagaagaaaacgaaacaggaaccacacggagaaggaacagggatagctcaccggagttcgtagcacaaagggtcccacccgcggcagacaccagatccgtggtggagccataaatcctgatgagaaaacctgtcccccacaccggagcgatggcagccctcaccgcaccccgacaaagccgcccaggtggttcacgcagacgacacgacgcacatccctatcgcttgacgcaagccaacagcggcgctaaatgattctcagtgcaatggtgcacttcttctgtgctcggtaatggtgagaggctcccggctaatgcaccacgcgcaggcttagctggtagtgattccaccgtatatatactccggagctcgggagagtccgatcgggggctcccaggatcaagaccccggcagttaggcatatccgtgaatctctcctatttctctccctctcttgttcgcggcagaacggctggctttgtagcccacagtgagcggcgatcacggaggagcataaccaccagatggttgatgctgcaccagtgaggagagcgggtcacgcgcaagatttccgggcggagctggttaacagaaacatgcagctttctggtggccccacatgtcattgaacacataggtggtaacgtcacatccgaccaagaaacaataaacaaataggtgaataccgtataaacatgaacttataagggtggac

SEQ ID NO: 62770 - DNA, 367 bp, Zea Mays
agtataggtcttattaaatgaaatgttgtcattattttgtatgatgtggctatgttgagtttgtgatccaaaatctggataaggggctaagttggcgagcgaaactaaggagaccatgttgagtagaagtgttgtctttaatgaatctgaaatgtattatgctaaccattcatctaatgctcaacagtcaggtccacataaaataagtcttcaggtggagaacttagatatggatgaccatatatttcaggatgctgttattccggatccacaggttcatgatatttaacccatcatcgatgattctttgtctactgagcattcttctcctgttgtgcagcaaccacaacagtctgttgtagttgag

SEQ ID NO: 62771 - DNA, 473 bp, Zea Mays
aagagatgggagttgaggactgctgaggaagtggtgaccggtgagggaggttcacccccgtcggactaggagtgcgaaggggcatcaacgacgtggattgaagagccgagagcggctggcacaattgagttgaggcacatgcagaaaagggcgcgaccatggacgccgaaagggacggtctgcaatgcgcgggctactgacaggggcactagagcatgaaaggggcacgtggtgcagcataggaaagccatcagtagggaatttgtagcgttaagacatggaggcttagggagttaacagatgtggagggataaaaacatataactatataacccttgggcaatcgagggggtgagtgaaaatggcctatgccaagcagtcgaagctctctgttcttgtgacagattgacagagctccgtccagagtagagagtagttaattcctggcagaaagtcatgtgcaactttccgac

SEQ ID NO: 62772 - DNA, 541 bp, Zea Mays
tcaaggtggctatatccatcggactctttatcccaccttctatctcactccatattttaaactctactctgtaaatagtgcgatacagtgtaaaacaatgttttgcacgaccatatacatactctgtagagccgaccttactaaacatgggtgatatgggtatgggttgggtgcggtttggatttcctacatggtgtatgggtcgggtattggttggttgccattaggaggcctaccttttttaggattgagtaggtcgtaagacttgagattctgtgcatgtttcaactgcaactgtatgggactagcgccaaagctaaatgagaaatctagcgtggtgaaacacatttcaaattgtgaatgatcaagggtagagtcaagaatctcaagagtcctacaaacatgagggctagtttagaaactcaaattctctttaagatttgagggactgaaggaaaaattagttcattttcttctcgatcccctctaatcccggaaggtaagtttccaaactaggcatggagggccttccccttctagt

SEQ ID NO: 62773 - DNA, 835 bp, Zea Mays
ataacctttctggtgatattgtgtggtttccatattctggcgaataactcaaactttttcttccgcttcagtgattaagtcattcccacaaaatttgtgttctccggcttctacccaatttagcaatgtcctgcatcgtcttccatatagtgcttcgaatggagccatcttgatgcttctttggtagatattgttgtaggaaaactcggccaatggtagccagaattcccgtgatccttttgatgatagcacacaatctcttaacatgtcttcgaggatctgatttagccttttggtttgccccgatgtttgagggtggtatgctgagctatgcacaagcttagttcccaaacctttttgtaattgttccaaaaaatgagtagtgaattatgtccctcgatctgacacaatagtgttgggaatcccatgtaaacgaacaatctcaacaatataaatgaccgcatactttggaggtcgataggtagttttgacgggtagaaaatgagctgatttggtgagtcgatccacaattaccctaatcgaatcattgcccttttgagtaataggaagtctagtaatgaaatcaatactaatttattcccatttccacttaggcacagataatgattgcaataagccagatggtttcatgtgaatagctttaactccgcaataattatcacatcttgcaacatacgctgcaatctccttcttcatcttggtccaccaaaattttgatttcaggttacaatgcattttgccacttcttgggtgaatcgatagtttgtattggtcagcttcatctagaatcttggttctaagctcttaatccttt

SEQ ID NO: 62774 - DNA, 900 bp, Zea Mays
tttcccccaacataatttcaccaaaggctacttggtttgctctggccgcagtgaccgtggaccatgcggacagatgcacgcgttcccggcgattggtggtggtctagttcaatcgggtgggtcgacgagcatcacaggttcatgagagtactcaaatgagagagcatagaggatgagctgaactgtatcacgctggccacggtgaggtcgttttcacggtggcggaaactcggtttgggggaaatccgaaattggagcttcctggtgaacgattgagggtgattcttggtgtctgggtacttgactaccctacggagctcacggtggtttcaatttatactgatcgttcgcgagcacagcgaatttgagcggcgtattgtgatcggtatgaactgggtgagtcactggtggccgcacaacgtggcttttaccgtggcagcacctccggcgatcaccggatatgcgtagcacagttagccatgacgtggtaaagcgtttggacacgtggcggacgacaatgatggctcaacggcggtgagaatctatccgagtgatcgatgagcaagggggtacggtgaaccttatctgcgcctgcgcccgaactaatccagtgccgagatttcaatccatcgtgatcttacccgcgaacacgaatcacagcgacggcatgaatcacggcggagatcatcggcggcgaaaaaaaactgagctggcggcatgatccatttcggatcactgtaccatggcgaagcccattcagtcagtctgtcagtctataattagggtgaattttctctcaattttatgtagtaacatgattgtcactctttagaaaagttatagctctaggatccagccataatcttggtatagcaaccctaggcaaattcttgctcgatc

SEQ ID NO: 62775 - DNA, 653 bp, Zea Mays
tgatcttcttttttagtataattgcccaaaattttgttgcacatagtctcaatcatttctagccactcttggcaaggctctttgaattgtttctcaaatttgaagcgataaggcaatcgaacaagttcattcttcttccttgttcccttcagtttcgccatactccattcactcaacgttggagataccctgttggctagatattcttgcactagatctctagtgctgatctgttcagccaccaccctgaattctgctacagcttgttggcatggtgaccccgatgtcatgtggcacaggggcctagtcagtccgaagcttaaactcagtgggctcatgaccatcgtcttcaacttctccctcttcttctcatcagccttgatatagaaccactcacttttccagccggttggccacttggtacgatagctgagcaccggagccttcgtatccttgcgatacgcgaagttataacaaccgaaattttcatgtaacccgtcttctctggccttcgtttggtaatgcaattcatgcactcgacagaaagcttcagcatttgggtccattccttggcttcaaagggcctagatgaagatgctgagcctaacgatagcgttaggggtcagctgatggagatagatttcataattatc

SEQ ID NO: 62776 - DNA, 1218 bp, Zea Mays
attttttaaccgagcactacattaggttgcaaagccgaagtatttattccgaagagctttaagtgtttcgctcagcttaagattctttttagcctcagccttgattgtcatgtttaaagctttggactcacggctgaattgacttgagttttctttcaaaagtgtttgtgctcccttcatctttttactcaatttttcattctgagcccgagcttcggcaagagagccctcagatgagatgagcaagatgtccttttccttcaacgaattttcaagttcttcaatccttttatccaagctactgataacaaactcattattcctatcttcgtcatcttgctgcatctttagagctttgctcagcggtaagctctgagttaaaggattaagttcagtagatcttcattaatgaaatgctaaaaccagcccgacgaatgaaaaatagtagaggaattataacataaaatttgagtagaataagctgcctataacatgttgtcttctgtaacagctaatgtctttttctagcttcggaaatccgatactctttgacagtgtgctcacaatttttgctccagcgcgatcacggatacatcctaaaatctcttcatccacgccgccaaagagaatggaaccaggctggtagccgccagatatagcaaattccttcaattctaatatatcctcttcggaaagctgttggccgcccaggtgccgaagatcgaagctttggtcttccgaagaggcttattcagttcttttttccttcgatgctgaagtctctacagcaattgccccctcagtatttttcccaggtgcaacattagcaataagtctatcgatttttgataaggttgtaccaagggggccaccactattttcaggttgttgaggaccttcgccagccatagcgggagtaatctccttttgaatcactagaggaggggtgtcaagaatagtcctcatcacattcatcatccgacgcttcttctgagtattccctccgccgagtgccgaatgatctttgtttacctctgcttcggcagttctctcaacatttttcttctgtggctgtaataagcttgttagctctgatcctagaggacttagcattgggaaaggtaagggtccggtcattacctctagaatttctgtcaatggaagctgccgaaggggtctcttctgaatgcttcggcagagaaggtctctctttttctc

SEQ ID NO: 62777 - DNA, 340 bp, Zea Mays
aggcagaggaatagcgttggaataaacaaaaaaattaaggattcattgaagtcactgaaacagtattaagacatcattaaaaatttggaactgaaacagtattaaatgtcaattaaaaaattagagtgtaaacatctgaaaggcttcgatgaaagtcactactgtagacgcgccaggtaggggtcgaacctacggccttctgcttaggaaacagacgctctatccactgagctacaagcgccttaatgactctaaatgatcatcagattataagactgcgcttatttttgtcatgctggcagaggagacagtgtggatgtcctgaaaacgacgaaacggt

SEQ ID NO: 62778 - DNA, 309 bp, Zea Mays
gtgggacaagatccaacaagccatgctaatgtagcagaacaagttgagacgtctatggcaagagaatcacctccacaaccacgaaggtcatcaaggcttcgtgaggcacgaagagaagttctattgttgggcaatgaggaagtgttgttgttagattatgacgatcctgcaacatatgcagaagcgatgatggacccaaattctaagaaatggcaagccgccatgagatccaagatagattccattggagaaaatcaggtttggagcttggttgacccacctcatggtgttagacccatagagtgcaaa

SEQ ID NO: 62779 - DNA, 459 bp, Zea Mays
gaagatttcgtcttgactatgaaagggccctcccacctgggctccagcttgcccctggactctgtccgagctgttcggacgagtacgaggtccccttcgctgaattcccttgggatgactgtgtggtcgcgccatgcttttgtctgggcttggtatttgtttagagcttgtagggcgaagactcggtctccatcgatgagatcctttgacgtgggctcgtccacgtcggggacggctgaaggaactgttcgcggggacccatgttttatttcttgtggggtcatggcctccgatccgtatagaaggcggaaaggagtgaacccggtcgccctgcactcagtcgtgtttagtgcccagaccgcctcgggtaacaaatcggcccacttgccctttctttcgtcgagaagcatctttttgacagctgagaagatttttccgttggcgcgttccacaactccg

SEQ ID NO: 62780 - DNA, 1637 bp, Zea Mays
aggtacgctagcctctaaagcgactccttgaccaaaggcttgggctaccaccatgcaaccagaatgtggaggagaccctacgtgaacatccatggaagtacaagagggagaacctgctcggacaccctcgggggctgggtcatagtttgcaccacccactcgagccagatcgtctccagcaacaccctcgggggctgggtcgtagtttgcgttacccatccgagccgagtcacccccggcaacaccctcgagggctgggtgagcgccaacaccatccttgagggctgagttctctgcagaagccacctctaaggctgaaggtccctcagtcacttccatgggagcaagacaatccaagtcaacttcctgaccctcaagaccgcgctccaaggtcgatgaggcgcgggacgctgcccgggatgaccccaacccggcgtcgaacacatcagcacaaacatccatcgcgtcaccatccgccggttctgataacatatcctctggaaccatatcttcaagagtttgatcatagttcgccagagacaattcttgtagaccaatgagggcagacaaagcaggagaaggaactccactactttccccactggctacatagcgccgactgttcttcctagtcagagggatctcatcttcttcttcctcctcattttcattagcaacacggacagcacacccattggggtcagcgtcagatgggtcgcacccattgggatcagtgtcggtaaattcaggcacaggcacttcctcagcagcaggagccaaaggaccagcatcccgatccaagctagacactcgccaaagatgtctcttcttctttttctgctcatcggcaggagaagcaggctgattagctcggcaagggcgtttcgggcgaacactgacaggcctctgaatatccaaggctttactagcttctgggagaggcgctaccatcaatgttccagcaggagcggcatcagaagaatcttcggctaacatatcaagcatagcacttatctctgcatcactgggatccaaaggcacctcaaaatgaacctgtcgttcatcatcaggaatttctccaagcaaagcaacgaaaacactaacttcttcggcagagggtcgcactctaaggcccaaaccgccatctccagcaggaggatttgacacgaaatgggtaaaggccttggaaggaggcaagttccaggccgagtaggcaacaggggcaccaacatttgataccttgcctctgagtatcatttcgagctggctcaccaaatccacagcaggaattcttctattggtgacccaggtggagtcagctaggcctcagtacagatatgccgggtatgccctgtccttcaaaggctgaacattcttgaagacaaagtcagcaaccacagcctctgcagtcagacccctctccttcaacagtccaacttcagctagcagaactcctgcctcagccacatcctggtctgtgggggattcggtccagctcagagtgcgaacatccggttgtctccctgactgtggggggagagaatttccgtgattctcaacaataaaccactccaagcgccatcctttaatgctgtctttgagggggatatcgagataatcagttttcctttcgcgac

SEQ ID NO: 62781 - DNA, 310 bp, Zea Mays
acaacagaaaggggcaacggggtctgggggctcaacaacaccatgccgacactgcaagctagaatggataggacgtcatgatgtcgcaggaggctgccagcactaacatcacgaccatggcggtaaggcgtcaagaggagcaggtcggcaccgggcagccaaaggaaaaagtggaggagtaggaggaggacgtagccgtggaggagaagatcatacaggtggaggcggagatgccgcaactgcaagaggtgaggccacagatcagcgaggtcgtggagatagaaacggaggcccatgagcgcatggacga

SEQ ID NO: 62782 - DNA, 429 bp, Zea Mays
caacaggcacatgtcaataacacagttcgctgtcatgtcggcttgcagatgccaggacatctctcctccagatacaacacccggcttcactatggacactcccctacgagtataagtaggacagtagggtccctccaaagggacaggagacaaaagatgattcgaccaccgaacactcagctctccacacggcctactcggtcttagatattgacacttgcctcaatcatctctagggacttggggacatcccctctcccgcagtgcttgtaacccctactacaggcacattggtgcgagtaatataagcctcatccccctcttctggaagtagggccttgtgttgcccaaaccaggataattgcttgtgtcttctcgcacatgatctagagtccagccatgtgacactatttactagttggttaagga

SEQ ID NO: 62783 - DNA, 403 bp, Zea Mays
tgacgagtgatgtttgtccggtgaagtatttattagtcctttacttttaggcgcaattatatttgagaaattggtgagcaatacttgacacacttgtggatggttcccaatattggtgtcgagcattcagatcatggattaatgctgcaacaacttttgatccgatcctcctaggtacgaacatcatgtctaggacatgataattaaaaaatgaacgagatgtatacaatatatatgaagcactagttataaccattacttatgggtgtcactggttgcttctgtagggtctatattgtgggctagaggaggtgaatagtttttcctaatacttaatcgtgttggctgaccgaaataattgtggaattaaacttaacggtctagccacatccgagatacgacc

SEQ ID NO: 62784 - DNA, 403 bp, Zea Mays
agcggcagacactgaattgaactactcccgcatatttcccctcaatcaatttctggattggagacctataatgctctacccacggtgatagcggcaacaacggagcactaagctcgttcccgatgatctaaggcagctcagatcaattgggtgggtcgatgagcatcacgagaacataagaacactcaaacgagggagcaaaaggtatgagtagacctggaagtggctgaccacggcgagatcaattcactcggtgttcttgaaggttttgggggaaatctaaaattggagcttgctggtgatcgactgagggcattacttggtggctgggtgcgtgatgatcctacggagctcacggcggggtcaatttatactaagcgagagcggtggccgggaattcgag

SEQ ID NO: 62785 - DNA, 749 bp, Zea Mays
gtgggttaagtttcatacctgtataccagtgtaacccattgtgtaaaatttctattagtggtcgtggtatgtgtttgcagtacccatcggatacatatacgttcacatccctaccggtggctgtggagcaagggaatggaggcccttgggcaggttttcttgttagcctaaccctaacacttctacatctaggcttggttgtttgaaatgagggcactacatgtgagtaaggtcaccgatcgtgatgagtgtgttggatggtagtgacaggggagcaagaacgaacttggcaatcgggggtaaggagtaaggacgacaatggtggataggaccaagggctattagtgatgtcgaacaatagcactgctggtggagggagcacatgagctatgcgatatgaggctactacgaccgagagttgaggcggtggtattggcctagagtagagtggtgcgttgggcaaagatgtgcagcgtatagagaagatcgacgaagaagaagatggtgacatatgctgtgtgggtcccacatgaaggtggcatgatggatcacaacgactgcccgtctgctgcgtctcaatcctcataccgaacactaaatatggtgttgacgtctttttggagcgccaatgtgatacccaattttctcaaaagaagttaaatgtatttttcccttttctttcgtgatctgtgtagttggggttggagtttttttaggaagcattcaccaataaaacagtagaatacttg

SEQ ID NO: 62786 - DNA, 559 bp, Zea Mays
ggaaaagagtgcgggcctgactgaaatagtgtctgcgaaaattacaaaggcgcgaatgccttgggactagacgaagaattttttgtaagttgtctacattccatgagtgctccaggtcttcgtcggatggcgatgtgagtctgtaggcattgggggacgtttttgtcttgacgatgaatggcccttcccagttgggctcaagtttgccctaggactctgttctggtggttctgatgaggactatgtctccttcctcgaactctttggggatgacagtgttgtcgcgccatgccttcgtctgtgcttggtatttgtttagtgcttccagggcaagaacatggtcttcgtcgataaggtccttggaggttgaatcatctacattgggagtagctgtggagcttgctcatggagatccatgcttcagttcttgcggcatcattgcttcggatccgtacatcaagcggaaaggtgtgaacccggtagctctggattctattgtgttcagcgcccatatgacttcaggaagctggtccgcccatttgcctttcttgtcttcaag

SEQ ID NO: 62787 - DNA, 360 bp, Zea Mays
ccgccaccaccaccaccaccatcggtcccgccgccaccaccaccattgaggggtaatctccccccaggggcaccagcatcagcaacaacaacagcagcaggagcggcgatctcgcttctagggtcactggaaaagtccagggccccaactaagtgtagcccctttttatttgagcctgatcatcatgccgacaggtcttaacccatcatctgttcgccaaggcttcttccccctctgctcccaagcccacacctcctccaccggataccaggcccaccgacgggtctggctctcagcagcaggcatctactgggagtggtgccgacgattcacccccggctgctgccaagacaacgctag

SEQ ID NO: 62788 - DNA, 452 bp, Zea Mays
aaaaaaccaatcattgtttcttgtgtagattcagtcacactagagagcgtatttggtctgttagttattctgttgcattgctgtgaattagatcctccagaacgttgtgcttgtgtttctattttccttgggaagtaatgttgtgtttttatttttggttaattctatatgatcattctgcgattagtagggtaatcctgtactcttgtctccactctactcaatgcttgtagttcttctgccctaaggcagaatttgggacgtgtgtgacattacgttttccatcttcgaattgtgatacttttgactcacataatctggtgttcttaagtgcccttttaattttgatgccttcctttattcagtgactatcgtctataacatatacccatcctgtaatgttttatgcacttggacagttagacctcatcttagcatcgtatgcatagatg

SEQ ID NO: 62789 - DNA, 588 bp, Zea Mays
aaatataggacatgtactttctaataaaaataaaatataattattgttcattgtcttttacataaaagttcattaaagcatatatcataacttttcataaataggtgtttaataataatgatcttttcacataaaacctatttagacttatatcataatttgtcataagtgattggttaataatatttataatatgctccataattaataacgcgtttcgtagcccattaacattagatataacatatatcttttgtaaaaggttaaaaaggtttaatattgttataacgtgttttatcgtcttataaatccttaattgagacatatcacatatgacgttttataaaagattaatttgatgaacctaatatttgtatattttaattaagatattttaagctcatgacttattttataaagtataaatcacatgtttgaaaagaataactttttattataactcttgcgacgtttttgaaaagcaaacgctcttctcgttaggttttcttttagctttgcgtatggtgaatgttgtatgttattgagtggtgtttgttcttcttgtttgtttgtgtgatattcagtggt

SEQ ID NO: 62790 - DNA, 1020 bp, Zea Mays
gcgatgacctaggtatccctccaggtgaattagcgggaggagatggttcggcacccgggtgaggatttgcatgtatccatcccccttaggtgttgatggcagctcattcgcaaggcggaccgggcgcaccctcgacttgactcacgttctggatggacggaatgaactcgggttgcatgttgcgagggatgggtggatgatcgcgagggagctgggcatggtgccctaccagctcgtgaccacgctcttcggtggctcggggctgacgccgatgagtgttcctttgcatacataatccccgctccacgggagttttgtcatcctcggacgtctcgtcccgagaaacaggttgagttggatcctgtcctccggtggcatggtgtctttggatgttgccttaacgattcccgcggcgacgagcttcacgctgcggggctcctcccccagtagagtcggctcgtcgtcggacatgggatcattatctactcctccgttgatgtagaggagcttggggtagtagtgggaggtgcctagcgttgtgggcgtaactgccgccttcggggtccgactgatccccatgatggctcattgcgcattgccaaacctggaagtgccgaggggacggtttcatatttcttccaactaattcgggtctagacccgggtccgcgaggtcgacaatggtgtcctccggcccaggggtgccgtggcgtcggctgaggcggggacgacgtttctagtgtgcctctgcccggcatagcgacagctcggtgcgtcgaatgagcgcacatatgtcgtggagccaagtggtgaactggtgcggtccttgccacgaccatttgaggtctagtcgcggaaggcgggggatcgccctctcttctacgacaccggcttctgctccgtcattccaatgaagtgaggcttcggagcctcctcctccgcgcatactacatggtggaggattcccttctggtcaacaatgcaggaaagagacctgaaatggaaaacctctcccgtgacg

SEQ ID NO: 62791 - DNA, 629 bp, Zea Mays
cggtaggaaaagagtgcgggccggaataaaaactgtcttgcgaattacaagggtgagctggccctaaggagtcaaacaaaaaacttgcgaagattgtcaatgttccaagaatgttcaaagtcttcgccagatggcgttgtgagcctgtacgcgctgggggacgccttcgtcttgacaatgaaagggccctcccatttttgctctagcctgccccgggactctgtccgagttgtccggacgagtacgaggtctccttcgctaaattccctcgggatgactgtgtggtcgcgccatgcttttgtttgagcttggtatttgtttagagcctgtagggagaagacacggtctccgtcgatgaggtccttcgaagtaggttcgtctacgtcggggacggctgacgcgactgtccgcagtgacccatgttttatttcttgcggagtcatggcctccgatccatatagaaggcggaaaggggtgaacccagtcgccctgaactcagtcgtgttcagcgcccagaccgctttaggtaacaggtctgcccactttccttttttgtcgtcgaggagcattttcttgatggctgtgaaaattttaccgttggcgcgttccacaactccgttggattgcgg

SEQ ID NO: 62792 - DNA, 445 bp, Zea Mays
ctgctttgaagttgttgcaacgttgtgtctgaactttaggtgtcgtaataaccaccaatacatcgaccgtgttttgatagtttcagagctcaaatttgggaattccctttaagcaaaacttttagttcttctcaataccttttaaatgggtatatacttgtaattgtctattaaatagattgagagaggtggttgtccggatataagccgaatgcctaatgtgcagtatctcaggctgagtttagctgtaggtcatgcagagttgagggctataaagataaatttgggtgcaactttattacaaaagtcgtggacaattttcaaacttttccaacgcgtgttcgttgaagtttaagttgattatagcaggggttataggtttttgaattttcgttgtccattgtttctatcctatcagttttgcaacaaaagagttgcattgttt

SEQ ID NO: 62793 - DNA, 494 bp, Zea Mays
tggattacgaaattgtcatggtttgttcctctcccttaacatgccaatcagtagtctcctagccaaaggttggggtttgattctcctgagtactttgcgatgttggtgggtgccttgtaccgctacggtactagcacctagaggatgtggtggccgaaggcctgaggtcccggtggaggggagctcaaacttcggtcctcattaggattaaagtgtcctccacgatgttgattgtaccgatggtcgatgcatgtcccctcttgtcctttttcctagggccctgggtcgggcacgctttgcgtgtttctgcctgtccttgggtgccgatgggacaggacccatgtcgtaccttcctctttgtactcgagcatctgtcccgacgaagcatcatttttcgacgacgcagacgcggtatgctggtcgacccttggctctcaacgtcgcgacatggaactctcggtctattattgcatagaaaggtagagaataccccg

SEQ ID NO: 62794 - DNA, 515 bp, Zea Mays
ctccgtataccatcaacctcttaatgcccagtgatatggcaatgttcaatccgtggatcaaagcttcatattctgctgcattattggatgccgagaataacaactgaagagcatatttgagttgctcacctccaggtgcaatgaagaggatccctgcacctgccccctgcagctttagtgagccatcgaaatatatccgccatacttctgcagtctccgggttgtccggtacttgttgccggtccattctgatacgaagtcaactagtgtctgagtctttattgcagtacaaggccgaaactcaatgtcgtgagctcccagctcgcaggcccacttggctattctttcaatggcttctttgttgtggagaatatcccctattggaaacccagtgactactatgactttgtggtcgtcaaagtagtgacggagcttgcgtgcagttagaagtactgcatacaacagtttttggacttgaggatacttcttcttagatggccccagaacttcactga

SEQ ID NO: 62795 - DNA, 467 bp, Zea Mays
ctgttgacagtacaagtttcagatccctcccttgtgtccctttgttgtaggtattgccttgggaatttgggttgattagcggggacttaatcatagggaggtggtcctaggatgaaggaggtagctgatgaccatgtactcatcgctggattgcttgaggcatttgaggccgaaggcagacttggccttggccttggctcttgtgattgaatttgaatatattatggggatgtagggtgaacagtatgaagatgtactaaacatctctttcagctgtgaaggttgagtagttgacgaagcaagctctttttgcttgttaatggtgtgatgtcatgttcttgtagtgtggcccttattctcaccacaaaacaagcagaatgacttccttggaggtgtaacaaatctgccactaaaaccttggcctccccttcctctcggagcaggtggttggaatgtgctatgcgaag

SEQ ID NO: 62796 - DNA, 1067 bp, Zea Mays
cagacaaccaaagctaactggccaagaagatgatacccttaacttgtatgattctacaaggacactgggttcttcttgaaaccagcgaacatgttgccttatgtgattagaacttcattagagctaccattcgcggattcgccaaggttacagcagatgtcactgcttactgcatcgtctccttggacaagtatggtcacacatccccgttccttcattgtctctaccattggtcttccttggtaaggctaaacttctttaggcgccgtcgtcattgttgcttgccagattcttttatactataatatacgtagtatattgccgcatgccagcgtaacattcatggttgtgagcagaatattgctacgcagtcgaccatgatgtctttgaatccctaattgactatgatcgtttgggttaaaatatatatgttctgccaatctgccttgatctgtgtgtacagaggattctatggttcttcgtaagactttgtctcatcgggttgttgttgacttgaagccacccattacccttcattaattccccgatagctagcataacattttcttgacttcccaacctctaagttgcttgatgcatcggattcctctgcaagtggctattgtttatcagtgtctatgaaaagtttatataaagactgtttccctttgcaattgcctggtgctgctgatctagcaactaaggggcttcttgaagtatgtatatgaacattgtttcccatctctttttcttcttcttcttctggatttgtatgaaatggaagcagaagtgtgttgtcgctctggtgctttgatttcattgcaaatgggctatgatggcaggaaggtgctcaagacatgtgtttctttgtagccaggagcccaggagagtctgactatcattcagcggacaagaacggaccagcatgggttcccatgctaatggcagcacctgtgcaggtgacggtcctccaccaatggagaagcggaaagaaccggcttttcctcttaaaacaatgccactgcatgctaacggctggttgaacgacatgaagctgtcctcgccta

SEQ ID NO: 62797 - DNA, 321 bp, Zea Mays
ttcaggatttaggcatgtgtttgtctagtgtcactgcaactccaaatcccagctcatcgataggaatagatccaagcactttaccaagtgatgtcgctgctggttcaatgagtgtcaatggaaaacaagtgcagggacaagtaactgataatgcaaatgttatagttgttgatggggatgagccttctggaaagaggtctaaaaagtgtacatcagatgtttggcagtacttcacgaagcacagagtaagcattgaggataatgggaaatcatatgtgcagatgtgggctcattgcaatttccctaagtgcaaacacaagg

SEQ ID NO: 62798 - DNA, 726 bp, Zea Mays
tgttatttatactatataaccaacttaactgaagatcctttggcctcaggcttcaaacaagatgttagtgttgaaatactaacaaactagagagtatcctgcgcgttatggaaaacacatcaatgaatacctttttcattgtcatttgctatgagtggaggctaaatatgccgtgaaattataaagtaggtgacaacaatatattattttagttgtacaagttggcgggaagtggaacagtgaagtgacaaatttgaggatcttgaaatatcttttacgaaagtgcttggaggtgtcgccgatggtaaataacaatatattattttagttctacaagttggcgggaagtggaacggtgaagtgacaaatttgaggatcttgaaatatcttttacgaagtgcttggaggtgtcggccgatggtaaatatatgcactatgaaaaaaatatgtcaaaaaacttccatgcataatgatgctgaatgtgtaacaatagtacaaaatagatgtcatatatatgcaagaatgttttacaatgtggatatcacataaattgtttggtacgaactgcaagttgtttgtgccactattccaatcaacaatgaaaactggtaaaacaaatagaggggttcaacatgaagcgacatcacattcattgcacaacatgtcagaagagctaatcaagttaattaaggtggcaacacttgaagttcaataatattatccagc

SEQ ID NO: 62799 - DNA, 521 bp, Zea Mays
atggagcaaggatcctcgtaggcatccaagaagaggacgaggggaagggagtgagacccacctccctgcacctctggaaatgccactagatctagcccaagttctagacaaccagaccaaacacagtgaagtcctcaccagaatgcttgagaatcagcgcccaaatggaggaagaccctaggacatgatgggaaaatttctaaggctcaaacctcccacgttcgctggatcaagcaacccactcaatgttgatgattggctacgcatagtaaaaaggaaactataagctattagatgccctgaagatcagcgtgttcagcttgctgcccaccaactctctgggatggccctatcctggtgggacacctttagtgttgctgtgggaaatgccacatgggcagaatttgaggctacttcctgcaagcatcatgtgcccactgtaatcattagctcaaggaagaggaatttcatgacttgacccaaggagaacgatctgttagtgaatacattcataagttcac

SEQ ID NO: 62800 - DNA, 772 bp, Zea Mays
gccatctagagcttattgtgccgctaagggtagaactttctgagatgctcaatgttccaggagttcccaattggagtgccatccatctgagttagtcagcatgagcctagtcgagccacttctgtgactatgaaaggtccttcccagggtggtgatagcttgtggtgtccttctctcgactatatgcggcggagcacaagatctcctacttcaaaagcttgagggtgtatcgccatgtcatggtaacgcctcaaggtctactggtatttggtcgactaaataacgacatttagccgttctgcctctagcacatcgatttcttcgagccgggttgctaccacttctacaatgtttttgaaggttagcctgggtgctccgaaagcaatgtctgctggcaatgctgcttcagacccataaaccacatagggtagttcccagatccatttccctgtaaacttctcgtttttgtcaatgaccctctttctgagtgcttctagtatcattccatttgctctttctacttgtccattagccctggggtgtgctaccaaggcatacttgagctggatgcacttttattcgcggaagtcaaagaattcagcactggtgaagtttgaacctagatctgtgatgatactgttgggtatcccaaacctaaagataatctcctggatgaactctaccaccttggccgaggttagagtggctattcgcttgtacactatccattttgcaaacatgtcaatagctaccaacacgtgtgtatatcctc

SEQ ID NO: 62801 - DNA, 574 bp, Zea Mays
ggaagaatccgtgtcggcgctgccccccttggcgatctcgccgccggggagtttgtgttgttcacctcctacatctcttgcgggttggcgctgccgattttgcccttcttcctgctactactggaggagttcgggcttcagcttcaacacctcacgccccactccatcctccaggcagcaatcttcgtccacctctgcgagatattcgtaggtgtggccccctacacttccctcttccgctacttcttcgtgctggtcaagtttgagaagactagggaccacatcgatgcctactacttccagacgaggacagatccggccgtagtctacatccccacctttggtggtgcgaggtgggaaaactagcgcagcgactgggtgattgccagcaccgaggccaacgatcgcctcatcctgccgagcgatgggccaacgcttgactgctagcaatggaggaccaagccatccctctcgccagagttcctgcccgtattggacaggatcaaggtcttggctacgtgcgaccggacatcaatgcacgtggtcggcgatctcctgaagcgccaaatcgtgc

SEQ ID NO: 62802 - DNA, 693 bp, Zea Mays
cgaatagacctggaacacgctgaccacggtaagggctcttttacggtggcggagaacggatttgggaggaatgagaaattagcgagctctggtgatcgattgagggcactgtttggtggcttggtgctagactaccctacggagctcacggcaggctcaatttatagcaggcaagagcagtggccggtgaatttggattgagacgcgcggcggccggagataacaggggttactggcacagtggattcgtggagtacaccgtggcggactcaccggcgatgattggatggctaacgtgagttatggcggtgcggttaaaggcttgaggcgtggcgcaactacggtgagcatcgcggatttcagtgatggccgtaaggccacgtcgctagcgcagggaaccgagggacagcgtggccgcagtacttgaacccatccgtgatgagatcttttcgccagtgagctcaatccatagcccatacgcacaaatcacggcgagcagtactgatcccggtgaagggtcaccggcgtccagctaacagaatctattgatcttttggctactgtaccatcgcacagcctattcagttggtctgacagggctcttttgagggcaatttgtgccaaattttgtgtagtgaccagactaccactttgcagcaaagttgtagcctaatgatcgagctacaaacttac

SEQ ID NO: 62803 - DNA, 709 bp, Zea Mays
gtgtggtctagctcaatgggttgagccgatgagtatcacaagcatgcgtgggtgctaaaacatggacaaggagtgcgagggcggacctggagatggttggccatgacgcgacgtctcacggtggcgcgggcaacagatttgggggaagaatgaaattctttggctatggtggctaatcgagggcaggggtgggtgctctggcttcgtaacaacctagcggagctagcagcgcactcaatttatagtgtccaagagtggtggctccgaattttgaaaggggagactggcggccgaagagagggggtgagtcaccggcatgaactaccgtggcgttcaccagagcaatgtctcaggcgatggacagactacctacggctatctactgcgacgtggtaactcttctaagtatgtggcatggctacgaagggcggcgaactccagcgaggacacctcagtcaatcgtgcggcaagtggcatggtgaatagtacggtgataaggctccaacccttccctgcattgagatgtttcaccgccagccgttatccacaaaccagggcgcactaatcgcaacgaccagcgtcaatcgcggcgtaaggtcacccacggcgaggtacactgaatctgaagatctttttgctactgtaccatcaggatcttcttcagttgttctgatagaacatcttcagtggtgtttttcttcaatttcta

SEQ ID NO: 62804 - DNA, 1418 bp, Zea Mays
caggggctgtaatactcttcatcggccctggaggagatcagctcaagtaaacattgcaactcttattcccatcctccaacaacacagcagagtacgatgccttgatacatgggctcaacattgttgtgtcactcaacatcgagagtctgatggtatacagagactccctagttgtcatcagctaggtcaacaaagattgggactgctccatcgattcaatgggcaattactacgctatggtcaagaaaatcgaagataaattcaaaggcttggagtttcacctcatagaaagagatcgcaacacaacatcagatactctattaaagctaggatcgagccgggcacaagcaccaccaagcatctttgtccaggaaatataacaaccgagtatcgcattagggctagcagaagaatgcaaggcagtggagcagatagaacctaacccaagtgactagagagtactaattattagatacatcaaaaacgaggagccagatgacaacgccactgccaagcacattgcaaggcagtcggctcattatgctgtcataggagaagcgctatacaagataggagcagcaagagtactcaaaaaatgcatcaactcaggtgtcgggaagcgtttgctagaagaaattaatgtacggcagtatggagtacatgcatcatcaaggactcctgtagggaaggccttcagagtaggcttctattggccaacaatgaagaaatatgcaactgacctagtccaaagatgtgaagcatgccaattcctggcaaagcagcagcacttaccagcacaacatttgcagactattctggtcacttggcccttcgcatgcttggggtcagatatgatcgggccagttaaaaaagctcagggagggtacacccatgtgctggtggctataagtaaatttacaaagtggatagagtacaagccaattgcaaccctgacctcagccaaggccatggagttcatctaggaaatcttcttcagattcaggataaccaatagtatcatcacaaacctgggattgagcttcatcagtgcagaattcttcgatttctatgagcaaaaatgtatccaagtcaaatatgcattagtagcacacccaagagctgatgggcaagtggagagaacgaacaggatgatattagaggtgctcagaaagaaagtatttgacaaaaatgaaaagctcacaggaagtggatcagggaactaccctatgtagtctgaagtttgcgaacccaaccgagtcgagccttacatgggaatactccattttttatggtatgcggattagaggcagtgttatcagcagacctggcctttggagcacctagattgacatttgaaaacattgcgaaggtggaagcagctcggcttgaggaaatcgatgtactagaggaggaatgtc

SEQ ID NO: 62805 - DNA, 524 bp, Zea Mays
gcaaactcggcggtgtcctcgactcgaccagaagttgacagaaaaggcgtggtcctgagctcgagcttctaggtaagttgaccctgagtttgggttgttcctgtgtttggatatgttctgtgtgacctatgtagggtgttggggctcatagatagcaatctagatcaagtcatgaagacttggagttttggagtccaacatcgacctcaaataagccaaaaggagaaaaatagtgaagaaggttaagtatgcaggtttaagtgttcaaatatgttgcatacaccttctactatgcatatggtactttggttttgctatctaaccatgtatgtagagaaagtgtcatttggagctctgtttgaggtgaaacataaatcatgaagaaaagaaaagaaggaggtatgaacccatcgcttagtcaattgggttatgctctaattatgtttgtctaagtgctagggaacctctcaagaagactaggcaagcatttcaggcttggcaagtgctagggaacctctatctgc

SEQ ID NO: 62806 - DNA, 556 bp, Zea Mays
tattgcggtcttggtgtgatagcagtgatcctttgcgcaacgaaatggcaaaaagaatgttagcgaagtacaacaagtattggggtgatcatacaagtttcaatattctcatctttgtggctgttgcacttgatccaaggtacaaactttcaaattactccaagatcgcaaccttagaaatgtttggtgaggtccatggagaagtggtttggattaaaatgaacgaaacactcacaaagctgtttgaagagtatgggagaatatatgctccaagtgacaaggatggccagaccaaagaagcaaataatgaccaagaagaagaaggtagtagcttgatgagaacattggttgccaaaaggttgaagtcgaacaactgtagtgttagtgcttcaaaattagagttggagaagtaccttgctgaagagaatgaagaacatactaccaagtttaatattatggagtggtggaaggtgaattctacaagatttccaattttagggcgcctggctcgtgatattctagccatccccatctctacggtcgcatctgagagtgc

SEQ ID NO: 62807 - DNA, 544 bp, Zea Mays
cgggcgcgccatggcgacagcattatcgcagtcgacgcgcggcagaggcagctcgcggaggatccaaggaccaccggcgggcgggtgttactgccatggcgacggcgaacgagcagaaccacagcggcggcatagattttctctccctcactctctctctctcctcacgacgcagatgcacacggcagcggtggatctcagcacggcaggcttcttgacgatcgaaggaataggccgtatatatacacctgagaggattccgcgacgaccgaggaaatcggcaccccacgcggagtttgttgccggaatccgattccatagctggatgcagacttgcagagaccccgcggatttgggttcgtttttactacggtggggaagagggatgacaagagggacccacctggcatggactatagaggaaagcaaggagggagacgagatgggctgccgcggggtgggaaaacacctgggccgaggaggagggagcttggcccaaccgcagggtttaatccttttctatttttcttttttttttaatttt

SEQ ID NO: 62808 - DNA, 512 bp, Zea Mays
atttatcatgatatatggtactatttctcgatatatcttgatagttccaattttgagaagcgtagggataaatctcttagactaactccaacagactccatcttcgcatccgtattttgcgtgacaagcaggctccgcataaacatggtcgtccaataggctctgtatccgcatccccatccctctcaatgaaagttgggtcccacgcttgactgtttttgaatgccctcttgtgcagagaagagatagacactgtaggaataccaggtggaagacaacacgcctattttgcatggtggtttacggagtctgctggagggcagaatagtggcttcggacgtgcaaaatgcggatgcatagtggagtatggggcgttgctagagttggtcttatcccgctatttaaaacactggtaactacatgaggctgagcccgactttcttgtcaatgtgcattcaagacatacttagctacttaggtttattagtctatctctaccggcttacccatcc

SEQ ID NO: 62809 - DNA, 609 bp, Zea Mays
aaataaggacctgaatgcaatggttctccaatagattagaactgcgagtttatttgtaagaaggattgggactctttaacatatttcccacagccgaaggggtacgagcgatttctagacgtccgatccaaatccggtcgccaaaatgagatctgcatcccgccgaaccggtatactgtcagtcactggatcgagatccgatggtccagactttatgaaacccgctcttaccacaaccgcccgatctgagtgagatatatggctcccgctacccggtacccagtccttaatcaccaccgtcaattagccgctacccggtacccagtccctaatcaccaccttcaattagccgatcgacagctagtgctttatcccttacccctggtcataccggttgtccggtggcgctcgcacagccgccacggcgacaccattgtcggcataaagtgccatggcaccctagcgctccgaacttgacatggtaagggaaaacgtatgtggcggttatagtgaatggcataggagcatcgtaccagcgtttgtgatgatggcgaggatagtccactatgcggggttgtgagcagcacgatcccatctctgttgagcaac

SEQ ID NO: 62810 - DNA, 405 bp, Zea Mays
agttgggtgggagcgatggccttgatatggtcgctttagctatgtagagatgatttggtttttaatggtaaaagttcttctcctctgccagtcatttactggtgtacttctttgctccgtttgtggctaccattatggtgtatggaaaatagagagttgtttatggaggtgtgtacacgattggagcagatggtgagggatatttttatccggctggtcagacgacacagaggttggctgtagagcagcaaaagaggaagaatgacgaggagaagaagcgagctcgcgagaaaaaggtggcttgcaatgctctcgagaggcgccaccgagcgcgagagagggagggggtgccactggagccattcccaagcacgatctccgccgccgccgacgatgatgacgacg

SEQ ID NO: 62811 - DNA, 743 bp, Zea Mays
gttgcaccgtcttaagtcatcgccgacttaagccgattgctccgttagtagggtatagtggtcaccctgatttgagcaagaacgcaaaacgaagaattctcgaagcctctttattgatgatgtgtttcccggtttacagaatacattgtcgccccaatagcttttgaaatgtagctaaggataaaacttcctgagatgttctatgttccatgagttcccgacttctgtgccatccatctgtgtgagtcgatatgatctaggccgagtgacttcagctactatgaatggtccttcccatagaggtgacaatttgtgccgccctcccccgttagaattcggcggaggatgagatctcccactgcgaaggatcgatgccgtatggccttatcgtgatagcgcctcagagtttgctgatactgtgctgattgaatcaccgtgtttagtcgttcttctacgagtacatcaacatcctccagcctagtagcctcagcttctactatgtttttaaagatcaaccttggtgccccaaacttgagatcagcaggtagcactgcctccgaaccatagaccataaagaaaggagtgtttccatgcagggctcgactaggttgagttctcaggctccaaacgatgtatggcaattccctgatccactttcctgcgaacttttcatttttgtcgaaaactttctttttgagcgcctccaatatcatcccgttggctctttctacctgcccgttggc

SEQ ID NO: 62812 - DNA, 567 bp, Zea Mays
gcgatcgagtgggagaaacggattccacgtgcggaactcgcgatccgatcgagagagcgagtagggcaggccggcaggaggaagagcgcgcgcgggagaggcaggcagggccacggccagcagccagctatactctgtctcgaggagctccgtgtgtgattcgattccgcgcacggcgcacgtgcttatccctctcaccagttgtctagtacgtagttgtgattgagcgcgcgtgcatggactgtgaatcatctatactcctaggaatgctagtcatctgacgacgtgtggacaccagtgtttgctatagctccctgcctctagattagatcttgttagtagctagagtcctgactaagggagggtgtgtttgatcgatgagcgcggggtagaatgaatgggttctattcttgttttctatatgtttggtttccaacgaaagagaagttgagcagttttagagtctatatacgataaatatttggaatgctcccactagctttaccaaaacgatcagatgtgagcgctctccttcttcttctctcctccacacttatatgactctcc

SEQ ID NO: 62813 - DNA, 962 bp, Zea Mays
taggatttgagctagggatcaaggtgaacacgcttggtctttagctcaagggctgaaattcagaattctgaatttcagaaatccccattgaacccttacttgagaagcttgttttagggttttattaaactattttggacaagatttcataatctttattgttgcttatttagtatacttcaatgtttatatttggcctaagccttgattttatatttttcatagtcttttgccccttttcttcaattttacttaaagagctcaattaggattggtattagggtttcaacattttgctcttttgaaaatcttacttgtttggaacatgattctttagatatacacttagtagatcttttattctcaagttaatttgatgctcatgctcaatttggttcacataaaatgatggttcttgggttagcacttgagagaaaccctaggtgacactcgggtgtcacaatttcttcctctcgtcgaacttgttctagatctcgtgccctttttcgcgagatcaccgaatcgcttcttcttgcgaccggcatgctgctcgcgtcggcaatcctcgtctatccccatctaccctttcggcgtccacctcgttatcttgggtccgcgagcccacctctgactgtcttcgtctaattttatctaaccctgtctgccacctacctaaatgagtctccgtcatacactgtatcgtgcaactcatcgcgcgaccgtctctttcgcttggccaggaagcgatctgcgacaatttttgcaaccgtcttccgcatcctctcttttctataaatacattcctagtcgtcgcataacccctcgtctctctcccagatccaaatcgcgtaggagcatgcatcccagcggttaggcatcagtgagtcccctccatctccttccttccctacgctcctccccttcgttcttggcgatcggcaacctacaacccctccccgcgc

SEQ ID NO: 62814 - DNA, 583 bp, Zea Mays
tggcctcagaagtgttagacaaagggaagaaatttaaagaaaactcttcggaagaagcagacttcgacctacggcacctaggtggccagcagctttccgaagaagatatggcagagttgaaggattttgctatcaattgtggctaccagccagggtccatgctctttggtggggtggacgaagaagttataggatgcatccacgatcgtgccggtgcaaaaattataggcaccctgtcaaagagcattagattcccgaagcttgaaagggatatcagttgttacaggtgccagcatatcatagggagcctattttattccagctttaaagtaagtactctcttttaggttacccctgatgtgtgtgcattagcttaaatattctaagtttggacctgcttttacagagtttactactgagcaaagctttaaagatgcaacaagacgacgaagacaggaaaaacgaaatcattatcaagggcttagaggataaggtcaaagaactcgagaactctttgaaggagaaagacaaaatgctatgttcagccaaagggtcccttgccgaagcgcaaactcagaacaag

SEQ ID NO: 62815 - DNA, 345 bp, Zea Mays
ccttggtaccacgctcatcgtcctcggcgtctgggtctgcatctcgtaggcttaggctgaagatctgcttggtttagttctggcattacagtcgtcgcatggggggaaaaaaggaagttttgagggcaattctcagattccatttcactcctctgtgctgtgttgccaattgccatatgagtgaattattcccagtttgttgatggcagcggcgtttcattagctagatggtcagaatataatgcagtttcattctggtaattttggttactgaatccatttctgcttaggtgatgaatgaatataacactacggttccattcattacatcctgagggttgacat

SEQ ID NO: 62816 - DNA, 388 bp, Zea Mays
agagagacgcacgacgaccggagaagaagaaggttactggcgcggtgattcgtggcctattaccgtggcaatctctctggcgaccactggacgggctaacgtgagtcacggcggtgaggttaatgtgccaaggcacgtggtgcaaggccgcgaagaggctatctccggcgaatctatccaaggcggccgcgacacactcgggtacgacgaccagagtaaaatagcggctggagttcatccctgggcgatatttcttaccctcggtgctaaccaacttttctgagcatgaatcaccacggcgatagcatgaatccgcgcatggctcgtcggcggcgaggggatcagaacctgatcctatctgttactgtaccatgggattgctcttgag

SEQ ID NO: 62817 - DNA, 519 bp, Zea Mays
tgaattttattacctggttttcctcatcgtcactaacatcacatgactcattacatccaatgtctggctccaatcggcatagaacgccatcaagctcattcaacacatccattgctttgtcgtaccctgcttttgacatacacgcctggcgaacaactttcattgttttcgttagcaacattttctatctgtatgatttagtaactccatcctttcccctgaagctcttatcaattctttcgaacggtacatcttgtcttgatgagacagtgtacctttgcaatatatactttgaaggtatcttttctacttgtagatgcatgaaggctcttaaaagatgaacacatagtagacctgcaataatgaagaataatcattatattgttactgatatatattattctatataacaattaaaactaaagttattaaatatgtacttttattagtataatcatttaatgttcaaacctgtatgttcccactgtttgcactcgcatgtatactctccagcttcta

SEQ ID NO: 62818 - DNA, 755 bp, Zea Mays
ctaatttagcttcaagctctgtggtgagtgggatttcatagttatttgtctactcttctcacttctggtagatcggaggtagataacggtaagcatgtccaagggtggaattcaatgtagttcggctacataaaccctaagtatgcgtccattcaagaccgacctttaccatttagcttggtataccaaacttgttaaaggactatcccaagtcaattcaacgactataagtatttacaattattagagatatatgcaacacaagcatagaggtcctagataggacgagtaaagtggttcgacgagaacacacaatggtttttttcacaccaacattgtgaaaattttctcaaaataacctctcggtatacttgcaacttcgtgttgctaggggttacatgtccttttatctcagagtttgcttcatgttgtccaacgattaaaagagcaatgtgccaacatctagttgagcaatatatgactgagatttctggtcttaaattatttggtaaggtctttttgcttactaatagaatcccaatttgtgatgtcttatatgccaaaaaggctttcatgcattatattatatatcttcgggttacttcgagtaaaactttatgcatgaggagagagcagaaaattaacttatctgtgtataattgtaattcaatttaatttcctatatttccaagcactttagagcttgatatagttgttatggccacttggcgatatataaatatgatgccacacaa

SEQ ID NO: 62819 - DNA, 899 bp, Zea Mays
agcacatatctacagaaaacacaatttggttcatcaaacatacagcacggggaaatcactgcgtgcagcccaaaacaacaattaacaaatttcagctcctatataattcaagaattgccgcgttctagagactaactattctaacactttatcatttgttagagttaaaacaatcaaattagaaccaataagtaaagttactaattttatacaagttatttcgcgcgttagaattatcgtacacaatcgacaaacacattcaccacaataatcaaacccggtataaatgtgtatatcgattgcgcccttcacacactaatttgtatttttacttagacatcacatgaacattactacttttcatccgcgaccataaccatatgcatttagactacaataagcaaatcatcgtgactacgagcttaatcaaagtcatctaacaagttggttaactagagcaacgacatagcccgatatacaatacacacgtcggcttgcctattattatcgcaatctgagacacaacatacactacaacatttttataaacatatgtatttacgcgtatattcgcacttcgaccaaatcatatgaaccgtgtatttcaataattatcccaaaacaactaactccgttacacacttgtatcacaaacccacttgacttacttgaagtgtctactcgaaatcgtgagcacaatcatacaccatatgcgaagcataatttaacgagcgcataatacgcatcgtcacgactcgacttataaatatagagaaagcgatgactactttggcatgtcagcacctctctatataagccaaaacaatttctacctacatcgactaagagtcctaagtattaaacacattatcacttttcacgcgcaaataaacctcaac

SEQ ID NO: 62820 - DNA, 663 bp, Zea Mays
tggaccacaggaaacagtaaagtctttgagacttataaccattgattatggatcaagtgaagtcaaaggtaaaatgtaggttctgtttttgccggtcattaggagtttagagaagaaattgaccggattaataggttagatagtcatgctattaagaggggtcaatgaacttgattggtgtaaaacttagtgcctcgtagagcataaactgttgcatttgcatgagggctaacagcgctttgtttttcaaaatatgaagtctattgtaaaagcgcaatataaaaactcttaactctgtggtcggtggaccgtctaggccaggaggctagatcgtccgcgactctgccagagaagtccgttggcgcacttgtctctgtctccccgcatggaccgtctgggccaagtggtcggatcgtccacataagccaaattgagtttgggcagggatagtgtgtttttaagtctttgcactacggattgtccgtggttttagtcggacggtaggtggtcctagtgcggacagtccggccatggttggcggccagtccgctcgggttgttttaatttgctggtgctctggtattccatattgataggtcccggaccgtctggcctaggcaggcgaaccgtctgggcttgactttttctgacagcactgacagg

SEQ ID NO: 62821 - DNA, 562 bp, Zea Mays
taactaaaagagttcaaacaggtgttctagattccttgccatttgaatagcgacatttgtgcgaggtgaccatgaccctagttgtcaaaccagaaagatgttgagtgcccataaaaatgttgaccctaatttaagtcttgaattttaagaataatttaagaacatccttccaccaaaacgatcctcttttcctaaaggcgaggagccccccatatagtgattgttccaaacgagatccacccaagaggggtcaagcctgttgaaaggatcaggatgcccaagagggggggtgaattgggctttactaaaattcttacaaaatattaaaccctgaacatgagcccaacttcacacaatctactagcaagaagtaaagctatgaaatggagaacaactctaagtcattattgcaaatactatcaaagcaaatacacaaagtaaaatgctcaaagtaaatgcaaaaagtaaagtagggacaagaagactgctccaatttttcctgaggtatcgaagagtcgacactctccactagtcctcgttggagcactcgtgcaagggtatc

SEQ ID NO: 62822 - DNA, 578 bp, Zea Mays
gtttttaggtctggtttctattggccaacaacaaaaagtgacacaactgagttagtccagagatgtgaagcttgccaattcttgtcaaagcaacaaaatttaccagcacagcagctgcagaccatacctataacatggccatttgcgtgctgggattggacatgattggacccttcaagaaagctcaaggaggctacactcacgtactagtcgccatcgacaaattcaccaaatggatagagtacaaacccattgcttctttaacttcagccaaggcagtagaattcatacaagacataatattcaggtttgggatatcgaatagcatcataactgacctgggaaccaacttcactagctctgaattctttgatttctgcgaacaacggagtatccagatcaagtatgcatcagtagcacacccaagagctaatggtcaggtggaaagggctaatggaatgatactggaagcactcaggaagaaagtattcgacaagaatgaaaagttcgcaggaaagtggatcagagagttaccttatgtggtttggagattaagaactcaacccagtcgagctctg

SEQ ID NO: 62823 - DNA, 668 bp, Zea Mays
gttatgaatgctttatctcgtgatgactgccaacacttcgagagtttcgaacagagcagtgcagactttgactgagaggtgttccaggtcgaggacctgtgtatgaagcgacctgccggcaccctgttcgacaggatgtggggaccgcatgggcatgccgtggtctggaagaggattggtcgagctatggaacatgtaatgctattgttattagtgaatcaggctcaatccgactgtgtcattgtgcgactgtctaacatgttgtttttaaatcaagcgctgagggacgaagatgtcgaagacttggactctcttggtacgctagggactcgtactgctgacgttgaatctagagatgcgaggacttcacactggttgattgcggaagaacagacactaacacttggtttggtacctgcgcaagttccgatgactgtgcctatgcaggggaattttgattcctcgggcaaggggaaggatattcttgatgtcgccgcatgtgttacgctgctatcttgttggagtccatcgttttccaatgacggtggcggtttttccgattttgattcattgtgtagcgaaaagggtttggaattctttgagggtatggacaacgagtcctctaaggaagacttaaatttttttgttgcactatacattgcgtctat

SEQ ID NO: 62824 - DNA, 405 bp, Zea Mays
ccaaagtggcttcggccgaggggtccttcgtgtcgtctgtggagaaggcggcttcggtctgggccgcagctttaacatggtcgcaaccagccttctccagaattgctgcaacccctcgagcgccggtgaaggcacaaatatcaccacggtcactaaggatctcttcaaaggcttcggcttcttcacctatccaatcaatgactccctcggggtcacctcgaatgaacttttctttggaagaatacacacccaccttggcaaagctggttttcaatttttttacgcaatccaaggatttctcaaagcatctctccttggattcacgaagctcctcaacattcttttctagcctaacattcgaccattcacttatttcttgctttacttttgcaagttcaaaatttt

SEQ ID NO: 62825 - DNA, 356 bp, Zea Mays
tggacatggtggaaggggaggagatagaagaaaaggaagaatcagtgggcatataaaagcagggacagaagacctagtatggtgaggtatatggcgcctgccgtaacttgattccgacttaagtaactctagcgaataacttgacgctatctcatttctatagtccgatgtctcaatctgccatagccttctagcgaagcaacgaggaagagaacagacaacttttaggctattatctaggcttgaatatgctaaattgcaaatgagcttctcttaaggacagcacttatacaatgagtggccatgacaaccgcacattaagtggtataaagtggcccatgcgtccaccacccaag

SEQ ID NO: 62826 - DNA, 279 bp, Zea Mays
atctaccacgtgttcgacgaattgctgcaatggagagacgtggcagccgtgctctggagcttctcctccataaatggcagcagtctgctttctcctttctcccccacgccactcctccctcccagcacacgagtcttctcccaaccatgagacctcctctctaccccacgcccaggaacgcaccagccttcttccccacgtcgagctcgtcttccatggccgctcctagatctcctgctcggcttcctcatcgccgtgctcccctctgctcgcgcccag

SEQ ID NO: 62827 - DNA, 595 bp, Zea Mays
gccgaagagcattgatccaggttggtagccgcaggatatggcaaattttttcagttctgatatgtcctctacggaaagttgttggccgcccaggtgccaaaggtcgaaattcatatcttctgaagaggtctcttcaattcttttccccttatcagaaggcactgtggctacatctttctcagcaaccacatccgaaataagtctgtcgatttccgatagtgtggttgcaagattctcgacttcggctacgacagtatcttcagcattgacgggtatagtagctttatccgctgaagctaggggcggggtctgttcaatagcttccattacattcatcatatgccgcttcttttgcccccccattttcccctcggtagccgaagcgatttcctttgactgcaagaggctagtcagatccaacctgagaggacttagcagtgcaaatgggaaaggttcagtcattaccttcaaaatttccgaaacctcagcagcagaagacgaagaagggctcataatctgcttcggcacatcttgtaccttcatttccacagaacatatcttgacgagtttccatttcttgggagctgattccttc

SEQ ID NO: 62828 - DNA, 321 bp, Zea Mays
gaaagattagggtaagaagagcttgacacatttggagatcaagtttggctctgatccttccttgacttgatgaggtcgatcatcttcgatctttggtcttggagttgtattccgaattaggaacatgtagttaatacagatttgtaagcataccatacaggttaataggtggttatgggataaataagttttaggcagagtttggcttgttgtttagcttctaggttgggccaccaaggtcatggtcaaccttttctcttccttgcttccaagttaaaaatgatcgattcaagtcttccagtgattttgtttaaaaaccaa

SEQ ID NO: 62829 - DNA, 288 bp, Zea Mays
aggatattattgagtttggagcgtaggcaccacaggtgggcgacgaggactatgactcggatgaggccacccaaattaggcattttaactcccaagaaacttctatactcctcgcctccttgtgtcaagagaagtacaataaggtgcaagggttgaaaaatgccaaagaaatttgggacgtcctcaaaatggcacatgaaggcgacgaggtgaccaagatcaccaagagagagactatcgagggagaactcggtcgattcgtccgcaacaaaggagaagagccacaag

SEQ ID NO: 62830 - DNA, 406 bp, Zea Mays
aaagatcttaggttcagcccccctcgccgccggtgatctcgcacccggattcgcttcggcgtcatgattcacgcccagttaaacccagataatgatcctcgggtgaaaaatctagcgctggggatgaacttgggacactgtttcgccctggtcgccgtacccactcgacttacggccggtctagataacctcaccggagttggctgcctgccgctcaggtgccacctgcctaggtgctctaccacgtcgcagtgaatcaccttagcatgttcgttcatcgccggtgctcatgccacggtgaaagccatgaatcacttgagccagtgacctctcttctctccggccgccagctcgccattccaaaattgggtgccaccacccttggacactataaattggtggccca

SEQ ID NO: 62831 - DNA, 315 bp, Zea Mays
ctgagggacacgtatggcatactccctgcatgcactactcagctgaggctaatgaatgtctttaccttctaggtttaaggcaaggcctcagtgaacccctaggtctgtgccaccgcaggcgatagtagtaatgatgtctcccatggagaaaaacgacacaactcagggccttagagcgcaccaagcggaagaaatactatcatatcatatgcacgaaacatacggtcatcaggacttgacccagtgtcgggcaagggtcatcaaacagttcggctaaccgggctagccggctagcatccaggccgtatcaccgat

SEQ ID NO: 62832 - DNA, 488 bp, Zea Mays
gtgattttgataggaagtgtggtcataaccacatcggtccagtgttgttcaaatcaattgctcagtttgttcttgctgcagttttgaattgtttttgtctccgctttcaattcctcccttctttgatttaagggacaatttgcattttcttgagttgttgtttctgttggggattgccttggggtgaagatcactcttttgactattgcaaacaccaggtttaagcagtttgtggtcgtgatccgagttcactctgttttgagctcgtttgagcaaaccccaaccaaacctcaatcaaatgtaggttttgaatttgttcatgtagtttttatttgttcttgatcaaacttcacgaaacatcttattttcctttgtgcttgttgtctgtgaaatttgagggggttatgtctagattttgaagtgcgacactgtcgctccctagcgcggcactgccactttcctatctctgcggttttggttttggtttt

SEQ ID NO: 62833 - DNA, 1010 bp, Zea Mays
cttagcattatatgtaacactgattgtagatgtgcatatatgtcataatagtaataatatacctggtaaaactgtcatatagctcatccctaatatttgtatttaggtattaatacaaactatcgaagtgtttgactgtctcatatgaacttgtcatggcctcgatcttggatccctaatattactttaatagttaaagaggcgatggtattaaggtcatatataatttttgaaatgaaaattatgaaaatgttgtcttacattgatgtcagacaaaatgaaatgttggttgtctcgataacgtggatcaataggaaatttaacttctacccgagcgacaatattgtacttccgtggtagcccataaaaatcttcatcacgatagtcatcgaacaacctgaagctatattaaccattcgattaaatataagggtcataagtttgatagacaaagcgtgtgtaaccatttaatataacttacataggcatcctttttgggcggtccgctgcagctctttcacgattcaatacgacgggttccatcgaaaatttgtatcctttaacaatgtttaaatttttatttttataattgagtagagggggcaagcgaaacaaggtttagtacatgattatatttgtttaaacactaatgcacgataaatttgctgagcaataaagggtttttgtttttgtctttgtgtttaatgttagacccgctaaagaagcagaaagagaagcaagtgagaaatagagttgggaacggatgcaagcgcaccgtactcaaagtatactaccagctaagccttcccactatcatgttatctcaagtttagcatcaacctatatatacaggaagcatgcatatagaattttatacccccaaaaatacccccaatacacacaatggaatgaactcatgtcatattttaattacaaaatttaccatatatcttactaaactcactgatgggaaggccaaaagttattatagaaagatgacatctaaactt

SEQ ID NO: 62834 - DNA, 850 bp, Zea Mays
ggaaatccaaacagctctctgatctaggtagcatgcaaggtcacatcctctcgctcaaacgtgaacctcatccattgatgatctgggtctatccatactgtggcatagaagactctgacccactcctcaatatttatgccaccgaaggtcagaagagagtgtaaacctggcagatatgagatattaccctttggctctgcatcagctgctgaaaggaaggcagggagatccaaaagtcggtgcgctctcagggcaatctaagtagacagctgtgccctaaagaaggactcctgggtcctagtgctgaagagtggcgcagctgctgggtccctctgagccggtaaccaagaatccatgggtacatgtctaaactaatgtacccggatagctgtggctcgctgaagatcaagcaggcgaggatcagcagcaagcggtctcacctcggtctcatcacgctcccgaaagcgaggtggaggaataggtggagcgaaagcaggagcaagagcagtgaaagctagagtggagactgagtcggaaggagtggaacgagtagtggaggagcgagttcaagacgcgaggcgacgaattcggtaggcgatctgattagaggaaatccgcaactgccctccctgctcagcctgatctgctgctgctgttgcaagcgatgcacgagcggctctgtccagacgcctcttctttctgccctcttgctgctcaagatagacagtcttgcccttgacctgtccgaaggggcgaggagggtcctcatcatctcctccccctgacggtgtgacattcttcgtcctcaccatcctgaactgactgctgcaagataaggagaagagataag

SEQ ID NO: 62835 - DNA, 602 bp, Zea Mays
gtttatttataaatttgcagggcacgaatgcaattactttgtgcacgtagtggacggtgggtttatttctaaataactcgggttcctttcgcaaactgacgcgtgcgaaggggtatggacatctctcagctgccagatctgatctggaaggcctagattaaatcgtagttttaactgaaccggtatgtgtcgtggttcgtcagatctccatccaacattcaaagccgaccatgccatcctcacatctctaccctaggatagtcgatccacgacacaaatctactatggcaaagtggtacatcgagttccaatcctgagcacccacgcatggatcgacagctaactatgcctctccttcctctggccgttagggcacatcggcgcgcgccgaggttgacctcgcaccttcggtgagcagcgagccaacgccccggccccgatttccgctatgaagagaggtacgtgaagtagaggtctaggtgagtagctggagtgtcttaccggaggacgaaaatgatggatggaccgaccatggcgcaaggtagtccgacgaccaagctccaactctgtcgtgcgagcctcggcacaccgattgcaccccg

SEQ ID NO: 62836 - DNA, 768 bp, Zea Mays
gtccctggttgcgtgtcactgacgcatgggtcccattacccagactgcagtgccgcacgcctgcactgtgccctgtcgctggcatcatgggcccaggcgccaggtgctccatctacctgccatcacgaaacaccccaacagactctgttctgttgcgtgattccggccggggatctcgcccctacctccatccccctcgtatttaccgcctgggtataaatcgtgggccatcgggaaccccctcatccgtctggtgatcctcgtggggctagccgtatcgctgagcgcagagagggtcgaagctcatcaccgagtgaaaagggccgccgctgggggagaaatcgccaccgtgccacggatcacgtgggcggggtacgtaggcatcctatatccaggtaaaaagggcccctaacacctctgcttcgtcctccgtgcgatgtagtagcattcggttttgagctcgggaagcttgggctcagatccgcctttccaaccatggtgccgccgcggctgggcatgtgcgccaccgctctggtgatcgtcgtgtgggggagaatggttgtagccttttgatctctggccaatggccaagattagcatagggtatcgttttctcctcataagatctgagccgtagactgatagatccatggataaggttaagggtctatgtggaccgtcggattagcgctgaaggttcaggatttcaacattctcataccccttcacgcatttgttctggaccgtggatctttgatctcatggcgt

SEQ ID NO: 62837 - DNA, 321 bp, Zea Mays
attttacataagtataatacctaaactatactattctagtcttcttcatcctttgttgctccatttcctatggcaggagaccgttcgtcaccaaggttcatggaaggagggggcctaaaaaggtccagctccccatcaggtccttcatttgctattctcgatggtccaactcccattgcagcaacatctggaggcacgtccgggtgcagtcgagcatacaatacatgcacttcttcatgtaaagtattacagtacacttgcaggctttcaagggatgcactaagctctgccacgcgatcaagagctttcgcttcgcaatcc

SEQ ID NO: 62838 - DNA, 384 bp, Zea Mays
cttctgctcaatcacctgcagccactcaattgtgtcaagaggctcttctcctttagcaaacactggcggccgagtctccaaaaattccatgtatgttgcatttctttgctgattctagggaatacgatgcccaccctgattgttttgatgatgagcaatctcatgcaaaatcctagcattatcagcagtggcattcactagggcagcaatggcatctaccagtgtaggtggaactggtggtggtggtgggttgatatcagcttctgcaccaccacgcgatgtgccagccccatgcgaactacgagtacgcataggcatctggagtaaaacaaactcataaataaacatccataaccataaaatatattacatgagacaggtaca

SEQ ID NO: 62839 - DNA, 975 bp, Zea Mays
atccggaccgtcgagcgagcagggctcgagggctcaaatgactcggaagaagactctgaggaggaggaggacgacaacggtggggcagacgagggtggctacgacggtggcgatgagggaggcgaggatgacaaggttggcaacaactgtggtgaaaacaagagtggtggcggtggcggcgataacaacgacggtgatggtgacaacggcaagggtggtagtggcgatggcgacagtagttatggcggcaacagcaacaagagtggcagcattggcggcaacgccggtggcaaggtgccaccagcttatatattagtatagtgtaatatagtggtagaatgttgtagtagtagaactagcagtagtagtacgaggagtagtggtagtagggatattttgtcggggtcggttaataatgaatcagcccttttctctgtaatgatcctcctgaaggtaatgaaaactgctagttttatcctcgttggatgttgactttgtgttattgttgctctactcttgtggtctgactgcgggtattgagttttttgcctcgttcaatttcttatgtttcgactaatatctcccgaccgattctgtgtaggagtgtgttttctgtccgtctgagcctgtccgactgaatctatctgacttaacttgtctgacctaacgcttactcctttcgatctgaaaatccatttccctcatgctggagcttgtggcaggtctacagttgacatgtatatatacgcctgttgtctaacagtttctagcaagcaaaccctagctttgctctttcaccacaactctcccctctaaaattctcgtacctcggtgagtccatgcttgatttcgcgcctttgtgaggtctcatggtgcccaggaagaagaagcggggtggcgctgcatctatcattccccctatcgatcccaatagccaacttcctttctatggtaactacacctctgttgtttctg

SEQ ID NO: 62840 - DNA, 412 bp, Zea Mays
tccccatggagggctagaagccaaccaatggcaaggtgaaagaagacaatgtggtgagtgatggatggaggagaagatctgcgactgggcgatgttgatgcaaaatcggacgacatagattaaaacaaatgacatggatggcttgtttgagtagataggctcaggcgtttaatatgtagagatattccaccaatgtagcaggtaatcaagggcatgcacacattttagcccctagcctcttggttaccctataaatacccttgtccggcctttggacaggagatgcttgataaggcatcgaaacaatctagcttcccattttgtcatgcactgttgctctcacccactcttaagtgtttgggcccacgagttaggacccaatagactctacccgtcgtgaggtctggtaaac

SEQ ID NO: 62841 - DNA, 338 bp, Zea Mays
attttctgatgtcataaggtctcttatgcaaaaacggcagggcgaaggggtatggagcgtcgctggccgtccgatctaaagtggatgaccacgattagactcttccctgcgcgaaccggtaagcaaatcccaccgttggatccaggatcaaaggtgtacaccgagtataacgcggaatcatcctgatccgcccgataccgaatctatgcgccagatttaacatcacgaagagttaacctatgacctaatcacagccgtcgaacaccagatccacggctggtgaccttcccgcaacctgatcgacgcgcccaatggcgccacccacccccacggcggcg

SEQ ID NO: 62842 - DNA, 415 bp, Zea Mays
ggcagagggacttgagctcacctgaatcgagctagccacggtgaggtcttcttcgcggtggcggaaaccgaattgggggaagtgagcgattctccggctatgggggctaatcggagacgagagtggtggctatggcttcggtatgacctagcgcagctggccgggggctcaatttataggtggagcgagcggtggccgcgaattttggacgagacacacggcggtcggaagtgaggaagaatggtggtgcagtgaacacgtgttcaccgccgtggcagtaactccggtggtcgacggggagtttagagggagtcacggcgatgcgatggcgcgattaggacacgcggtggccaacggcgatggcacgacgacggtgagcactttacccgcgggcggtgagccaggggaggagtac

SEQ ID NO: 62843 - DNA, 385 bp, Zea Mays
tctgaggctcagtcaacaatcacggtggacagcgggtttatttcctaaaaacagaggggctctttagaaagattcctatgccgaaagtgtatggagcagtctcggtcgttggattagaagtctacgacctcaattatacctgcccgagattgaaccgatatgctatgacatccgttggatcgaacatcaacgctctagatttaaaagtacccaattgaatcacgttcgcacaatccaagacctacggccgagatgcccatgcacgaaagggtacgcacgatctgataaaggtcgtccatgagtcaatcaatggctcagataccttatccttccctcagccaggactaaacacggcggcgagcaccgccgcggccgtgcccctcac

SEQ ID NO: 62844 - DNA, 688 bp, Zea Mays
aaaagggaagatatcaaggaaattatccagcgccccatctggtctcgcttcggcctccgaaggccgaaggtggctgtcgagagtgacgtcgaagcgtgccagaaggcctttagcaatgtttgtgctttcattggcacaagagatataatccaagagcacatagcctatagggtgtggccacttgtggatagctgggaaatgccgaaggagactactgctgaatccagtgaaggtggcctagttcgattgaaatataccttcacattcagagagaaatttgatgaaccaaacgatgattagttgaaatgcattgaagctaccagtgacgagctgcttgggacatattcgaaggccgaagatgatgccttgtccgcagccttcgggggtcgaggcaagaaaagattgaacagggtgtttgatgcaattggcttcgtataccctgattatcactacccattacgaaagcaaggaaagaagagaaaaactgccgcttcggccaccactgctgtgctgaagggcaagaaaatgaaggttctgacccatcggccgcgatatattgaaccggccgtagtgcctgaatttggtgaagggacttcgtcgactgccgaagcaaaacaagctgctcccatcgtgcagagcactgaagaatcgattgtagtgtcgaaggtgcctacagtcaggccagccg

SEQ ID NO: 62845 - DNA, 487 bp, Zea Mays
cccacctctgccctgggcctaatgggccaaatatacaaccgcgcgacccacttaagccactcgcctggctgagcttcagacgactgtagtggtgtgtcaccgccaggcgggacccacccgtcagaccgccctcacacgcgtcacccaagcctctgttattgggccccacccgccgggaccttcctctacctgaagccgatctccgaccgaatcgcacctaacccgtccttaatcgtcggtgatcgaccaccagttaaatccttatccgtcgggatctggtgggccccgtcctatgtccctgccccgcgctaatataaatcgaccatggtgcccttccctaatcatctattccatgcctaccaagactcctcacggaggaagcaaagagaccgccggcggaaaagctgtagccaccatcatccaccagcgaggtaagagccgcttccaaggttttgacgtgatccccgccctcataacagtgttttgg

SEQ ID NO: 62846 - DNA, 448 bp, Zea Mays
cttagagtctgctggtaccgtgctgattggattaccgcattcagccgttcttcttcgagcatatcaatgtcttctagcctggtggcctcgacttctgctatgttttcgaagatcaaccttggtgccccaaacttgagatcggcgggtagcactgcctccgacccatagaccatgaagaaaggagtgtttccatgcagagctcagctaggttgggttcttaggctccaaacgacatagggcaattcccttatccactttcctacgaatttttcattcttatcgaagacctttttcctgagtgcctccagtatcatcccgttggctcgctcaacctgcccgttggctcttggatgtgctacagatgcatacttgatctgaatgctttttgctcgcagaagtcgaagaactctgaacttgtgaagttggatcctaggtcagttatgatgct

SEQ ID NO: 62847 - DNA, 386 bp, Zea Mays
ctgggtgatagtggatttctaaatcataaacttttatcagctcaagccatcttctttgcctcatgttcaattctgactgggtaaaaatgtatttcagacttttatgatccgtatataaatggcaagtatttcccagtagataatgacgtcatatcttaagggcatgaacaactgcagctagttccaagtcatgatttggatagtgctcctcatgtcggcgtagttgtcttgaagcataagctatgactcggccctcctgcattaggacacatccgagtccactacctgatgcgtcacaatacacatcaaaagttttttcaatgtccagttgagccaataccagagcagtggtcaataacaccttcagctgctcgaaggcttcattg

SEQ ID NO: 62848 - DNA, 436 bp, Zea Mays
ggagcctataaattaagcgtgccttcgggtccgtaaggtagtcaagcacccaagccaccaagccgtgcctccaattgctcaccagagctcgtcaatttcagatttcccccaaatcagccaaaataccgcagcgtgaacacctcgttgtggccacccttctgcaggtcagttcaagctttcttaattggtgttctagctttcctcatgtcccctgaagctcatcgacccattcgattgaactagaccgccttaaattgcctagaacaccttggattatcctcggtttccgccgccgtcgtgagcagacgtgctccggtccggatcagtgaaattagctgagggattagtgttggggagggttgaattaagtgacaagcaaaggagaagtctagccgttgcgttttccggccggtatgggctcgccggagtcgctgct

SEQ ID NO: 62849 - DNA, 1223 bp, Zea Mays
ctttgcttcagcaccgagggttttggggagggcgactagggtttcaactcggcgagcgaacacagaatccttcctggtcgtcggaagcagcttcaaccgcgtcagattcgtctccgcgtcccatgcgatttattcctcccttcttctactctgtactctatcggtgtcgccatcgttcagacgcggccgctggttttgtgttcgcttcttatgtcatcgcacacggtgatttgcggctgtcaaagattgtgttcgccatcgtcgttgctgtcgctcggcacacgccagacctgctgctgcgtcctgcacactcgtccttgcaccgtagcacctgtgtaacctgaaacttccttgacagcgccgtcctctgcttcgcagtcatgccggtgaggtcaacatagacctgcttccagccacgccctcgggttgtttgatgaaatgtctcaacacattttttttctccactacatattgcagtcatgccggtgttgtcagtcgtacacgctggttcgttgatcgatgaagtgtcccaacactttatcctaataaatacatatacgctactaaaggtcatttataatttgttgctgctgattatatcaactatattagatatttcatacgtacgttacctgtgcgagtctaacaaaacatgctaattgtgattttacagctccctcatccgctgcaacgacaccgtgattgctttacagcttaaaaccttctgtaccgtgacttggtattcagttcacaggacgaacctcatcattacatcctcggatgagtacggatcaaatgctatgctcgaaggcgtgtttccatattttactttaagtcagttggtctgattatatggtcggtcactcatacattttttggtttctgaatactatatcaacgattcacgttcaactgcgccattcttttacggccggcttctaaatgttcacctcttatgcaggtaagtctagagatggtcccaaattttttcgtcattttactttgcgcatatatactcctgctaataatgtaccaatcttatttggtataattagtaattggatttcatagacgatatttaacctcaattattcacattggattacgtatacatatgaagctgttgtgatgtatcctgctagacatttgcttgcatcgtgtgcacatttatattcatctttagatagggtcagctaattatatgagtactgatatattctttg

SEQ ID NO: 62850 - DNA, 1086 bp, Zea Mays
cctggagtggtggaggtggtgggtacaatggaagtagtggatggctctggagcgacaggagctagtgaagtgggaggtggagtagagagtggcggaagttgtggagggagcagtggagcgaggacgagatgcgggcgacgaactcgataggctatctgatctgaggaaatctggagctggcctcctcgctcagcctgctctgctgctgctactgccgctgcaagtgctgcacgagcggctctgtccatacatcgcttctttctgtcctccagctgttcaaggtaaactgtcttccctttgacctgcctgaaggggcgaggagggtcatcgttgtctcctcccctaatgatgagacattctttgtccgcaccatcctgaccggactgctgcacgatagagtgaaaagataagcaggagtagagagcagccgataggatctcaaatgaagcgatagctacctggaaacctcacgagagagagaaaatccaggcaggacaggagacgggcacgagggcaggcgagatcactgaaatgacagaagaggtgagcacatattagtcacatagtcataagtatataaaatgagaataaatacatacacatagagttaagacacaaaaactgagtgatttggagaaaaaggggtcaaacgacgcgagaacggcgtttgaacaaagaattgtgccataggaagtttgaaatttgaaatgaggcatgaaatgatgtgaaattgagtcgatacttcatggataggtatatatgagtgaagtgtgttcttggtttgaagttttgcggagaaaacgaatttttgggcactcggctcagaaacgatcgctataaatgggaaacaaatggtattcccagtgactggaatagtggataggcgtaaatttcggtgagagtgttactggaagtgtcttgagggtgctggaaaaaactagggtcgatttgagcaattttagctggtttgggcatttcaccgagcacctagcgtgcggggtttcagagaagcggtgaaatggttgtttcagggtgtgaatcctcctagagggagaggtgaacctgcaggagagtgacacaagagta

SEQ ID NO: 62851 - DNA, 470 bp, Zea Mays
gcaacccgcagatgctggcatgagggtaaattagattcgagatttttttgcaaaatggtctcaggttcaagttctcagttattcctatcatccttttgggttgggtattttcgagttgggaagtcttcttcagaaggacagattactcagtggtgatatttataatgtggaaggtaccattatgcatttcaaccgtccggatagagcacacaacttttagagaagtaatgtacaacagaaaatgttggatatttatgttgggtgtccctgttaccctcatgaatgacatgtgtatccatcaggtcgtggcttccttcagaaaatttctgtgttggcacaacaacccttagattagatcatacgttctggtcaaatgtatgtatatgtttgctaatgatgtgcctagaagtattcttctcacatagggagatgactccaccggattgggttgttcttggtccatacccgtc

SEQ ID NO: 62852 - DNA, 895 bp, Zea Mays
caggggctcccttggaagtatcccgagacttagtcaacactggcactggactacgggttggtttctacgaattccagggactcttatataactttggctcagcgaaagggtatcgcgagatttaggccatccatcagatcctcactggacgacccggattaggtcgatcaccatccggaaacaatgagcgatgggttcctcggatcccacatcgacagtgtagatttttaagtgcctaaatctgctctagatcacccgattacggattgacggttacgattcaattgaacgaagaggtatccctctacccgatcagagccgtccgctggccatccaacggccgagcgacatcttcccccctaaacctcactggacacggcggtgccgcccccctacacgacggaccccgccggtgatagcccaccgacgaagtgaagccctaactcaagtttcgtatagcgcacaaggttccgtggatcaaagtgaatacatgtgagaggtttgtaccggaaatcgtagggcagagatcactggccccgggaaggtgcagatgcgcgaagaccctgctcgtatgtgagcaatttccctacaacgacgcccaaattccccactagagtgagtcaaggatgtgccacacttcgacacgaactgtcccccaccgctaatcgggaccggaagtcactgtggagggcacccgaggtcggcgatgaactcccacggcgcgatgcagttctcggtggagttgacttcctaatgagagctcatcgtgcgagacaggtgtgcgcattatatccacgccaggcggtcaagtacgcaatgcccgaggcgaggtggttgagagaagcctggcatcaccggcgacggaatcggtccgcgcggtcgtggcgaggtggaa

SEQ ID NO: 62853 - DNA, 439 bp, Zea Mays
tattcacttacggacatacctccctgcttaagggatagaaactcctttcttttaatcttcataagcccagcaggaatatggtaattcctgaattgagtggagaattctgcttaggtaatggtgttgacagcagcgtgagcaacgcagtatgcatcccaccaatctgcaacgggaccggtaagacggcccgatgcatatagcacattatccctatcagagcactgagctatgttgagcatcttgtccacagattttaaccagtcattagcttgtagtgggtccgcggagttggagaatgttggtagtttgtgactcataaactcccggtgcttattcctgggtggagctggtggtggtggtggaggtagtggtggttgttgctgtctttccaggcgttcttacctcatctcttgacgcatttccaactgttcctgacgca

SEQ ID NO: 62854 - DNA, 311 bp, Zea Mays
aaaacaataatctggttttgaaccaaacaaccgttcaacaggtgactcatgagcaaggacaggtgttggcaatctattgatcaggaagactgctgtcaagaacgcctcatcccaaaattttaatggcatagaggcatgagcgagaagagcgaggcctacttcaacaatatggcgatgtttgcgttcggcggatccattttgttggtgtgtatggggacatgacacaagttgggaaataccaagacgtgcaaaaaacagactcaatttttgatactcgccaccccaatccgtttgcactgccaagatctgtt

SEQ ID NO: 62855 - DNA, 516 bp, Zea Mays
aggattttgaagtggctaaagcgaaacaagaaataagtgaatggactagcgcaagactgcaaaagaatgtagatgagcttcgagaatcgaaggaaagatattatgagaaatccttggattgcgctaagaagttgacagatagttttgcgaaggtgggtgcatactcatttgagcaaaaatttattagaggcgatcctgaaggaataatcgaatggatcgatgaagaaattgaagcctttgacgagatccttagcgacgtggtgatttttgcgcctttgccggtgctagaggggttgcagcaactttagaaaaatctagctgtgaacatgttaaagctgcaacccagatagaggtcgtcttcactatagagaacacgaaggatccttcggttgaggctactctgatgggcaggaaactctactccaacgtttggatgaaaggcgaccgagaattagctgacgaagctataaagaagaacgagaaagaatcccatgaagccaagaagccaagcgagcc

SEQ ID NO: 62856 - DNA, 331 bp, Zea Mays
gtttccaccgccaccattaaatcgagggagagagatcgatgagggcgccaccgttgtgccaaccgtagggagtaccgccgggggttgatttcatgctggggcattgttgggtatggctagtgttgttggggaggtggccgaccctatcgatgggcatggtgcagtcaccgtgctccgggatacgcatgggagttgtggttcctcgtcggggccgtcctttgccaggggctgcgtctcgctgctcgtcggtgctgttgtttgggcacataagtgctcaggatacttcgttgatggcctgctggtatccctgtgtggtgttaggagggtgcgg

SEQ ID NO: 62857 - DNA, 782 bp, Zea Mays
gatgaatagtaggttaggaagaaagtagagtaaaaaggtataagtgttgtatgttttgaccattggaagttgggatcctcaatcttacatgatctctaatatatagagggggaatttttgtcctagtaggaaacgaacccaaaacacggtcctcaagttttcgacgttaaaatagatcaaaaatcaacttgaacaccaaactagctcgaactcaatagaaaagttggcttacgcaactagggagtcgactaagccagtttccttaggactgagcacgtcacatagagcagtttgcttagctggctggtggagccggctaagcagactttgggctgaagaatcgacttagtcgactctgtcattgcatgtggtgtcttctccctttatgcttatttgtttcattacttgttgcactagatatttttctagcaccattttattgttggaaactcgttagtgtggtctaatctttatatcgatacactttagaatgtcaacagtattgataatgtgtcatggagaggtacacagtcaatttacaatatattcgtagtgaatcattgagacacaactactaaatgcatagattgttttgtacaagctgtgtgtacataatgtagtacactatagcataaagaattctattgagcctacaggcccttgcagctacggcgagtcctcacttaaactgcaaattgcttgtgaacgtcaagccaaaggtccaaccagccggcaccacattattaaatacgagtgtttggtcatctgtgatggtgatcctg

SEQ ID NO: 62858 - DNA, 941 bp, Zea Mays
ctttccttgttatcttcatcctatcaagccattcttgagtcacatcatattgagcatccattgtgagaaccatttcttcaatattgggaaccttgtttgagtgtcttctagatgtaaattctaagatcaatcaaactctagtatgattctcatacaagcatatatggactaatagtaatatggtcaagccaattcacgattactcatatcttattcactttggcttgaccaatcctcttaatcacttcaacctctattctgatcatatctatgcagtgatttctcagatcttgtccatatatattcaaaccaatatagagaccatattatatccatttgcattgtctcgttggttatttaaccttgtgttgaacttctgttcactgatcattatacactattcaagtatgttcatcatactgaatttcctattcagcacttagcaaactcgttagacctttaaatgtgttgttatctaaatcaccaaaactcaaaaaagagatgaatgcactttcacataccatggcaccgatggacttgtgtcggggtccttgactgaaggtgagtctcatactctcccatccctggcttatggtccttttagtcctagcgcgtgcagaggagcgcctctgagcccttggcgccgagcgctcaaatctgtctgtggccatcgacctcgtatgcgatcgtcttggggtttcgtagtcaggggaaatgtccacccgaactcctcgaatggcgcttgtctctgccgcattcaagaattggaggccacgtcgtcccggcttgggtttctctatgcctcggtcgccactcatccctcgatgagtactcgaccaagcgtggatgagcctacctcgaatgttccagcggtcggtcacatggcaagctctaaagacctgagggcataggcaggacccatcacgcagcacccgtcccac

SEQ ID NO: 62859 - DNA, 668 bp, Zea Mays
atgcagggtctatttcataaacattcctaagactcaggactcagctatgtggaccgcgagtttattaacagattttccaggggctcgcatgcaattgcgtcaggccgaaggggtaccagcgcaacagggccattggatcctgatcccacggtgaagggataccgtttatccctagatgcccgatctaaaacggaggggcacgattagatcacacatccagtgaatcgatacgttatgtgggctctcggatcaaacaccgacgtccaggatttaaaatacagcggtaggttcttgatcgtttgatctcaatctaacggttacgaccaaatttgttttcacccctccgatgaagatcagagggcgcatggctttcgtcctcctcacccacgctcgccagagtggcgcatttgggtcactggtgcacgattgcaaagtctgctaagcactactcaaggctaagtcaatggcggagcaggggagaagtttcccaccgatggtgaagatgatgccgagactccccccctgcgtgaaacgaatccgcggcgggaatccgctccagtgagtgattccgttagcactagtaagctacccccgtttggatcgatgctacccgagagagtatgaaaccgaaacgatgaataaggcgttaccacgtattttgctgcatc

SEQ ID NO: 62860 - DNA, 352 bp, Zea Mays
tggatcaaatatgtcgcatccttctttgttgttggccaatagaaaccggacctgaaggctttccctaccaatgtttttgatgctgcatgtatgccacactgccctgcatggatttcatccagtagctgccttcctgtagtcgaatgaatacatttcataagacacctcctgcacctcctcgatatagcagaccccctatgatggtatagtgggccaactgccttgcgatacgttctgtctcggccttgtcatccggttcttcctcattttttatgtacctgataattggctccctctagtcgttgggatctgtttctgcttggtctatagcgttgcattctttagcatgctc

SEQ ID NO: 62861 - DNA, 289 bp, Zea Mays
gctcagccgagccataggggaagtgtcactagtggattcgttagggtttcggctctaaataactcgaagcgggagtgagaatggtggccctggtatgcagccggggttcctccgatgatgtgctgccgcatagggagggtggcgccgccatttgtgaccgcaggcgagagggacgaacgggtatcgttgatcggcagatcaacggtgcatattagaaaacccggtgcccactcgcaatatttaatccagaccgctggtgaattattgggcggttctaatttgcatgagt

SEQ ID NO: 62862 - DNA, 462 bp, Zea Mays
tacattagacatctgtagctccatcgcatcatgacatatcgcataagccactaacggaaaagaagggaaggtttctgccttcagcgtaaaaatgcttcgttttgaacgaagatgcttcgttatgaaggaggatgcttcgttatgaaggaggatgcttagttatgaacgaagatgcttcgttatgaatgaggacgcttcgttatgaatgaagatgcttcattatgaacgaggatgcttcgttacgaacaaagatgtttggatgtgaaggaaaagaagggaaggtcttttcgccttcagctcaaaataaacatgatggtttcgtccacaacaaagcagatgacaccagacaatggtaagactacaaaggtaatagaattttacaagtcaaacccttcaatatttttacatgtcaaactcttcaacgtttccattttgactcatctacctaaatacattttctaa

SEQ ID NO: 62863 - DNA, 491 bp, Zea Mays
tggctgtcgatagcagtgaagcagacccaattgagagtatcaaggttgtgtctgagtttccagatgtgtttccaaaggacttgccaggtatgccaccagagcggaaagttgaattcaccatagagcttcttcctggaaccacccccatctttaggagagcttacagagtatcgggaccagagttggttgaacttaagaagcagatcgatgagttgtcagagaaaggttacattcggccgagcacctcgccttgggccgccccagtcctattcgtggagaagaaagatggcaccagaaggatgtgtatcgattatcgagctctgaatgaggtcacaatcaagaacaagtaccccttgcccagaatagaagatctgttcgaccagttgagaggagccagtgtgttctcaaagatagatctgaggtcaggttatcatcagctcaggatccgaccttcagacattccgaagacggcattcattaccaagtatggg

SEQ ID NO: 62864 - DNA, 759 bp, Zea Mays
agtaaaatgagaaatctgttgtgacctagatcgagtgactcgcttgtgaagctccccgatcatctgctgaggtgggtgatgacgctgaatatgctgtggagcctcccttgagtaagtggcctccccctcaacagcagcttcaactcctccagcctcagcaagagctggctcgagcagaccccaagtggtggaaggagtggggtcgggtccgtcagccgtagtagtggaagcaggctcgactggggtggccgatggagtttgctcgagagcaacccaatcggcgtcatcatgctcctcatccacaaagatggtatgtcacatctgatctagacctgcatgctcaaagataggggatggataaggtgcagtctcatcgaatgtaacctcacaagtctccataatgcggttagtctctaggttaagaacacgataagcatgagaatgtaatgcataacctcgaataaccccatccgaagaccaggactcaaattaatccagattaccctgtttcagcacaatgcatctacagccaaacaacctaaaatgggtgaccttggatggccttccaaatcacagctcataagaagttttgttcagaaaatcctgaagaaagatgcgattggacacatggcaagtagtgttgatcgcttcagcccaaaacgcctaggagtcctatgctcatcaagcatcgttctggccatctcaacaagggtccaattttgcgttcaacaataccattctgctagggcacatacggag

SEQ ID NO: 62865 - DNA, 602 bp, Zea Mays
gtaggatgtccttgtataggagcacaaataacatacttggctaagtagagggtaagttgttagtagaaagtaggatgtccttgtataggagcacaaataacatggcattaggttcactcaattcttttagatcccccttcctagtcatcatgactaatccttcttttcccggtgtcttggttattggaggctgtggagttttatttggctttggaaactcttccttgctatttttgtggatcactctcaagtggttctcgctctttcgctatttcttccttagatcatccttcataacttccttcggtgtcaaaggaagcaaatagattcgctctcctttatacaagaaagacaacttgttggttcttccaaaaatctaggcattacgatcatataaccaaggttggcctagcaacaattgacatgcttgcatagcgaccacatcacattccacatgatcattgtacttcccaacagaaaaaggaacattcaccacgtggctaacacgcaacatagcttatctttgatcatacctccggtatggaaaagatagtggcgctgtccattttcttccctttcagcagtcacacttagcactcgaa

SEQ ID NO: 62866 - DNA, 456 bp, Zea Mays
cgactcttgagtcttgacttttgacccactccaggcaggcccagtgcagctcttgcctctgttttactttacttttatcgcattttcctcttgagatgaaagaaaaaaagaatcgaaaccgataaaaaacgtggctatccgaagagtacatgcgggtgagaggtaaaatgggcctcttgctcgaacacggcaacgttgttattaaagaaaataaaaagtaataccaacattatagtaaagttaacaattcctgtatgttgttatgacttgctgtttaaaactttgcatgcttggttgtggacacttgccctagcttgcggaatagaaacgggacagccgacagtgaaacctcctctgtatctatctacgtaaatttatgataacaaatttgtattaaagaattagcccgctcgcaatcatttttgaattcatcgcatgcaacaccctgtccctcca

SEQ ID NO: 62867 - DNA, 1009 bp, Zea Mays
tggcagcgctcgcgaagtacgtctgggctgtttcctcatatgacgagtagcatctatacaggtcttcgcgaagaattactatctacactggcagaaaaggaaaataggtgataagattccacagtttggatcatgcaccttaacgccgaggactaggaagacctcggctgaattatcgagattgtcccatgtgccataaataagtggggcagttggtgggaattttggttttatgtggctcccggggaagtcgaagggttgccaagtttgccccctgtcatcctgtgctcgcatggttatgtggcatttccacgttttgaggtggcagaagaagacgaagacgagggggccctttgatatgcagcccgcttgagtagtggacgtgatttggtcgacgagtttatcgcctctggggtgtggccactggcgcatggttgggcattgggcgagattaccccctttgaatgccgacattgggtggccagctggtgcaaagtcctaccttcgccgtggacctgcgcggccgagatgcggctgcgtttgtgcgtgaagtcgaggccgaagcaatcaagattgttggtaaatacgcgccgaagacagaaacattgaggagttgggatatccgcggttccaatgttaggttgaaccatgtgtttgagctgaataatttgtcgtatgattcttacccggagggagactccggcgacactgctgatcactgagggaagcaggtaaagtcctcggtcgatgaaggtccctcaagggatagggctccgggtgcggctttcagaaagagaaaattaggtacggcgggtgaacagtcagggcggagggcaactggttgttttggttgaggaattgctagaaacgtgcgtggctcccagggaattgatgtcttcgcctgaactccgggaaacctctttgcgaatgctgaagattacagggggttgatggcctaggaatgatccgataccctgggcagctagcgaagatttttttacgtatcgac

SEQ ID NO: 62868 - DNA, 695 bp, Zea Mays
ggtatgattattgggatggattggctttctcagcatagcccgatgaagacccattggctcgaaaagtggatggtcattccttatagatcagcaactgttttattatatggaatatctgttgtttgtccagccggatccgtagttgaagttactgcgttgcaatctgttcctccatcactgttggatttgcagctgccagatctgttgtcaacgttgttaactgaatttgctatgttgtttgatcctccaacaggacttccaccttcacgtcattgtaatcatgctattcctctcattagtggggcttctccagtgaaggtacggccataccgttatcccccagccatcaaggacgaaattgaacgtcaagttactgttatgctgcaaacaggcattatccaacatagtgacagtcccttctcctcgtcagtacttttggtcaaaaagaaggatcaatcatggcgattctgtgttgatttcagacacttgaatgcaattacagtaaagtctaattacccggtacctatcattgaagagcttttagatgagttggaccaagcgtcatggtttactagtctggatctcataggagggtatcatcagatactgctacaacctgaagacactcacaagacaacctttcatacacactcaggccactatgagtttcgtgtgatggctttcgaattgacagg

SEQ ID NO: 62869 - DNA, 508 bp, Zea Mays
aaaccgctccatctacggaggggaaggccgggggcagaagaaacaacgaatgatgaatgtgatgcaagctattgagtagacatcgcccctagcttcggccgcaaaagcagctatgtatgtcgatgccgaagatgccgccggagccgaagctgattaacacgcaaccacgatgtcagaaatcaacagactcatatcggatgtggttgcagagaaggacgtagctgcaatgccttctgacaagggaaaaagaattgaagatgcctcttcggaagataaggatttcaaccttcggcacctgggtggccaactactttccgaagaggacaaatcagaattaaaagagtttgttatatcctgcggttaccagcccagatccatactcttcgacgggtggacgaagagattttgggatgcattcgtgaccgtgccggggctaaaatcataagtactttatctaagagtgttggatttccgaagctagaaaaggacattagttgctataggcgac

SEQ ID NO: 62870 - DNA, 1024 bp, Zea Mays
gccctttctcagtattgcttgttgttcagcggtgtagctaatggccttgacctaaagtactaccctcgtcgtttgaccagcagtgctggaggtgtgattgtctcgccagttggtgagggtaatcccaggctgagcagcatggtcgacctggctgtcgtgctcaacacagagttggaccacgcccttgacgagttgggcaaggttcgggtggaggttgcggaattgcgtgctgagtgtgcggcacgccactatcttgatggtggttctcccgcccctgtcgagattcagcacccttaccgctcactgccccgtggtcgcttcgactatggtaccccagactgaagaaccctcatagatttagatccatagatcgacagagtcggagtcagtaataatgcttaattcagtgtcatagtctagtcagtctttgttagagttagtttgtttatcttatgttggatgcttgttatgatggacatgtaatgaagttggatatttgtaatgattgtcatcaagctgtgggtatcccctacaacttggtgtagttattaataaagtcagttatttagttggataatccatgtgtttccactttcctctttatctgagaagctatcagtgaagatggtcaattgttcaatgctgtgaagatttccatatatcttttcttatgttgaaagactgcagagtcaggtctgatatgtgtgtgatttctacagatgtctgagaacaggcacagaggtgagaggcgtgctcagccagaacagcaggtaccccaagaggatgcagcccagcagcaacagttgccaccaccacctccgatgacagtcgagcagatgttcatgatgcaaactcaggcagttcaggctattggtcagaccttagcagcgatgcagcaagtgcagcagcagccacccccaccacagcctccagtgcaagttcaaatgccacaagtgcccaaagacaagcgggcagagtccatgaggggccatcccctgtctttgcccactctgctgatcccatg

SEQ ID NO: 62871 - DNA, 543 bp, Zea Mays
tctaagggaattctttagcataatggctagagttgccacaagtataacacatgttcttgttgccttgacggttctgttgctgagggttttgattgttgttcctcggtgctaagccttggaagtggttgggtgcttgttactgtggtgttctgatcactcatcatccttactattgttgttgcgtaggtcccctgctcagggtgttggaaacaatcctgaagcactatggctgggatgaaggtttagctgttggtgcctttctcttattatggctcacagggtagagaaaaagaggaaggcacatatgacaggaccctccgctcagcctcaacgtgttaggattgtttctaacaatcagagcaggggcccttggtagtagcagagacgatgggtaatcatgtcacctctgcaacaggcacccaaccgcctcaagccccagttccaaggaactacgatcagaatccttaacagccacaacagcaaaatcgccaaaacaacgggaactgatgctatacccatggcaacgctggccactatgcaaag

SEQ ID NO: 62872 - DNA, 768 bp, Zea Mays
cagacacggtgatgatctcctatatcaaagattgagagttgaatgactaacacaagcagcatatcatggagaaggaaataaaaaatcttgaaacaaccttatttgaggatatgtatctagacgaaaaccagcataccgtgcctggacagaaaaaatggtccacgtgccagctcgacctggcccgtgtaacccgcgtgcaggcgtgccgcacgcccatttgaacatgtactgcgcctgtatcgttctcccactcaacgtacgtggcacggcgacagcgatgcctatatgcgtatgcgtgctgtcgagtgtggcattgcatgtgcagtgcaggcgcgcgacagaagagcgagtagagcgatggaaaaggacgaacggtccaacagaatgtctagaagtgggaaaaaaacgtcaagacatgtatttaagacagagaaggtagttagctactaactgatggcgacgacgagaacgagatagacacgtgccgtacagtgcagagtgcagacggaggaattctcgaataaaggccgtgtgtgtacgtacgcgcgttccatgtgtgtgtggatgattgggcttgggcacgtacgagtgtacgacggcgacgggaaaatgtttgaaggagagacaccccacggcatgcacgagagaggttgtccgttgtcgtacatacgtgtccaatggcagattaattaaattaagaaggcctcttgttttaatctagcatagcttatatatgcatggtgctctgctggctcctttttacttttc

SEQ ID NO: 62873 - DNA, 364 bp, Zea Mays
gtgagatgaatggaattttgaccaaaggtggtaaaagatactttctcacttttatagatgactccactagattttgctatgtgtatctcttaaaaacaaaagatgaagcgttcaattattttaaggcctataaagctgaagttgagaaccaacttgagaggaaaataaaacgtttaaggtccgatcgaggtggagaatatttctctaatgtgttcgatgagttctgcgtggaacatggtattattcatgagaggacaccgccattctcaccacaatccaatgggattactgaaaggaaaaaccacactctaacagatttggtgaatgccatgttgagtacagcgggattatccaaggcatggtg

SEQ ID NO: 62874 - DNA, 1045 bp, Zea Mays
gttaaaatgaattaaatatgaatttcccaagtttctagaattgtttttgtattaaaaactaatttctataattatttctctattttattcctctctggactgcgcaccaatacctggaaagcgcagggactctagtgaaaaatgattccagacacaggactcccacaaggcggactgcgggttaattcatcgaaatccgagggactcatttgaatatttgcacaaccgaaggggtatgcgccaatctggactgttggatcacagttgggtgcttgagattaaattaagtcccccccgaaccggtacgagatcccggccataggatcctaatcttacggtcatgattttatgagatgagatccaacaggatccgtctattaacagatcagtggcccagatcgttcacgcgaaagggtacgccaagctctaatccctaccatccatcgggaatcgacggtcacaaggttctctccctccacgacagtcgaccatggcggcatcgccgacccacgacagaggggtagttggatccacgccaatcgatggtgcaagacactagtccctattctgaaggtggctacatgatttagagaatacggcgaatgcgtggtatgaaatcttaccagagattacattggtgggacaactcggcgacgacaacggcggacccggccgcaccgagccaacaccggtaagaaattgcgcgtcccccgatcggcaattccatcgagtgaagcccagtgtgacatccacgcatctagtcgaagcccctagacccaccggttgaatcccgagcggaagcgtgggcgagttccatggcggcggaaccttgacccgcagcaatggcgcccttgcttttgcccatgaccgcggtatgagtgggacgacaaggggatgaatagatcaagggggagcgagttcactttatccgggagttggcgcaatggctccgcacgtgagccgcaacagaaatctgaccttactagcgtactgactttgcgcgggcggttgagccgtggagctcgaaaatcccgggacaccgagc

SEQ ID NO: 62875 - DNA, 306 bp, Zea Mays
ccaatgttgtggcagatgccttgagcagaaaggcccaatgcaattgtatgagcatggatgcaaaagtcaccaccttgtgtgatgagttgtgcaagctgaacctggaagttgtttcttcaggtaccctaaattatatctcggtggagcccacattacaagagcaaatagtcagggcacagattgaagacaagggtgttcaggttatcaaggaaatgatcaagcagaaagcagaaaaatacaaatgcttccgtcaggacagcaagggaattctatggtttggagatcgattggttgttcccagggacc

SEQ ID NO: 62876 - DNA, 786 bp, Zea Mays
ccggtggtgcttatcgtactgcagcttttggaccgcctgagcctgctcgagacggaagcggacgtcagccagaaaagcttcccgcgcttccatttcttgtgccaccgccgccacccttgtgtcgccgggctcgtaggagcggatggagggcggatcacgaccgtagaccacccggaacggggtgtcgcgtagggatgactggtaggccgtgttgtagacgtactccgcccagggaagccagcgaagccactggcgaggacgatcccccgtgaggcagtgtaggtacatgacgatgacacggttggccgcctccgtctggccatccgtctgcaggtggaacgccgatgacatgaggagcttggtgcccatgaggcgcatcagctcgctccagaacaacgaggtaaacagcgggtcgcggtcggagacgatggactgcggtatcccgtggaggcggacgatgtcggtgaagaaagcctgtgccacagactccgccgtgtacgggtgcgctaggggatgaaatggcagtatttgctgaagcgggcgacgacggagaggatgaccgtttttccgtgcacccggggtagcgcttcgacgaagtccatcgcaatgtccgcccagaccgtcgagggcaccggcagcggctgcagcaagccagctggatgtagatgttccgacttgaaccgctggcacgtcgtacacgcccgtactaagtcctgcaccaggcatctcatgttggggaagtggaagtcccggcgcaggcggtgaagggtgcggtggacgccctca

SEQ ID NO: 62877 - DNA, 1121 bp, Zea Mays
ggatttcgtcacgcctttgtgtggtcttgttcgtttttgttgcgtccgcagcatcgcgagagctgaaccaacaacagctcattcatgcatggttgaagcgcttggactggagacggcgtgtgcgattcaccttctcgtatcgtagctcggctttgccagattttggacggaaccgcgtttcctgtctcgctgattgcttcaaaatacccatttggttcgggcgtcaaaatttatctttgcctttcaactgtttcatctttttcttcttctcttattcaaaaaaaaaataacatttttgtgcttgatgacgcgttatgacagtcatgtttctcgttcgcatgatatgtcagtcaactaatccaagtcctgtacttaaagctcaatccgcatcatcaacaacagttgtcgaagcgacaccgttttcttttcttttgcgtgggggcacagattcgatgatagtatactggagtacgtggcagtagctgtagctagtatgcctgccccaccagctagtccaccaccaaccgcgtaactttcctgggctgttgagcatcgggatcgagctgctactgccctccattcaaacgccggggaatgtctggcgtcctcgaatgatcctgctgatccgtttttgctgcgtgcctgatgcctacggcctaccggagtttggcggccacctgtatctgtatctgtatttgtatcggctggggatattgcctgtcttcatcatggctcctcgatctggcaggcaccaattaatttccgtgcaaatccttcaacgattcggttcggtgtgccgtgtgcgttacatcattctgatgtgcgattaggactcttgtgacattcagcctagtagtttccggtggatttcagccttccagggctggtcgttcaactgtgtgccattggttttcagtcattcttgatggaggtggtataactttacggctagttttgaaacttaaattccctccgggattcccgaagattgatggctggggatttaagtttccaaattaacccttaaactgaaattttgtggacggaagtaaccaatatgtgaaaccgctccacggacaaatcgttagcttttcttttactcggcaacagaaggatagctt

SEQ ID NO: 62878 - DNA, 759 bp, Zea Mays
tgggccctatggggtgatttcaatttctatacacttttggaccaaagtgtatatatcaaatggtagaatatcaaaaaccaaacaacttttacattagaggagtttcaagtaatgtggaacaatttggacttaattgcaaaaaggcccaagaacacccatatggcttaaaccctgaaattagtgacattaggcaaagtttgtacccttgtatttcctaatccatgaagattttgccttaagtcattacaacaaaatggtagagctatgttagtagttcaaagttgattaagtgactaagccttgatgttgtatggaaattgggataaaataccctagaagtcgggctgtcagacaacttcaatcctgaaaactaaagttcagtgacatttggttaacttcggagacagtttgttgttaattcgatgaagttaaggccagggtcactgtggtaaagttgaagccctaacattggtgaacaaatttgttgtattaagcttggcctggtgctatacaatttttggagtaaatcgctcccaaacttcggtcgtcaggcactcgggagggtgttcagtgatgaacagtaacctgatgaagatcgccaggttcagtgcactgccgctggtgatctcgcgctgagatccgagttcgccgggaagatttgtgcttggtgcagagtggataaccgcgggggggggggtggatttggtcacgggcaggagcttatcggctgcacttgatggccgtgcgacgtggccgagc

SEQ ID NO: 62879 - DNA, 377 bp, Zea Mays
aggtgctgcaatggtgctgaaatcccgcacaaatcgcctgtagaatcctgcaagaccaagaaaacttcgaacctgcgtgaccgtggtcggaagtggccagctcgtgatggcaacaatttttgcctcatccatctcaatgacttgcgatgtcacaacatatccaagaaaagacacacgatcggtgctaaaggtgcacttctcaagattaccaaataaatgtgcatcacgcaaaacattaaaaacaacacgtaagtgttcaatatgatcaccatgagacttactatagataagaatatcatcgaaatataccaccacaaatttaccaatgaaagcacgtaaaacctcgttcatcaatctcatgaaagtgctaggcgcat

SEQ ID NO: 62880 - DNA, 809 bp, Zea Mays
cgtgccttgcctccttgcgctcgctggcaagcagagcgaaccgatcaaccgcacccccactctctgacacgtgggacccacacccacatgtcatccctaaccttccgctctctctttgttccacgacggacacactgtcatcgatctcgcccctgagagatcggaacatcacctcgatcattgctcccccattttcctcctcggatatctgtgccatatccccgagtagttttgtcggcattaaaatggcgacccgaccatgctaccctcaccatcactgcccttatgtcatcaattgcatggccctataaaagacgacccctagcaccgattgatcacctcactgagagctctgcctccttcctggcacttgcaccctcacactagtgcaagtgtcgccatcactgagcttcttgagcacgttctgccctaatcagagtacctttgtcctcaccgtcactaccacaattgcatggggactggacgaatacacagttgcatggggactggatgaaggaatggttctacgctgaagtagattctgtgaactagaaagatttcaagggtttgctgatgagtcctctaaagattagcttcggtctaaggaggctaaagtgtgatatgtgtgaagctgccgaaaaatgttacaagattttcaacactatcgccgagaagtctagctctcgggacctgattcaagaagcactttcttacgacatttatcctacttgtaccgggtggtagctatcgaaggaagtgaaaagaaaagatggtgatcttgacacttagcattttaatttaagtaacag

SEQ ID NO: 62881 - DNA, 532 bp, Zea Mays
gaggaggatggttgcaaagagggagtgggcgaggacaacctcacacatggaggagcgaagcacgatgcagcggtgggaggaaaagaagacgatggtggaaagggcggtgaaggggagaaggaggtggggacagaagttttcaaggaagacagtggtgtcatagtcggagggggcgaccagtggcgcgggcaggtgcgaggcgcaactaatgaggaggtcgtcacattcgtcggctgcgaaccacgagtttagtaggcggcagttgcgagtagggtgcaggagaagaaggggtgcgtaaggactcacgatgacgcacgatgaaactcccatattaaggagtatagaattttgtataaagcagaaaggggtgggtgatgcacgacgaattatggaactgtggaaactggtgttttatatagtagggagggtgacacgatgactataaaaccgtggaaactggtgctttatataataggtagagatagagattaaatgttgactgctaattactgtctccctccaaatccttccc

SEQ ID NO: 62882 - DNA, 661 bp, Zea Mays
aaaaaaagtggtgactattagggttgaccctgcctccaaatcaaggatgaccctgcctcatcctactttgacctcaaaccaaacacatcctaatagacgggtgttatccagtggagctcttccttgctgcggtgattattcactagggggtcattattagagaggcaatgggcatgacaagaggatgggacggtgatcacacatgatgcagatagtagaagatgtaggatattgtggcccacacttgtggttcggacagcatagggacccaaagggccagcaaagtctgcaaattctatggcagaggcacggtatacatggtttagttcacatggatgcaaggtagacatggaatttagcaaagtggggaaccggatcatcatcacttcaagtaagacaatataagataagttgctgacctacaaagtcatggaagaagttcaagacacaagttcgaagaagtctggacgaagacacgtgaagaaatggagttgatttcacacttttcgtgtgcactggtttagtccaatgtatctcacagaggagcaccaaataaatagcatgcatgcaacaacaggagcaccaccagatatgtacggcgttggggagttgtagccggatgtgtggccagacatgcccaaggtggcccaggtgctggccc

SEQ ID NO: 62883 - DNA, 563 bp, Zea Mays
tcgcgattttcggtaacaacccctcccatagattcgctttgagcccagctttgttttgatgtgttccgcttagagcaccgggcaccgtatcagcgacgggccaatcaccggcgatactccgccgtatgggggcggtggcgccgctgctctggtcacggctggtgaggagagaaagagaaggagttgtcgcttgtgccgttggtttggaaatcaacgcatgagattagatcgtgtagcaacgaaacctgggccttcagatcgtatgcgatcggtcacgattaaatcgtgggtgtatcggttcaagattggatctaggccatcaacccagatcgggcggatgaaaatcgatcgcacgactttaaaatctggaccgtcgatcctcgatccaagggcgagtaatgtgtaccgtttcgatgttaggatgagtctaatctggaccgtaggattagatccgtgcggccgaggatcatgcataccctttcaccctgacttttagctaaagagaccgtaggtttatttgaattcaagaccgccgtacatatacgaattaaaataaataaaat

SEQ ID NO: 62884 - DNA, 915 bp, Zea Mays
tgaaggatccggatcatctaggctaagcgcgacacccattgggatctcaatactagatacacccattgggatttcagtaccaggaacacccattggatttttagtgccaagaccactgacctctaaggtggttgggtcggctagaccaatgggcacaacagaacttgttaccacgacatcatcagtccggggcattggtgacccaacatgaacatccattgaagcagcagagggggatccgaccgaagcaccctcgggggctgaagtaccagggcagactggcaggcttacctctgccctggccaggaaaccagcagaagacacttcgtccaggcactctacatgaacgtagacaactctgatttcaggcaattcaagcaaaaggtcctcaggaatagcatcgtccagcacactatcgatagcagacatagtcaggcctcagatactcatcatttcatcggaagcaaggctcgaagtgtcaccacaagctttagatcgccgttctcgacggaccaaggggagcgtttcttcttcttcttcttcatccccttcctccacctcatacctaccagcccacacaccactcccaccttccatgacatcctctagatcagcacccactatatcgtcatcaaggttcgatgcgaccggagcggtcactggctgcaggttcgatgaacaacgaagtcttttcttcttcttcacctctgtggactcagcccgagagtctgcttgacatgatcgcttgcgacgtgtacccttaggattaccaattttcttccctcatgcacttgactgctcggagctccactctccgactcaagtcgcgctgattcagatggctccccagccagcatgccgagaacaacgataatctcagaatcattagcagctagctacatcaagaaatgtttc

SEQ ID NO: 62885 - DNA, 510 bp, Zea Mays
aggcatccaagggaccgagtctctttcacccatctcaaatgattccaaagatcaaacttgagtcctctcgcttttcttgattgagtaattgaagtctccgtagggtacttcacacgtcaaagcctcttgctagccttacaatgactgggagtcaaaactccaagatcaagagcacaacagaacaccacaaagatgatcactcaagcacactatttttctttctcacaagcaaggctatctctatgcacttcttctcaattctagcgtatggattacttggaatgaattggaggtgttgctctatgcatatgagttaatgctctagctcttgtgtattgaacggactggttggggatgtatttatagcccctaacaacccatatagccgttgggaccaaatcccaacatatgcactttttgcgtgtgcaccagacctgctacattactagtccgatgcgccatcgagcctctatcagactacaggttcagtgaccgttatgaaaaagttgt

SEQ ID NO: 62886 - DNA, 608 bp, Zea Mays
gactgggggatggcccctcatgaattctgcttgcttgtctttgggcacttgtggcatctagacttgcacctgaggctgaggtaggggtggctgctgctgcacttgctgcattcctgctaaggtctgaccaattgcctagactgcttgggtctgcatcaagaacatttgctcaatggtcatcgggggtggcaatggcaaatgctaatgcggggctgcatcctcttggggtgcctgctgttctggctgagcacgcctcgcacctctgtgcctgttctcagacatctgttgaaatcacacacatatcaaacctgactctacagtctttcagcaaaagaaaagatgtatagaaaatcttcatagcactgaacaaatgaccatcttcactgacagctcctcagataaagaggaaagtggaaatagatggattacccaactaaataattgactttattaataactacaccaagttgcaggggatacccacaccttggtgacaatcattacaaagatccaacttcagtacatgtccatcataacaagcatccaacataagataagcaaactaactctaactaaaactgactagactaagacactaaactaagcat

SEQ ID NO: 62887 - DNA, 482 bp, Zea Mays
ttcagtatttcagacctaacttcgaacgtattagctgtcgagcatattggggatggatcctcatggactagattagatccccacccagagcaaccattaattattttatcgcgaatgcaggcgtagcagaaacgatcatccatttaacagactcgtacgtgtcacgagcccagggttctgcacgtcctttcatcgacgacgtgagctcacccccaacacagccacgcagggccatgtaatgtacatatgaggagaggaggtatcggatcccatacgtgtgggctgtttgcattcggttgctccgtgacaagtcgagctgtagttgtatcttccattgtcgcgccgtgctagccggtcgaatatcggaacgtgcaccagcatgcatgggaacaaagtgtcaccggccggagaatgttcagttccccagagaaaagccagtgctggtgctggcatcttcagatctggaatagacgaaggtgttc

SEQ ID NO: 62888 - DNA, 849 bp, Zea Mays
ggcaatatctccaacacttctattactagccaaccatgcattagaacaatctcccacaactgaaactacaaccgcttcaaacagcttttgaacctcttttctgtagtgaatagaggattaggcccaaggtctattaggttcagttttttgcagccaaggccatctaactcgaagagcccaacatagagattttaaatcatgtagtcccaaacctcccatatcctttggtctagtgactctaggccaagccaacaaacagtgtcctatattagcttctttcctccccttccataagaaaccttttcgaagtttatcaatttctttgatggcctagttaggcaaatcaatagccattgcaatgtagattaactttgcagtcataacagattgaatgtaaatggccctgtcagcctggttcatcatctgtgctttccaccccgggagcttggaagcaaccttatcaatcaacacacagatctagggtcgagacaacttatgaagagataaaggaaggcctatttaagtgcaaggaaacatagagaattcacacggcagcatgcttttaaccacctccacaacttcctctaagcaatggatggggaacaccttccttttatggacattagtcatgaggcatgatgttgtgccaaataactaaataatattcaacattaaatttaaatcaggagggtctggcctcagaaagatcacaacatcatctgcacaaagtgaaatgtggtgttgcaatggttttgagcacaaaggttgtagaagatcctcctcaacaaccctttgcaccagacttgataaaatatccataactaaaataaagagcataggcgagagggg

SEQ ID NO: 62889 - DNA, 421 bp, Zea Mays
gttcatgcctgatctagaagagggagcctgtcaccatatgtctgtagatggtaaggaggccaacctacttgaggctattagagttgtgttggagttcctcgacgtgtttctagaggtcttaccaggcatgccacccgggcgtaaagttgagtttgccatagagcttatccctagcatcgcccctatttctaagatagcttgtagagtgcctggaccagaattggtggaactcaagaagcagatagacgagcttttggagaaaggttacatcagacccagcacctcgccttgggccgccccagtgttatttgtggagaagaaagatggtacgaagaggatgtgcattgattaccgagctctgaatgaaatcactatcaagaacaagtaccccatgcctagaattgaagatctgttcatccag

SEQ ID NO: 62890 - DNA, 335 bp, Zea Mays
gcagagtagagatggaactaggactctgcttgaaagcagatgtaatacttttgctttttgtaaggtatttttgagtactatttaacaagcagtattagcacttatctgtgtaccgcctgttcttgctgtgtgttgcgatgttatgttgttgacccctccctagtacctggccccccgcctgggatgcaggcttgatgtgtcgaggttggataccagcgtatctgaaaaggttgtcaacaactctcgggaggcaacctcgccgggatctggatttgtacacagcttcatctagggagccttagtagtacacccataaggtcccctgtctgatatta

SEQ ID NO: 62891 - DNA, 488 bp, Zea Mays
cgcagtcgtcggagggaagtggccaggcagtggattttcaagtccggcgaggaatcgccctagcattgacgccgtacttctcgaattgatggtcgccgtgtcttccgtgcgctctagcgaggctacccgaccacaattgaatccctagcgctagcgtggatgggaaattagcccacggcggcagtcccttttctctcccctccgcctacggttcaattggtgactgggtactcggcgagatggattggggagctggagcggccgtgttatataggggcggggcgagtccgagctcaagattcacgaggatccgcaacaactcccgccagtgcaggtcacgtagcggtagctgcgggatcgacggagttcgtttcggcatttggtggcgatatgcggaaggtgacgtgcctgacacccgaccccacatggtggtgattgagggggaaagcgagcatgggcgcggagcggctggccaacgggcccggctt

SEQ ID NO: 62892 - DNA, 417 bp, Zea Mays
ctgaacaaaaaacaatgctcctggaattgtttcttatgttgtgtatttgaagtaagatccctgcaaaaaaatcaaggaaacattgtctgcaatacacaactagacaactcagaagaatcattgtctgaattagaaggatcagtaaatcaatctgccttatgcattagaatggcaaggcaacatgctttagtgaaacgcagtgtctactaacaaatttgttcagtcccagtggttgaccatgttatataaattaaggatcagtggatcaatcagccacacgaagaaacatagtatagaccatgttcttctcagtgctcaaccatgctattcccagttcactaagatgaagttcactaagatgcagttcccagtctagaacacatacaacaattcacacaatatagctctatgattccg

SEQ ID NO: 62893 - DNA, 566 bp, Zea Mays
ttttgttttacgttacactggaggacactaagggttcctgggttgccttcgtctattctgtgcttgcattgctatatcgcattccctcagtttaagctaaagaaggggataatggcgaagacaccctttgcacgcagctaggacaagaagtggccgtgatttggtggagaagtttattgcgtgctggtgtgggcaaatggtggtaatgccggcgaagccggtcgaagagagggcctaggagaaggtcgtgatggctacttcgtcagacccatgggtgcgattctgcgcggttgctgacgggggcgaagaggtcaccagcacgtctgtggctgagggtgtggcgactactatcgcgcggcatctccggtatgtgagtttttttaccgaggcctatgcaatggcaggctgttgtcttcgccgatcaagtggcattcggggcgctagtgaatgttgtgacctcgccactgcgttccgagaggaaacgactggaggacaagatagagagccttcagatgctgaatactgaagctatcatggataaatctgcggccaagatcaagagtcgg

SEQ ID NO: 62894 - DNA, 1569 bp, Zea Mays
tctatacatcaccttgctaaatgtattttattctagtattgtctatgctttacttattcattctattagacccgatctcactcttgtgcttgcgacatctttgtagaagacccctgaccatagctcttagtcttttgggattctttcctcttccattattaacttgctaccatttgaccatctctattcccttggcattgacatgctcgtacccctaaattcttcaatactcttgtttcaaatacttacatctaaatttctcatccctacgtaaacactccagtttatatgtccatgaacttcttgtcttctgagatcccttcctattccactattaagtcgttatcctttgcctttttctattcccttgtcttggtatgcccgtatccttggaaacttgcataccccaatgactgctcaagacattttagttaacatgtccttgaccacctctgtttgttgacggtccatgagcgatcattttattttgcacatccttggtgatctcgttgtttccttataacttccccccagtcattaatttttacttcaaccattcggttggaaccttacctatcttacccttaattgtttcctctacttcaccatttcaagagtcttaccttaattccatcctttgttatgcttgttattgatatcatctttacctttgccatctctacatctcaccttgttgcttattttaatcctgccctctaaaatcttctctcttccatctcaacgtgagagttgtattttacccattttccttggatgcatcctattctttgccgcttgaactttcaaacccaacgtttaatgtgttttgtttgctatcgcctttacccttgtgatcctaccttgatgttatcgtatgtctgccacttaaaacctcccttctcccctctcaattcgagagtggtgttttgcttaccccgcgcttggtcataacctcagctttgccctgtgcaaatcttgtcttaactcaattctttgttgtactcatacccttggttcttttatacctttacctcttctcttacacccttttctgttaccaccttcaacccttgtaatacctatatttttaccacaacacttactttgaacctagcctttggagccttctccttcccattcgagttcaagagcggtgctttactatttcacccttgattgtttccctttcttttccaccttgcaagcttcgtcttaattccatcctttaatgagtttttgtttgctaaccccattacctttgtcatccatcgatctcaccttgatacttatctttatggctgctcttcaaaaccccctctcttccacctctatttgagagttgcagtttacttatctagcccttagtcgtatcctcttctttgccactcgcaggtcttgtcttaactagacccttcgttgtgcttttggtctgttatctgccttacctttgtagtctgtggatcttgccttggtacatattttaaatctactttttgaaaatcttctcttttctatctcaaattgagagcggtgttttgcttatctcacccttggccatatcatcttctt

SEQ ID NO: 62895 - DNA, 506 bp, Zea Mays
catagtactgaagatgtccctaaacctcaccatgagacgggctcagctggacccatcaagcaccactacgtctgtatcagaatagcaataggaaatcgtatgacgaacggacaagacgcgacaccataccaggggtaccgcggcgcacgacctagcaaacgccaaactaggggtacgccgatcgggagcaggaggccaaactccacctcggcaaaatacgagtcctcattgtaaagtatacccttgagctataaaagggcaagaccaccccatcttcacaacacatcgagaaatacacacaatcactcaactgtaacacgctccaagcaatactatgatcaacactacactggactagggctccgaccttaaccagtataacccctgtcttagatccaccttcgagcccccctgtggctcaccattcgaactaagtttgcgctagcccccataccgaacacaaatcttattgtcccttggtttctaagaccatgagagtatgaatg

SEQ ID NO: 62896 - DNA, 879 bp, Zea Mays
taagcattgtgttatacaaaaaatagagaaaattggccctaaagtttggctgtcagataatacagagattgaatatggactgttagtgaattttgaagaactttaggcttgattcatgttcaaaggagtaagcaactgagcatgatctctatagcagaattgtagtttttatgtagggctacaagtttactacagacagattagcaagttgtcgcacaaaaaattaagaaaaatgtctctgaagatcctcgatcagaacaactgatgaagcttccaatggtacagtacactaaaatatcccaggatcagataacttcgccgccggtgaaccgtgcgcccggattcatgccggtcgccatgattcatgccgcagggaagtagattgcgctcggccgtgaaaagatcaagtcgcggatgagttcgggctattatggcctcgctgttcctcgaccacttgcaccgacgacgtggcctcgcggccgtcaccggagtttgcgcccttcactgcgattgtgccacgcctccggccattaaccacatcgtcgtgagttgtgatcgttacacagtgatcgtcgtggcttcttatcccgcaattgccacgaatcactgcaccagtaacctctcctcctctccggccgccgcgcgtctccttcaaattcattggccaccgctcaggagacctataaattgagcacgcaatgagcttcgtagggtaattacccatccaaagcatcagcacttgcctccaattactcaccagagaccacgaattgctcatctcccccaaatcgggtttccgccaccgtgaaaaggtcctcgccgtggctagctcgattcaggtccaatcttgtcctctactctcttgtttcagcactcttg

SEQ ID NO: 62897 - DNA, 932 bp, Zea Mays
attatatataagtttaggacataaaacttgcatcaatatatatttgtattcaaagtgtgaaaattgattctttagcaaattaaatgacaatgcattgtaaaaaaattaagtgcaaaatatattttataacgttttctattaaaacacgcttataattttaggacatgggtgtagaattttcgcaataaaatacaataaattaactaatttggacaatctatacaccattcaagcaatttttggatgaagctttatttgactttgttgtagatgtataatttaggtgtgttctttatgtttccaacacccaaacttttatttgcacaaaatatataatttaaaaattatacaagtaattataactcctgtctaaagttgtagctctacttttgaatacaaaattacaagaacaacaatataaaagaaatacaaatgcaggatcctcataaacttgaaattttcttacctcatatagtcagatccgcatcaaaccatacatcaagtacaaacctaaggcaccaatcaaattcaggtttggtgacctatatataagatgctcaagtgaagttcagcaattactcctacatttccccacacattatatgtagttttgcccccacaacttggttatagattgttgagtgcatgcattattaaatctggataaaagattgataccaaaactgcctttgtgttctatgtatatatactactgctacaatactcccagcagagaaagagacaagaagtgaaggcaaatgtagccagatccagtaattctaacatgaaaaatgaggcatagccagaagcatgaaagcatgggctaaaacaggtgctgcccgattgtacacacactgcagcctactgaaacaaaaaactatacgttttcagttcctgcgtatatatcttttaccttttctttttctaaagac

SEQ ID NO: 62898 - DNA, 600 bp, Zea Mays
cggcaactggccgcgagacgatcccaagagcaccgtctacatcgcgccacaccaagtcagggtattcaatccgtctccatcgccgacgactccaccgctgtccctgcctccgcccaccgccactgtggccacgactactaggaagaaggagaggccaaggccaaccacggcagggaagagcctgcgcctcatgcgcagcctctttccggagatggagttccccgcccgggcttgacgatttaccactgctgcgccattctgtactggacctggacgtgatgcattgctttgcttgttcgttcatgggtagtcgctctttttgtttgattagttcatgaatcgtctcgtctcgtcaccatgtatgtgttatcggcgaaactaaactgtcagcatatggttggtgtcaaaacattccccttttggtaattttatgtattattatatatttgatgacataatggagtactattggactcttctccctgtgtttgattttgatatgatattcgacgcaagtgtgacagactgacagcatgtttggttggctatattattttggtacagctgagtttaaaaacaaattattcaccaggatttcgg

SEQ ID NO: 62899 - DNA, 300 bp, Zea Mays
gggtacgataatatatttcatctcaaatgagtatgtatcttaaggctttataccttatctgcttacttgtctcctgagctagatccttcatgtagttgaagatatcaactctccaatcgactatatcaatttgcataatctccactccatccatcctggttgacagacatgtaaccggatgccatctatgctggcatattggccttaaagttctgttccagtggcacccatgtcaatgtgttatgaagcaaaatttggtcatcaactctcagcagctgttgaaatgtgggtatagagcat

SEQ ID NO: 62900 - DNA, 350 bp, Zea Mays
catttcttggtcatatcttgtcagttgaaggggtagctgtggatccgaataaagtgaaggatattttagaatggaagtcgcctaccacggtttatcttgttcgaagttttcttggtatggctagatattatcgtcggttcattcccgatttttcaaaaaactccaagcctattactgaactattgaagaacaatgtgaagtttaattggacaccagaatgtaatgacgcttttgagaagctaaagaaattcctaactacggtaccagtgttagcccaacttgacattgagaagtcctgtgacgtctattgtgatgctttgagtacgggcatcagatgcgtgttaatgcaa

SEQ ID NO: 62901 - DNA, 756 bp, Zea Mays
atctacttggacctttttgtccttgttccaaattaggacatgtattgtccgttgccggtctactactggttctcaactacaacacaagcagaggatagatcatttgcacttagctattatgcccagtccaggttgcaagttttagaagctattgcgcccaggctatagcacaagagcaagcaatatctggtaagagaagaaagaatctgccacccagaaaaagactataaccattggagatctcaaaccgatgacaacagcaagcacataaaaagatcactgtgatgggggaggaggggcagaacgaacgggaggagcagtcgaaggaattgcaacagctgctcccgccgccatcgaggaatgggaggagtgaatgggtccagcgaatgggagatgctagcgaagttgtcagccacgtcctgatttggaacgggagcaaaaaggtccaagcaggtgctctctcctctgtttatgcatcgaataggtgaaatgacattttatcggtaaacaacatgtgagaatggtgtactagcgaagaccttgcacataatggcatttgagcgaatcccacgtttcataatggcataattccatatttttcctcctgtaggaggacaagccctggctggtgcacacaacattgtatcaacatcaagcgtcttggctcatgtgcctctaggaggcactgccccccaagaggaaatacatcacacacgtatgttggcatagggtggccatgaccatgcttagctcgct

SEQ ID NO: 62902 - DNA, 485 bp, Zea Mays
cagcttttagtttataattggttcaaaaatcaagagtctcgctctttttttaatagtcaatagtgggtgattaggagagcataggtatctagctacatattatgtgggataagagatggataggttgaggtaacaaggattatggcaaggaaagactctatcttgagtggtgatgcatctaaagatatggtttgaattttatccttcattttcagcgatgatgtcttcctctttcggtcttggtgttaccatctgagttacggaaacatatagttaagacagatttgtaggttaaccaaatatcttagttaagacagagttacggaaatattttagctaagctaaaatcccacccagccatcattatcaaacgggttagctagctaagctaggaactcatctctcaggcactcaggttgaccaggatagttccaacatgctgatggacatcgcttccatgcatgcaacaaaaatcttgaattttt

SEQ ID NO: 62903 - DNA, 723 bp, Zea Mays
tatagaaggggttattcagtgccctatatggtctcgcttcggcattaggaggccactcattacacttggaaatgacgtgcgagcgtgccaagcagcttccaatacagtgtgcacttatatcggcacaagagacttggtccaagagcatattgcttacagagtgtggccacttgcaaacgggtgggaaatgccgaaggaggctaccactggctccagtcaaaatggtatagtctatttgaagtatacctttcgatacaggaaccagtttgatgaaccaaatgatgactagcaagatgttatagaggcaactagcgatgtgctgcttggagcatactcgaaggccaaagacgaagctatgacaaccgccttcggtgctcagggcaataagagattgaacagggtatttgacgttatcgggtttgtggacccagactactgctatcccacacgaaagcaagggaagaaaaggaaagctgctaccttggcatcttccagtgtgtcgaggtcgaagaaggttaaagtcttgacgcgctgacccagacacattgagatggtcgatgtaccgaagctaagtgaaggggttgctcctgccacagaaccaagtcgtgctatgccaatcgaaacttgtacagatctggccgaagagtcgaaaccagagaaggcagcggaaaagctgaaggtatgagccaaacaattagaatagaactgccaaagccatcaagt

SEQ ID NO: 62904 - DNA, 637 bp, Zea Mays
gacaaatctaattacatcaaaaactctattcagccttctctttccacgaacacctaaggcaattttcatggcttcgtcctctgccttcatataagcccccagcaattgatcactggtcacctcaacggctgcaagccattcatcatctggctcgccgaactgacttctataacgataggtgtatttcagataaaccaggccaccttcactggaaccagcagtagtttccttcggcatctcccaatcattaacaaggggccataccttgaaagcaatgtgctcatggaccaaatctctggtaccaatgtaactgcgcacggtgttgaaggccatcatacaggcttgagctttgttatcactcgcgatcgaaggtctcctaatgccgaaacgtgatcatatggggcgctggattacgtccttcacatcttccctctcactcaaatcatttttaacataaaactattgcttcatccatgagcctaaccactttttctgaaatgttggcacaggacacctcacgtcagaccggtacacgaagttataacatccgaagttgttgtggtactgctccttcccagtggtctttgtttgataagataactgtgaatgttgcaaaaacaatcagcgtccggttcca

SEQ ID NO: 62905 - DNA, 619 bp, Zea Mays
gcagctggttgttgccgtcgaagctcggaagatgcctcgattcgtcgaaaggttcatcagcttgttcccatttcttttcagcatgcatagatctgtgacatagtttgtttcggttgcttgaatccaatggctatgctgctgccatgaatatttaggagtccctggtttaggatttgttgtctaaatctgacaaactgtattcctgtttatccaccagcgatggccttcaaacaagttgtaaatataaatttgggttacaaatttgtcactgaacttaaagatttgacatgattgtaggcgactttacaagcaacacatacttttgtagattacaatcgcttgtgaaatgcacagaacattttcaggctcatgcacatgaaggtagaaaggtgctcctttcttgaaataaccaggtctagttgatgacattcttctttggataactgttttttgcacaagctccttgtatcttttgcatatcatgggagtgtatggtcagttgtctttgttcataatctgtttcagagttgaaatctatgtcagactaatatttttcagttagatgcagtttattccagagtatcataggaaacgatggatatgcaattgttgttttttt

SEQ ID NO: 62906 - DNA, 346 bp, Zea Mays
ctcttcactcttcttcttgatcttgcaagactttttagtttaagataaatctgcacccattatcttccttttccatatggctatacctcttcctcccacgtccatcagttctcgtatctctcccgtccccgtctatccctcttgagcttaattggcacgctgccagtagctgcctgcgactcctacagtcctacgtacgtatcttcgttcgtttgagctgttgcctgttggtcgttgtgtcggtgctgctgtgcattgtttcgttcctttttcagctactttagcatgagcaactctgttatttgctgtaatgaagctgtgttttctggtgtaatttccttattgt

SEQ ID NO: 62907 - DNA, 527 bp, Zea Mays
ggaaacctggtatcacaaaaggtcattagcaagcccaataacgtcttcatcgactagttgtactctaataccctctcgcgtgaatacaatgccttcaatatcatagaaacgtcatttgaggtttaaaaggtgatgtattgttttgaattctttatattccaactttttagcaactgtatggtggaaaaaatgtgccttacaacattaacctatgttggacagttcactcacgcaatttggctaaattttccatggtctttattttattttgagaaacgatgtggcataatgatgtgtggtgttttactcgagtggacataaacaccgtctaggtatgccttgaatagaggggattataggaaacctggtatcacaaaaggtcattaactagccaaatggcatgttcatccactagttgtactctaataccctcttgtgcaaatacaatgcccttgacatgagggaaacatcatttgtggctaaatttcacatggtctttattttattttgagaaacaatgtggcata

SEQ ID NO: 62908 - DNA, 977 bp, Zea Mays
attgaggaatatggtaaggaaaaatataaaataaaggcataaaggtaaatatattttctatactttgttaagtaggttccaagcttcttccccagccatccctcggccgcccttcgcccagatttgagtgatgaatttgttgcctatgcttcgagcttcggctggaatatcaactaggtcagacggcgaaaggccgaagtttggcctattacatctagctttaatgaaagcagcaaccatgccacgagaagtcactagcgcacagaaatcaccgtggccagttataacttcgtcgaggacgtcaacctctttctcaacacattcaagagccccaggaatatcttcatcagaaaggttaacttctttagatacggctccaacataattgaagatacccttcagccgagcgatgcattgagtagcaaagctgaagcatttatcctaaagagttttgattgtttcgttcagtttgacattcttttcaacttcgtccttgattgtcgtgttcagtgcttcagactcacgattgaagcgatccaagttcctttccaaatgtgttcgagcttcttccagctctttgctcaatttttcattttgagatcgagcttcatcgagggaaccttcggctgaatgcagcagactgtctttttccatcaatgaagtttcaagattattaatcttcttttccaagccttcgataacaaactcatttttcctgtcttcgtcatcctgatgcattttcagggccttgctcagcaacagactctaaaagacgaattaaagttagatcctcattactgaaatacttaaatcggcatggtgaaagaaaaaatagtaaaggaaccttactttaaaatttgagtggaataagctgccaataatgtgttgtcttctatagcatctgatgtccttctctagttttgggaatccgatgctctttgataatgtgcctataattttagctccagcgcggtcgc

SEQ ID NO: 62909 - DNA, 746 bp, Zea Mays
gtggtttttgcgggagggtgttcttctattaatgttgttggccgaggccatgttcgggcatacgaagacttctcccgaggccaaggttgggtttgagcatgggtacacagtcatgctgggagtggtcggaacagtagtccgagtggtctcctgcgggagagttggtggctttcaaaagcgccactgctagggcagttggtcgagactgagctcaagcgaggcgtagtttcctctcgaggccgacctcgggcgaggcagagtttcctctcgaggctgagcccgtgtctagttgtcgtatgtcctatccggagttgatgaagatagtgaccggagcgggggaacagtgcccggtattagcgggtgcacgtcatcgtgggtggtgaaagttgatttgactgtggtcacatcgtcctttgttgaatgtggtgtcatcggtggagcaggtgttcgtatcggttgcatttaatgtgcatgccttgcgtttcttgagaactttggccaaagtcgggctcgaggctgggccttcgctcgggatgcccttgggtgatgcagattttttgcttcccgtcaaagggggctccctgggtgagtcgaggatccatgcaggcacacccttcgcccgaggatggactcgggcgaggcgtagttttgtgcaaccagtaagcggggtctcgggtggaccgtgattcgaccccgcgtgacctcggggagctcatgttttgccttataatttcctagtacttggg

SEQ ID NO: 62910 - DNA, 401 bp, Zea Mays
gttctttgaaatgtttcttgaacttgaaatgatagggcagtcgaacaagttcattctttttcttttctcctttaagcttaggcatattccattcttttaacgtaggaaagactctattggctaagtattcctgcaccaaatctctagtaccaatatgctcagacacaaatcgaaattcgcccacagctgttcggcatggtgacccttgcagcatgtcgcacaggggcctagttaacccgaaggttagatccagtgggctctaaactatcttctccttcccctcatcaaccttaacataaaaccactcattctttcagccggttggccatttggtgcggtagctgatcactggagtcttcatgtccttgcggtaagcaaagttgtagcagccgaaattctca

SEQ ID NO: 62911 - DNA, 429 bp, Zea Mays
cagcaataccgcagggtctctttagaaaacaaatccctatgtgaaggggtattagagaatctttgacgttacattggggcagacggttgtcattagatctaggctcaggatcgctagaaattgcccgatttgagatctgtgttttggatttaaagggctcagcgaaggggtgtcgggctttagagcccattggattatagatctacgatcctgattagatctaggctacttgaattcgagccaaaagatgaggagtcaatggtagagatcaggtgattggggctggtttgccttcctcggttgggtggcgcaacaccgctcacgagacgctacagggcttcgccggcacgtgacaagaggatgtttcccctagggttctaggctagaggaatggcttggtgaactcaggacaactttttggtctcaaga

SEQ ID NO: 62912 - DNA, 646 bp, Zea Mays
aagtccgcgaggcaaagtggccgaccaggtcccggccaagcaagtccgcaaggtggagtggccgaccaggccctactaagcaagtctgtgagacaggacgaccatccaggccctactaagaaagtcagcaaggcagaaactcaagtaaagtgtcacgaagtccatgccaactaggacaatacatgacgacacctgaggttgaggccagccatgcgaacgataggccgatggcgcgtcgagtgaccgctatcgacatgatcgtacctccacaagtacggccacacacacgctcccactacctcgaggggttggacggccctgttcacataggacctcaacattggagcttctacagtgactcgaatatcgggtagtgcgcagaagatacatcgtaccgaatgtatgcatacacacaccaacgaatgacgcaggctcataacggtgggcaacaccgcacgatgcacgacaactccatacgactggcctgcgggggagtacgactacgcacgatcctacgaacaccgtcaaaggaacaatgccacctaagggcaaccggtcgagctcctccaataggaaacaagtccccattgtaaggtccaacacttgaattataaaaggaaagacccctctgaaaagtcgcctaaag

SEQ ID NO: 62913 - DNA, 291 bp, Zea Mays
agaagacgcgtgagccattggatgtggagcggacgagtgggattagaagtagtgttctgatttggggtaatgaatcggagccgtagatctcagatcctaggatcacaaaagcataccggtttagtaaagacttcaatctatttgcatccgtccgatggtgatccaacaaccgtggctagctcataacccttctcggcgtcaatttcacaaaagaacccctctgtttttagggaataaacccgccatccaggttgactgttctctgtgtcttagttattttgcgagccagcc

SEQ ID NO: 62914 - DNA, 417 bp, Zea Mays
agaaggcgtacaaggttgcattgcctctagcaagagcagggcaaggcaacaccgctagaactgcgacccaagtgagaggtccctgctacaactgtggtcaactaggccactttgccaaatattgcccgaaccctaagaagcagaacacctaccctgcacgagtccaccagaccaccatggaagagattccgaaaggtgagcctataacagcaggtgtgttttctgttaaccaacaccccgcagttgttttgtttgattctgtatcttcgcattcattcatgagttcagcatttgcacgaaaatatgagcaacagtcagaagagttggggtatagatattgcataagctcggcaggggctgatgtgctaaccaatcagatagttcagggggcaacccttgatataagggacaagagtt

SEQ ID NO: 62915 - DNA, 620 bp, Zea Mays
agcgggctttgaaggcccaacctcggtttcagtttcaattattgtagcttcgacttctgcttgtttcatttcagcttcgagttgtgccttagaagcttcggcaatttttctggaaggagcaggattcaaggtttttgttgtttctagtacaacatctagtacatttgccatcctcctcctcttaggagttgtggcagaacttttttgtgtcttcgacattgttgcttctgttgaagggcttaaaatctctggcatctttgatacttcttcagtttttgtcttttcagccttatctttgtcaacctttgtttaaactagctcaatcgaaggtgccttcagcattatagccggctcttcagtcctctgcacgggaggaatagtttctcttaattcagcagctaaagaggcctccccgccaaactcgggcaccatagccggttcaatgtaacgcggtcggtgggtaagaaccttcatctttttgcccgtaggcttcagcacaggctctgttggggaggccaaagcagcaacttttctcttcttcccctgtccccgcagcgggtagcggtagtcgaggtagacgaagccgatggcatcaaaaactctgttcattctcttttttc

SEQ ID NO: 62916 - DNA, 564 bp, Zea Mays
cttggtctaagggaaaagtccatgtttttcggggtggtctggagctaggtagttgcttatgcttgtcccgtaccgtaaacatacaccttcgactgccctagaatagctgacttagtactttctagaccaggtacttagaagtccaaaccacgtagtgattcaagggctggtcccaaaaccgggttcaacaagactcagatgcatgattcaatggattgaatacaacagaagtaagagtctcgagggtgcgctgctatacattgaccttgagcgatacacccaaggtcagcccatagtataatattaatcctacacggtcaggataaccagtataccatggggctggtagagaaaaaacttgttttaacagcaggaaacatggtctaatctagcgagggtctgaccccgaaaaatctgacctactgagcttcctagtacgttccaagtgtacttatctttgaagagaattacttgctctcattttgtctttgcagtggtggcaagatgccaccgggcgtgggaataacatacgtgaagccgcgtaacacctctcgtcatcagcac

SEQ ID NO: 62917 - DNA, 418 bp, Zea Mays
gcacatcgtgcttcagcgactgcgcgatcatcgtctttatgctaagttgtctaaatgtgaattctggctaagggaaattaaattcttgggtcacacaatttctcaggatgggatatcagtagatcctgagaaggtacaagaggtaatggattggaaacctcctaccacagtgaggcagattcagagttttctgggattggcagggtattatcgacgattcattccggatttctccagaattgcgaagccaatgactgaactattgaagaagggagacaagtataattggagccagaagtgtgaagatgcctttcatgcactaaggcagcacttgacaacagccccagtgctagctcaacctgacaacaccaagccctttgaagtttattgcgatgcttccggtactggattgggatat

SEQ ID NO: 62918 - DNA, 677 bp, Zea Mays
gataaagcatgtttggtggagcgaccagcggccattttgggggtgagtgccacgacgacgttctcgcaggcctgatgtactagcgtgctgcagcagacctgccatggtgcagtaggggcgaagccaggatccaaaattaggggggccaaattagattaaggaagttgttagaagcattttgcactatttatatgagaattagctaaaaaaataacaagtcctatagaattagggaagcattaggcaggacattgctcccctgccccctggcttgcagtctgcctcttgcgttgggcacatgcgcgctgctaactggtagatgtgcattggccctgcgctctagctcatgactgcatcctgtgtggtggcgtggatttgcactgttgaagcatggacaggtccagcgtggatgcgcgcgctatcacctagcgtgctggtggcacggatggaggccaaatatatgtgctgaatgtaggggtgtaaatggtacggatattatccgaccatccgatcgtccgaagaggctaattattcggttggatagtttttttcggatatccgcagaattttcggatttcggattcgaattcggatagtacagttcggatatcggatacggatatgatatgactgatatccgtcggatttcggatatccggatatcttctcggataact

SEQ ID NO: 62919 - DNA, 549 bp, Zea Mays
gtttggggccgtgaagtcgcttagcatggtcaagtaccataagcctacatgccccaccgctctgcagccggtcctgttgcgtgaatcaaaggataagaaataccagctagcggaccctatgggtgcgctactaaaaaattcctagccaagactgtgtgcaggtcgtgtcccagttgagattgccccttgggggccatgacaccggttcctccttaagaatcctggcatccatcctcgacacgtcgaggccatatcccaagggggccaagtaccagagaggaagttggtaacaatgcactcagcaaagaaaaagtggcgtgcagataagttgtaatatcgcctgataagtagtacctaaagagtatcttacaaaatcaaagacatattacaacccgctccccagcggaaccctcgttttctccatgcaggcctggctactcatcgtcagtaggatcccgctggaagcgcccgaccaccatgtccacaacgtcctgcacgccctcctgggcagcgtcttcagcatcggtcaccagacccgcaatgactggc

SEQ ID NO: 62920 - DNA, 1659 bp, Zea Mays
gagttagtctaagataattatattttatgtattcatcattggtgtaggttagagtgggttaaaatataaattatgcgacatgttattggtgtttgaagacgagatgtgcaaagaatcagtttggtgtttcacccgtctagtagataaatgttgttataaataattgcgctaaaatttggtcataagagtgcagtgggcacatggtgtggttggatgtgataagtaaattggaagtgtgggtttgtctgagcccgatgttgtcaaacgtatatgtcgaaatgcgttgtagtagtgattgcgttaaattaaacagaaatgtctcgagtgcacgccacaacgtggttgtatgcgagacgggaaaatataaggtgtgctcgatgggaatgttcggtcgttgtaggtggaagttgtctttgcttaaatagagaggtggtgacatgccgaagtagtcatcgcttcctctatgtttataagtcgagtcaaaatgcggggtactagtggtacgctaggcaggcggtgtccaaataaataaatcggttgatgtggtagttgtcgtgcgtgatttattattagtgagtagttgaattacgagttatgtgaaaatcatgttagaaactagtgtgtggcgtgtaactgtgttcgtgtagtgaataataggtcagtaggtattgttggtgtcattggcaaatggggatgattcctattgtgtgataaattctaaaaggcaaagaacatgggtagtgtgtcgatcaagttaaccgataggttccgtaaacacgcttgtgatgcttttatgtgcatgataagatcgatgccttgtcgtcgtagtctcaggaaattttctgaaatgtgctagtgctctactgatggggttgaatgaacttgagatgtattacaatagctgtgtgtcgcgcaggttatccaaaaatggcgaaaggtggtgtatgttggtaattggaaaatagtcacgtcattagccaactcgtgttaagcaggagtcgattgcgttaagtgattgttatatacatgttgtgtctcagatttcgataataatagactagccgacatgtatgatgtatagcggcctatattgttgctctagttagccgaattattagatgacttggttaagctcgtaatcacggggaattgcttattgtggtctaaatgtgtatggttatggtcgcgggtaaaaagtagtagtgctcatgtgatgtctaatttaaaacgcaaattgttgggtgattatcgtggagaatgcgttgttaattggttgtagtaattttagtgcactaaatgaattgaataaaatttgcaagttgacttgttagtcctcatttgattattttaactctaacaaatagtgaagtgttagaataattcaagtctctagatcgcggcaattcttgaattatatagaagctgacatttattgattgctgttttgggctgcacacattgttttcgtcgtgctgtttgtttaatgaaccaaatcatgttttatgtaggaaagccatatagaagagttgtagataaccttattatcttgcttgtactaaaatttgacagccataaacctgatcgtttaggagttgtgcttttcataagcccagcacttgaatctgtcaaatttctgaacagatttcagaaattgcaatg

SEQ ID NO: 62921 - DNA, 420 bp, Zea Mays
ccttctgccactaacacagaagaaattttaaaggtaatgactgaatctctacctaataagctaagtctgctgggaccggaactaatgaagcttttacagaagcagaagaaaccttcggctgccgagaagcctactgaaccaaaaaagcgaagaattattacggtaattgaggctatagaagaaacaccgccaccagcctcagcgccgaaagcggtagcagccaaagctactccttccgaagctaatcctcccgaagctgcagcagccgaagccacagatttggaaaccacactcgatgacattgatgaattgattttgaaaatggctgaggaagaaactgctgcagctgctaaggaaaccccggtcgtagtgcctgaaaaaggggaaaaatgcctgaaaaagagaaggagcatgccgaag

SEQ ID NO: 62922 - DNA, 1012 bp, Zea Mays
catggatggacaacttgacttcttcttgtccgtgacctagccgaatagtcctttgatcaccatggataatagccttattctgggctaaccaattcgtgcctagaatcacatctacatcttgcccctttataactatcatattggtagggaactcatatccgactaaattcacgggtacgtggaagactacttccttagtaaaaatatgacccctaggtgattgaataacaaacccctcctttgattcaacactaggtatgcaatgcttctcaacaaaagtcttgctcatgaaagtatgtgatgcaccagaatcaaaaaggatgacggcgaaatgattggcaacagaaaatgtacccatcatcacaggttctccttccggggtggtagccacttgcgtgtagtcccagttttccttgtatttttacctgcatgagtgcttgctacatttcccttgccttgagatgtgcttctagaagtctgttggaaattagatttattttgctttggatagggacagtctttgatgaagtgtccagacttctcacagttgaagcaactgttagatgaactgggtaaggccgggaactattttgagcaggggcaggagtgggatggataaaaactggttgcttgaaaggataggcgggtggacgaggaaaagagcggtttgggttaaaagtacgaatcaaaaaccttgaccgcttctcggatccttgagaggatccttcactcccttcacgcccatatctctttgtctttccttgccccaaattcttggattccactgaaagcgttgtgctcacagccttgctgtaagtgagatctaggcaagtggccatctttcgctatagtcgatcatttagacctctcatgaagcaattctttttttcaggtctgtgtcaacttgctctatagcatactgggtgagatggttgaatttggcaagatattgcatcaccgaatctcctccttgctttaagcatacaaactcttcaagttttatttgtagaac

SEQ ID NO: 62923 - DNA, 651 bp, Zea Mays
gtaacattagatatcgaaccaaccgagccaacactgacagcggggctagactgccatagcattaggccaaccgagccaagactgatgagctgattaaataaataagcactatatttaagtatatacttgagtgggccctcaacattttgggtgccctgggcggccgcccagttcgcccccctcaggtacggccccgaacgacggagttggatggaggtagccaaaacatcataactctataattttttggagcatatcaactcataaatgttgtggagctttggttgtttttagaccgaagtttagagtaccactttcgcaactccaaaaatctcgattatgaacgtaaatgtggagttggaaggtaattaaacactattggcactcgtttacacaagaaaacaggttgtgtaaacagttcgttatatttctctattccatcctaatctgcatccttgttttctctcgcccatccttccccgagcgtaacttcgccgatgcatgctggccctcacgccgaccgttgcctcccctacacttgccaccctcatgttgtgtgccgacgctctcgcctcccaccgcccctcccgcaccagtctcactcgtcactgcctcacatgtcgcctacccatccttgcgcgcccgccagcc

SEQ ID NO: 62924 - DNA, 1133 bp, Zea Mays
gcggcagacaccaaatcggatccttcctaaccatttcccctcactcaatttcactaattagactctaaaacatcatgtccacggagacagtgcagacagtcaaaggaactaacatgttcccggcgatccagggcggtctaacctaattgaatgggtcgagtagcttcaggaggacttaaggatgctagaacaaacgaccagagcgcttgaactaacctggagcaagctggccacggcgagggcaaaccgagcagagttcttgagtgatttgggggaagtaagaaattggagctctctggtgaacgattggatgcaagacttggtggcttggtgcgtgattaccctatgaagcttgcagtgcgttcaatttataatgggcaagagcggtggccggtgaattagacaacgacgcgcggcgactggagaagacaggtgttactggcgcgagactcagtggcatctaccgtggcgacctcaccagcgacgagccagtgctaccgagcggtttctagtgactcaccgcgacggagtaaagcatcgaggcacgtagcccggctggataacggcgaacgccattgatgccagcgcgactaactacgacgagacacgatggcggtgagaacagtggttggagtttatccccagcgtgatactttacaccgaggagtgtttatctgagtttggtcgggcgtgaatcgcgtcgccggtgcgaatccgggcacacaggtcaccggcggcgaggttctctgaacctgatccaccctgtgcactgtaccatggcgcagtctattcagttgacctgacagaccaactttgagctcgattttctcctaaattcacatggcaacttgctgatcggctagtatcaaagtttttgtctaatgatccatctaactgtagtcatcatgctcaaacatccatgggatcatcttcaaaatggcccctaaagttcatcccatgtcactgaatatccaatttcaggtttcagacagactgacagcccaacttggggcacatttatctcagaattcttcatggtaccaaggcatgatctctatagtaaagttattctcctttcatagatctacaaaattgatgtggtgacctagggcaaaaactttataacttggcag

SEQ ID NO: 62925 - DNA, 437 bp, Zea Mays
ttcaggcaaccctagggttaaaactgctaatatttggacttctctgtaatatttgtaagctgcgggtggatggcgggttgaattataaataacttgggggttctttcgcaaaagtcgtgaggccgaaagggtataggcaatcctaggccgcccgatctgatctcgagggtccagactagactgatcctttaagcgaaccggtatgctatgtgagccatcggatcccaacacaatgccccagatttgatgagctgagatccaatctcgatcatccaatttacactaacggctcagatctaatcctaccgaagcggtaagctcaaaccaatctaggccgcacggtatggggtcaacggctagggttgacagtctggagtgtttccccacttttaatctgggccgtccaacccaccaatcaacgactagctcaatttctt

SEQ ID NO: 62926 - DNA, 906 bp, Zea Mays
agcagatttgtggctggtgtatagggctacaagtttgttacagatggattggcaagttcttgcacaaaaatccaagatctaggcattgcaattctgtctgtcaggcgctctgaatcaggatttcgatggtacagtgttcagatcagatcgccaggttcagttcatctcgccgccggcgaccacgcgcttggattcgcgcctgacgctacgattcgtgctcaacgaagtactgattgttgctcggggtagtaaatatcgttgtgtggatgaacttgagccactgttcactccagccgccgtgtccgcctagctcacgtccgattcggatgaactcacccgagttagccgctcaacgatcgtgtgccacgtgccttggtgtcttaccacgtcgcagtagctcatattacacatttctggtgatctccggtgagcccgccacggtgaaagccaccaatctcttgcgatagtgctcttttctttctccgaccgccaccgcaccatctcaaattcacgggccaccactcgaggatcctataaattgagcatgtcgtcggttttgcaaggtagtcaagcactcaatccatcaactcgtgccttcaattgttcaccagagcccccaaattgctcacttccccaaatcggttttctgccgccgtgaaaaggctctcaccgtggccattgagcttcaagtccgatcatgtcctctgctctcttgtttcagcacccttatgtgcccctgatgcttcttgacccgaccaattaggctagaaccccttagatcgccgggaacacttcgtgctatccgttgatcgtgcagtcgccgtgagcagagaggttggcagctcgaaccgtgcaattgatcgaggggaaacgtttgttagatgttgaattaggtatcagccaagt

SEQ ID NO: 62927 - DNA, 680 bp, Zea Mays
acaccaatttagaattaacataaatataatacatattattgtcataagagcaaggattaaataaaatgaactaaagttcacatcattggcataagggaagtaactcagaattaaattaaattaacaataagaaccatcaaattgatagcacaatcaatcatggttcattcataagtttaattaaacaagccataagttccttacagtcacatgacgcaaaatgaaacatgccaacagataatagaattaacagctaatagaagtaccatggagaggcaacaaatataaacgagtagcctcattccataaagtagcaaaagatatgacattactacaacttggcaataggataggtgtcacgatagcacaagtctcatcccacaaaagccagccaaagatatgacaatatcagagtttgccaacaggggagccaccatgagagcacaagtatcatcccacaaaagctagccaaagatatgacaccactatatcttgccaacagggaacacaccacgatagcacaaccttgacccataaaaggagcatatattgctctagatgtcaccaaaagattgatcaacctgccccatgcacatctaagaatagtagtgcttggccagccaggtccttagccacaacaccctatgagaatggttcatgttaacaaaagcaactccatg

SEQ ID NO: 62928 - DNA, 3508 bp, Zea Mays
gacagcgactgggctggttgtccgtacacatatcgctctacgtcaagctacgtgttgttcctaggggacaacctgttgtcttagtcggctaagcatcagactgttgtctcatgttctagtgctgagatagagtaccgcactatcgctaaaggtgtggctgagacgacttggctgcgtcagctgctccacgagctccacaatccaccttctcggtgcattgttgtctactgcgacaacatcagcgttgtgtatctctccaaccccgttcaacatcaacacaccaaacatgtgaagatcaacctccattttgtccgagagaaggtcgccatcgaggttcgcatactctatgtcctcacgacatcctagttcgcagacatcttcacgaagggcctctcctcctcgacgttcaatgagtttaggtttagtctcaacatttgcaatatctagggtttcgactgtagggggtgttagagtatatttggtagtctagatattgtgttttatagactgctatatgtatccgtgagttgccttatctcctacgtcatgtactctatataaaccgtctaagagctcaatgcaagacatcatcttttgttacagcatatacctttgtctaacagtgtaaatagcagaaagggaaacttattttagcatatactgaagatattcaaattatttacagcagtaccttgaacaagtcgcatgcgtgctataaacgaattagcacggctttgaaacacttctctttcttgctgccaccatctctccttttcaacatcagtcccataagactcggctgatttccccatcaaaaggttccaaaccctcgtcgtctcaaaatccaagtcaaccttagcacgaggccgctgctttttgactaactgcaagggcctctcattgggaaccatcaccacaccaccatatgggacaagagcatttgaaggaccacttgttccctcaaaagaaataacagctggtgtggtcagagataaatgcatctcagttctctgcacctgttcagtattcaaatcaagatgcttcaactttgatgcaactccttgaacgtaatccatatagggtcctgttgatgtgttggttgatctcccttctgctacttcacaatgagtatcaacgttgattcttttattgtccagggtctgagatgaaaagtttggagaactctcttctgatattttgcatccattagttgcgccataaaaagtgcttccagctgaaagcctgtccttcagctcatcatttggttgaattacactggaacagtgcggtcttgccttttctgaacgttttttggtcaaaaacttaatgcaagaacttctatgcagcgcatccatgcatggctgtggcagtcttgttgatgcttgtagagtattattcttaagatccatagtataaaagggggaatttctgcggagtcgggcagatcgcttcttttttattgcacccgcttggaaaaatgcgaacatctcagctgcagccctcaagacaacagagtcccgtgtgccaggtagcgaaccattgctatggtgtgtggggttttccacttccgacaccttacccatctgacttcttgtgggatccatttgaggtaaagacctagctgaggaaacaagaccatcagcatcagaatagtttaattccaagtcctttttgttcccttctattgtggggtttaccaccctttcatcagcaaacaaactgcacttacttttgccatcaggtttgcaagttcttcccacattatcttcttcccttgccagttccgtactaaatgatgcagaagttgcagccgaaacttcttgtgtaggttttagcatatctggcaaatgtatgtactcatctaaaaatttgttcagtctgcgactcatgtcgaaagctaattctcctggtgaattctccataccttcttgcatcacacgcccagtctgcacttctgactctgagtagaaagaactttgagcatggccaggtttctcatagttgtgatggtgtatgttggccattgacgaatggccgccctgcaatccttgttctttggattcaaattgcagacttcgtcgaactgatgatgttctgcttctagctgcaactcctgttgctccagagattgattgatcgctaacaggaccagagcaattctccagagagctgaggtttcttttcttccggacataacttctcttgaccttttggttcggagattttccatctggtgttgaatcaggtttctgcactttggctggcttattctctctgattacctttggtctgtgttttttcttccgagccttcattttcagcgctggggtttcctcattcctgaacatttcggttttctcggcacttgctagctgcgtctcaatttgagtcagtgttttctccttgggtacagttggtgctgacaatggtgtgtgttcactcttgttgatttgtgtcttgagccttttttgcatagattggtacatatgaatgttgtcatcagtggtactttctgcaagacaggtggttgattcttgagaatgttgcactcgtgtttcccaggtagctgcaggaaccactgattccaaatcattgtagctgtcacggaaaattgctgttgctaattgtggaagttgggtacttccttttccattttcagtcttggatgcttcatcatgtaaacaattcatccgatgctctgaattgtatttatctgcagtggctagctgtgaagaattcgttgtcatatcacctgcaacgatgctaggtgttcttccatgtgacaagaaattactcccagcaagccgaatggaagctccttcggaatacatagagcaacagaaaacaaagagcgttcagtgcattcataatgtatgataatatggccacacaaaacagaaccagcatgacacctagaaagaacaacaagatgagaggacatgcttaccctctgaaacatcaggtaaggcagtggccgacggcgacaactgcggcctcgaaccccttctagtgagttccctatggaacactatgatattaataggcacctgcgtgcaacccccaggcatattccaggatggctggatgcagggcacatcaccttgttcagttgcacggtttatcggactcaacagagcagattgtggagcaggaacctcctgaatagtattcaggacagacgtggagcatggggagaataagacttgcgaggcgatcgagccgctgttgcctgctgcagctggagctgcaacattgtgacagcctaagttgggcaccccagcactcaggaacagaggcctgttggcaggggtgtttggatcgcctctccccgcagacatggcttcaccgggtcttcgggagttgcgttcagtttcgagcttgagggtgaatccttgcttcttccagggcctgcaggaagaacatcatcagaatacggataaataaccacaacatttcgaattgtgctcaaatatccccaaaacccctgggaaaaatcacaccaaaagca

SEQ ID NO: 62929 - DNA, 614 bp, Zea Mays
accaagaccaactacgtcgagttggccacagtgatgagggtacggctccaggttcgccagatctgggaagcagttcggtacgacgacgtcgactaccacgaggatcgacgggtgctggatgcccacattgctgcagtcccgcccgagatgcagttttcgctttcccagaagcggactgccaaggaggcctgggatgccatcgctgcgacccgcatcggcagcgaccgtgcccgcaagaccacactgcaggcacttcgcaaggagtgggagaacctggccttcaagctaggtgaggatgttgatgactttggtctccgcctcaacactctgttgcagaagatgatgcagttcggtgacgacacctacgatgaggagagagctgttgagaagcttttccgttgcatccccgagaagtacaagcagattgctcgctcgatcgagtctctgctagacctctccacgatgacgatcgaagaggcgatatgtcgtctcaaggtggtcgacggcgacgaaccacaggctccctctgggcctatcactatcggcaggaagctacatctcacacgggagcagtgggaggcctgccagggtgacaagaggaagggggagtcctc

SEQ ID NO: 62930 - DNA, 335 bp, Zea Mays
gggtgcgggcagaggcgctgcgctgagagatgatgtcagcgagggcatcggaaagggtgccaagaagccaagtgcggacgacggcattcatgcgaatccaatcaggtgactcgggaaaaacagaatcagagaggacgtggcattccagggaaaatttggtgagggtgagaaggaaagattcggaccagcgggcgtaaaagttggagttggtgtcaaggagtagagggacaagagcccggatgttggttactgcaacagcctgggcgtgaaggtttagcagcgtggctgcctcgtggtggagaagagcagcatgcagagttgcaggtgggatgtcg

SEQ ID NO: 62931 - DNA, 468 bp, Zea Mays
cggccagcggccactagcgagcccagcagctggagacggccagccatgccccgcgaggccgcgatcctatttccatctaactgcattcgtacgtgcgtgggtaacaggaaggagataaccaatggtgggccccacttgcatgcatcacgcctccataatttcccacatgcatgtatttctttttccacacgatccacaatccctacggtcggcacttgcatgcacaaccctcacacaagcgagatctgcaggcatgcaacacaggtggaaaattgctcccacacctgatcccacctccccttgatactcttgtggctaagacccatgtggtccatcgtatggttagctttcgaccaatcaaatcatgccacgtaatgtaaatccgagaaacactagttattcaatatatacgttgtgttgcgagtccgtctcgacttgtttcattcgtagcgacttcgtaataacctc

SEQ ID NO: 62932 - DNA, 852 bp, Zea Mays
cctatataatgagggcaggagccgcgattaggctaaccctaatttctccaccagcaaacgagcagctactcgtctctcgccgtcgcgaagccgccgtcgcgaacctagcagttcggtacacggcgcttcctccctgtacgtgtggatacctcagaggtgctgcatctggagcactagaacgaaccacgcgaggacgtgaaggacagcggcgactgcacgacactgctcgacgcgttcgtctacatcgagacgtcttccactgccctgcgcgtctagtggtaattccatgacctataaccgcagtagttcttggttttatggggtcgaaaattttgttttttgctagcgtagcctccccataatcctacactaatctcagatgattttcatgtgctttttcattctgagagtataccagtatgtcgtcgatgaataccaccacaaactggtcaaggtattccatgaatactttattcatcaagttcataaagtaagttggtgcattagtctgtcaaaaagacatgactaaaaactcacatagtccatatcttgtagtgaaggccgttttaggtatatcttcagtttgtatttcaactgatgatagcctgatcctagatctatctttgagaatactgtagctcctctcatctgttcaaacagatcttcaatccgaggtaacgggtacttgttcttaattgttacttcgttcaagcttctacagtccacacacattcttcttgaaccatctttcttgttcacaaatagaactggagctccccatggtgatgaactggggcgaataaaacctttttctagtaattcttctatttgtttcttcagttcaattaaatc

SEQ ID NO: 62933 - DNA, 809 bp, Zea Mays
cagaaagcaaaggcaggcacatttgcaggtttgctattgctgcgccaagctagaccacacagcacagctgctgcaaaaaagaagaccacaccaggtggggatggggctgtgccctgcatggagaatagatagagcagcaaaacaaaacaattgcatctttttttttctctcccacagaacagaacataccctaccctaccaaacggggcatcaaaagaagaggggggaatattaaagctttggagtgatgataggtactccggaactccggaggggccatcatcccctgtttgcagcgtgtgcccaagctgccctgccctgcctgcctcctccaaagaagcttcaccacctctctgcaacaaaacactaggcatgctagtgaccaaaaggaagtctccaaagtggcaatcaatcggaatcaacttgtgtgccacactaatcaataaataaatatcatggtgtcacctcgacaaggcaacaccaagcgagccattatatcatggtgtcaaacatctatcaagcatctctcacatcatcctttcagtcttaaagcatccatccatcatccatcaaatcctacactatcctatccatctactagctccgtgcattgcatgtcatgcagatgcagtgcacgcatgaggacgacgagggcctgttttgaggcgacaagaatgacaaggggtcattccttactcccctggttgccttgtgggtgtacatcttcttatctttgtggcattcttctgtgggccttcacatgccaacagcacccacccctactctactacccactagagatgcaggat

SEQ ID NO: 62934 - DNA, 512 bp, Zea Mays
atcactaagggataattttctagggccttagatgtgggttttgtgtcttgcggccatactgaccctaatgggccttcctcatcctttttctttcaagatgagatcaaacttagctattctaaatcctcaacttcttcggggggctccttagccctaaagggcatgggtcctggctaactatcagtgtttcgaacctagctccgacaagtaaatttgtgtgtgcattctaggcttcagacagtgtgcatgatgggcgcaagatttatactggtttaggcggaacgtccctatatccaatctttagtggctcgtgctattggcatctttgctaatcaatgctcatagtaggggttacaagcgggctagagagggaggagaagctcccaagtctcttgtgtggaggaggtggacctaaaggctacaaagctggagtcctaactaagccttggcccaacggtggggctccgctctctgggtcttcactcctggtcctcattgatgcgttcttctcg

SEQ ID NO: 62935 - DNA, 566 bp, Zea Mays
acaggaaagtggataagggaattgccctacgtcgtttggagcctaagaacccaacctagccgagctctgcatggaaacactcctttcttcatggtctatgggtcagaggtagtattacccgctgatctcaagtttggggcgccaaggttggtcttcgaaagcatagcagaagtcgaagctactaggctggaggacattgatgtactcgaagaagaacggctaaacgcagtaattcgatcagcacgataccagcagactctgagacgctatcacgacaaggccgtacgacgatgatccttttcagtgggagatctcatcctccgccgaattctaacgggggagggacgacacaagttgtcacccttatgggaaggaccattcatagtagcagaagtcactcggccgggatctatatcgtctcactcaaatggacggcacagaaattgggaactcctggaatatagaacacctcaggaagttttatccctagctgtatttcaaaagctatcgggacgacaatgtactctgtaaaatgggaaatatgtcatcaataaaaaaggcttcaa

SEQ ID NO: 62936 - DNA, 700 bp, Zea Mays
aaccgtgggaggcagagatagaagagtgacccgtcctgtgctgtgcacccataagcttcattacagtaaagacgtggcatctaatcgcttagactttcatttattacacataagtaggagtaaagctatcagcaacggaggacggatggatcgtaaggacgaaggcgatgaacgacatgtcgttgctgaagctgatgaagcgacgccaaagaaaccggagcgcgccaagcgaacccatcatcgtaacgtttaaataagtgggacagagtcggctgtgtagcagtaggtggtcctgggccgcaggcatagcgtatgcttcagtataaatggaaccgtgtatcatgtaccaggaattatcgaagaaaatagaaataacaatccatcgccttcgtctctatccttctccatattctctcttcttccttggtgccgggtatctcattagctcgacgttcatctatggtcgacgctaacaaaagcacacaggagccatcgtgtccacccctcgcttgtcgctatcaacaaaggcagagggggcttgaaatgcgacggccaccgtaccaacgcactattcgcaaggacctcatcacacagccacacacgcgtgctgttgttctctcccagatactatttggtataccacaaggggaaaaaagagtcctttttgtgcgagcactggccgtttgaccctgccgtccgc

SEQ ID NO: 62937 - DNA, 520 bp, Zea Mays
cgacgcttcgggaccaggagcttcgattttctcagttacaatccgctctgttgatttttccttagggtcagcacgctccatctcggtaggcactgagggcctagcttcggtttctgtttgaattgttacaactttgatttctgcctgcttagaatgagcttcaagttgcattttggcagcttcagcaactttccttgtaggagcaggactcaaggtttttgttgtttctaacacaacatccagcacatttgccatccttctcctcttaggagttacggtagaccccttttgtaccttcggtacagttacctctgttggagggctcaaaatctctggcatatttattatttctttaatttctggaccttcagccttaccaaccttcatttcaactaccccgactgtaagcaccttcggcattgcagccggctcttcagtgctctacgcagtcggaacattttcttttgttttggcagttgaagaggccccttcgccaaattcaggtatcacggccggtttg

SEQ ID NO: 62938 - DNA, 724 bp, Zea Mays
tggaaagcctagttattcaaaacttgctaatttcactcttataaattattttatcagccttacctctttgaaatttcaactgagttgactcttctcttgtagatggttcgcactctccaaactacccgcatcaacaccagctatgcccctcagccccggcagatcccggtctacccagtggtagtcgaggaaattccggcggatctccctcctatccgagtggagaatgtagtcaacctggaggacaactcggaggaacagctgccgacgcccaccccgttggcagagtccctggccttcgcagctaggtcatcgatgtcagcaccgtctgcaccagccttccaagcacctgcacctggaggagatgatcccgacaactccgaagacgacgatgacgaggatgacggcgacgaagaaggtggagacgaacacgtccacgaggaagctgactacgcccagcaggacaacttcatggggtttggtcccgttgttgaacattatacatcaatgttcgagacggggcatttccccaacctgctgcaagaagtgctgcacgcgctaggcacctacgtctgccccctgtacgaaacaaggcgagtgagcgagcctccccgggcttgctattacatcactcgcatccacgtcagggtgatggatgtaggggacaggggattcaggactctgtctgctcacgagtccctgacaccactgtccacctacgctg

SEQ ID NO: 62939 - DNA, 666 bp, Zea Mays
agaatcacatcaataccgttggatcctaggaccactaagttgactgagaaatctattccttgaatcttgagattaacatgggggcatgagtgtgtggccttcatgtcacctcccggtgaactaatgtgtaatatcttcttaagagggtacttaggtatgttgtgtttttccacaaatgactcagttataaacgaatgcgatgctccagagtcaaataaaactgatgcaggtatggagttaacaagaaacataccatatactatgtcggcatcctcaggcactgattccgcggtgacgtgattgacccttcctttgctctggttctgcggagtcttgttctgagcagatccacgagcgagggtgttctggtcattcttctgagtattgctcctttggggtgtttgctggttgcgccttgggcagttgttggcatagtggcctaactccccgcacttgaaacatccattgggttggacaggtgcgttgtttctggcctgcgtgttactggcgccaccttgacggttttgtgaactcccaccagacctctggttggtctgggagttgctcctttgctggttctgactctgattatttctctggccttgctgtccagagcgttgcacttgataattgcttccgccttgatttccagagcggaactacgaa

SEQ ID NO: 62940 - DNA, 1129 bp, Zea Mays
tttactgttcaaatttattttttaatgtagcttttgcttgtcctgattaacttgaaattgcaattttggactgtgtgcattgtatgtggctggtgcagtggtgagagctgtttcactaagtcatcaggttacgggttcgaaacagtcaatctgcatttgtgggagaaggttcgccccagtttattccttccctagaccttacttatgtggaagcctccgtcattgcatctgccattttttattgtatttggctttatgcattgactgttgcactgttgtaccatgccatcaaatttatctttgagagcattaccttaggaaaaactaaagaagagcaattttgtggaaaataagatgatgcattgatacctggaactccttgatatttcattgttttgtcatttctattttgttgtgggctattttatcttttctgttgggctcattctatctgtggtagagatgctgtcagcagttaagacaaaaaatgtaccaaggattggactgctttgagcaatacaacacagatcctccaaatggaagtagccaaagttgtttgtttatttgccattgctattgatagaacttacagtgcaaaacaaacgacaattgattggagttgtatgaattgattgtgacttttatggcatatttctgcattatcctgacttgttaaagttctaggttggatacttggaatttatgcagccttcgtgcaaaacaatgtatcagtatataggattatgtagttactgatctttggcaagggcttgaagttagatgtcttaatgactagagctaccttgattttttttcctgaaagacctgccttgatgattttttttgcagctttgcttctagatttgctgtattttagctttgtttctagattttctgtatccagaaaaaaatggtgtagtatcaaattatcaaaatttacacttatgttatgtgatgattgattgggacacctttaagaaatttatgagatcaaaataagcaagatattcaaggtcatttttaattagtcaataaatagttatgatgttacaagcctactcttcatatcttcaggtacattctcaaaccatccttgctccctgtcaggaataaaaagatggattgctat

SEQ ID NO: 62941 - DNA, 538 bp, Zea Mays
cgggctcggagggtgtgcgcgaagggcgcaagatttatactggttcgggcagaacatccctgcatctagtcattggtggctttctctaccggcaccatagatgatcaaactcatagtaggggttacaagcagtcgagagagggaggagagcatcctagatctcttatcgggtggaagtagagcttagaagattagaggtggagtcctagctaactcttggcttggtggggctccgacctcctggtcctcgttggtgctcttcctctttttgtccttgtgggctcgtctccatctgaaggcgtccggtcgtccctcagttcgtccttctattcctcgatcggtcgatccccttgccctaaggcggccctctccctttcataggccaggagaggggtcgaccagcggtggctcctctaggaaggaaccataaagcaagggtaaaatcaagtgttttacccccaggtgaggccatgcatacttgtggggcctagggttgcctaactcgcgtatttatcatggtggatgacgtgggagcggc

SEQ ID NO: 62942 - DNA, 396 bp, Zea Mays
gtgatctgtcgccacaattcgtgcccgcctgggagattcgtgctgcgagaagagtagataacatcggggcggtgtgaaaatatccagtgtggggtgaatcgggtcgctggccggaccggccgtcgtgtcccgccgcggtcaattgcgctggcatcaccggagctcgtcgtttttttggccatgacacgtaacaaccactcctccacatggtaagagtcgtggcaagccaccggtcatcgtcctcagaccagttcccccttgtgcgccacggtgagcatgacacgatgaaatatcctagctggataaccgtgatcttaatcccaaaattcatgctcagttcaatcgggacctataaattgacgatgccctctgctccgcctctttgttaagcatcca

SEQ ID NO: 62943 - DNA, 635 bp, Zea Mays
gtcgttttcttaacatactttttagtgcctcattgctcatatagttggtgcatttgcatgagagctaacaatgctttgtattgctaaaggaaaaacttattcaatagcgtattggatgtggttgaacttgtatactctgaaccatccccggctagtatggtggaccttctagaggtctaactcttgtggttgtagttgttaatgtggctcaagactcgacacctgaagatggtgccaatgtattctttatatagatgagccatgcatggctgttacacagttggagaaaaccaggggaagagatagagatgcagctccaagaggataacaatcctagctatctgataagcacaatatctaataccttctaataccccctcaatctggacgcatggaagcaacgttcagattggtcctaaacaatgaaaacgatgaagctggcaaggcttttgtcatcacattagcaacttgatctttcgttgaaacaatacgaacgtccaactgtctagtagccacacgctcccgaacaaaatgataatccacctcaatgtgtttagatcggcgatgaaaaataggattggcacataaatatgttgcaccaatgtcgttatcacaccacagatgtgctgctcaag

SEQ ID NO: 62944 - DNA, 614 bp, Zea Mays
aattatatctgacgccgaaagattaaaagttggcttgttaaccaccttggcgtgagtacatcccaccttcataaacgcagcagtcgtcctgcgagaagctaccaaggcacagaaatctccatgtccgcttataacttcgtcaagggcgtcaacttcgttttcaatatgttcgaaggccctgggatgtcttcggctgaaggggtgatctctttggcagtagctccaactgagttgaaaattccctttagtcggtttacacaccgggtggcaaaatccgcgcacttgttccgaaggtctttcaaagactcatgcagcttcgtatttttctcagcctcagcttcagcctttgctcgaagttcttttgtttcttgttcgaagcactctgattttttatttaaaattgtttgaacattgtcaagttcctcgcttaatttagtgttttgatattgtgcttccgcgagggagccttcgactgcttgcagcaggaaatctttctactctagagaagcttcaagatcttttatcttattttctaagccttcaattataatttcgtttattctatcttcgttatcctgctgcattttctagaggagcatgctctgcaacaacaa

SEQ ID NO: 62945 - DNA, 417 bp, Zea Mays
aacgctcaccacgacgcctcggaatgccgtgagatcatcaagctcgcgaaacgcgtcaacacgagcagtcgtccaaagacggatccccgccccgtcgtcggcctgataaggagagggtcgacgatggtgaagtggctgtgggagaacgagaactcgggtatcaatcacccgagggggacctcaaggacgtcttcactggggattccaactccggggatgacagcgaccgccgcaagaagttgtacgtcatgtacggtgggagctgggaacttacctcccgcaggaacgtcaagtccctacgccgtgaggtcctgtcggcaactccaggggtcccgaaggctgccccacatcaacgatggaggagcaccaccatctccttcggggcacccgactgccccgacaacatggcaggggctg

SEQ ID NO: 62946 - DNA, 346 bp, Zea Mays
caagatccctgattgagccttcacatctagcatttcccatcgcttcagaatggcccaaacaacattagatcaggaactcaattctctctaaactgtcacagaaaaagaaatctctcgtacaaattaatgcctaaggaacaaaggaaataaattgagattgaggtggtgctgttcatcggcacttagtccacgaaaagtgggggagtgcgatcttcgtagctgcacgttctcggagcatagctgagcgagaagggtggtcggtgtgcgacgaattgcgggccggagttggagaccgccgcccgatccctaattgacgtggtcaggtcgcggtgagcacaggtttttc

SEQ ID NO: 62947 - DNA, 487 bp, Zea Mays
agacttttggatataaggcacatagcaagtgctatatagacgaaggaccgatgacgtgatcagatagaagatgaaaatgagccggtaccacaattatctttcttctaattattaaaaccacatgtaccaaccaatgatatgctaactctgggaacaattaaaattttttctacccatagtccataggcatagctgaggcagagcagagagcaagagtccaaaatattagcgacagaaagccatcgaggctcgagcagctactgctatgaaaacagcaaaatgcaaatcaaatgccctacgtacatggccaaagtgaactgaaagaaccaaacaatggttggctcctgtagtttgaaagtgaccactcaaaatttgacggtccaggtcatgcacgaactgactgctgcacttgctgctatcttgccaccgactgctggtgctcgttcagctcaaacagagaggcgcatgcaaagctactgcaccatcg

SEQ ID NO: 62948 - DNA, 461 bp, Zea Mays
atatcaaacaaaatgaagttttagttggcatataattgatcataaagtaaaattattcaaatagaagtgacaagagacaaccaggtcgaggcaacatgcagacgtcaggcaacgggaggtgtcgtggagccgctagacaggcaagcgacaggtggcaccatgggcccaaagaacaactgagcgagcgacaggcgacatcacgactgacgatagttagatctcggttgtgttgtatgctacgctacgatgattgggcaagagtttgagtgggcaataggtgtgtaggcatgcaacgcgcctagaacgatgatgtgcagacgtgtggggcgattgggcgtgcagcgagtgggcaatagctgttgttgcggcgttggcggcggaggagtgaagcgaagctgacagcgatgtcctgaacaagcaagaagaaccatgcccccgtgagcccaacatgaacggacaac

SEQ ID NO: 62949 - DNA, 795 bp, Zea Mays
ctcatcccccataaaaataagataacaagtggcaagagtcaacaaaatataaaattgaaggtaaagaaaatggcattatgtactgaagggcttctagatgtgtgttttacatgactgtatctaatcatgggacagatgtgtgaataaatcacatttgggactgaattcggagctagcacattttgcttcctacatttgtgaatcaatatctgtaatcgtgatgaattgaacaactagctagtccttgcaaactaaacccactatcattaatttcaggtttcagatttgacttgggctttggaaaataggcagggatgcaagggacaggtggtagtgggtgttctctgttcagttttttcttgcccagcagaacataatgcaaaaaaaatttaaaattattttaaacactgctacagttctatcgaagcactgctctgttgtcctatcagttacaattgcggccacaattacgattcatgtcagaaaaatggcacacacaggatcacacaactaattttggtatatttaatagcatacagtaacgtggtgccactacacattattctaaaacctgtcattatcgacttgaaagttacaagtattatccttgccccaaggtccttatagttctgttattgaactaattggtattagttgtgcacttgtgttatctatggtattatcattttgttatcagctacctgcctgtcgcttttactaaatctctaaacattttattatcagcattacttttgtagacagtgagaaccttgactgatgggtcgctcgacgtgg

SEQ ID NO: 62950 - DNA, 527 bp, Zea Mays
gcagggactgcggcaacgcgcgacagctggggattggttggctgccgcaatgccgctggaggaggagtggaggactgcccgaaggacggacgggaatgaatgaatgtcgtaggatggggggttttttttaaggaatgtcatggaatggaatgtgtggatccttaaggtcacagctgcacatatgctgtcaaacagccgaacagttgagtttccactgtgatcgtgtacaaatacagtatcatcacatacgtgtattcgtgccactacaaggtagaactgattgtttgcctaggccaaggtggagcaatgtcgttaagcatgaattcggatccactcgctccgaatatatctagatcgttatatctagctttttagtttggaacacatagtcacatagatatgtagataataagtaggaggacccaatataatatgtactatctattaaattaataatgtaggccacgacactagacgcactaccatccctcgctccctctccgcgcacacgcatgcgtccgcgcctg

SEQ ID NO: 62951 - DNA, 480 bp, Zea Mays
ttcatccttaagcacgtcaatgaacaatggtgattggttgaacatgttcatgtcattgtttgatcccgccacaaaaaagcatgtaagatccacaagttatatgaggcaactatctcaagcatgatggctagggattcgatgtcttgtattgcgaattgtcctcttcatctaataggatagtccctccactttcagcgtatgcaatctatactccctatcttaccaagaaatcttctttcctcccccttagctaataaatgcctaaggctatcaatagtgggacgacacatgtgctacacctaaaacatgcaataacacctctacataatagtttaagatattctaaggcaaaacttttcccattttgatatattcatcgatggagtcagcaacactactgtacgcaagtatatgtagggcagttgtgcacttctggtgcgggagaaaccactgcggttgacagcatcagttcgaaaagtg

SEQ ID NO: 62952 - DNA, 398 bp, Zea Mays
ccgtagtgtagtgcacatgctcgcaacatgtcttccagaatctgattcaccctttctgtctgaccatctgtttggggatggtatgctgagcttcggattacttgggtcccaagtgattcttgcagcttctcccaaaagcgtgccacaaacagtgctcctctgtcagatataatggtctttggaataccatgcaatcgcactatttgatcaacataaatttctacgtacttctctgtcttatgggtggtgtgcactggcaagaaatgagcggtcttggtcaacatgtccacaataacccaaatggaatcatggtgcctagaggtattgggtaatcctatgataaaatccatacaaatgtcctcccatttccaagatggtatgggaaggggttgcaaagg

SEQ ID NO: 62953 - DNA, 475 bp, Zea Mays
caaaaattggaggacaaattcgaaggattggagttccatcacgtggaaagagaccgcaacgcggcaacagacgcgttgtcgaagctaggatccagtcaggcccaggctccacccgggatcttcgtccaagaaatatcacaaccaagtatcctctcagatcagatggagagtgcaacaccttgagccaaccagagtcggaccccaatgactggagagagcctatcatcaggtacataaaaaatgaagaacaaccggatgacaaggcagcagcggaacgcatcgcaaggcagtcagtccactacaccctcatagggggcatactgtacagaagaggtgcggcaggagtcctcatgaagtgcattcactcggctattgggaagcaactgttagatgaaattcatgtcgggcagtgcggagtacatgcagcgtccacaactctggccgggaaggctttcagatctggtttctattggcc

SEQ ID NO: 62954 - DNA, 412 bp, Zea Mays
ggtttcgcactgttctacaaagtagtgtttaaatataggtataaggatgagtacgctgctggagataagtcacgtccgaattatatagagggagtaggactataggacccgtttcgacagagctgcggctccaaaaatcactccatttatagcttgtttattttaaaattctcagactgcacagacggatttagagctgaagtcatgaactataaatagatgagtagtgagtacaatttatatagatggttcttaaactttgtatgtgatatgatacgaggtcttcaaactcttgaggtacaacattttttagttccttaaatttgtccttgtaatctaagacaagctcttaaagcacaacgttatggttcattatctagttaggtccaaacggatcctgaccaacaatgtt

SEQ ID NO: 62955 - DNA, 961 bp, Zea Mays
cgttgttgggctctctctcgccaacttgggcatcagtgttgctattccacgggtcattggcaatctctcgcacctccggggcctcgacgtgtccaacaacacaatctctggccagataccgacgtccgtcggcaacctcacgcgactggagcgcctcttcatgaacaacaacgacatctcgggcaccatctcttcaatcttcagcaacctcttaccactccagaggctccggaaactagacctctcctacaatagcatctccggtgccattccgctggacatcggcagatttgggcaactccaaagctttaacatcacctacaacaacatctccggcgccgtccctccgtccatcggcaacctgactctccttgagtacctctacgtgcaaaccaacttcatctctggagaaatatctctggccatctgcaacctaacaagcctcgtggagcttgaaatgtccggcaaccacctcacggggcagattccagccgagctctccaacctccgcaacattcaggcgattcatctcggcaccaacaatttccacggggggataccaccttccctgtccgagctgacgggcttgttctatctcggactcgagcaaaacaacctgtccgggaccatcccaccagctatcttcctgaacctcacagggttgcatctcttcgacgtcggcagtaacgatgtttctggcgagatccccggcgccatctcgagcaccggctgcgcgttcttcgtcatcaacctctactccaacaagctccatgggacgcttccacggtggatcgccaactgcaccgatcttatgacgctagatgtagagagcaacttgctggacgacgagctgcctacgagtatcatctcgggcaagaaggggttcaagttcctgcatttgtctaacaaccgtttccagagccatgacggcaacagcaacctggagccattcttcgtcgcg

SEQ ID NO: 62956 - DNA, 329 bp, Zea Mays
cgtatgtgtgtatgctgtggtgtattatggtagtggtggcgtaagatatttgattgaggtgtgcgggtatatgccgtaatatggttatactcgcgacgaggaaatatgtatgtattgtgtaacacgacgtttaggttgctattgtataatcgtgtgaaggatgcgcatgatggtcatgtgactaaagggtggtgtagtggcgaagcgagaagtaagtttagtatttttaaacggttagttgatagcatatatttgtgtcgtcatgatttttgttttatggcggatcgatgtttcgctttgtcaaatattgcattccattcccattggat

SEQ ID NO: 62957 - DNA, 325 bp, Zea Mays
gttatgacgtggagagtggggatgaaaattctgaggatcggccctggcggccaagtcatactatctttggaaagtcgactatcaaacagagtcatattgacgccatgagggggagatattttcgtgacatgtctattgtcagagttggaggagacagcactgccccagtccctgaggaaaacaaagttgttatttatcgaagcttcctgaaagcaggtctccggttcccactgagcaaatttgtggttgaggtattgaagatttttcagatttttcttcatcagattaccccgaagctataatcagaatggggatgtttgtctgg

SEQ ID NO: 62958 - DNA, 819 bp, Zea Mays
ccacggcgcaagaaacccgagactcaacactacagctgtatggacggcgggttgaatccctaattaccagggggctcatatgtgaaaagaaccagcgaagaggtatgcgcggatgacgaccgtccgatcaaaaatggacagccacgattagatgcacggtggatataaccctgattcccgagtcaccgtcggatccgagatcgacgcgaggaggtcgtcgacccaagatagcgtgtgggccatttgattgggatctacgacccagatcttattaacgcgaaccggtatcctgattctaatctgagccgtacattcacaaatcagtggccaggtcgcaccctcctcttcccggttgaacgccggcgacaaccagtgaagccacggtggcgcgccatggctgggagaccccccgatggtatatgatgcgccattaaccgatacgctaggtgccaaataaagctaggacgacggcggatccagggagggggttggtactcacaaatggcttgaagacgaggctgtccacgaagcggggcggcttcacggcggacggtaaaggccgacgagcaattccagattgagcagagttcaatccgctcaggcgaagtcatgatccaatcccacgcgacttggtgcggtccctaaacccgatatcgaggtgctagcgctggtgaattgcggatccgcaccggcagccacatcacccttccgctgtagcgccgcgcacagagcctacacctcgacaggggtcgagagaaaggggcgtacaaggtcctgcacttatactccagtaccgcgagggtgggggaaggctccacg

SEQ ID NO: 62959 - DNA, 586 bp, Zea Mays
cggcattcgccgtgtcatcaccaaggtctggagcagcggagtcagcctccagctccaagccagataaaacgccaaagttttctttcctcctcttcatttcggtggacatggtcagggagcttacccgacgcgtccgcttgcgacgagcgctaccattgctacaaattcttttctccccatcgcacagatgtccgagaacagcatccgctgacttagctcgagcagacccagataactctccagccagtgcacttagaactgcattcatctcagcatcatcagcaataggtttcatatggaagtgggtctgtctctcctccttaggaaaacccctatgcgcagtgatgagggcctcaatctcattcgaagaaggtcgcactctatggcctgggctcccgtcttgaacaggtggattggacacgaactctgaaaagggcctatgcaataacgaaatgacacatgaagagcactacaagtgacaatattgaaactcgtacacattagcacttaccattgggggaagattccaagcagagtaggaagggggagcaccgacgttcgaaattttactcctcggcatcacatc

SEQ ID NO: 62960 - DNA, 832 bp, Zea Mays
ctttttgccctttggcacaacagagatggccgaagcggcagttttccttttctttccctgctttcgcgagggatagcaatagttagggtatacaaaaccaatgacgtcaaaaactctattcaatcttttcttgcctcggcgttcgaaggcctaagtcattgcatcatcttcggcccttgtgtaggccccaagcaattcatcattggttacctcaatactgctcaaccactcatcgtttggctcatcaaactcggctctatatctgaaggtatattttaaatagaccaggccgccctgactagacccggcagcagcctccttcggcatctcccattcactcacaagcggccatactctgtaggcaaggtgttcttgaaccaggtctcttgtgccaataaaagtacacacagtgttgaaacttctctggcatgcttcaatatcgttcccaagagcggtggctggcctcctgatgccgaagcgagaccaaatggggcgttgaataattccttttatatcttccctctcaactaaattactcttaacataaaaccattcctctatccaagccccgggccacctttttcagcatgttagaaccgagtaacttacatcagggcgaggcacgaagccataacaaccaaagttgttgtgatactgctccttgccagtagccttcgtctcatacagcagctcgtgcatgttgcaaaagcaatttgcgcaaggctctagcccttggcttctcacggcccaactgaaaacccccatcctgataatggcttcatgggtaatttgatgacgaaaaatttcgaacgtcttcaacacttcaaccagg

SEQ ID NO: 62961 - DNA, 589 bp, Zea Mays
atttgacgcaattgggttcgtctaccccgattaccattatccagtgcggggtcaaaaaagaaagaatatttcctctgcaaaggagactacttcagccgctcctagtgagccggcgccgaagaggaaaagggtaaaggttctcacacaccggccacattatattgaactggccacagtgcctgagttcgccggtgagacctcttcggccaccgaagctaaagaatcaactctgctgccagaaatcgaagagttggccgaagagccagcaacagaaaagacggaagaaccaaggactgaggaagcaaaaacatcagaagttttaagtccttcagcaaagattgagacaggaaaaagccagaagggtccaatagtgaccccaaaaagaaaaaggacagttaatgtgttagatgttttggagacaattaaatcttcaagcataactccaaagaaaactgttgaactttctgaagtgtctactgaagcctttgttgctaaagcttcgaagcaacaacttgaagctgaagctgggccctcagagcccaccaaggaacaacctttggaaaccgaagaaacaaaagttacaaaggca

SEQ ID NO: 62962 - DNA, 535 bp, Zea Mays
gcgtccaaaacactcgccattctcctacctttcctaggagttattgctgcagcagttgttaacttcgacaaccccgtcggtgttgggggactccatagctttggatacttctctgtctttgaactccttgcctctgttttttctactggagcgacagtagcttcaacggtcacaactggaattatctccaaagccaagggggtggctttggcatattcaacaatttctatcttcactgcggcaggcgttgcagcagtcttctctaaagagtgtagcttcagcctacaagtcaaaaccttagctctctttggcttggatacaacggaagaggacgtagttgccattttcctttttgacccttgttttcgagcgggaaaacagtagtcaagataaataaatccaatcacatcaaaaactctgttcagtcttcttttgcctcgagcaccaaaggcagtggtcatggcttcgtcctctaccttcgtataagccctagcagcccaccactggttgcctcaatggcttcaagccaatcatc

SEQ ID NO: 62963 - DNA, 373 bp, Zea Mays
ccttcatgggtttacctgagagggcattagatttgttggaactcatacatactgatgtgtgcggaccaatgagtacgacagctaggggaggattccaatacttcataaccttcactgatgattttagtagatatgggtatgtctacttaatgaaacacaagtctgaatctttagaagagttcaaagagttttagaatgaagtggaaaatcagcgtggcaagaaaattaaagcactgcgatctgatcgtggaggtgaatatttgagccatgagtttagcaatcatctaaagagttgtggaattgttccgcagcttacgccgcctggaacgcctcagaggaatggcgtgtctgaacgacgtaatcagactttatt

SEQ ID NO: 62964 - DNA, 542 bp, Zea Mays
gttgcaagccatataaagaatttgcatcttgttggtgcccaacatttatatgttctttgccagggttcaactccaaccgagcctttgaaataccttctataagctaacccagagggaaaaatcctaaaactgtaggtgtccaagtccaaatgtagtgatctagcactcccagcatgagttggatgtctagcagaaatcccatagcatgagaaacacaatcagggcttgcacatgaagttctcccctaatgtcttgatccactgcctattcaacaatgcgacttttactgtcttggttttaatagccctctttggaattagcgaggagagctctggagccatctaggctaaggaggtcccatctagccatttgttagtccagaacaaagtggtttcttcatttctgactgaagtcacaactggaattccaaacaaagagagtattgaatgatagtcaataaaaattcttctcacaacttgttgaagcatatttccgttgatagttactcatcgtcacccctcctttggtctcctatgtagtca

SEQ ID NO: 62965 - DNA, 378 bp, Zea Mays
gcccttgttgcccgtgtgctagggtactggccgcttcgatgctcacttcataattgcccctcgcgttgggtttcgggaggggtaacaaacccttcatgggctgaccttcatactccaagttttaccggattgatcgggtcacctcgtagtcatgggttggcgagggtccactagttccttccctacatgtgggagataatatcgagtattgaaaagatgggtcgagtcatcttacccggttttgccttggcagtagttgggcctcggcgctgcttcctgcgtcgtgtgggcattgctcgaccctttcatcgggctcgtgggttccatggcccccagggcatgtgcctcatccggcccagctctgctcatcgaaaccgg

SEQ ID NO: 62966 - DNA, 557 bp, Zea Mays
attaacatggattgcgaaagagctcaccacaactaaaccaaactcccatgaaaaaacccctaaatagaaaattgacaatcaatagcgcaaatgttcattttgtttctacctctcactataaaagcaacaataacaatgaaatattgtaaaatcagctaaactttatgatctacaactttcgtattcaaaggataaaatattttttttcatctaccatttttaatttgacttgtaaggcgacatacatgatctgccaccagaacctgacgaaacatgacacataaattcaaaatatcataactccctgcagctaacaaaattttgcaaatataaactcattgaaaagattataacattccctaaaacttttattataatgaatgtctcagaattggtttccaaaccgataaaacaatgcaactcttttgttgcaaactaataggatagaaacaatggacaactaaaattcaaaaacctataactcctgctacactcaacttaaactacaacgaacatgcattggaaaagtttgaaaattatccatgacttttgcaata

SEQ ID NO: 62967 - DNA, 655 bp, Zea Mays
cgagtcaggtgcatcgtctcgtgtgttaagcctgcagcagcgttttgggtgacccatgtatgccttggctcgtcccgaatgctgtagggacttgtgaagtggacactgatgaaagaacgactgccagccgttgccaacagatgcatgcagtgatgcatcatggaatgcccctgctcaatgtcaatggggctggaagtggaaactgggaaaaactgacgctgacgggagttagatgcttgattgaagcacatcatggtcatggtaatgtcacgctggaagtggaaggaggcggttaacgcatcattttcatgttcgttttcactttgcatgtggaatccggtgaagcaagtacgtacgagtgctaacttacctactattctcaacactgaaatgttgcatggaatttaacctgttcatgctttgggtggccatcaaatgttagagacgtgctggagtccgccgcttttgcaataagttcttcgatgcgaaatttggtgccgtccaagccttcaaggtgcaacattcttcatcttacgcagaccgacattcccacactttatgttggaagatactgtgaggaaggcttcaagagttttcaactttcaagcagcctatttctgtatccaacaaatcatagacaccagggaagaaaccc

SEQ ID NO: 62968 - DNA, 663 bp, Zea Mays
ggaaaaggcactggaaggacctgcctttgtcaaagaggctgaggagaaagttgccctgatccgcagaagattacttgaagctcagagtcggcagaagagttatgcggacaacaggcggagagaactcagatttgaggaaggagacttcgtctacctcaaggtctccccgatgcgtggtgtcagaaggttccaagtgaaaggaaagctagcaccgcgattcgtcggccctatcccatcattagcaaagtgggacccgcaacataccgtcttgaactaccagaatccatgtctgatatccacaatgtgtttcacgtatcccagcttcgcaaatgcctgcaagcaccagaaagtcacatagaagaagaggcaatacagattcagaaagatcttcagtaccgtgagaagccagtaaagattcttgactcagcagtccggaagacccgcaactcagaagtgaaactctgtaaagttcagtggagcagagaaggagaagaggaagctacatgggagagtgaggactctttgaggaaggaatacccttatcttttctcaaatctagtctaaatctcaagggcgagattcctttaagtggggtaggtttgtaacatcccaaaatctcaacccaaggtttggaaccctaatctcctaacccccccttatttc

SEQ ID NO: 62969 - DNA, 1564 bp, Zea Mays
cccagaggcacatttccctttcaggtatgtctgcagaagctgtggtcaccgatttcgttttcaagaacattcagccattaaaggacagagcatacccggcttatctgtatcgaggcctcgctgattcgacccgggttaccaacagaagaatttctgcagtggatttggttagccggctcgagatgatactcagaggcaaggtgtcgaacatcggtgctcctgttgcatactcggcctagaatctgcctccttcctaggcttttaccaattttgtgtcgaatcctcctgctggtgatagcgatttgggccttagagtgcgaccctctcccgaagaggttagtgctttggttgcctcacttggtgaaatccctgatgacgagaggcatgttcatttcgaggtacctttgaatccaagtgatgctgagataagtgccatgctggatatgttggctgaagattcctctgatgcagtccctgctgaaacactggatgcagcacccatcctagaggctggcaaagctttggatattcagaggtctgatagtgttcacccgaagcgtcctcgccgagccaatcaaccaacttctcctgctaaggggaagaaaaagaagaagagacgtcttcgccgggtgtcaagcttggatcagggtgctggtccttctgctcctgctgctgaggaagtgcccgtgccagtttttgctgaagctgaccccaatgggtgtgacccgactgatgctgaacccaatgtgtgtgacctagatgatgctgaccccgatcggtgtgacccggctgatgttgaccccgatgggtgtgacccgactgaagctgaccccaatgggtgtaccgtccgcattgctgatgaagatgaggatgaaatccctctagttcggaagaacagccgacgctacatagtcagcggggaaagtagtagtgttccttctccagctttggctgccctcattggtctgcaagaattgtctctggcaaaatttgatcagactcttgaagacatggtcccagaagatctgttgtcggagccgacagatggtggaatgatggatatttgtgctgatgtgcctgatgccgggctggagttatctcgggcagcgtcccatgcctcatcgaccttagagtgcagtcttaagggtcaggaggctggtctgaattgttttgctcccatggaagtgggtgaaggtccttcagtcttagaggtggctgttacggagagctcggccctcaaggatggcgctagcgcttacccagcccccaagggtgttgccggggatgacccggctcggatgggtggcgcgagctatgacccagcctgcaagggtgtccgagtcggttctccctctcacacttccgtggacgttcacgtagggtcttctcctctgcattctggttgcatggcagcagctcaagcttcgggtcaggaagtcgccttagaggccagcactcctgatgacagagttttgacctctactgatgatactgacttggtccccactgatgcattgtgggttgttccggttggtgatccttcatcgagccatcaattaacttc

SEQ ID NO: 62970 - DNA, 552 bp, Zea Mays
aaccgctgctgactatactgattttgtggcggcctcaaccatagtgcctgccgatgataatttgtttggttctatgtctgagtgttttgagtccgatggtgaatctgggagttcgtttccttggacggaggagtcctcggatgaaggcttggattattttgttgcattggatgtggctgcggtggagacttcgccgcgtgtggagggtgctgaggatcttcctggtgcgagtactgggtgtaggcggtgaagggtggtgggaaaacatagtgtgggtgaattttcgtgaagtggtaggcgtcgtcgtatggggatggagcgtggccatctccgagtagaccggattggtaaacgagaattgttgtcttcgccgattggggcgggcataggcgagggggatcttcggaagctttttgagggtgaggaattgaggataatgttgtttaattatagggagatgggtatcatcccgaaggttgagccgatgtaatacgtgatgccctcgccgtgtgtatgtaattgtaatttgtatggtgatgcggcctgtcggcc

SEQ ID NO: 62971 - DNA, 687 bp, Zea Mays
ggatcaaatgttggggaagaagtcttaataccaaggattgccctcaatactacagatgtgaagtggcccttcacacttcagcgacgccaatttccagtacgtctgtgttatgcaatgacgataaataaaagtcaggggcaaacgctttcaagagttggcctttacctcaagagacctgtctttacacatggctagctttatgtggttgtctcccgttcaacgtctagaaatggacttataatcctgattgaaaatgaagatgccacattcagctcacagactcgaaatgttgtttacaaggaagtccttgctgccgctaatgcggccgccacttaggccttttcgtgctcggttgctgtagcgccacgtatggtgtttgtaaataaataatgtcgtcaagtgcctacgcgcttgtttcttatgcctttgtttctacgttcgcagctgcttatgtgtgctatgtataggttggtacgatagtcgtgttttctttttgtgcttcgcacatgctatttcatgcataggttctgatgtccttgctcttatgttctttcttcctgttttagcttgcagatgggagacgtgttgatctcggagctccagcatgggaacacttccgtgaccatatgcgcttgtgtttctcggttatgggatttctgtgatcctcagaatgaagcaaagttgctc

SEQ ID NO: 62972 - DNA, 392 bp, Zea Mays
agctagaagttcttgaaatgaaaaaaaagaatatggtttcctttgaagaatcattatacaatacggttcagagtttacatgtcagttatcataccgatgtaaaatagagccttgttcgaacacgtcgctcaggttcaaccacattagcatatctgcaataaaattacttgatatgttttacaactaaaaaatggaattgcttagtaacttactttggatccaagcagtattttgtttcctcgtgggagtcatctagatcaatgcccttcttgttagagatagatctttcaacacattcatgcttaacctcctcatagtaactcctctccttccgttttgcagatgacactgtcattatatcattatatatgtcagattcagcagcagcagca

SEQ ID NO: 62973 - DNA, 562 bp, Zea Mays
ttgtgctgtacactctaaccctcaaaagtggaagtcttggctatcattagctgaattgtggtataacacctctttccattcctcattgggttgttcacctttctaggccctttaaggctatgaagcatctgttcttggaatactagtagtcacagggcagaaagatagggaggctgcttagtttatacaacacaaaattgagcatagtgacatgttaagggaggctttggcttgagctcagcagagatataaacattttgctgataagaaaaggattcctagggagtttcaggtaggggagtaagtgttgctcaagcttcagccttatgctcaacactctgtggtcaaccgtccttaccccaaattagccttcaaatattttgggccttacaaagtcattgagaaggttggtccagctgcttatcgtttggatctaccaccggaagctcagattcaccctgtttttcatgtctctcaactcaatccgtttgtgcccaagtacactccggtctttgatacacttcctcagccactggttttggacaaggcaactctggctccg

SEQ ID NO: 62974 - DNA, 1489 bp, Zea Mays
gattaatgtagtgacatgaatactacatatttgtccttcacatgaagggttagtctcaacatccagcgagactcgcaacaacaagttgcttcattgttacaattctgcaaacttattgttattattaccaaatgcacagtcaatcattaatatttagactgatatacgcaacactattttatgcataagggtccctcagaggctcatgcacaccattcgtcgtttggagttagtagttgacttcagatcaacaactaaaatgaccatcagggtctagcgctcacaaggacattcactagttgcattgtgctttcaagcacataggagaaaatgtgcgtatataatggtggtaaagtgcacggcatcaggccaatgctgccaagcaaagatttttatatgcagagatgtatagtccagctcgttttattattgcccatggtttacccaattactcataccgatatgaaattgggtatcaatttatgcaacatttttaggtattacaattttgagagagcactaataacaatagtcaattatttgtgatgctgccagcagggcaaacatttctcctcatattatataccaacttgttctataaagcattatttcgatctcttcattgttcagcaaaaagagaagctttggaatagaacagacaaggccaataattcatttttatctgggaaaaatcaccatataactatcttttaatgaaacaaatgatgataactgcttggcatgaacgaaacaagactggtatccgcctaggatccgtcttcaacaacagatagtactcctctcatacgaagaaatcatcaggggtagagaggatacaacaggtctctacaagatcttcatatttccatcacgaattatcatcactagtagtctagtggtcaagacatatggctcttctggctccgaggaccaaggacatgttaatgtctaatttagcttcaagctctgtggtgatgtgggatttcatagttatttgtctactcttctcacttctggtagatcggaggtagataatggtaagcatgccaaagggtggaattcagtgtagttcggctacataaaccccatgtatgtgtccatttaggaccgacctttaccatttagcttatagtgtataccgtaccagtcaaaggactattccaagtcaattcaacgactataagtatttacaattctgagagatgtatgcaaagcatagaggtcctagataggatgagtaaagtggttcgacgggaacacacaatggtttttcacacaaacattgtgaaaaaaattctcagaactatctttcgatgtactcgcaacttcgtgttgctaaggtactagccatttatctcaaagttcgcttcatgccgttcagcgacaaatagcaatgtgccaacatctggttgagcaatgtatgactgagatttattcatctgacaaggtcttattgcttactaataaaatcccaatttgtgatgttttc

SEQ ID NO: 62975 - DNA, 481 bp, Zea Mays
gcagctagcccgcagggccttccatgtttctgagaccgagattaatgtctgacttgttgtggtgaaatgtctgagtagttgatgtcgttctgagctttgttatctgagcattttgtatttctgtggaaactatagaaaatgcaactgtctcactacactgctatgcatgaatttgatgttgttcgatccaaacagatgcctaatgtggtcagcacaatgtttaagtttgtaagatggatggctagttggctagcagctgggtatgtcctttctcttccctttcttctgcacgcaagcacccaaaccctaatgtaagattcagatttgatataattacacttgtataatgcctaaattcgttttttgcaataattatccaatgtacatgtttacacccatgtagtgtactgggttcgtcctgcacgcttaagatcgatcttggttgacgataggacttgttgtccaggtgcttatgtctctc

SEQ ID NO: 62976 - DNA, 742 bp, Zea Mays
cttgcaaccagctgggagatcagttatctcccaagttccattcgagatgattgaatccatctcgctacggacagcctccctctagtactctgcatccggagatgtatatgcctctgtaagggagcgtggttcttcatccactagataaataatataatcatcacccaatgacttttcagtcctttgtctcttactcctccttaactccaaatatggagtctggtcatggacactcgagggcagagaatatgcctgagatggaccatctggagctactacttccttatcccgcataggtaagatgctctcaaagaatgtcacatcacgagattccattatgacatttacagcgacttcgctcgtctcggaatggaccactagaaatctataagctgcattgttatgtgcataacccaggaagacacagtctacggtcttagggcctagctttctcttcttcggcaacgggacattcacctttgcaaggcagccccaagtccgaagatgcgaaagatctagcttccttcttttaaatccttcatagggtgtggcctcacggttgcgaggcggtaccctgttcaggacatagcataccgtgagtactgcctcgccccaccagatgtcaggcatccccgaactttgcaacaaagcattagctaagtcacacatcgttcggttctccctttcagctaccccatttgactgaggtgaatatggagcggtggtttcatgaatgattcca

SEQ ID NO: 62977 - DNA, 304 bp, Zea Mays
gtagattagagccataaggaccagaatgaattggcgggacaacagggctgagtagttaatttaaaaattacatttgttctttcgtagtaaatataaagttgttaatggttgtgccataagaaaacagtatttcagtaccggcaacacagttcagtatctgcagcaaagaatgatactgaaaggaagtagagtagttcaagaaccatctcttcagatcaatctgcataaggtgctgaacctgagtccggggtcttccattgcgacacttaagaggacaaatcttgaaccctccacctgaaatttt

SEQ ID NO: 62978 - DNA, 280 bp, Zea Mays
ctgagccacagtagtactgatgaaagagtgtgagctccctgagtccaacagaactaaaacatccaagccagatatatgtcccacaaatttcatcgtacggggaacctccagaccagtaaccgctgctttcgacaggtgcaatacattaagttctgtttccccatcagctgtatcttccactgaatcttcctctagcagttgcaccatcttccacatctcctcaactaagtgcaattgaaccaagtcagcacacttgtgacctcgtgcaaatggtgcccca

SEQ ID NO: 62979 - DNA, 613 bp, Zea Mays
cggacgagttttgatcaaagatcacaagttgcttttcttgttcagaagcctcgatcaaaccgtcgacagatgactggtattgatcaaacaatggtcatggaaccagttttggagaaggaacaagaagaacttgccctctgtcttatggatctgtcccaacgcactgcatcatcatgcatgccagccgacagtgaccaaatcaatggatgcgatcgacgaaagcaagaagattgatccgcataacatagcagatggtattggtactagtaatataatgacataccatgatctagcttctattatcaataaatttatcaacttttccctatactatggcttcacctcccataaatttatgggaaaattgtatgacgagatggtatctgcggacccatcattgtttatgattttattgtgaacacaccaagctctccaaagtgctaacaggacctgcaccttgtgttttgccgcagtggtctagaaaaagtagtaaccagtccggtcctgagactgttcctcgtccggcaaatgccacaccgccctcatacgctgccttagctccatcgccctaggacagctaacagttgcatgaaaccttgtctccctctccatc

SEQ ID NO: 62980 - DNA, 664 bp, Zea Mays
tggcgggttgattactacatagtactgggactctagcaatttgagcatggctgaaggggtacccttgattttgggctgctcgatcaggttacaacggaagatatcagatcgcgactcaatgaatcatacgctcatcgtcgcccctaggatcagggttaacgctctagattttaaaatgacctaggctagtctctcccgtctaataaggatctaaccgcccagatcaatccgctgcccatacaatccagaccgcttatctacaccaccccctaactcgacgaccgaacccggcggcagcgccgccctgcccagacggtggagcatgccgacgagacaccgatcggccaccctagaacaccaaagccaaattggacggagctatcacgacgagaacggatggagaagataataggcagatccttacctcagttcgagcagtagagctcacaaaccatggtgaagggcagcttggcggcagcgacgaacgatgatgagcaattaaggcgctgttgaggccttccacgctcaatcacacccttgagcacaacccccggggtacggcaaacaccctagtcaagcttggaggtcccggcggtgatcgaacctaagctaccaccatggcggacctcaccctctcctctctcatgttggctctgataaggcg

SEQ ID NO: 62981 - DNA, 611 bp, Zea Mays
tactctaaaagcctaagctcaagtggagaaaatcattttcaatttcaaagatatggaacaaggaaggatgtttcagtggagcgtacatgtagcactagtactcgactatagactgcagtacacgtcttcagtgctgagctcatcactatcagtccccgtccgggggccgtcggctgagctcaacggctttctcctgtgctgcgtgcgcatcgtgcggcggccgctgtgggcgcagaccccgacgaaacggcagaaaatttgaaattcctctcgctcctcgccgctgcacgcctgcaccatgccgcatctcctgtcatgttgtgtcatgtgtgcaccacgaagcgcaaaactccaatccacgcatccggaagctctacccctcaaacaccaccgccgcatcggttcgccgttagccggtcacctcgcctctctcctcccccaccgcgtccgaatcccatggggctctgtttcagcaagaagcagcaagcgaagcgccgagacgagcagccgtccagtgacgccaagaagagcagccgccggaaatccggcagcgacaccgtgcttgtggccgatgccaaaaaggcgcctcaggcaaaggcgccggcgccgcc

SEQ ID NO: 62982 - DNA, 427 bp, Zea Mays
caccactaataagtttttatcctaaatattcattaacactttcatagatcatcgttgcctcttagtcatgtcattgacacgctcaacgacattttccagaatcactgtttctggcatatacaaaattgattaacattagccgctacactgcacctgctctccgatatccagctcacattttacgtggaagcttggacagttaatcttcttctgcgttcaggttcagctcttcactctgcatgatgccgtgaactcgattcatgattccttctcattcacctttgatcttgctgctgattcttagcaggacaaaaggtgaagctactgatgcagctttggcccttgattttgatgttcaggaggaactcagccactcaggtgacccagctgcacccaggcgtgtgatcagcactcttctcgttcccag

SEQ ID NO: 62983 - DNA, 1274 bp, Zea Mays
gtttttcaaccatttcatcaattatttcttccatttaggtttaagactgaaaggagcacgtgacttcttctagttctctcctatctccagagttggtcgtctacaaattaaggccaagtcttttctagccttagggttgtcttttgttttgtcagtgatattcaggcaagtgctgataatgctttcacccatatttcgttcctggtgcatcacatcaatgttatgcattagaatcaaggctttcatagaccacatttgtgagtccaattatgatcggttccataaccttcaaaatgatttccatgttcgtttagtttcaaatcattaaatctcgtgacaatctctagaccactaagatgcttgggtggtcccctcgtcacaatcgtgtcctttttaaaagcgttcctatcgaacctgaataagtgaccctctggcaaaaaacatttatggaaatcaaagtaacatatctttccaccaaactgcaaccgaaagcataaagtgtcttcaacgcatatcggacatgtcaaaatcccctgacaactccatccagcaaagataccataagcaataaaatcatgaatagaccataaaaatgcagctctcaggttgaacttctgtttcttgtaacaatcgtacgcctcgactccttcccacaaaattttcaattcttcaatcaggggtctcatcatcacatcaatatttgttccaggatgatccggaccaggtattacaagacacaagaaaataaattcatatttcatgcaaagagctggtggaaggttgtatggaacaacaaagacgggccaacatgagtaggacgttgcagttagattgaaaggcgagaaaccatctgttgccaaaccgaagcagtcattccgcacttcatcagcaaagctcgaatcaaaggcatctagtgccttccatgcatctatatcagctgggtgcgccatgacatctggattctcacgtaccccttctttgtgccacctcatgtgtctggttgtattcttggagatgaacaaacgtttcaaccgaggtataagaggcatgtaacgaagctgcttacgtgcaatcttcgtcgtcactgtcaaaccatcgttgttttcaacctctaggaatctacggtcaccacatacattacacttcttctcactcgtggtctccttccagaaaagcatacaattattgtcacatacatcgattttttcgtagtccataccgagaccagagagcaactttttggactgatacatgtcctttggcatcttgtgatt

SEQ ID NO: 62984 - DNA, 371 bp, Zea Mays
ttcggatatgtatttggcaatttcccttttcattctagtccaccaatatagagatctgagatcatgatacatcttgttgctaccagggtgcatggagaattttgaaaggtgagcttcgtccagtatcttctttctaagctcagggtctttaggaacaaccaatcgatctccaaaccatagaattcccttactgtcctgtcgaaaacacttgtatttctctgccttttgtttgatcatatccttgataacctgaacacccttatcctcaacctgagcccttatgatctgctcttgcaacgtgggctctaccgagatatagcttagtttacccgaagaaacaacttccaggttcaacttgcacaactcatcac

SEQ ID NO: 62985 - DNA, 441 bp, Zea Mays
gtgagtggtagttggaagggcgactacagtaggattgaggtgcaagcaagaagtggcgactacaagcattagaggggatgacctgcaaggtgcaggctgcggccaggggcactgtagccgtcgaccagacgccaacggtgctacggtctatgggacttaaaaggggacacgacacacagcgcaggaagtcatcaaggctagaaagagtgatcaacggtgtggaattgggagtgcttggggtttagggagttagggttttctctttattgtgtaataatatgtgttaggctaaaaataaactatggtccgatttcggatatctaatggataacctaagggtgagaggtaatgtcctaatacatgcccacccaattttgggtcggatatgcggctgacccacaggtcaaaaatgtatccatatccggcttcattaggtcggat

SEQ ID NO: 62986 - DNA, 302 bp, Zea Mays
aaccattgagcatctttattgactctcaacacagccaacacagtttctcaggttaagaggaaagtggaaataaatgggttgcccaactaaataactgactttattaataactacaccaagtggcaggggatgcccacaccttggtgacaatcattacaaagatccaacttcattacaagttcatcacgacaggcatcgaaacatatgataagcaaactaacactaactaagactgaataagactaagacactgaattaagcattattacagactccgactctgtagacttatggctccaaat

SEQ ID NO: 62987 - DNA, 379 bp, Zea Mays
aagaatctagtgcttcatcagactcggaccaacgtacacgcacttggggtagcagggctccactacgagatatcacctgtctgtccaaaatctgaagaggaacacagggaacaacgaagttgtctggcaatgtggtgctgacttggtgatgccctttggattgtttaagctaagacacatggaatacaggatgtattcgcgctgtcgagggcaactgcagtttgtaagcagccttgcccatttgctgtaagactgtgtatggtccaaagtaacgaaaactcatcttatgattggcccgtgtagcaactgatgtttgtatgtaaggctggagcttcagatagacaagatatccgatactgaattcccgatcagacctacc

SEQ ID NO: 62988 - DNA, 518 bp, Zea Mays
gtggataagctccagccagtaaataattccggccaccgtaccacgctcgccgcggtggattaagatgagatcgccggtgactgccgccttccggccttgtgccacgtgtctaggcatctccaccgcatcgccgtgacctgttttagctctctgttgatcaccggagtgaacaccacgataaaggacaccaatccactgcgctagtgaaattccccctcctccgaccgccgtgcgtcatcgctcaaatttccggccatcgctcactaggccgataaattgagcaccccctcggctctgccatgtattcaagcagctaacgcacccacccgcacctcaaatcctccaccagagagctctaattttggattctccccaaatcacgtccgaactccgctcggtttagcctcaccgcggccagctcaattcaggtcagttcaagtttctccgtcgcttgttctagcatccttaggctctcctcaagctcttcgacccctttgattgaactggaccgccatgaa

SEQ ID NO: 62989 - DNA, 599 bp, Zea Mays
gctggaaaaaaatcatgatccttggtcgacggaaggaaacagacgaagagattgatcgacgggagcaaatggacgagcggcgacgtcgggaggaagaagagaacccgggcgtagcgccaaaagcactttaaacagggacgatgatgagaattgagaagtcgtgaatctcgttgggagccgtccgggagatcggatgctttcagtcttcttccgtcctctgcaaattgcaccagagcagaagcaaagaaggccaaggtacattggatggcagagcgacgcgattggaagagataacctgtttgaatggacaggcgaaagcaaaagagaatgcttctctataccatttcgagattcaaacacccccgaaaaataggcagccccaaacctttgaaataaaggccttaaacatataatcatcagtgacaaatacgcccaatttaaacatgaaaaagaaataactacataatttgttgctaatgatttatcaaacaaacaccttctattgtttcattccaggtgtgtggaaataaacactgaacgaagacatgcatcttctactgtgtgtatggtactttgcacaatcaatggagacaagcaat

SEQ ID NO: 62990 - DNA, 438 bp, Zea Mays
gcgtcaggcatcctcatgaagtgcgttctcccgtacaccaggaaacaacttctggaggaagttcatgcagggcaatgtgggatacatgcagcatctagaacactagtcgggaaggttttccggtcaggattctattggccaacggcgaagaacgatgcggccgaattagttcagagatgcgaagcttgccaatacttgtcaaggcaacagcacatgccagcacatcagctgcagaccataccagtaacctggcctttcgcatgctggggactggatatgattggacctttcaagaaagctcaagggggatatacccatgtattggtggcaattgacaaatttactaaatggatagaattcaagcccattgcttctttaacttctgctaaagccgtggaattcatacaaggcataatattcagattcgggataccaaac

SEQ ID NO: 62991 - DNA, 489 bp, Zea Mays
cttattccttgtgactcgagtcagtgtatcaagaatcttgatggggtactcagcataagttagatcttcttgaacactaagatcctccattggtaactgttctccaggcaccctgagacatttcttcagctgagatacatgaaatacatcatgaacatccgcaagatgatccggtaactccaattggtatgcaacctctcccactcgctttaaaatcaagaagggtccaataaagcgaggggacaactttcctttgactttaaatcttctcataccccggagtggtgacaccttcaaatagacataatctccctccttaaactctagcagtcttctccgggtgtcagcatagcttttctgcctggattgtgcagttctcaaattctcccttatttgctggacttgttcctctgcttcctgtataatctcatgtccaaacaactgcctttcaccagtttgatcccaatataatggagtcctgcactttct

SEQ ID NO: 62992 - DNA, 1388 bp, Zea Mays
gcgaccgtcactttccggtggatcctcgacgaggtcgaggtggacgatgacgcagaagtgggagccagagcgacgaactggtggagtagctccatctcgaaccaacgacgacctacgggagatagttagccaagttaccttaggaatgcaggacgggtcctctgtccaggcccagagacagagggcacgcgtgtcctccttcctcagcgactgaagctcaacatagtccagatcgcaggccctcgccaccacacgcttggcgatgctctcgttccaagcgtgaagggggatcccctccaggcagagccggacgtgatacttgaggtctacagggcctgcctgggtcatcggtagccaccgcctaacgcggatgtcgaggttgccggagagaaattccctgcgctccaaagccgtctccctgtggtgctgatgggagaaggtgacgacgaagtccgctggatggtgtcttgctacggagatgtcgtcggggcgcacgcagaactggtggcagaacgccctcttcatcctgtcggtgctcacctcaggtcggtcccgccccagccaggcgacgacggcgtgggtcgagagcctctctagctctgcttccatgtcgccggtggaagcagcgacggcgaaggtttcactggggcgtgtccctggatcgcctggtcgaggcatggtggcttgaacgagcggagggaagtcatcgctgtggagtctggggggcggttgcggggcagtcgtatgctgggaggtcttggccttgggacagagccaagctttatggtcggggcctccgcatccgaaacaacgcagagggtccctgcaggaggaagcacgatgtcctctgcccaaacaacggaagcatttaccgctcagtcttaccagcaagttgtctctggccgaatttgatggcagcgacggcctggtggttggacgtcttgaatgctcgcgggcaccatgtgagcgcttgcgccggaccgttgtccatccatccagtacatcttcggcgacgtggtcaggcctgccgcagctcgcggttgtcccatggacggaggacagacgcgatgcggtcggagtgaggggggccgcagtgaatgtgggtctactgccagatgcgcgcggcgcggcggagatgcagtgcaggggaggagtaatggcgaagcgcacacgtttggtgggagcgggggtggccggttggcaggggacatcagcgcaaggttctggaaccacaataactgaggctgggcggggtctcctctgtgttcctgccggcggcggaggcagaggtggacagggcggggcgcgtcggccaaggcgaaatagggcttggaagggaggtagcgggctgatctatcgatctgcggtggaggaaagaggtgggaagc

SEQ ID NO: 62993 - DNA, 839 bp, Zea Mays
ttggcgtctggcaaggcagaatattgggatatctggtatcacatagaggcatagaggcaaactcggccaatatacaacctatactagacatgacaccaccacagtccgcctaagatgtccaaaaactaataggaaggcttgccgccttaaacagattcatctctcggtcagcagagcggagtttccccttccttaaaacgctgcgtggagcaaaggctttgcttggggcacaatgcaggttgtagccttcgaatcgctaaaggagtacttgttcgacctcacaacattgatcaaccctgacctcgcatcacccctcctgttgtatattgtagcctcgcacaacgcgatcaacacagccatggtgcaggaaagacacaaagatggcaaataacaacattatcatgtctattttgtctctaaggtcctcaccaactcaaaatgcaatatgacagagttggaaacaataccctatgcagttcttatggcatcacacaaactgaggtactacttcgaggcgtacaagataagagtccccatagaccgaggcctcaatgatctattctgaaattctgacagaatagctaagtagataactgaactctccggctacaacatcgccttcgagccaatgcaagaacaacaatcaaattgtaggtgctcgccgacttcatagtcgactggaaagggtcttcgacccccagctaccgcaacgcagaatcagtttcgaccatccactacaacggcgcctggtgccatgtggggggcaggtgtcgctgcaatcatcatagcaccatccgaggccaagtacaaatacaccgcccgcttaagcttcacactcg

SEQ ID NO: 62994 - DNA, 464 bp, Zea Mays
gacgatacctactaatatatagcttcgtgcatcgatcattgcttaggtgggtctacttttgcttgtgtttattagggtgtgtcctctacacgaggtagttaacaggaactggggtagagttattcctaatcgtccatccatgcttttgatcggaggctatcctaaccgttggttgtagccctcggtcatacgatcacaaaacctaattgacatccacacatgtccccatcacctaggcgtgcgtagtgcctgaaagagctatgatctatggcgtcgaaccccatgatcacccccaacaggcacaggatccgagcctctgtctgcaaatgctgctggaggaggacatccacacgccgaccggcgatggcaaacctcaacctcgccagaacacgtagggaggtggaggtggagatgaacagatagagaagaaataaagaaaaaaggttcttgggctaagctttccc

SEQ ID NO: 62995 - DNA, 744 bp, Zea Mays
ctggggcatgagtgtgtgtatgcaacatgtgtctagtcttgtgggtgcacaggtgtcaagtatagagatagtggtcgacggtgaaggtgaatgtcatgtgggctcgtgttaatggaccaggagtggtgaaggagtgttgggtcttgattgagggactagagaagtcgaatgatgagtcgtggtggctaacaacttggaacatcgatgggtacaaggatatgatagagtggatcatgttactaacacggttgaggaccggtgaaacacatgcctacaacgtggggacatgtatagagtacgctatctatgcaggttttgtagttgagccttaaagccacccagcgacagtttcataggtttcaccgagtttggacctcaaaatcggatgacatggttccagaggcaatcaaaggtagcatgcggcgtcatcatggagggtgcatcaaaaaaaagcaacttcgtgaagagagtgtggtcgtctgatcaatatatcaagagttggtccttttgcccagttgagtggataagccctatgtatctagggatagtttagaaaagagaaaaacactataaataatgggatgggttgcatagctaaccatctctctagcctttaatttttctctctttgttttcatgtgttaggagatccatatgtgctcttcatattgacacatatgttcttgtgatttgggaagtgtggccttaaccacactatgacctcgtgtgatatatatctgaggt

SEQ ID NO: 62996 - DNA, 804 bp, Zea Mays
aagcaggagaaggaactccactactttcaccgctagcaatgaactgccgaatgtttttctgagtcaaaggaacttcatcttcttcctcctcgtcgtccacattagcaacacaagcagcacccccatcgggatcagcaacaaatggagcacccacattgggatcagcagcggattgggtacacccattgggatcagcatcagtaaattcagtcacaggcatttcttcagcagcaggaaccgaagtaccagcgtcccgatccaaactggatactcgccggaggcgtctccttttctttttctactcatcagcagaaggatcaggctgattggctcggcaagggcgcctcgggcgagtactggcaggcttctgagtatccaaagttgtatcagcctctgggaggggcgccactaccaatgctgcagcaggagcagcatcggaagaatcctcagccagcaaatcaagcatagcgcttatatctgcatcactagggttcaggggcacctcaaaatggacctgccgttcatcatcaggaatctccccaagcgaggcaaccaaggcactaacttcttcagcagagggtcgcactctaaggcccaaattgccatcagtgataggtggattcgacacaaaaagggtgaaggctttgggaggaggtaggttccaggccgagtatgccactgaagcaccaacatttgacactttgcctctaaggatcatctcaagtcggctcaccaagtctgcagagggaattcttctgttggtaacccgagttgagtcggctaggcctcgatacagataagctg

SEQ ID NO: 62997 - DNA, 371 bp, Zea Mays
ctagccgatgagtatgttgtatatcggcctaggttgttgctctggttaatcaacttgttagatggctttggttaagctcgtagtcacgatgatttgcttgttgtagtctaaatacgtatggttatggtcgcggatgaaaagtattagtgctcatgtgatgtctaagttaaaatgcaaattattgggtgaaaagcgcttcgatattgattatcgtggagaatgcgttgttaattgagtatggtacttctagtgctcgaaatgacacggataaaaattagtaagtctacttgttagtcctcatttgattaatttaactctaacaaatggtaaagtgttagaataattaaagtctctaaaacgcggcaattctt

SEQ ID NO: 62998 - DNA, 406 bp, Zea Mays
gaggaaggccgtcgactcctttgggcagcgcacgtccatctaccgcggcgtcacacggtaagctaagctagctgtcgcagatccatatctaatccggccgtgaggtatatatgaacctaaaaaaaagtgacctttgcgtttgggtgtttcttatcatgcatggactgctactgtttgtagcatgactgcatgaggctatctgcatgactgcatgcaaattaaggtgcaccagctggtgttgcttggtatgtgtggctgtggcctattgttcataacacagggcatgcctactatgcttgcctagatcatacttccatggattagtggatgcagaaaagttggggtttgttcttggaaaacccatatattatagtgtcgcactaattttgtgaagcctttgtctgac

SEQ ID NO: 62999 - DNA, 733 bp, Zea Mays
gaatccatacgccggtgacacgaatcgcggcggaggatcggtcatcggcggtgaggtttactgaacctgatcatgttactgtaccatggcaaacaacattcagacgacctgacagccattctttgaacttgattttctcccaaatttctatggcaactcataccaagttctgcagcaaggttgtagagctacaaaccagttgcatttcgactataggggttgaactcaattaagcactaaatcagggttgaatcctaggccaaagatggctctgttacactgcaagtctgaggttcagagttcaatcagcctgatagccagacttcagacttaattatctcccatttcttctcaacaactatgcttatactcttaagcaaagtttttctcctttgttaggtctacaagtttgttgtggtgacctagggcaaaaaccttagaatttaaaagttacaaagccccaaagttgagccaattctctgattttcagacttagtaaagaactcaaatgaggtccattttgcaattaagtccaaaatccaagatttggcttacaaatccacatgtttgtgaaccaaatgacttaggatactcatttatcatagtttttgcactttagtccaaaagtggactaattttgcacataggcccctagggtttggatttagggttttccagggtttcaattagggtttctggtatctcaagggtgtaaatgtaacttaaacccatc

SEQ ID NO: 63000 - DNA, 589 bp, Zea Mays
ttgaataactgctcaaataactgcagacttgtgttgaaataactgaatgtgctgaaataactgctcaaataactgaatgtgctgaaataactgaatgtgccttcctctgcttgctcggtgcagacttgtgttcgttgcagacttgtgctcggtgtcgatttgttcacctatatattgctttgttagaatgacgagaaatacatatagcgcagtggtttgtgttagttgagaggtgtatgaggtgctgggttcaatgtagcttgggtcctttttttgttggcattttgtcccattaatcttatattcacacttttttttgcataagaccaaaacccttttgcataatcctctgatttttttaccttaagcaaataagactaaaacattactccatgccaagtttcaccattgtttgaccaaatttgctatttatttatttatgcctagggaaggcatttaacccacagaaaatagtaaatagtccaaaaaagggacatctatgcatgaattaagtttgtataggctagatgaacaaatagtacaaatttcaaggaagaaaacaaacaaaactaagaaatgtagctcaaac

SEQ ID NO: 63001 - DNA, 611 bp, Zea Mays
ccatagtccacgtaacagtagtctgtgtcttaggaactttctttattattaaagcaggacagaaatggcctctatgaggctatccacgtcgccaaaaattcttcacaccgttggattgtgaatcaatggcttctattcatcgctgtatcggtggcgtgtggaatatgctcttctcgctccttccgcttctcgagacttccatggttggcccgtgcagtgcatgcctctcctcgctccctccgcctcgtctctcttcgagtcccttcgtctctctgtcagctgcttcaccttctgccgctttgatcgtccattgccgccttcatcgtctgctctggtgtttggtgatatccatcgctttcttcgtcagctccacttcctcgtcgagttgctgcttctttcattggggtttctaagttcctcttgatattctcagaagtccacaccttctcgcccacccaccagcctctccgtcacgcgatgcttctaggaggatctccacctttccaggctcccatccgtcacccatggccgcacatgttcaccgctatgcctccgccgccagcagctccgactctatgccccgtgccccatgccctgtgcctgccgccacc

SEQ ID NO: 63002 - DNA, 307 bp, Zea Mays
aggagcactagatgtgaaaaatgcccaacaactagtttttttagtcattgggattcaatcgttgaggcatccgttgcacatgtccgatgcgcaacaaacaggtccagtgcacctaccacaattgtttcatgtggggtagcggttggattgtttagtgcgagttataaatactccttatggttagccatggtcactcccttggactccaaatgtatgtgcacgcaagggtggatttgggccccaggccatctggaccgtggtccggagcgcaacccaaaagtcttcttgtatatagggttttttcatc

SEQ ID NO: 63003 - DNA, 419 bp, Zea Mays
agggaatcaaggtcttgggtgggcgccgccgctctgatggccggggtggaagacggtctctcagccatccatccggatgtgagcggtggagattagatatctggataccacttcacacagttagatctagggcgtcgatcggacgatgtgcgggtgagattagagcgaccacataaccccttcgcccgtgaaatctagaccatggatcccaaatcctacggctcagattgaatatcggttcacatatgatggtgatataatctgagccctcaaatgccgatcaaatggctgaattctacctgtaccccttcgtcttggacgatttgctaaagagaccctgcctttttcacaaatcaaactgccgtccactcaggtgcaccactgtgtctgggatggttttacgctttagccactggcct

SEQ ID NO: 63004 - DNA, 514 bp, Zea Mays
atcagatcgggttcaaagaggatatggaccgctcgatctgaatggacagacgagattagaagtggcgtttggattcgggcaagtgaatcggagccgttgagatccgatcgggtggatctaaagggtgccgggtattttaaatcacgaccgtagatctcggatctgatagctgtggacgcgtaccggttcataataacggtgatttaatcgtggcctttcggttttgattggacgaccagggatcacagataccccttcagctcgtgctttttgcaatagagaccccatactatttaaaaaacaacccaccatccaaacacatggaaaagtaattgcatatcagtcctgaactttatagatttaaccctgagcttttaaacattaggcgccacagtccattaatcacggattattaataaattaggtccaaaaacgattataagtgaggaaataatccaggaagctctagaaattcatagcttacacgttttaactccgatttactccgttccag

SEQ ID NO: 63005 - DNA, 590 bp, Zea Mays
caggtgcacgacaagacggtaggtagggaaatgtagcatctcgttatgtatgtatcattccgctacaagatgggggctttataggtcggtccggggtagccggataggtggcccaaagtacattactgcccccagtcagcgaccacatttttacaacatgtactgtacaacgaggtaattacagtgccgcagcccccactagttacgtgtacacacaattatacccactgattacattgacaggtgggccccacatagcatcattgcgtgtccacgaccaagataggtacgtcttctgcattcgctgccttcgtccagacgagccttcgcatctcctaccggcccttatcgagatggctcatttagaaggcttcagttccggacatctcgtcccttgtagtggtcgaggactcccgagccctcgtcttcactgaccgatggccgatgtcaatgaagtcattgtcaagtgaattctctggtcagctacagtgctacagttagttgaggtggttggcgaagacttcatgtttctgtccaaaggcctgttcgacattcatcccaacaatacccctcgagggaccgattcatcc

SEQ ID NO: 63006 - DNA, 647 bp, Zea Mays
aaaaagaaaaagagacgcctcctgtgagtatccagtttggatcgggacgttggtacttcggttcctgctgctgaagaaacgcctgtgactgaatttattgatgctgaccccaatgggtgtgcccaatctgctgctgatcccaatgtgggtgctccatctgttgctgatcccaatgggtgtgctgcctgtgttgctaatgaagacgacggggaggaagaggatgaagttcctttgactcggaaaaacagtcggcagttcatcgctagtggtgaaagtagtggagttccttctcctactttgtctgctctcattggtctgcaagaattgtccctggcgaattttgatcagactcttgagaaaaggttccagaggatttgttatcagagccagcagatgatggtgtgatggaggtttgtgttgatgtgcttgatgctgggttgaggtcatcccgtgcctcgtcgaccttagagcgcgatctcgagggtcaggagactgatttggatcgtcctggtcccatggaagtaattgagggcccatcagccttagaggtggctaccgcagagaacttggaccccaaggatggtgttgacacttgcccagcccccgaggatgttgccggggatgacttggttcgggtgggaaatgca

SEQ ID NO: 63007 - DNA, 311 bp, Zea Mays
tgcggtcaaattagagcggctcgatcataatccaatggtgcataccttaaatagcgaaggggtatgctacattctaatcacagccgcacacgaatggatcgatgtttctggttaaaaatagtgaatgggtatttggcatctaatctgggctacttgatcacacatcaacggttatcgggcatcagccatcctcccagccgaaacgcagcagcgcgacgagcccgcgtggtggtgaccatcgccggcgaacgcacatcccatgccctggagctctaaatcagatattaacacgatctacactactagcaaaa

SEQ ID NO: 63008 - DNA, 715 bp, Zea Mays
cgcaaatcgccgccttggccgccatcacaaattggtgatgcagcgtccgcttcatccactggcttctagggtctccgtccttcatcccccgcatcgatctccgtccagatctcgtgagcatcctcttccacggcatggtagcatctcccaccttacactctgccaccggccgccctctaccggagcccctacctgttgagttgcttgcctcaagtctccctctatcggaggcaatttagcgccatggagtgtaccctatctctcactcgtacctcggctttcgaagacggtcaaggccctgtcacgaaccatgcgtagcctggattagtaccacttcgcttgcaggagggggggcgtaaccggcttataagggcaagcttccctcctctctcagcccgagttttgagatgtgagggaggggctcgctgctgaaggccggcccacgagcgcatgaacgcccaaacgcatgtcgtgtgtgggctttttgccggactggcctaggtacattgacaaatggtatcggagcctaggcctgcctgtttaaggggatgggatgtcacgaatcatgcgtagcctgggttagtaccacctcgcttgcgggagggggtcggcctgcttataagggcgagcttccctcctctctcagcccgggttttgagatgtgagggaggggctcgctgctgaagaccggcccacgagtgcatgaacacccaaa

SEQ ID NO: 63009 - DNA, 606 bp, Zea Mays
gagcaggcaaaagccttggtcgaggccagcgttttatatatcacctatttttctcttctgccagtgcagacagtaattcttcgcaaagacccccacagatggctgcccgccgtatgaggagacgaccgagacatactttgcgagcgctgccacaacatttggtgtcaactgatgaacttgtacctcgaacctccgcaacacctctactacaaaccaatgcgttgacatgcgaagacaagcaatgaaaaaagcttcaaaaacaaccaattcaccctctgtctcaaagacctcttctgcccctggagctcgcccgacgccattcccaaaataacctagctgctgcatctccaacacgcgacctgaaaatatcctcgaggtcccgaactcgacggtgtggccgggctgcagttctaccattgccgaatcactcaacatcttctcaaacgacggcgtggccggtgacgcgctcgcagtagatgaagaagaggatgacattgcggcggcgcgcgatttgcttgatacgagctaggtcaccggcgaagaaggagcaaagagggcaggcgagcagatataaaactagggttttccagcgcgagctcgagcagg

SEQ ID NO: 63010 - DNA, 345 bp, Zea Mays
tatctgtggcagcgtgaatttgttggaatggcatgagatgtgaaattgggattatttaagtacgcgttaatttgggcgatcacttgtagtggaactttgatttgacttggtcttgaggattaacgacgttgcctagctaagttatttgtcgttgcacgtgtgcatgcattcccatcacttatgattgctgggatgctcggtcccaagtcacgctcacttgaggacttgaggtaacaaattgaatttcctgttttggaaccaactatgctattttcactatgtccatttctttctcaaacattgtatgccatttttgtatggataaaccctgaaaaaatcatctac

SEQ ID NO: 63011 - DNA, 322 bp, Zea Mays
gccgaactttggtcctcttcgttgtctagctctagtgccctacactacacatttgttccttttcgacgcgatatgttgcatgattataaattgtctccttcctggttcagttcaagtttcattgtattcgccaaatttcctaaaacatgaggaacatcaggtgttccagctgtatttgaattgctctcgccgataccccgtcttgtactttgggggaaagtgcgagataactgtgttcgtgctcggcttcatctttggaaatggcctcagaattcaagtctttgagtgcgtaggtccttttcatgttgactttagtagtaag

SEQ ID NO: 63012 - DNA, 407 bp, Zea Mays
aaagtcatcaattaccatatactcattctattcatcgcactactatgcctcttgagctaattcattctgatgtttggggtcctgctcctatatctgttggtggtttccgctactacattaattttgtggacgattttactcgcttcacttggatttatcttatgattgatcgcactgatgctcctcgttttttccttcaatttaaaaatcatgtcgaacgtctccttgatgccaaaataaaatatgttcaatctgattggggtggtgaatatcgtaaaatgcacaaccaattctttactaatcttgggattgctcatcatgtgtcctgtccacatactcatcaacaaaacggtacggtcgaacgaaaacaccgtcacattgtagaaaccggtcttgctttattggcc

SEQ ID NO: 63013 - DNA, 855 bp, Zea Mays
gtcggagcttgttgttggtgctggagtttggcgccggcgccggaggtcgtgtctacgcagttgagcatccccatgcttgaacacatgagagaccagccaatggtcacctagctagatctcacgggatgcatataacaagaacactctctgtatggacaacagcagggcttaggttggcattgatacagctacaaattagtcactactacgagtacgtttaaccggccgggtctatgagagaaggcgaattgaaggtgcgtgggaaggagcttgcagtgtgtttggcgtctctttaattcgtccatcttggttgcaggtgtcgtactagctccatgaatagacgtctattcttggaggcattgccttggcctgtggctgtgcacaacatgtcaaagtagttttggtcggttgctcaggtaatgtctctgccaaattccctactgctgggtattgtccattggtcgaaggcacctgccgacaaagcgacgagaagcaggtctcagtctcacaagaaaccagggtgttccaacgtacaagggacaagggactcactttggaggaaaccctgctacgggacgggacatcgtcggtaaaaaatatgagcgagacacacacacttcctatatatatgcaccacatatctgtgaagagctagctcgctctaaaggaatcaatgcaagtatataagttcacagttaactgaaaacacacgaagagagcacacaaagtaaacgatttgctactagagaggtgatcatctagacatgatcatctgggtggtgatatgcatgcagtactgcttctactttcttccgatgtggtcaggaactagatgaagcctgttttaatcctaag

SEQ ID NO: 63014 - DNA, 1488 bp, Zea Mays
ttctcgggcttcatgggtttcattttgttcttctttatagcttcgtcgactatctctcggccacctttcatccaatcgttggaataaaatttcccgcccattagagtagcctcagtcgaaggatccctcgtgttgtctacagtgaagacggtctccgtctaggttgcggctttaacatgttcacagccagatttttctaaaattgctgcaaccccctggcaccggcgaaggcgcagaaatcaccacgatcgctaagtatctcatcaaaggcttcagcttcttcgccgatccattcgatgattccttcgggaagcctctaataaaattttgctcagatgagtatgcacccacctttgcaaaactatcttttaactttttagcacaatccaaggattttttgtaatatctctctttcgattcccgaagctcatctacattcttttgcagtcttgcgctagtccattcacttatttcttgttttgctttagccacttcaaaatcctcattctttttcgcaagctttttctttaagctttcaattttggttctatgagcttcggactgcgcagcaaggttggcttcactagccttaactttgtctacaaaggaaagcagaattttattcttctctgtgacttcatttctcagtttgataacctctgaccgaaggttaccaagggctatttggcagctttcgtcctcagtattcttctgtgcccttaaagagttaatcaggattaggccctacaaaaaaggagaggaagaggatcagcacaatagtaaaagatacaaaaataatctgctcataagtcaacaacatatttaccttcagactattgtaagcgaggatgtctgcgaagtcattcttcgacatagtagagaggccaacttcgagcttcggaaatcctgtatttcttgccatctcccggcaaacagatatttccttgttatccggaaggcagtatagaaagtcatcttcatcagtgccattgtacaccaaagatccttgcgggtactttaattccttggcatagtgtttagctttagcaatttcctcttccgacaattttttacccgaagcgtgtcgaatgataaagtctaactcttcgggactaggaaattcaaccttcttgggtgcgtcttctttttccaagactagagctgcatctaaaggtccttgctcaatattctgcctagttccaacagaccctgtttcgatgggcactgagggcccagcttcggcttcggcctcctttgcagagcaggagtggctgcccttgttgactccaagacagcgtccagcacgctagccatcctccttctcttgggagttattgcaggagctttggacacctttggcagctccagctctggtggcgggcttaggatttttggcaatcctgccgactcctctggctctggctctttggccgctttttctttggcttcggcaggacgcttcagcgctccggccaactcggctttctc

SEQ ID NO: 63015 - DNA, 370 bp, Zea Mays
ccaacgtacgggaaacaagaagaacaactcactaaacctgaccgagatccacaaaactaaactgtaccaaactgactcaacaacaaaccctgaccgagaccgacgtcttctaatcgtcttcacattcattaatgcatagacccatcattgcatatgtttctatatcgagttttattgcttacatgggagttagtggcatagctaggattttagtgataggtgatcccattaattttttccacaatatgagtgcaacaatggataaataggcatgtaataaaaaatattaaatgtaatatggtcacataagaaggccgtgtgatcatctaacatattagagataaaaattataaaactaattattctagga

SEQ ID NO: 63016 - DNA, 637 bp, Zea Mays
ttccttgtaactcaagttagagtgtctatgatcttgataggataatccatgtaagttagatcaccttgaacattgagttcttccatgggtaactattcctcagggacacggagacacttcttgacttgagacacatggaatacatcgtgtacatcagacagattataaagattctaaagggtccaataaagcgagggggtagctttcctttaactttgaatcttctcattccacgaattggtgacacctttaggtacacgtgatcaccctcttcaaattctagtggtcttctccggtaatcagcatagctcttttgtcgggtctgtgctaccctcatgttctcccggatcatacagacttgttcttccgcgtcttgaataatctcaggcccaaagaactgtctttctccagtttgatcctagtagagaggagtcctgcactttctgccatataaagcttcaaatggtgacatcttcagactggcctggtaactattattataagagaactcagcatatggtagactcttgtcccaactgcctccatgcttaagggcacaagctctcaacatatcatcaagtacttggttagtcctctcagtttgaccatcagtttgagaatgataggctgaactgaa

SEQ ID NO: 63017 - DNA, 683 bp, Zea Mays
gagccagttccgtcagggtctgaagccttctatcaggcatgcactgggggcctttccattggtggacttccgtaccacggtggagcaggtgctgggtgtggaaatgcaacaccagtataccatggagtcgcagaagtcttcgggtgttgatcagcctcgtggccaggacacgaggaggggcaacactggaggtccagctcacaagaggggcaagtctcagcattagcgccaccatccttaccgtggcaaatcttctgacgcgggtacttcgggaggaagtactcagaggtttcgggccgttcctaagcccgagctagggctggtgtgtttccgctgtggagatgcgcatcgccgtgtacagtgccagtggagtggcaggtgttctatctgcagtcaggaccacaaggacgtggtgtgtaggaggaatcccaatgggaagctcagatgggagccggtgacttcctcctcttctcagggcactatcaacatgatgtcaagtgctgagcagcagttttcagttcctcttcctccacaacagctttatgtgcccgggacttctcagttcgtgccgatgcagggtttccctcagtatcaggtcgcgcctactcctgcaccgtctacccctgtgctgactcagtttggagctccgcgctagcctcctccagtggctcagtggggttctt

SEQ ID NO: 63018 - DNA, 334 bp, Zea Mays
acggtgagctactttcacggcggtggagaactgtgttgggggaaatcttaaattcgagctcactggtggatgattgctaacgattcttcgtggctgggttcgcgataatctaacgcagctgtccaggccttcaatttatagcgctcgcaagcggcggccggtgaatcgagcgagacgcgcggcggtcatagaaagaaggagttcactggtgcagcggctgggtgtccagtgtcgtggcaattgctccggcgatcaacgaagagctagaagaagtcacggcgatgcggtggcgaggttgggacacgtggtggacaacggcgatggcacgacgacg

SEQ ID NO: 63019 - DNA, 404 bp, Zea Mays
gatggcacaagttgtcgccctcatgggaaggaccattcatagtagcagaagtcactcgaccgggatcatatcgtctcactcaaatggatggcacagaaattgggaactcctggaatatagaacacctcaggaagttttacccctagctgtatttcaaaagctatcgggacgataatgtactctgtaaaaggggaaatatgtcatcaataaaaaagggcttcaagaatactcagtttgttcatgattgaccggcattcttacttaactcgaggtgaccactatgccctgctaacggagcaatcggcttaagttggcaacgacttaagacagtgcaacatgcttgcgcttacttaattcggggtgaccactatacccagctaacggagcaatcggcttaagtcggc

SEQ ID NO: 63020 - DNA, 358 bp, Zea Mays
tacaaattaaacaagttctatacattaaaaatctatttctattttatttttatctgaatttcgagttgactggactgggcctcaataaccagaaaacagcagggctacggtgcaaatattcttaagactaaagagtccctggcgtggacggcggattatttttcctaacacagaggggtttatttgcaagatcagtcggccgatcttcagcgaccgcacaggatttaaaacaaccagatcgaaccgtgctcggtagatcagaaatggacggcccggattcgccgtccgcgaacactacgtctaatcgatctgagccgcacagtcaagatccgatggccaggatcccatcgtccccaac

SEQ ID NO: 63021 - DNA, 535 bp, Zea Mays
tgaaaaacaacctttaaaacacaaattgggttgtatgaatggttggtgatgcccttcgggttaacaaatgcacctagtacagttatgagattaatgaatcatgttcttagaaccttcattggcaagtttgttgttgtctattttgatgacatactaatttatagtaaatcccttgatgaacatgttgaacatatccgatatgtacttgctgtccttcgagaacaaaaattgtatgctaaccttgagaagtgaaccttttgcaccaacaaggtagtgtttcttggatttgttgtatcaggacaaggtgtggaggtagatgaagaaaagatcaaagttgtacgcgactggatgcctccatagaatgtaagccaagtgagaagcttccttgggctcgttggttctaccggtggtttgtaaaagacttcagtattgttgctgctcccatcaacgaattgaccaaaaagaagtacctttcgaatggggagaagcacaacagaaggcatttgaagaattgaagacgaagttaacaacagcc

SEQ ID NO: 63022 - DNA, 801 bp, Zea Mays
cagtaacatagccttcttgcatctctattttcatttctcttcgaatctacgtcgtctggaggcctcttggatgacctgtcgaccacaaagcaaaccctaggatctctcctccgagacgagatccctccagggacaagatctaggtgttgttggtaaccgccaccgtccctacgcccacgccgaccgtctgctcgatgcagagaagacttgctcctgtcgcaggatcgtggaccgtctgacccatgtcacggaccatccgtgcagctgcagagaccccgtcaagcgcaacaaaccctactgtttggcctagatccggagccagcaccttctcttcctttgactatgctgcatggttggttgcatcgtgtggacgttctcacgaatatagtgcatgttggggaagccacagggagagacgttaggtacggctggtagcgcgtactccagccacagcacacctactcccagccatagtaggagtggtagtttgttgtgttctgtttggccagctcctacacgcctgctctgctctaataaagtgtcctccacgccaacctaaatatgaatatccttcacagacgtaccacatccgtacggataatttgcttcaacggccacaagagtcaaaggggaagctcgtcaacatcgtagcgtgtagcgcggctatagtaggcaccctgcatgtgacagactcatagtaactacttcctccaggtctaaaattcttgacgtttaaggctataaaggaatagatcaaaaaatttgacgttttagcttttgcatgcaagtttagccgttttt

SEQ ID NO: 63023 - DNA, 310 bp, Zea Mays
acacgaacgctccagtaactacgcagcatgaacaagcaaacatacaaaccatcaagtatatcaacagatattcaatatagtggtcaggaatggtggtggatgggtgaatatagttttgagtagagtttgggttgacagagtagagatgcttaccgaagggtatattggaggtgaactaacactagaactatagtggcagagtagggtatcgaatgggtggggggtttgccttggctcagggtgctgagggtgtggaaagggagagggtaactctctaggtgtatttatagctaggtgtgtatggtttagt

SEQ ID NO: 63024 - DNA, 801 bp, Zea Mays
gttgattttgagaaaccgcagggtctccattgcaaaaatccaggccgaaggggtattgatcactctcagccgttggatttggatctcgtggcccagatagatctcagccttttaccaaaccggtatgtgacgctgcccgtcagatctaggatcaatggagaagatttaatgaatctaaacctattcggaaccaccaaatatcaatctgagggctccgatcaattgtccctgagcggtacaccatagcccacttctggccattcgatccacgatcgacgaccaggcgctaccccacctcttttaccctccccccccgacgaccacaggcggtagggtgtgccaccgcggcggccgccacggtgaagcttccccgacgagactagtgcccaccacgcggataacgaacaagcgcaaaacgacacaagggctaatgtgaactcaatgaaagggtcatactgacggttggaggtgacaacagtgctgaccacgccgtgaggcggatccgtgacgatgtgaacatcggtgagaaatctcgccgccacgcaatgctacccacacacagggatcgtgccaccgcaccccgaagacaccgacaaccctactaggctaaattttgtggcccaaccatgggtgaaactcacccccgacgatggcggcactcacgatctctctctgcatgacgacatcccaagacgatggtgcgcgtggccacacttttccacggcgagttcccttcaatcgatagacgagggaggcttggcacagtagttaacccctctaggaaaaatccgtgacgccccc

SEQ ID NO: 63025 - DNA, 441 bp, Zea Mays
tagtttttcgcactttaggggtagtaacatttaaaacaatccaatggaacttttaatttttcgcactttaggggtagtaacatttaaaacaatcaatggaactgtggcagatagagaaaaagaatcaaacgttcgacaacaattactcacaatagaggagaaacactcagcacacatcgcttgccgctcaggtggtcgctgccaattggccagggaggcgctccgccctcgcctatgaataagaaaagaaaaggaatcaggttgaggaagttgtatagtttgggagaaggtgtaatggcaggggtagatttgggcggtggcgcggcgccagtgcaggccgcgtgcgtcattgctacagggacgctagaggcgaattggtggaggtggaggccggactggcggtggcggatgcctgagttagagctcacccggccgcctcgg

SEQ ID NO: 63026 - DNA, 548 bp, Zea Mays
tacgtcgccaaagtgatcacgactgtttgatgagatccaatggacgagagtgaggtatgaatgggcatgactctagttaggtcggatgcaaggcccaagcctaggttgtggcccaagagcacgcacacgactgtgtagagtgttctgggtcacacaatagcaaaccaaaatttagttagtgggccaattttaatttaaattctccataatttatttttccaaaaaattatttttcgagaaccccctcccgcgcacacttccttgtccccaccacgtgtcgccctctgatgtgccccacaccacggctcgtagttacttgccagtgcacctaagcccactctctcgctgatagcttgggcccacatgttagactcgtctccctcctcaaactgacgttcccacatggaactagcacacgccgtcgtactccccatctctactagctgtttggaccctccctccacccacgacaccctcctcgctataaagtaagtgcttccccgcacagccactcgagccaaccctcgcctattgcagctgtcaagtcg

SEQ ID NO: 63027 - DNA, 388 bp, Zea Mays
tgaattcaacctgcatgaagatggaacacttagaaaattatatgaaatgcgtaaggaatggattcctgtttttttcaaacatgactattgtgagcttatggtgtctacgcaacgtagcgagagcatgaacaaactcgtgaagagcgctcatgtcgattcaaacaccccacttcatgagtttgcgaagcaaatgttgaaactactgcatagcaggaagatgcaagaaggaaaggaaacactagaatgtatggtatgtaatattatttatgcattatactatttagtaggctcggaagacataactaattattttatatgcagggtcaaaaagagaccacaacactatatatgttcgaaattagggttgcaagggcatacacaagggctg

SEQ ID NO: 63028 - DNA, 699 bp, Zea Mays
gtggattaccgatatctcaatgccatgacccagaagactgtgtttcctattccagtgttcgatcaacttgtggataaacttgctcatgcccagtggttctctgcacttgaccttttagatggttaccatcagattcgtttgtgtgttggtgaggaatttaaaacaactttctctacacaccatggccattttgagttcaagatgatggtatttgggttgtctggagcgcctacctttcaaggtgcgatgaatgctacacttgcaccactgctatgaaagtgtgtcatcgtcttctttgatgacatactagtttatagcccttcatattcagagcacttgcaacatcttaaactagtcttcaggttgctctctaaggaacaatggcatattaagttgtccaaatgccagtttgctaaacaacaaatttcttacctagggaatgtcatcagtcatcaaggtgtgacaatagacccttccaagctgtcagcaattttggaatggccaaccctgacaaatattaaggaatttcgtagctttctggatcttgcggggttttataggaagtttgtctagcacttcactattattgcccgaccattaatattactgctcaagaaggataccttatttgtatggactaaagatcatcaattggcatttatagctctgcataagccattaagttcagcacctatgttg

SEQ ID NO: 63029 - DNA, 793 bp, Zea Mays
gcgtactattcatctatgtctctgacattcacagttaggcccctgcacttctgtttcttcgcaacgccaagtccacgacggtgaacggcgacgagcatgcctccggcgaacttgtactggccggaacacgcaacagctgctgcactaactcggctaacactaaatcctacccaagcgaccctaatccctcgactaattgcacaattccgggccgaaatctctctgtccacaacgacggtgaagatcagagacaatccaaggtgttcatgatgatttggtgcggtttagcttaatcaaatgggtctacgagcaacaggaagcttgagggaggctagaaaaccaatcaaagaagcttgaactgacctacagagggctgaccacggagaagtgttcacgtggaaatggatttggggaaaatgcaaaattaggaggctctagtggatgatcagaggtgcgagttggtgcgctgggtgcgtaataacctagtggagctcactggggcagcaattaatagtcctacgacggtggcgtttttgagaaggcgcgttggcggtcggagagaggggaagtgcactggcgtgggtgatcgtggctttcaccgtggcaaagcctccgacgatggatgatcttactactacagttcactgcgacgtgttaaagcccctaggcacgtggcgcatgggcggcaagcggccaacaccggtgaggatcatctcggccggccgcagaccaagtgggtacggtgaacccaccagggaccggatccgagcctatccgggtgccaagatctttt

SEQ ID NO: 63030 - DNA, 719 bp, Zea Mays
gttgtctgccaatagcagaattttcatataacaagagttatcaagaaagcattaagatggcaccatttgaagcactatacgggtggcgatgccgaacacccttaaattggtctaaaccaggggaacggtggtttttcagacctaacatggtcaaagagacagaataaaaagttcaacggataatacacaacttgaaagaggcacaagctcggcagaagagttatgcggataagcgacgctaacctttggtctttcaagttaatgatcaggtatacctgaaagtatcaccaatgaagggtgtgaaccatttcggggtaaaagggaaattggcacctcggtatattggctcgtttcttattcttgaactatacggaccagtggcataccgacttcagctgccagaaacattgtctgcagtacataatgtgttccatgtatcttagctgaagtgccttcggattcctgatcgaaccatcaatgtagtggatgttgctttggaaccagatttgacttattcagaacatcccattcgagttttggatcagaaggacatgatcactcgaaaaaggaccctcaagttttataaggtacaatggaaccagcacacagaagatgaagctacctggagactcaagatttcttggaaaagaattttcctaggtttttagcttcatgtaacttataagatatgtatatttgattgtaaagttggaatgaac

SEQ ID NO: 63031 - DNA, 923 bp, Zea Mays
tctctcttgcccttcgcggcccagctattgcgccccctcggcccatccggctccttcctcccaccatgcacctgcacgtgacaccggcgcctgggccccaccacacaggattaccgggtttacctccgtgcacgctcttcgctctctgaccggtaggacccagcggtcaggtttatctctttcccctcacccataacagaaccaagctccgttcccccgctgaaatcgccgtgatcatctctgatggcggcggcagattctcccacaaaacacgccgatctcgggggcgggccgaccatgcgggtcctcatcctcgtctataaaaccataccgtgaccctcttccccaccatctggagcgctgagatcggagcagagagatggagaagtggaatcgagggtaggagagagaatttggcgccgcctcttgcaatctacgcttgcgcggtggctcaggggtttgggaggacttcgcaggagcaagccagtggccgaccggtggacttggcgtggtcatcagtggcgagctcctttccccttgccgtcgtgccgtggactgagttcaacactgctcgatcccctgtaagttgcccaccatctaattcgcgatcgcctctgcatcgttttacgtcagcgcttgtggtgaatcggtcgctgggggggaatcagctcgggtggctccgaatgtggctccgccgttggcgacaccgccgcgactggttgaccggaagttgggagaaggccactggtcattgatctcctgctgacggccacagttagaagttggttatcatttcacccaggcgatcggtgaccatggatctccgttgggtcggccggcgttgatcgccgccgcgagcggggcctcactgtcgcggtggatggaggataggggaaagaggaagacgggtccctggccgtagg

SEQ ID NO: 63032 - DNA, 640 bp, Zea Mays
tgttaagcagcttccaggcttcgtctctagccaattcatgcccgcccttagcccaaatttgggtaataaacctgttccctatgcttcaggcttcggttggaacgtcaaccagatcagatgatgaaagattgaaattcggcctgttgacagctctcgcgtgattgcatccggcttttatgaaggcggcagttgtaccacgagaagcgaccagcgcatagaagtctccatggccggttatgacttcgtcaaggacatcaacttccttttcaatacatttgagtgcctcgggtatatcttcggcagagaggctggtttcctcagatgcagctccaactgaattgaaaatgcttttcaaccgagcggtgcattggcttgcaaactcgaagcatctctccttcagagtccttagcgcctcactaagctttgtgtttttctcagtctcaaccttaagtgttgctttcaaagcttcgttttcctggttgaatcgattagagttttccttcaaaagtgcctgagcatctgccagttgtttacccaacttcttgttttgaggttgcacttcggcaagggacccttcagctgaacataacatttcgtctttttccttcaaagagtcttcgagttctttgaccttatcttc

SEQ ID NO: 63033 - DNA, 560 bp, Zea Mays
gttgtataatttatcctcgcttcactaattagtggttatcttatttcactcttggtcattaataataatgttttcatcttgtctatctccttgttatttctgatctgattccttgattttataatatcttccttattcctaaccttgtcccgcctttcaaaaaaactataagaaattgttttccttgggaaagattgccttgattgaatgaataacacatcgagttatgttgtgctgatatgtttgagttcatgttagttatctttgtgactatgtttgatttgcttctttgtaatgattgttggtgtattgtgtgacttttgtccacaatggcatcagttagctaggtaaaaccttagatagatgggttttctatgctctctataatctgtctttgctcaaccctttcgtcccttgcattcttccatacccatatagatgtcagaccttggaatgtcaactgcaagtgatgtcactaagtgcaaagaatacattgtgttagcaactcctccagctaagtctcagatggaacagttcaagaaggcgcatgcacagtttct

SEQ ID NO: 63034 - DNA, 546 bp, Zea Mays
cccgtaagcagcttttggcccacaccctggcgatgttacaaccactatagtatgggcggcctctccttgggggctcgggcgtatggacaacccctcagcctctgcctcggctctctacggaaatcagtaggaacgaatcaacagcacaatatgccatcacgtcgacttgcatacaccagggaatctctccttcgaatgcagcactcggcttcactgcgaacactccccttcgtgtataaatagggcagtggtccctccagggatggagagggacacacgtagacaggagctcactcctccactttgtctcagatattggcacttgcctcaatcatctctagggacttcccctctcccgtcgtgcttgtaaacccctactacaggcaccacagtgcgagtaatataagccatcatccccctctgctggaattagagccttgtgttgctcgaactaggataactgcttgtgtcttcttgcacaccatctagagtcggccacgcatcatattgactagttggttaaggacccgtggaccaaacaccgac

SEQ ID NO: 63035 - DNA, 430 bp, Zea Mays
gccaaataggaaaggctcttggcaccagcaatctcccatttttttctttcctcatcagcagctctaagactcatggtaatattggggctgcaaccataaaaaacgcatttatttctatggttccacataatccaggctcccaggatgataagggagtcaagtccttttttgtgagtccattaacaacagcccccacctcttcccaccaacctagatatgagccaacatccggttgtggagcaagagaatgcagaccaaatttccttagtagcagataccataattccctcgagaaaaaaaacatgtaacaaagagatggtctaaagtttcatcctcttgacaaaaacttaccaaacttatcaagcccaaaagagactacatagcaaccaaccccacacattttaaaattttaaccatcttgtagttaatc

SEQ ID NO: 63036 - DNA, 473 bp, Zea Mays
tgccatatctgcgtcaaagttcagatacacaaattgctctctctcaaagcaaaaagttcaggtacagagctcttccacgtccatctcttttatcgggaacacaacatgttgcctgaacaaagagacaaaacaaaaaacaattttacaaaggatctccgctaaacagcaggatcctcagtaccggagatcgttttagttattttcaattgatgagaacgattgcctccagaactcaccacacaattcatttagcagcaacctgtcaaacgtttcttcggctgccatatcctttcttcctcttctaaagccctctcgagtctcgaaatactccctattgacgaagaagtgttctctgaagatgaagtgttgctaatctgaaatactgcagtcgatattcagataagggcggaaggttaccaggttgtgaggtgtaatagtaggagattgtaataatccagctagacgagtgtatg

SEQ ID NO: 63037 - DNA, 844 bp, Zea Mays
ctggtattgcgcctttccctaaagatcgaaaagccttttgtactggacaaccaagggaaggtcatccaaccaagtatcaaacaaaaaactagtatgttccccattggcaatgatttttcggcaatatttataaaagagatcttttatgctcatcatccctttcgagaaatgaaagtcttcttgtttttctccaaacgtaataagggggtttcccttaatatacttgcttctaactatttgttgccataaaccctccgaggattccagtctccaaatccatttggctagcagactcgtattcatgcagtttaggtcaagtaccccaagtccaccttggtctttaggcaggttgaacaagttccatccagccaaatgatacttcttggtaacttttcctccctgccataacaatcttttcctgataacatcgattttttaagaaccattttcgtcacagaatacaaagcgagcatatacaggggaacattagaaaggttgttgtttagtaacataattcttcctcccagacttagaaatttaccacctcaagtctcaactttttttctagtttctcttccgtgcctactcattgggtcctacttagtttcttcttatctatagtgacccctaaatatttcattagaaggttactaataggacaagtaaaatgtttgcgtaaaggttttcagaattcacagcctctccaaagcagaaaacttcgctcttatggaaatttatattcaagtcagacatctgttcaaataggatcagaatcagtttcaagctcctagccatggctaggtcatcctgaagaaggaaaatcgtgtcatcaacgtattgcaaa

SEQ ID NO: 63038 - DNA, 356 bp, Zea Mays
tgagtttccgaagtcctaggatgatatcttcatactctgttatgttgtttgtgcatctgtctgactcgagtgcgaagcttaagtgcgtgtcgtatctctacttggcactggatggcgtcgtgatgactgctgtggcgcctgcccaccaaatgttgggaccacctacacgtggacgggtgggcccaaacactcaggtgggggaagagctcaggtgaacaacgaactgtggacgagaaccgtagcatcttgttatgtgtgtcacgtccgtgtacagtgcgagggtatttataggtaaccggtcgggtaggtgggtccccaagtactgttatacccccggttacctgctacattcccga

SEQ ID NO: 63039 - DNA, 412 bp, Zea Mays
tggtccgagctaactcttttgcacaaagctggcggaagaaatagctcaactctacaagcgctagccagacatgctcagggacatagcctcgaaccatcgccggaagaattcgttcaatccatatgtggaagtcatgactcttcatccctaagactcgcagagtagatacgttcaccccccctactaaggttagctgcatacccatcagggaacattaacatcttgatccactgtagtacttccttcctctgggccctgctcaggacaaaatcggccttaggccttctccatgtcttaccaccactaggcggcttcatctcttgatttggtctatcacataactctgccagatccactcttgcctttatgttatcctttgacttatcaggaatctccataattgttgcccaaa

SEQ ID NO: 63040 - DNA, 632 bp, Zea Mays
acccatcagatttggttttaaccttgaagacccatttgcacgtgataggtacagcaccagcaggtaacggaacaacatcccatgtacatgtgcgatgaagggcattcaatccatcagtcatatcaagctgccactcaggtataccagaagcctctttataagatgatggttcaacaatgactgcaccagcacggggaaacccataacgttctggagctgcaatagtgccacggtcacgaagatgatacccctgattaaaaacaacatgagagtcatcattgttagtacaagtatcagcaacaggatcatcatcaagactggccgtgggagtagagcgaggacgacgaatgtaagtctgagtgacaagtggtttggaagagtaagactgagatggtgtggaagtggaaggtggtgtgatgggaataagaacatctggggtagaaacagtagatggtggtactgatgaagtttgagaaatgggaggaaggctcatgaaggaggtagactctgtggaataaaaagaagaatgggtggaagagttgtaaaagaagggtcagttttcattaaagctcacatctcgagaaatacgcatgcgacaagaagatgaatcataacatcgataacctttatgt

SEQ ID NO: 63041 - DNA, 643 bp, Zea Mays
gcccaggtggcccaacaccagagggaaagcgcgcccgcgcccgcgctgtctgttttgcgcaaaagtcatcggggttttcactaactgggatccggtcttccactgtttaacacagtcgcttacagtttgcataaaagtcctcccacttctatctattctgggtttaaagtccccgacggtgcatggcgcggcagagctccggcgagttcctggaccggccaaacgggataggtgctactgagcggtctacaccaaattcacggcctatcaatggtttccccccaatcaatttcatatttggtgatctatttcgctctgcccacgaagacagtgaagctatagacattagttcgtgttcccagtggtgatctatttttcatggcaactcacccaaagctctgcagaaaagttggagggctacaaaccatctacaattttgccatagcagcaatagccaaattcctattgaatcaagcttgaattcatgcccaaagtcactgcaattgcactgtcagtctgaaattcagactttaacaacctgacagcctgactttgagtgtgattatctccaatttcttcataacaaccttgcttacactcttaagcaaaattgttctcctatgttaggtctacaaatttgatg

SEQ ID NO: 63042 - DNA, 730 bp, Zea Mays
aattattttagttggtttttagttttttttagaagctaaagtagactagaaggatcaaccgaagagaaccagtatcctatcaagacagagtgctgacgcgcgcaagaccgaccacacacgcagctacacatcatcagcgcatcacctaataatcgtgcatgcatgcaaggtcgtcgtcgccatgcatgtgtttggatgtatattattgtccctgctgcatggcatgcatgtgaacgatagatgcgctaggcttccattatcgaaaagctctagctagactgtcccatatgctgcatgtagctagtatgtagctttaggtagtaacgaggaagtcgttgatgtaaagaggagcatacacacgtggcatctccaggcatgttatgttgcatgcacgaataatcttccagcagtggccagaaatgcacacaggccgggccaattatatatgccgccagattccccgatccaacgaggctcgacacgtacgatcaacgagacacccgacacttgttctcgaagcatcatgcatatcaaaggagtaaattacataaattcctacgtcgatgaaaatatgttattttttatagtttggacctcatctttaacggcagtgatccatcaatctttagtgcatgaaaataacattattttcgacggctactaacattattagtatattttcgatcgcgccactaatggttgtcaacgataacatactagctactgagtc

SEQ ID NO: 63043 - DNA, 298 bp, Zea Mays
gtggccacctcaactcttgtaccacctcggcctctcccgccatcgcccttgtacacccagcagccgcaatcgtcgaccaccctcctgtgttcaagagggcatgtccactaactgtactggtattttgaatacttcaactttagattggtcagattgttttaaattctcagtggacttcatatttgtattcacagttaagcaagttccaagaggtccagagagcactcaacgacaccatttctaagatgaaggtagttgcgaaggagttgaaggaactggctagacaagagatttttta

SEQ ID NO: 63044 - DNA, 733 bp, Zea Mays
caactatatgatctttatctctcaattccatcaagggagctcaactccaactctcttgatgtcctctagatctaatcatgggccacccaacccgactcgtccgaagaaaatctagcgcgacccgatccgatcaatacagtgggctggtacgggttataattttttatctataataattcacgggccgggtatagaccgtgatatttgacccaaaacttgacccaacccgaaaaaaacccgacctaaagccaaaaaaccgacccaacctggaaaaaaaacctgacctgacacgtcaaacagggagacacgagccaacccgacccgacactaggcacaatcagatatgggccgtaataaatgacccacagaacaggtttaatgtcgtcttacatgttaatctagcatgtgaggaaagtattgagtcattatgatcctccttgatcaccgagacttcatgacaaggctagcactatcaaccctactttggatactcattatgtgttgattgcatatcattcaatgacaatctaattaactaatctgtttcactaatgctagaactgcagacctacttaagcacaagccctatattagtcaatgggtctcagtatgcttaatatgcttagttgggtggcatcaatgaaagtcgagtgtgagcgggaacccatccccacccccaacttgtaggagcttcaccaggattagttaacaagaaaatcttgtaagttcggtt

SEQ ID NO: 63045 - DNA, 474 bp, Zea Mays
tctgtcaagaaatgcaacgattgaatctgagtatgttccaaccaacactactagccaatttgcagttggaatcaaccctagttactcaaattgtggaagctcaaaagactgatgccggaatagcccatattaaagcgcgtatggcaatggatcccactacgtgtttccaacttgataacaaaggtattctttggtttaagaatcggctagtagtcccaaaagtccccacattgaggcaccagatacttgatgaatctcatacctcccggtattctattcatcctaggaataataaaatgtatcaagacttgaaattgcagttctggtggacaaagatgaaaatagagattgctcgttatgtggctaaatgtgatgtatgtcaacgagtaaaggctgtacatctgaagtctgctggaccattgcaatcgttgcctatttcagaagggaaatgggaggatatcagtatggatttta

SEQ ID NO: 63046 - DNA, 360 bp, Zea Mays
gcccttgaaaatgaaaactttattgatgatgtattctcccattatagagtacaatgtcgctctgatagctttcgaggtcttgctaagggtaaaacaactctatgttccatgaatttcccacttccgtaccatccatttgagtaagccgatatgaacctggccgagtgacctctgatacaatgaatggcccttcccatagtggtgacaacttgtgtcgtccttcccccgttagaattcggcgaaggaccaagtctcccactacaaaggatcgatgtcgtacaactttatcatgatagcgcctcaaggtctgctggtatctggctgactgaattactgtgttcaatcgctcttcctccagca

SEQ ID NO: 63047 - DNA, 630 bp, Zea Mays
ctttgtgataacatggcacagcaggccgggccatcaatttataggggcgttgagcggtggcgcctgatttgaagaaatcgcgctggcggccgagaagggggggtgagtcactgcggcgatctattgtggcgatcgctggtcatagatggatgacgatcactggttaaccttcacgttgcaaagcgacatggtagctatctaaggcgtggcgcaaccggagaaaacagcggtagtcttagcgatgaccgcacaaccacgtcgcagcagagtgggcacagcaacagggcggccatagtgccccaaactcatccgtgcttgaagatcttttgactgtcgaacgtaatccacttattcgagccacgaatcacagcgcctagcgcgaatccgagcgcatggtcaccggcggcgaggttcactgaaccagcagatcttttgctactgtaccatcaagaactgcttcagtcgttctgatagagcgttttgcagcacaatttgcttcaaattttatgtagtgacctgaccaactctctgcatcaaagttgtagatcaacaaaccagctacaaatcaactatagagacctaactcatttacccaatcctttgagcttgaattgaatccaaagttgagca

SEQ ID NO: 63048 - DNA, 919 bp, Zea Mays
ccgccgtacccacttggaccacggctggccgggatcgtcctcgccggcgttagtcgcttaatgatcgtgctccacgcgtcttgtaagtctatcacgtcgcaatgaatcggtgttacaagcctatccatcgcctgagaactggccacggtgaaagccacgaattcattgcgccagtaacctcccctctccccggtcgccagcgcttctcctccaaattaagcaccaccaccgttgagtgctataaactgaagcctcagggagctccgctaggtaattatgcgtccaacgcactagcacttgcctccaattgtctaccagagccgcctaattgcccatttcccccaaatcggtaaaaataccaccgtgtgaggaccttgccgtggccagtgtgctacaggtccgttcatgtcctctgctctctttgtttcagtacccttatgtgcccctgatgcttctcgacccgactaattaagctagaacccattagatcaccgggaacactttgaattgtccccgaattgcgtggtcaccgtgagcagagaagttgggagctcgaaccgtgcaattgatcgaggggaaacgattgttagatgttgaattaggtatcaaccaagttagagcaccggccattgcgtgacttggccagtacaggctcgccggagctcggtctgccgccgttctgcatcgtggacttggcgcggtgaagaaatagaaatatagggggggttttgtgagttgtcagtgactcagggaatagtactttagactcttttcaagttgtttaaaatgctaggggcctttgtgtaaagttatcagcacgggcgcgcgtggggcattttgcctatcatgggctatcttgggccagaatgagcccaatactgttgaccctttctcgttttctttttctctcagaattaga

SEQ ID NO: 63049 - DNA, 1038 bp, Zea Mays
ctcggccgaccgagtcctcacctccgacatcgcccacccaggcatggccccggatcactcggtgaagagaagcatgtgcctctgggactagcgcgatcccgaaggcaccgccgacgaccatcccgaccactccatcgtcaaaggagatggagggagtgtgcatcaccacacccagctcgttctccccgaacgccctcttcatccagggaagggtggaggacgcactcatttccgacgatgagcccaccttactgggggaggaaccccaccccccagcgtgacgcacgccgacgccgaaacaggcatcgaaatgtgcggcgttaccatgaagctggggaataggatccagcacaacccatctcccaggatgaggcctctaaagtaggggaaacccccgacgaaagagcgctccaagaacgctgcaactcccaccgttgtgatcgtcaccacgcctagtaacacgagcgggaactagatgaacaggacaccatgctccgacccgagaacccgcttctcccttggaacctattccctgactttgctcgagcactaaatacattaagtgaagtcagaggggtcttgactcaaatcgccaatggcctaccacgcaccccaggcacggagggctatcgacgggtactcacctaagcggtgaaccaccttctccccctcgcccacccactaaatgatctatgtcacactgtcaacagtcggcgagacacacggagtaacatcaatgcttcgctcgatcaccgacatgaggaagagatgaggcgatgagaagagtacgaccaggatcatggtgcactggtacacagccgtgccaccaggaccgagtcagcagcaacctccaccaaaagtctggccccgggtctatcgaggcgacacgacacccgacatcactcgccttcccgagactatcgacgtgatcagcgctgggaggatcgaggggcgtgtggagtctccgcccttacctctcggctctgagcgatccaatggccgccaaacttcaaggtctccaacgtcgacaaatacgaa

SEQ ID NO: 63050 - DNA, 382 bp, Zea Mays
tcatataataatagttaccagcccagtttgaagatgtcatcgttcgaggctctatatggcaggaagtgcaggactcctctatattaggaccagactggaggaagttagttctttggacctgaacttattcaagaggcagaagaacaagtctgtgtaatcacggagaatttgagggtagaatttgagggtaacttattcaagaggcaggaagtgcaggactcctctatatgtgcctaatgtatttcatgtgtctcaattaagaagtgtctccgtgtccatgggtaaacagttaccaatggaagagctcagtgttcatggagatttgacttatacagaacatcctaccaagattcttgacactttgactagagttacaagaaat

SEQ ID NO: 63051 - DNA, 379 bp, Zea Mays
ttggggttcagccctgccttcagcagctagtcagatgcctagaacttgcgatatggtaggcgatacgtagcacaactgcacaagtagtaacagaacttgccatgcccccattaaagtcgccagcaaagtggacataccttacaatctcgaacgctggactggcaaaaatttacaaaaggtgaggggaaatcgctgcacaacctgttcgaacattggaacatcaaattaatgctggagttgcaaattatacaaaagacaacgaataagcaaaccatgacatggttaatggggccatgaagaagctatagcgccacaagtgaacacatatccaacaaaaatgtatcgctgcaaatcaccacgactcacaccgatacggaat

SEQ ID NO: 63052 - DNA, 821 bp, Zea Mays
gtcacatttgttcctcacttggaagcatgtcgtaatgcccagataaacccttgtttcagtaccataggtcctttggatgaagggatgttgcttttccaccattattcatggtatttgtactataaataacctatgttcctttcaaaacatgtttggacacaacttacggaacttgttaaatttaaaccttctagctaagatgttgcttaagtgatatatggaagttgtattctggtagtcaagttagtggagttaaagaccaccaacatgcatagtggaatatgtagtgggtgtgactccagggataaccaagttattaggttactaaactaagatggccaataagttaatatttttgtttaccttagttaactataggggtatttgtgtcaaggacaagaggcttgcgttgcaagacgagtgtgaggtctgcaccgttgagcttgtcttaattgtcttactctgctgtttctgttgcatgcgaacggaagagaagacctgcaaggcatgtctcgttaggcatgcaccgtcctcaggatgatggttctcatgtgtgcctgcatgcatcattgtttacctgtcgtacctcgtgttttcttcacgggaaatcggttccgttcctagctcaccgtccgctagctggctctccatccatccagcccaccgtatatatgccaagccctcacaccaaccgtcaggccatctccttccgctatcccctacccccttccctttctctatatacaaactaaagaggcaccgtctcccacaacatctctctttctcttcctccttccccaagtcggcgcggtagcttcccg

SEQ ID NO: 63053 - DNA, 804 bp, Zea Mays
gcagctaagcatctacaacacatagggatgtggaaacaagaacgaggaggtcgtgaacggacctgtagcgagctagtcatggtgagcactcacacggcagtgttcttgactaatttgggggaaatcccaaattagagctctctggtggacaatccgagacacgagtgggtgcgctggatgcttgactacctagcggagctaatggcacactcaatttatagggcccgagggcggtggctattgaatttgtcatggcgcgctagcggccggagagggggaagagcactggcgtaaaggattcgtggcgttcaccgtggcaaggtcacctgcgacaaacggacatgcttaagacgagttactgcgacgtggtaaagcacctaggcatgtggcacacggtcgataggcggccaactccggtgaggaccactttgcccgaccgcagcccaagtgggtacgacgagctcaccgtcgaccaggtctgagcctatccggtgtcaagatttttaccctaccgtgataatctcctcaccagagagcacgaatcgtggcgacggtgaatcatagcgtgagggtcatcggcggtgaggggggctaaatctgtgatctttgtcaggtaatgtacaattgggatcctattcagagcgcctgacataccaatttgtagggcccagatctcagatttttacatgacaacttgttaatccgcctgtaacaaagttgttgccctatgatccggctacaatcttgctatagcaatcacccttaaatacttactggatcatgctcaaaatagccctcaaagtt

SEQ ID NO: 63054 - DNA, 739 bp, Zea Mays
gtcctggaagagccggccagccaggccatggccagcattccgatgctgcctcgacccacacccatgtacggacctttattggtctaggctgcggcgctgggcaacccgcgtggaacgtttaattgccctctgcccgttttcttttttccctccctgcccgcacattttacacatacatcctccgtgtataaagaatggtgtatacacctaaccaacccaatgttgcatcgcatgggtcatgggtggatatggagaatcttcgcgagatgatagacagacagacagacatagacatgtgggccaggaaaaggtgcactgcatccaccattccatttcaccccagtcaaagatgactagtgaaggtccaccacccccactcatgcaggtttcagcagcagacaatcaaacatgtttctttttattttccccacctcagattatacagatccaatcatcggatgaggaagatgcagtcaacaaatcacacactccagtgatctactactagctagctctagaaccgggcaaacttgtacaagctgtgtgtcacacacatgcacgtcgagacaatatcgtttgctctattggttttggatggttacaacttttgacgttgttgacacagtgatttatgagccctgtgttttgtagcttctataattgcagtcaacaacagtcgcagccgactagagcctctataatgccaaccaactctatgctagtaaatccaagcccaatg

SEQ ID NO: 63055 - DNA, 678 bp, Zea Mays
cggcggcgtagtcgaccgaattgggggaagaaagaaattctttggctatagtgactaattgaaggtgggactgggtgctttggcttcatgataacatggcgcaacagacccgaccatcaatttataggattgctaagcggtggctagtgaatttggattgagcgaggtggtggtcagagaagaaatgagccacgggcatggtgattcgtggccttcagtgattgcgacgtggtaattgctgaggcacgtggctttcggtcgacaggcagccaactccggtgacttatctggaccggccgcaaagcagaaaggagcacggcggctagccggattagtgcccatagcccaacagcggtgacgatctttttaccccgcggcgttatccgggcttaagtgggcacgaatcacctcatcggcgcgaatctacgcgcgaggtcgccggcggcgagggggatctgcttctattgatattttggtactgtaccattggaagcttttttagttagcctgacagccgaggtttagggcaggttttctccaaattttccatggcaacatcatcatccttctgcaccaaagttgtagacctatagatcatcttcatctttgttatagcagtcctagtcgaattcccactggatttagctcaaatccgatctcaagttcgaccaataatac

SEQ ID NO: 63056 - DNA, 321 bp, Zea Mays
gattatgcataattcggcttcaaagttaatcagagaccactgacagtcaagtttcagtgcctgacccgactgacagcacaacttctagggcattttatttcaatttatgtacagttctagggctcaatcacttaatcaaacttggactactatagtaactctacaaatttgttgtagtgacccatgacaaaatcctcatggatcaagagatacaggggcttgaagtcgacttgataacaccgtttttcagagttaagcatatgggtactcttggctcttttgcaatttaccccaacttgctccacaaaacatggaaatccc

SEQ ID NO: 63057 - DNA, 637 bp, Zea Mays
atcaccctcagacagatgggcagacagaacgagtcaacaaagtccttgaagatctattaagagcatgtgtgctagcatttgatagaagtagggaatccagtctaccctacgcagagttctcatacaacaatagctatcaggccagcatcaagatgtcgccattcgaagcactgtatggacggaaatgccagacccctctcatgtggtccaacgtagggggaaaagcactagaaggacctgcctttgtcaaagaggcagaagagaaggttgcactgatccgcagaaggttactcgaagctcagagtcggcagaagagttatgcagacaacaagtggagggaactctgatttgaggaaggagacttcgtctacctcaaggtttctccaatgcgtggtgtcaggaggttccaagtaaaaggaaagctagccccacgtttcgtcggtccctatcccatcattggcagggtaggatccgcagcataccgcctggaattaccggaatccatgtccaacatccacaatgtgtttcacgtatcccagctccacaaatgcctgcaagcaccagaaagtcacctcgaagaagagacagtgcagattcagaaagaccttcagtaacgtgagaagccagtgaagattct

SEQ ID NO: 63058 - DNA, 403 bp, Zea Mays
gcgtaccggatagagcccggacacacgtcaacatgcctaggccacgacacttcctcccccgagaccttgtgatgggtggtccggagcttacttggtggggtccgaactccatccaatggctccaggctgctttacttcgtgggttcggtttgtgcgcacaggggtcctgcgccttcttgaggaggtctaggcccgatgatgttgtctccgagaacgccaccttaaccgctcacgagatacccttggggctgttctccgcgtggctagggatagccgcataggcatcatgccttcataccgtagtaaggggtacccctgatccagggtatcgatagtggcctccgggcctgcctcaggggagggaacgagcctgcaggtggggccaaagttcgatcggcggttg

SEQ ID NO: 63059 - DNA, 853 bp, Zea Mays
ggctagcggggcaccttgcggaagagtgtagcggagacctcgggtgcaacggtgatcgagtcgtcgtcaattgctcatcggagcatcaccaccaccgtgaagccgtggcgcgggaacctccactacggcgttgtctcggcttgggaaggttgtcaagaagacttcatcgaacccatagaacctccgcgggtgtttgagcgcgctcggtgcgttctggaaccggagaaattactcactagagcatatttccatggtcggcatagttcggatcactaatagctagtagtcagagggcagtgctgaagcattagagatacttgctccgacgagttcgctggtgagcagttcgggcggtgccattgtggtgttagttgagaggagagagaggtgaagcaaataagccctggtcgtgcattttatgatggacggtctagattggattggagagtacccacttcgcttcattaaatcagcaccgtcagatcgagatcttgtggtcccagtttcgtagcgagtcgtttaggctacaatctaatcgcagccaccaaaatttggtcggacgtctcacattcactaatacctcttcggtgtggctcgtttacaatagatccctcaagttttatgaataccaacccgtcgttcacatatatacaaagatccttgcagattagtcaagtattattcaaaatgaactctaagcttcgcaaaattaatggttgcagcccataggatatttaaaattgtgtaaattgatatagaaaatcattttattatcaatttaattctaaaaacttagaaaattcgtaactcatttgttttaactctgaatctagcagttctcgaacctatgatt

SEQ ID NO: 63060 - DNA, 452 bp, Zea Mays
actttagtaagttcttctgtccactttcccttcggcaatctaaccaaggattttgtatttcccaatataattatgttgttcacaattttgactagcgcattagactctagatgtctgaccgaagcaaaatttatgtaggttcccacttgactgcagaatgctctattgcttatgagttaaactaagtgccattgttgatagtgatagactttgggactccgaagcggcaaataatgttttgccagaagaacttttgaatggttgataaagttattgttgataaggcttttgcttcgatccatttggagaagtattccacaaccaccacgacatacttcaagttccactgtgctgctagcattgggctgattatgtccatcccccatctttgcaggggctagagatggcaatgggtaaaatcccgttgggtatcactttcacaaacccatact

SEQ ID NO: 63061 - DNA, 597 bp, Zea Mays
gtttggtcaatcgctctgtcctacccggtatgcgagtaactgttgagactctgatgctgagattccctgtagtgaagcttgactggtctcacagggtagagtcgaaggacattaagggtcatacgctgtgatgcctcatcccgttgacagagactccccgtgactcctccgatgtttggtagtgtcagccaagatgacgtttgatggtgacatgccttatcatggctggcatggggcaacgatgccaaccttgtttccatgtcaggcgagtacaggcatgcgctcgacgtgcgcgttatagggggtcatgtcactatgacccacaggtgcactagccccgttatgggccttttgcctgtccggctcacagagttgctcggctagagttggtcggcctgtccgcctcgttgagttgctcaacagaagttggtcatcctgtccgccttgctcagttgctcagcgggagttagttggcccatccgcctcgcagagttgctcgatgggagttggtcggccttgttcccatagcttctgtcccatatgggccaccacaagtcatgggcccactttgggtaccccattcctagggacttgtca

SEQ ID NO: 63062 - DNA, 572 bp, Zea Mays
ccggtcacatttgtgtcaaataatgctatgtttttttttctttttgcgaacgaggtactcttgcggtctgattttgatgcccattttcactattatttggacgttatataaatttgttctaccttctatgcattcttgtctcttccacagaaacaacttatgtattaagataaactcttttgggtgagagtgagtcaatgggttcacattggagaggtcgaagagaggagataagaatcttctgttcctcggtttgtttgtttcactgtttgagtcatagaccctatccaataggagctagataacctgagagggtctgcactgctccactgctgtttgctttaaactttgtctgttaatggcgtctgctttgaacggctgctgctcatagttggtgccttgagggaagccacgccaatgccttgtgatgtgaggtcctattaggtttccttacagggcaaaaggctttcttttcctttcatttacgtcggatcactatctaccccaacatctcatttcgatctcctttagttcatccaccatctctccagcatctcatttcgacctccttt

SEQ ID NO: 63063 - DNA, 408 bp, Zea Mays
gcggtgacagattagagacgtgaaagaaatagaatgagcagggtacttaggtacttgcctacctgttccattgcgcgtagaatgagaaatagttcctatagtgttagcgtccacataaccaccattctgaaggaaacagacacatcaactgattgctgctatttttaggctgccatttgcattcaattttagtcaacattatgaactggcagcaaaacaaagctgctattgtcaggttgctattttgaagcaattttagccaccattgtaaactgcctgctgcttggttttgctacttgcaaatagcattcttatgaaccggctatttccacccgttcactcaatatgtgcattacttctagcttttaatgttgataggatatgataggtgacacattgatgttgtgc

SEQ ID NO: 63064 - DNA, 454 bp, Zea Mays
ctttttggggtagctgtaagatctttttgtgccttcggcactatcacttctgccaaaggacttgtaacttctgatatctttgttctctcgacctatgtctctttaacattatcgaccttcgactcactcaatttggccaacggtgccttcggcgatgcagctggctcttcattcttctatgtaagagcaagtcctttggcttcagtagccgtagaggtctcgccaccaaattcaggcactgtggccggttcgatgaagcgcggtcggtgagtaaggaccttcacctttttcttctttggcgcgggctcacttagagcaactgaagcatcacctttcccagaagttgcactttttctcttttgccctttcagcgggtagcggtaatcggggtacataaacccaatagcatcgaaaactgtattcagcctcttcttcttccggcctccgaaggccg

SEQ ID NO: 63065 - DNA, 554 bp, Zea Mays
cgggggcagtctacagtccagtcttaatagttagtacagataaaggaagacatgatggttctatctcccttcattgcgcaggaatccttgaagaaacgagggaccacccaattgagtggggactaagagtgagtgagcacaccaatcaaaacttgccgaacaacaaccatcccctttgcagttgatgatgagcaccccacaatagctcatccaagcaccataaactaacatcctacgaccttaaaggggagaaagcctctaaggaggaagggcgagattatgggtccacctagcataagattgatatcaccaccaacaagagacaggtgatgaaactgaggtgtcaatggccacacaaccaagagccacgggccacgaccttgagatgagatcacacaacttgacacgggctagaacgactaggacgaccgtcgatcagcgacgagcaccaccacagaacaaaatacatgtcggggcatagaatcgtagcataaccacatctctcctcgtagttacgccgctccgctgccgtgcgaccctttaggtgaggggcc

SEQ ID NO: 63066 - DNA, 787 bp, Zea Mays
gttatcaagaaaggagcgccctccattttatatatcaagggagaaacctttacaatggagtctcacccttgatgagaagagagaaagagataggatatctatctccttaggtaaacgtggtgggtcttctttcctgtgcgtgggcgtacctccggtatggtgttgtccatcgtgctggtccctatagcacgtctaatgctgatgtcttgatggtagtgcgtagtgggtcccgtgagtcagtcctagggtacagttgtactcggcgtggcttcgcctgttgtatgtcttgtgtcaccttctgtcgtacgcggtgtcacatacgctcggtatggtgtgtatctcgtctttttcaatatgcgagccaccattgagactcatgtgttgaggtctcccatgactgaggctgactgaccctactggacaatcgagggcatgtctgaatagtttgtgggggcgtacaagagtgctgaggatgatcctttggcgctcatcctctacagtatgcgcacgtctagacatggctaggtgatgatgcatcttgtcacaactggtgtgggctcgtactaatgggtttgggtctctgccttgcagacttgctcgatggggacttggttggccgccccgcaccgtagacttgctcgacggggacttggtcggctgctccttctcgcagacttactcgacggggacatagtccattgctctagcttgcaaatttgctcgacggggacatgggttgaaaaggaggttataggcctatttaggataccctgtccctaggtacccg

SEQ ID NO: 63067 - DNA, 501 bp, Zea Mays
ttgaagttttaaaaaataaaatccgccctataaatagagagggttatttgggttcatccacacccccacactcttcaattcccttgtatttatttagattatagtcttttattcttttttcttatatggaatcatatctggagtctaaactttaaaagttttactgacttgctcaacaatcaatcactaatcactatgacaccttgtcggtgtggcataggtcttattcgacgacctctcttatacatcagcattaggaggatatttgtacacatctctgttgagtccataacctctatttcatatctatatcctcgtactctatatccctaccaaatattcatacatgcttttattctcaacgatgatcataccaccgatgccccacttcctaccactaaaatcacaaccaccaaagttcctcctccaccacctttcacctatccatatccaccatatggatggtaatgctccttcatatggtgctccacctcatttcgc

SEQ ID NO: 63068 - DNA, 590 bp, Zea Mays
cttgcgcccatcgtgcacaccgttcggagcttggaacacacacaataaatttacttgtcggagcgaggttcgaaacaccgatagttggtgcgccagatagggcgtgtgcatgttcctgacgaagctcttcaagctccggatggccaactgcgatgccaatcgtcttccaaaaatagctatccgtgttttgggagcctcgacttctcctttgacggtgaaggcgaaacgttcaaggcccaagaggcccgacctcctccactgaggaacctctgcgtgaccacgagggccagcggctgcccccgcatcgactacacccccggagcggtgatccgctttgggaaccttgatttcttaatcaaccaggagggcgatatggtcagagtggtgccctcccagcctcctcgtcccaagagccccgtcgcggtcttggtggccttagccttgccccacgtgggcagcgtgagaggcgcaggccggccctgccttttgaggctgacaaaataagatgatagatctcgacccatatgggaccaaacccctcatatgacgacctgtccgctttcttcagtcctacgcggagctttccacat

SEQ ID NO: 63069 - DNA, 679 bp, Zea Mays
attttcttaagtaacttactcattttatttatcctctgggctacgagcattaattccagaaaacttgggattacattcataaatatcagggactcagttttgattatttcctaacgggttgggtggtggcttgatttgaaagaaactcgagggcctctttataaagatggacatggcgaagcggtacggtggattgctagccgtgggacgcaaatccgacgacaagaatcagagacttatctcacttgaccggtattctatcacaacggtcggatctaaaatcaatgctcgatattaaaggatcttgcgatctaatctcggccaacggatccgagatcaacgactatgattttcgatcacgatggggcagttgacattcaatcgtgagcgctcatcaccagatcgacggccagggccgtttctcccctacatgatcctattcacgccgaaacggggctacgacatcctacccgcggtggcaggcccacaggcgagcggtggctgctacgaggctatggatgagatgagtatttgattgatggtttgatgtgttatggttgcatgtattatataggtcagaaggtgggtggttacatgatagatctaatctggtatttatctgttataatcctatcatgtctcttaggaactctaacaaactcgaaaccaaatcaattac

SEQ ID NO: 63070 - DNA, 403 bp, Zea Mays
gtggcctgctaagtgccaggtggtttaaatattgtaaccgtgaagtcttggacagaaaggaaataaggaaatcaaaaatactccccacggcatacctgagccttgctaagtgtgtcgattatttcgctcttttccatgttccagcgacagtgtgggttactagtgcttcgttgcatatggaaggcaatgcatcgcgatggtttgaggtgtataagctgcagcatggtctcggtagttggcaggaatttgttcaggcagtgttgcagaaatttggtgtggacgagtacccttagaccatgagagagttggtggatttacatcagaggggtaccgtggaagagtatttgaaggaatttaatgaagctcgttatgctgcttccatgcataaccatacattggatga

SEQ ID NO: 63071 - DNA, 632 bp, Zea Mays
tcaaagccctgcaaagtgctctatcaggtactctgaatggggtttcccattgtacagtagactgaaaaagatcttcagatgcattgccccttgccgccagtgacccttgcgccgtgatccgcgccggtgctacaattagttctctctagtgaagaaatagtcatggcggagtaaagatcttagcaccggataggctcggacccgatcactagtgcgttcaccgtacccacttggcctgcggccgaccgagatgatcctcgccgacgttggctgcttactgaccgtgcgccatgtacctaggggctttaacacattgcagtaaaccatggaagcaagtccgtccatcgccggaggccttgccacggtgaaagccacgatcacccgcgctagtgcatttctcctctcttcggcgccagtgcatttctcctctcttcggcgccagtgcatttctcctctcttcggcgcgccttctcaaaattagacgccaacgccgtaggactctataaattgatgccccagtgagttccgctaggtaattacacatccaaagcaccagctctcgcctccgatcgttcaccatagcctctcaatttctcttttcccccaaatctgttttccgcgtcaccgtgaac

SEQ ID NO: 63072 - DNA, 273 bp, Zea Mays
agagaacagcagagtgaaaagtaggctagagcttgagaagaagttgggtttatgtttttcttcttacatgccccgcaacagatgaccactcagcctataaaaaccctcacacccgttcgccagaatccagcacattaacccacgacggcccaaaatttcttgtgctgcgcttcttcgctcgatttgaagtcctcgttggctatgtagatgtagctacatcgtcaacatgttcactgctgacaacagagtccattggaaaccgcaacaatagac

SEQ ID NO: 63073 - DNA, 351 bp, Zea Mays
aagaacgtgacagcgaatttgcaatagtagacatcaagcagaatcaccttggaagaccattcgggtcgaataaaatgtagtgatgccaggtaggaagttcagtggagaaccagatataggttggtaaattattacaatgtttctcacatacttatcgaagcatggcaataatatggagcaacatcaggtagaaattattggagggcctgacctgcactaatcgctgtggagtaacattaggtgatgatgctcaagagagtgcaaatcaggcgacatcataaaaattatgcaaaccagagtcaaaggtagaatatgaaacataacaacgatatccaattaaaatgtcaggta

SEQ ID NO: 63074 - DNA, 481 bp, Zea Mays
ttaatgtctaatttagcttcaagctctgtggtgatgtgggatttcatagttatttgtctactcttctcacttctggtagatcagagatagataatggtaagcatgccaaagggtggaattcagtgtagttcgactacataaaccccaggtatgtgtccattcaggaacgacctttaccatttagcttatagtgtataccaaacttatcaaaggactataccgagtcaatgcagcgattataagtatttacaattctgagagatgtatgcaacacaagcatagaggtcctagatagaacgagtaaagtggttcgataggaacacacaatggtttttcacaccaacattgtgaaaaaaattctcaaaataacctctcagtatactgcaacttcgtgttgctaacggttacatgtcattttatctcatagtttgcttcatgtcattcagcgacaaagagagcaatatgctaacatctggttgag

SEQ ID NO: 63075 - DNA, 517 bp, Zea Mays
agtccgacagtacggtggctccaacgagtcgagttggcgccacacaccagccaactcgaggtagaagacatcaacagaggagtcctgctgacgagtagagctagcgagcttcagagtggagatgtagagagtagtgctgctcggctggtagagagcttgtgcccgctcccacatcgcctgagtggtgggcagagtagacagatccatggcaaattccaccttcatactgccaagaatactctgagtcgcccgagcctcatcagcaagccaagcattataaacagctaagtcagccatgtattgctcaactcatgagcataatcctccatgacttgagcagaagaaggaacattatcaaccccgacagtgggctcctctagatgtgccggtaccggaggaggagatagaccagtaaggtgaccccaaatgcggtggctattgagacaaacataaagcatagtggaccattctcgaaaattggttccatcaaaggtaacacagggaagttgcataagag

SEQ ID NO: 63076 - DNA, 602 bp, Zea Mays
aaaatctattcgtagttcttctctctcccatgtagcctcatcttctccatggtggccccattgcactttgcacattttaatcactttgctccttgtgacacgagtcaaggtatcaagaatcttgataggatacacagtttaagtcaaatcatcttggacagtaagatcctccatagctagctgctctttaggtaccttgagacacttcttcaattgcgatacatggaagacatcatgtacatccacaagatgatcaggtagttccaattgatatgcagcctccctcactcgctttaagatcaagaaaggtccaataaagcgaggggacaacttccctttaactttgaatcttctcataccccggattgttgacacctttaaatatacatgatcaccctccttaaactctagtagccttctttgggtatccgcatagcttttctgccttgactgtgcagttctcatattcacccttatttgatggacttgttcttctgcctcttgtataatttcaggtccaaagaactacctttcaccagtttgatcccaatacagtggagttctgcactttctgccatacaaagcctcaaacggggacatct

SEQ ID NO: 63077 - DNA, 964 bp, Zea Mays
gaaattcttaaccactccaccaatactcaagccaccgcgccgagctacgcctggttagcctacagaagatttgctgctatatatctcctgcacgactcacgtggtaagcaccaagttagtagtcgagcaggtggaagaagggcacacaaacccagtacaacatccagtttacttcatcagcgatgtcctcggaccctcgaagataaggtatcctcatgttctgaagctattatacgcggtacttctaaccgctcacaaacttaggcattactttgacgaccacaaagtcatagtagtcacaggatttccaataggtgatattcttcacaacaaggaagctgttgggaaaatagccaagtgggcgtacgagctcagagctcatgatatagaattctgaccccgcacaacgataaaaactcaggcactagtcgacttcatatcagagtggactgagcaccaggtcccagaaagcctagaggtcactgaaatatggaggatatacttcgatggctcgctgagactgcaaggagcgggggcagggattctctttatcgccccggaggtgaacaactcaagtatgcactccagctcttatttccagcatccaataatacagcagagtatgaagcactgatccatggggctaagcatcactgtttcactataacatcccaattttaatcccaaggttagaaaccctaaattcctaaacccccccttaattatcccctatgacccccacctcacgagacatttcattcatcatatgcatacactatggttgttggtagcacctatcatataatattttgacacctaagaaatttaaataaatatttgtttaaaggaaaaaggcgattatagaaaaggagaaataaaaatagatttggaaataggaaaagaaaaagaaaagggaatttctctcccccccagctgggccgattccggcccaagtccctccccc

SEQ ID NO: 63078 - DNA, 633 bp, Zea Mays
caaaccctaattcaaatcccttgtaggcaaatggagccctagaggggattatggcaaaaagtctatgtaaatcacattgtcatgacttggactaattataaaagttgtaatacacttaataccctacaaaacatagtaatagtatgaccccaaaaagaattcagaagaaccccaaaaaggtcaccaaagagaagagcataaaagaaaaatcaggatttgctcaagttcaaaaccgaccatctttcaaagatcaaacatgttcactttaatcccaacctcaaaaccttatggcccaattgacaaaatggcgcccaaagacccctagaacaccctggaaaagtttgaacccaaccctaagccatttggcacgacttggcatggcttttgtctcagtgtggacagctctgacagagccgacttatcacccctatatctctctaccctgaccatatctttgcttggaactcacataaaaaaggtaggattaggtgcagggaagagaccgtacatgggggttttgccaagatctgcacgctaaggtgatcaaatcggccgttgaaccctggcagaagtaaacccccacgtgttcgacgtgggctgacactcgggggcgcgctcagagcacgcccgcac

SEQ ID NO: 63079 - DNA, 455 bp, Zea Mays
cgagttgatgatgggcaggaggggtttcaacttgggctacgcgttcatcaacttcaccaccacgatggcaccccgcatgctctactacgccctgcagaagtccggctggaccgtgtacggctccaagaaaaaaaaaaacgaccacaaggatgcgtagcagcagctgcagcctgaagccagtagctaggaaaaggagtaaacttgttctgagggaaaggttgggggactttggacggtagctgcgtctgcgtggtggtggtctgatcgggatgtctgtagtctgttccgtagagctagcgtagcggtagtgtctttgtactgtggtgtagtggagagtgtttgtgtgttccatttccatgtcatgtgtatacggtgtacctgttgtgtcttgaactccgatgaggatgagtggtagcagcgcgcggctgggtgtatggtttgtagtactagtaggc

SEQ ID NO: 63080 - DNA, 524 bp, Zea Mays
cacactttgagatgcatctggatttatccttaaatccgggcgtgacaactacatctgattctagcgctagatggagtcacgctcagcgtgtgaagaccatcataggaaggatccatccctaaactacacatgaaaatagaataaacccctaaagaatccacatggattactcggggttgggaggctacatgtagcagatgtgcttatgcgcacagcgcacacgagaattcagtcttcaacaagatccagtgatcatagattcacgctcagtgcgtgacaaccatcgcaggaagggtccatccctaaactgcacatgaaaaccgaataaaccatcaagcaatccacaaggactactcggggctacatctaacagatgcgcttgcacgcacctagaaatgtaaattctcaaacaacagcctccgcacaactctaaggagttacacaaaaggctcgggggctgttgtcgagtacataggaaccgagtgcccaaaataggaccaaagcctcttaacggcctatttgcc

SEQ ID NO: 63081 - DNA, 1294 bp, Zea Mays
cgtgatcatgtctcatcctattgacagggactctaacgcctccccgccgtgccgtggcatcagccaagacggtatttagtggcgacatgccttatcgtggctggcgtgggtcaacattgtttgcctcgttttcacgttaagcgggtgtaggtgtgcgcctacccgccatgtggcagagggtcgtgtaactggaacccacggatgtaccagccctcgccacaggcccttatgcccccacctagcccagttgcttgcgcaagctttgatcgaatcacccccctcacgtagttgctcggtgggagttggtagggacgcccacctcatccagttgctcagcgaggcatggttggtccgtccgcctcgcccacttccatggtgggacttggtcggtccgttcacctcgcctggtaactcggcgggacttggctggtcttactctcgtggcttcttgcctagttgggccaccataagtaatggatctactttggatacctcgttcctgagacccgttagcagcacccgagcttttgagcaactctttggagttgctcaaaggctttcttgttgggaatcaggatttttgatgcgcgcaagcgcgtttgctagatgtagccctccccccgagtaatatgtgaggattgcttaggggggtatttcacgagtgtggcgttttcgcggctttgggcggaccctcttttgcgatggttggctcggttttatgtctgataatgtgcttagtggatgtcgatgacgcgtttgggctcggttgtttggtagtttttttgcacgcatctctccccagagagatttctagtcttttgggggaggttcgtccatcaccgacctagtcgcgcgtggagagggaggtcgtcgagctgctaatgggttatccaagtgagatctgaccgccctcaggtagggtttggtatggctagtggtcccacttgggggctcgccccgttgggtgaatctcatacaatccttccttactcgaccctctatcggccctctggttcgacatgcgaccaaaggggggtcagtggcaccccatcagctggtttaacgcaagggactgtgaggtacgaccttagacacgttctcaaccccaaattaactatgagtataattacattggtgtggtcgtcgaccactccagattccacactcgtccttcaccactcacggtgtttttacacgaatccacatgatatttaccttcttcgtcgaccactccagattccacatatgcaccacaagtcaaaagacacgctacatatacacacccattttccta

SEQ ID NO: 63082 - DNA, 808 bp, Zea Mays
gtggggtagttcgattattattctgtattctgatctttggtaattgattgttcctaatcttgatctttgaattgaattatactctctcatagtgtattagtactgttaataatgcgtgcctagtctttgaatctaggctatctcatgctgtgttggtattgataaagatgcgtgcctgtgtttgtttttcgattttattcacttcgacataaatagtgaagctattaacttaatggttgtcatcatcgattgtgaggattaagctattattatggtttccgttactgatcgctggattagctttgtgtctcatcctgacgttttcttgctgctggatgtcatttgaggtataagaaatattgagcacgagctgaagagattgagagaggtattcatagagctgggtaggaaacaaagctgaataaggcattttcccatattcatcacttattttgtagatatgaattgctatagactgtgttgtgaattttctttcgtcgttgcgttagcaacacattgattttggcgcatcgtccgccactgctaacactgtccatattcttaggaattggacgcaagctacagcggagggtcagatccaattcttccttggattctctctctatctagatcactgaagaaccaatggatacagggatggcaagggcagacagcatcatttctgaatagttcttaatctttttatcttttgggggggtgggggtgggcggcatctctaagctttggcttttgaatatgatgcagcaggtagctgagtactcaaagaatcaacaaagtgacaagcaca

SEQ ID NO: 63083 - DNA, 295 bp, Zea Mays
tggcaaccctcgatcagaggtaatttagctgagaaacgaagccctgaagaaggacaaaattctaatttcattggtgaataaagtgaaagaagatgaggcaaaatacaacgcccaggccgaagctcataaagccgaggttgaagaccttcggaaaaaacttgtcgaagccaatgaaaattgtgcggtcgcaaaggctagccaagagattagtgaatggtggaagaccaaactagagaaaaatattgaggagcttcgtgaatccaaggaaagatgttttgaaaaatccttggattgt

SEQ ID NO: 63084 - DNA, 608 bp, Zea Mays
ttattttagattatttttagcaaataaaaggcatattatccatagttatatggactaaaattacataatctacccgtcccgcccctcacaatcacaattcacgaccatccgacgccgcctcctgaaagccatcccgccgcccacaaccatctcacgccccttggagattagcctccatgttttatttttagttaaaaacaatgttttttaattttatgttggaaataaatttgtagaaattttttacctcgttgattctggatatcgaaccataaggattatttagctccatacaaatatgtgaaataccatttgccagaatttagagcgggaccacgagcaagtagaagaaaagaggtactcaaccaattacactcctctctttgtaatcatattgagtgtctttcggtgttttgaagataaaatggagaattttactggatttgtcaagctatccaatgttgaagcagtcgaaaataatacgtgcatgtatggccctacataatttcattcgaaacagtaaactggccgacgaagagtttgatcggtgtgatcgagatgagaactatatgcatattgcttcaacacatcaagatagtacaagtgaa

SEQ ID NO: 63085 - DNA, 594 bp, Zea Mays
caaatagatccatcttatcttaaaagactctctcttgtcttaatagattaatcttatcttgaaggaatcattttatcctaaccactttacttatctcatcctaaagtaacaaccagatctaatccaaaataataatatcatatctaagttatatttgtgtgactaaaactacttgacttatcccaccatgatcatgatctaacccaaattaattggatcttatctagtcaaagctagtgaaacttggatctgagctaatgtgatagattaatctaacataaggaaggctaaggttgagctaatctaatataagttgcttaataagaaggataataccgatgaaataaatgagactctactcctataaaatatgttttaatttaattcactctgcactaaagaacaaaagaccaactcggccatatgcaacttccttaaccatccgatggtttcataacccctctgttttaacctaacagagattctgacctacctacaccatataatccatcctatcttaaaagattctaacatatcttaaaaatatacatcctaccctggtcgatctatctaacttaaactagtctagtctag

SEQ ID NO: 63086 - DNA, 594 bp, Zea Mays
ggctatcacataaaaattggagaaaactactcctcaacttgggctgtcagaacgactgaaggtggtggccatggtacagtactaaaaaaatcttcagattcatccccctcgccgttggtgacctccgcgcaaggattcacgctaatcgcggtgatttgtgcaggactcggacaggatagtaccagggggtgaaaagatcggaaggggagtggatttggtcgcggggtgaagcttatcaaccgcacttgtagccatgcgacgtggccggaccgccggtgtcgtcatggtactccagcaacctcagctacgccacgccgtagctctttaccacgtagtagtaatcgtggtgcgcctggacttgccatttcaagagacgttgcaccggcaagcgccacgactgaaccgctagtgatcttccttctctctggccgctagctttcatttccaaaattcggagcctcctcttaattcccctataaattgatggcccggtctgctgcgccatgttgtcatgaagccagagcaccgactcccgccttcgattagccaccatagccggagaatttcattcttcccccaaatcagttgtctgcg

SEQ ID NO: 63087 - DNA, 604 bp, Zea Mays
tggtctaggtcttcgccggatggcgttgttagcctgtatgcgctgggggacgccttcgacttgacgatgaatggaccctcccactttggctccagcttgccccgtgactctgtccgagtggttcagacgagtacgaggtctccttcggtgaattctcgtgggacgactgcatggtcgcgccaggccttcgtttaagcttggtatttgttgagggcctgcagggcgaagacacggtctccgttgatgaggtctttggacgttggttcgtctacgtcggggatggctgatgcacttgttcgtggtgacccgtgctttatttcctgcggggtcatggcctctgatccgtatagtagatgaaaaggagtgaatccagtcacccggcattcggtcgtgtttagtgaccagactacttcaggtagttggtcggcccatttaccctttctgtcgtcgagaagccttttcttgatggcagtgaaaatcttgtcgttggcgcgctcgacgacgccgttagattgtgggtgatatactgaggcgaaggcaagcttggtgccaatggagaagtagaagtccctgaagtcctggctgtcaaactgtttgccattgt

SEQ ID NO: 63088 - DNA, 839 bp, Zea Mays
gtcattttaggatcctcttgggtatatgtaccaagccaaagccccttatccatcctctacctcgtcgtgattcaacccggttgggagtgatgtaggcggagcggggaaaagaagaaatggctgtcatggttgattccctcttgggaaactagtctggcctcggtaacctgtttgggaggaagggatgagctcgtgggttgtggccgtggccctgcttggcggagaggagcctcgggttgagggcaatttctcgctggtgcttagatgccaccatggagctcctacgcaccatcaatagaagctatcgcgatgtaattcaaggtaaggtatatgccctatcgttcatcatactcccttgcatgttctgcgcttgtgttggagcgggtcgaggtgttgggtaatgtggtggtgccttgccgcggttgagcgccgccgtggcaccacgcggtgtcgtagtcaagaatttgagctcgatgttaggatttgtgcgttaggccatgtgattcggggtggtcatggcttcgttcaccctgggtctgttgtgagattagaacctagagtcgcctatccatgtgccccagttgggtttgcggtggtgctctagctcactgtcacagtggacggagggaagaagaagacgagactcagattgttgatacgatgatgggcggaccagattagtggagcgcaacactatggccaggtgcaatggtgtccgtagatcatctagcgagcgaacgagattaaaaaggaagaaaacgattcaggtacatgaatcgtggtctggatctatgatcctacgggcacaactacttactggttcagtggatggatcttag

SEQ ID NO: 63089 - DNA, 573 bp, Zea Mays
tggtgggtcttgccctccctgctccgttcttggaccaaggctgtgctgactgcgttgggtgaagctgtgatgtagagtagtaggggtaagactgggtctgggctggttaatgttgctagatcagacatatattatttcaaagactcaaaggatgtggcttgttctgggcccgaggtgaagtcctttgcatcgcccaacgttttgaggaaaggaaggcttcgctcagtggattgtgagatgaatttgttcagtgcagccaatctgcctgtgagccattgtatgtcttttgttgattgttgcggtgccatgttcatgatagcctggattttgttggggttggctttgattcctctatgtgatacgaggtagccaagtatctggccttggcggacaccaaaaattcatttttctggattcagccggagtcgggcttcacacatgtttgcgaatgtttctgcaaggtctgatatgtggtcttctttgtttttgctcgcaacaactatgtcatcaacatatgtgaacacattgcagcccatctggtcttcaaggattttttggtaaggcgggagaaag

SEQ ID NO: 63090 - DNA, 339 bp, Zea Mays
gggaagggtatcacctaattaggggcaatcaaccaacacctaatagggaaggaaacctcctaaacatggaaggaaataagctaacaccctctcgcagtcgaaacgtcgatggcgcagacgttaagactggagcgaaactcggagaagtgtccgcaaaatgagacgtcgttgggacatgaacacgaacatcaccaatggcaacgcactcgcggacgaagtggagatcaatctcgatatgcttcgtgtgctgatgctgaacctggttagtggacaagtagacaacactgacattgtcacaataaactaaggagctcttggtcaagggactgtgaagctcct

SEQ ID NO: 63091 - DNA, 610 bp, Zea Mays
ttcattgcaaaccgatccatcaaaatataaagtccaaggagtaatagtgaggtatgatatgtctagtttatgagtatcattaatccgatgttctacaataaaatccgctatgacctggcctctcatagatttcaatggttcacaggccaagtcatattctatgagtgcataagcccacttaccaattctaccactcataattgggttatgcaacatgtatttaattacatcggcttgaccagaaacagtgcaatgactagacagtaaataacatctacacttggtgcatgcataaaacaagcataagcataacttctcaataaaagtgtacctcgtttcagcatccaccaacctccgacttagatatgtcaccacatgctcctttccttcagtttcttgtgtcagaacagccccaatgaccttatctccagctacaatgtataatcggaatgatactcctgctcgtggtgcttttaatacgaaagccgaagacaagtattttttaatgagatcaaatgcttcctgttgctctgcccccaaacgaattcggcatcactcttaagtcaaaggataggggttgttgggggccttcgacttccgaaggtcctta

SEQ ID NO: 63092 - DNA, 451 bp, Zea Mays
gtgctgctgtgcaacaggcacaccaacccttgaagcaagggcgggagctacccgtggtgcgacgacaccactccttcccccatttggatgtcggaggtggggtcgaggtgctcgacaatccgaaccatcatgtcaagcaggaaaataggtgaaaaacctaagctaaggtcccctaccttgctcgtcaaatgttagaggtaatctccaaccgggtggcggaaagcacccgcctaatcctaacaacgagtggttgcatagggtgtgcttgtggagatgcaagaacataagaaacacaaggatttagagtggttcgggacatcagagcgtaataccctatgtccattgtgagttgtatttctgagtgcttgagcatggatgatgttgagtttgtgtgaggatgagcatgagcctatcccttatatcgcatgtgccttcccttttatagtccaag

SEQ ID NO: 63093 - DNA, 303 bp, Zea Mays
ctttgctacaatatcaacagtcaatgataaacggggtccaccaagttgcaaagcaccgggcgtataaatatgaaccatagtggcagcatttgatacgccatttctgccatttgcgttattttctcttgctcattagctcttgcctgattttcgagtttttagagctttggtttaaagacatgttttgctccagatttgaaaacaagaatatgagtggaaagaataagatgactgaagagaagaaaacgaccggggagacgaagctgtatgaagagaaaaaagttgcagatcctttcattgttg

SEQ ID NO: 63094 - DNA, 962 bp, Zea Mays
gtgggtcacgcaggtcatggtgctcacaagaatcagcgtcggaccactagaattttggttggtcgacaccgacgctgtcaacgggttagcgtgcgacgtcgagctcgtgttccaacaaaactatgccagtaatggccaaacggccaccacggtgagcttcactagcacacagggatgctcaaacacaaatcaaaggcatagaaccataccgggttcgcctggccacgggaatgcggggatgagcacgctctgtggggtccgatggggataatggatgtcgcgatgaattctggcggaaacaggcagtcacactagagctatacgatcgcaagggactacaagttcaccgtgcactaccaatttgggacgaggaagggaagacaccgcgaattttggcttctaccgatcacaccggaagacagtgaagacctcactatggttcatggagcaatttaaagggatggcgacctagctagctatccgcggtcacgaggcacgacgtttgtgcatggcgaccacgtaacaaagaagcacagtgtggtagaatttaggcgcgagtgacaccgcgacggaagtaccgagccccggtagccgtcggtgaaatatccctaccccgacccggcctagtccacagctgtgaattggcttagagttatcccaccccagccatctctatctcatcttcatttggacacattcggattctacagtggcacggatcttttcttcagatatttcaacaccatggatcttccgtgctcgactgaaccgactccctttaatccccttttttctcttaattcctgttaagaacatgttaatctctattaacaagaattgttcaccagacaatggtcttcaaacttactataggattctaggtcctaaactgaacagattctaagatatggtgctcacaaatcggccacatttcactgggaccattactgttctgaatccag

SEQ ID NO: 63095 - DNA, 543 bp, Zea Mays
gaactgtggcatgctctgatctaatgtaggaggcttctcacgtccatgacactctcatggccctcactagtccgcctcgccatcaccgatgtcgccgtcatgctcttcactctccatgtcgagaaggtttaggtttctctcctctcaatcgatactcccaacctcggacgggagacatagtcacaaatcacccgagggcaacctccgatgggagacgcagtcatgactcgcccaaggccatccccggccaggagacgcaatcacgactcgtccgaggccagcctcgggcaggagacatagtcaccactcgccctagggtaggagacatgttaatgactcgccccatgccaaccctaggcagaagatgcagtcacgactcgctcgaggccaacctcgggcgggagatggtcacgactcgcctaaggccaaccccggacaggacatgcagtcacgactcagtcaaagccaacttcggctgggagacacagtcacaactcacccgagaccaatcctgggcgggagacagtcatgactcgcccaagg

SEQ ID NO: 63096 - DNA, 1089 bp, Zea Mays
tctgaattgcctaagatcaaattgcttgtcccagccgacgtgtccatgatgggcacctcaacacccaaggggttagaggccacttctatcacatgctttgttccactctttcttcatgagtaaaatttgagtggagacttacttggatgcagatcggcttacatgggggaggatctggtttctcccataggtgctaaccaaggagctttagcaccatctcggttcagctcttccaattgagattgggcgagactgcgggtacggtactcagtgtctcaggcggcccaacaatatggggcgagaccacaagcgcacagtccgtctcaggcggcccaaaatcggatctagaggtggaaaatactgagacatggagggtcatccattggggcgatcctgacctagatacctggggcgagactggtcctaaagtatgtgtctcaagcagcccaagagcatggggctagacctcagacaagcaggtcgtctcaagcagcccaaggacagagccagaggagggaagagcggggatatgaggggccaacaattagggcgatcctggcccatccgaatctagcgacccagtctccaatggctggggcgaaatcgtcctagggggtcagcaacccgatcgtaccattcccattgtcttcggggcccacctttagggaactattcatctgcctcctgggtcccgaccaatagtatcgggaagccatggcagccccaaatcttcactcagggtcaactcagcagcttgtataccacgcccttcaaggttgacgaatgccccagcactacacctaagggaactggggctgacgcatccgagtccctaggggcacgtgaaaccccaccccttccatgtggcggctgtggtactagccggagatggatcgaccgccgcctatcagggggaccgctcgaacgccaaggaagagaatctcgtcgatcccgctcctcatgatcatcgcaatccctaggctggtgaccatccatcgaagggaagggaggccccaaccccaaggcagcgtccgtagtatcagcaaggatcacagtgacactgatattgtatgttagacaactcctttc

SEQ ID NO: 63097 - DNA, 632 bp, Zea Mays
gtggaaacagctgtcgaagaccccgcggcggcgaccaggcctttgcaggtggcagaataggttttggagattttaagtgtaaactgttgtctctgtgatactgaacctcggttgctgcgcaggttccgacgtttgggcctgcgcaagcaaccgctgctgactatactgattttgtggcggcctcaaccatagtgcctgccaatgataatttgtctgtttatatgtctgatgattttgagtccgatggtgaatctgggagtttgtttccttagacggaggagtcctcggatgaaggcttggattattttgttgcgttggatgtggctgcggcggaggcttcatcgtgtatggagggtgccggggatcttcctagtgcgggtggagggcgtatgcggtgaagggtggtggggaaacatagtgtgggtgagttttcgtggagtggcaggcgccgtcgtattgggatggagcgtgaccgtctccgtgtaaaccgggttgataaacgagaattgttgtcctcgtcggctggggcgagcataggcgagggggatcttcgggagctttttgagggtgaggaattgaggataatgctgtttaattacaaggagatgggtatcattccgaaggttgagccg

SEQ ID NO: 63098 - DNA, 766 bp, Zea Mays
gtttttttgtcgcaaacttcctccggtactacgattttgatgatggcgacatatcagaattttatgtaccggtatgttactaaattagtgttttgatcatgcatatattaattactccttcatacttattcttagcattaattcaatattatgactatttcaggatgaaccattggaccaacgtgcttttgttctgcattacctgacctttcatcgcaacaacatggttgtcccgctccctgcataactgctgccttacaagtttgctccaaggaaatggcgttgtttgaaagccaagtcttagatatcatagctgaacatgattccctatgggatccccaaaactgtttatgttacttaggtgttgcttatgtgtatgatactcaatatgacacttatgttcgatgtgtccagtatctatgctacttcgtatcagtttttatttcaagtgtgtaaaacataagtgttaccagactgtctagttatgttatctgttatgaacttctatgcttctgattttccagattgtgagatggttaatcgtgtgcgtccaatgttttgcgtatttctattatcatattatctttaatattcaagttctatgcaacctatatacttccttattttatatacattaggttccttttttacatattttaccatgctaattatgctaactgtgacccgtggttatgttacaacctgtctggtgtagctgtaatgcgaaacccgaagtatgtactcccatttgattagttatgttaag

SEQ ID NO: 63099 - DNA, 346 bp, Zea Mays
caaaggtggtggaacccctgggctcgactctggtggtggtcgtcaaccaccaatcgacatccgttctcgacttgctccaggacaactcgagccacgattcgactaggagcaactccgatgtcgaggaggcaccgaaaagggtctgcttcatggcaacgcccccgccaaaagaaaacgacaggggagacaaggaggccccaatcaagagtaggagtaccgacaacaacgccaggcacgcatcctagcatgagaggcctcgctccatcagcagcaagaggaggtcaacacccttatgtagaagttcgaccgcatctatgacgatgtcgagcgaaggcgcctcaaggcc

SEQ ID NO: 63100 - DNA, 368 bp, Zea Mays
accgctccggtctggcaccgaatctgaagcaacgctgactcccctccctcgggtgctgtcccgcgctcaccaggctctccgggaaaccgaggtggctatccggcgggagtgggaggcgctcgagaccgagcaccagcgccttggcgactggtgcacccaactggaggagcgcactaaggcggtgtcctgccattttgcctcagaacgggccgagtttgagcaggagcgtgaggacttcaaggaggacatccggaaggtgtctgaccaggaggacgaggtgatccagaagaagaaaagcctggctaggaaggagatacgcttagaccaaagggaggagaccgtcacagcgctccaagctaagctgaaag

SEQ ID NO: 63101 - DNA, 311 bp, Zea Mays
gttccaccaactctggtccggacactcgataggctctcttggaaataggggtggtgcctggtataagctctatggcgaattcaaccttcctttcaggtggcatacctggtaactcatcgggaaacacatctgggaattctgatactacattaatagcctctgatggtttaatctcctcaatatgggcggtgatttggtgatagcttcctttccttggtccagacaagaccaactccactaacacttcttctcctgataaggacactaacttcaccgttctcttgtcacagctaagactggcttgatacttg

SEQ ID NO: 63102 - DNA, 668 bp, Zea Mays
gtgcgtcgcgcagcacggacgcactgtttgacaatggactggacaggcgcgccgtctgcaggatgaccctggcgccacctgccagcggagtggacaggatgcattaaatgctgagggggcacatcgcctgtcaacagggtggacagatggcgcatcctgtccgcaataaatgcagagaccgcgcggcctagaggccttacgtcaggctccgcccgctggcttatgtcacgggcaacaagccacgcggtagcatcgggtctccgcctgagcggggagcgcaagcgcacaggataaggcctgacacgtgtcagtaccggacccttgcttatgccagggtatcccctgtcccgggacctcattgtggcccggaccttactcggagggatctggaccccatccaagggacccgacatgcttacttgggagtcccggaccataatcgggggtctgggttgtgcgtacaggggtccggtgcttcctcgcggaggtacggtccaactaatacatcctgggatgtatcatcttttctcgccacgtggtgccccttgagccgtccacatggtggggtcgggtgttgttcaccgtacggctagagatcgccgtacgggcaccatgtcttcatactgtagcaaggggtacccctgattcagggtaccgacagtggcccc

SEQ ID NO: 63103 - DNA, 341 bp, Zea Mays
ggaaggaggcaggttccaggccgagtatgcaacaggggcaccaacatttgataccttgcctctgagtatcatttcgagccggctcaccaagcccacagcaggaattcttctgttggtgacccgggtggagtcagctaggccacggtacagataggccgggtatgccctgtccttcaatggttgaatattcttgaagacaaagtcagcaaccacagcctctgcagtcagacccctctccttcaacaatccaacttcagctagcagaacccctgcctcagccacatcctggtctgtgggggattcggtccagctcggagtgcgaacatccggctgtctccctg

SEQ ID NO: 63104 - DNA, 630 bp, Zea Mays
gctctgcctgtcacatttgacgaccccttcaacttttgcactgagcggctgcagtttgaggtggtggacttctcgggggtcctataacgccatcctcgaaagatcgtgctacgccaagttcatggtcatgtcgaactacacatatctgaagttgaagatggctcgaccacacaaaatcatcatgacttccgcttcgttcaaagccttgtacacctgcaagtaggccaatagcgagctcgcctcaacgcttcctaaggacgccgcctgcgcacccagaagcggatcttggaccctcgatcctgcagaagacaacgagggcttcccgaccagcaccatcgaccaccctaagtgtgcgcgaattagtgcaacactcctcgacaattagggaggggcactcgccacatcaacaaagaaaggcacaagggctgcgatgaggaggctgtgcaagatctagataggaagggtttgtaagaaaactattccctagtaccagacccaaaatctgtaccagctaggacagatgaatgaaactcggggggatgtatgttaaacaattcaagtccatgaataagagcgggctccattccttctgactaggcctgcaagcggggtggatgtaagcgggtattt

SEQ ID NO: 63105 - DNA, 294 bp, Zea Mays
aggaggagaccctcaacattgatgagccaaaaggtgacaagcccaccgacttaggctcaaacaacaagaggaaggagggaaagaagaagaggcacattacgaagatcatctactacaacaacgacgcctcctcttcttcactaaaggacgacgacaattcctctacaaaaaagataacggttagtcaaaactattcttttgattattctcgcatctcatataatttgaatgctcatttattgtctatttcgcttagcaagccccctcactttgatggggaagacaattcatttt

SEQ ID NO: 63106 - DNA, 751 bp, Zea Mays
ttttatttgaaaattttgaactcagatttgaattataattaaaacagaaataggaataggaaaacaacaaagaaaaaaggagtcgggtatacgccgtcgggggccattgcgaaggagtcgtggatggtcggtctgctctgtcacgttcgtgcatggatgggttgggtgcatggatgcgttctcttgttcaggaatttcctcagcagcccacagtcttttgaaggcgtgtcggaccggatagcaatggttcagacatgggacctcgagcatcttctcgaatggtcaatggcttcctcgatcgacggtttctttcctttctaacaggccatgactactagcattttgttgtgcctccacttgtccttcttcctcttatctagttgtcctctatagcctccgtcgggctctttattgctcttggccttctgcctacggtggtagaaaatcggcccactgcttcttctctcgatgcgtggtttgttgcgatgtcaagttctctcgtggtccatggggcttctgcaccatagcttgtgcaccagagtctcactcgtggttcccatgatgaaagcactaataatttcggtgtcagcgaggttagttaatttgttgtgttgtcgcgagaaacgccggatgtagtcccgtaaggtctcatcaggcttctgttggcaattcttgaaatcccatgcgtttccagggcaaacgtacgcgccttggaagttttctatgaaaatttcctcgaggtcggcccagt

SEQ ID NO: 63107 - DNA, 507 bp, Zea Mays
cttgggcgcggttcggtcgggagcgccggtgaacctgtgccaggcagttgttgcttcgcaaccctgctcggtcagggttgaagatgagttcgtgtccatcagattcgtgattaacggctaggattagatgaccctagaaccgaatcggggcggttggatcgcgattgtgcggtccggatcgaataccacgtaacccttcgcccgggagtaatgataagcgtcgatcttagattgggtggacacgggacgattccggtacattaaactcgatagctaatattagatcctacaactacagtgacttactggttcaggggaagcacattttaatctgggtcgtgtgctccacatccgacggcctagattttagggtacccatcggcctcgaaatctttctaaagagcccctcagttttgttataataaacccaccgtcctagcatagttagaaaatagttaatttaggtcctgttttaacagttgggtccctgcgctttcactaaataat

SEQ ID NO: 63108 - DNA, 563 bp, Zea Mays
ggagtgtcaaagtcgcatattcctgtgacgaatgcaccgatgagagtagagatacctctgtagagtatgaactccgcttgtactcctcaccctaggaaaagagtgagataaccgaatgattcagtacatgccaagcggggacgcctgcaacaacaaactactgaagaggatacatggcgctcccttgtcctagaagtgacacaccctaaagatgaaagtcctaattcaaatgtgcgcacaaatgatagcatatggactacataacaactggtctcaattaatttaggaattcacgatgaaccagatgattcaattgaagaaattgccacaaactatgttgagacggaggagttgtataactgaaagactacagatgtcgacactgattttgtctctatgatcgttgttgcgattattgaggatcctaaactaaagtctgtggcagagtgacagaagcgctctgattggggtaaatggaaaaaacaatggatgttcatctggaagagggatgcaaacaatgtggcagtgatatacaagcaaggcttgtagcaaaagggttcacg

SEQ ID NO: 63109 - DNA, 592 bp, Zea Mays
atcaaccgcagatctaatcttggcccttcgaccaagcgatcaatgatcccgagatcgtcaccttcattccggtcagacatgcgaccaagaaccaagtgttgcgacggcgccatcaccggcaacctggttagtcggccccagctaccccaacctacgcatggttttgcagaaaatagagaggagggtatgtggaaaatgttggtggttgacttacgagtgatcgagctatggtgaaaactgtccatgcgacacgacgacatggggaggaagcccgccaccggcaagaaattggcgtccaggagacggggctctcgccaatagggactacaggcatgttcgatgaactccggcgaatcacataggtaccccaggatggtcaaatcctcccagaaatcctgatctcccccacggcgggtctcacccaccttcccttttgctgtttcttcctcacggtgctctctgtgcttcagcgcggcaatggcctaggggaggccgcaggggcgggtttatatgctcccggtcggagccacaagggcggcggatgtagcccaaaacctccggcgatggtctcggatcaaggggacccgctgag

SEQ ID NO: 63110 - DNA, 511 bp, Zea Mays
gaaacagaataagtgaccgtgccatctgttcgttgcttgggttgccgaatgttattctttaggcgagtaccatatgagtgtgtaggagcagcagccagatcttcagcaggagctgatgcaatttcagcagacggtataatataaacttgatcagaatcagtagatgccggagagaataaatctggcgagaaaaccggaggcaaaatgctgccatcacagatggcaggtactgtggagggccctggcgcagaatttggtgcagcagtaatgggcgcagacgcgttgtcccccgggaaggaattgtcgggcgcaggtgacgggtggtctgtggcactcggtgctgcatgaaaaaacttaggaggcaacaaatcaagcaactgattagtattctcgttagtaccggtagcaccctcatgctggccaaagttggatgaagattttgagaaggggaacacaacctcatcaaaaataacgtcgcgtgaaatatagacacgaccagtttccagatcaa

SEQ ID NO: 63111 - DNA, 837 bp, Zea Mays
gccggcaccaaccccgctgtagagtgtactgcttccgacgcgtacgcgactgcatgcatgagcgatatataatgtcaccttggtgcagactcctgcgctccgaaggattttttaaatatttttaaatatttttaataggatctgttggctctgattcgggccaaacactaggggttgtatgattgtatctctgatggtgctcggcggcgaggacggcagaaggtccgcgaccctgctgcaagcaagtcttctctcctgctggctggatggtccgtggtttaggctggacggtacgcgaacgcacaaagggtcgaagaaccctagaactcactccaggagggatcccacaggagagttctagagagggtgccctaggaacggcaggccacccaggaggtccttagacgacgaagagtcgaagagagatgaatattggaggtttggaaaaagctaagctaggtctaaattacgtcacctcctaatacgataaaaaacgaaggaaataaagtagatttgattgattggttcgattggtgatactcgcaatcgtatgtaccccttcatatatatagggagaggtctggatcagttcctaggtgtttatcaataaaatttgcgtatttagttggataaacacacacaaaaagagatattttatcttatctttactatattaaagcatcagtttcaacggtcgtcccgcgtcattcttttataaaaaaccacttttatttgtttgaaatcaacccgcgactctctgtctcacccgaaggaatagacggatggatagcccatagaacacagacaccctccctttctctccgtactatctacaac

SEQ ID NO: 63112 - DNA, 925 bp, Zea Mays
ggtaggtgtagtagtagaagtagtagtagtgagtagggatcttttgcaagggtcggttcataataaaccggctcttcttctgtaatgtcactcctgcttatataaataaagcttgttggttttaactatcttgaatattgagtttcttttggtctcattctgcatttggagtttaattgttggtactgagttccttgttatgttcgatttcctgtctcccgactgatctctcccgattgattctacatagaagtgtgtttcctatccgacttagtttgtctgacttaactcgtccgactttactcgtctgacttaacgtgccctacttagcatttcttccatttgatctgaaacaatcatttctctcgcgttggtgcttgtggaaggtctggagcaaacacgtatatacacgcccactgtctgacagcttctagcgaacaaaccctagctctattctttcaccgcaactctccactttgaatttctcatgcatcagcgaatccacgctcaattccaagcttacgaaaggtctcatggcgcccaggaagaagcagggggcacagcggccgtcatccccatatcgatcccaacagccagctccccttctgtggtaactatgcttccgttgtctttgaatccgatttgctccaccttgtccaaattggtgttcttccctcggaggagttgtgtttatggcatatttggcaagggactaccgtgcccatggaggatacccatgaatccgtggttttcgtccctttctttatctaaggcctaggtttgcccatttcccccttattcgtggcctccttgatttctactccctcaatataactcacttgaaccccaattatgttcttcaaatttccatcttcatgcatctctgcgaagcctatcttcaaattagcccacactttggactata

SEQ ID NO: 63113 - DNA, 537 bp, Zea Mays
ggacgtacgcacccaagtctcgcagccactcatggcccccacgtcagactttctctcacacatttttttacaagccgacctcacaaccatttcttttctcttgcattttcttgtatttgctgcagccgggtcctacttctcattaactggtgctctttcgtctttcctcatccttgttctcgcacacacgatggacggaagacgctgctgccgccgcttctttggagttaggaaacgccgccgcaaccgtccatttcttcgatgtctcgtctccacactctagtgcgccaccagagcacacattgcccatctctctttgcctctctctatcacaccacaccattactcgcgatcgtttcttccccacacagttaaaccgccattaatggttttcatgcaccttcaatccggcgcccctccgtgtccctccacctccttggcaattcgtctcgccgccgcgatgtggaggaccccatgccaccttctctcctttctctatctcaattaaatcgattgtttctccctctccactttaag

SEQ ID NO: 63114 - DNA, 768 bp, Zea Mays
accgtgtcggcagcgatcgctttggtgaggcgaagtcgggcgtagcgtctccacttggtgccgcgaccgggagcgaaaccaattggccgccgattcgagttaggcgtcgcgcatccttcgctcgtcgccgtcaggacgaattactacgtcctacacggtatgcttcctccctgttacattcaccgcatgcctagggacgttccgcaccgcgtattactgaatgggggcagcggtggggctatgaattcgtcgtcgtagttgcctcgtcgccgttcgaccgcattgtgtcgtggacagtagcgcgggatgactgaccgtagaaattgagcgtaggatcgtgctcgctgagaactaccggatcggttggaaccgagagaggtcgcccttgcacccgatcgccggatttcggcaggcgcactccatgggcggcggtggcatcgccgggaggttttgactggtgacggtgaagactctcgtgtgccattgattggattgttaacgaccaggattgtacgaggggcgatatgtgttctggattggcgtcgtccgtccaatcacaatcgggcgaacccaaggcgatcgcggtagcgttgaatccaagccgtgggttgcggatcggaaggtcaggggcgcgtaccgattcagacaatggtggatctaatcctagcggccaagtgttgatcgtactgttggaatctagcgttacccctttgtcgtgtctgttttgcatatgagcccctgcgctttccgtaaacaagcccgcagtcc

SEQ ID NO: 63115 - DNA, 562 bp, Zea Mays
cttttatacctttatactgttgtatgctaggctgtcggcaagatcatccttcgacaaaattgaaaggtcatcttccagcttcggcaatcccatgcttttacctatcgcccggcaaacagatatttttttgttgtccaggagacagtaaagaaatcatcttcattgcttccgttgaaaactaaggctcctttcagatatttcagtttttgagcataatgccttgcttcagcgatttcatcttcggacaattttttccccgaagcatgtcgaacgatgtagtgaatattttcaattggagcttcgggagcagcagtctcgatcttttcaggtgcaatctgctctgccatttcttcctcaggcgcggtaggtttcatcgcggcgggcgctgaaggcccagcttcggtttcagcatgagtttttgtagcttcgacttctgcttgcttagtttcagtttcggtttgcgctttggcagctttagcaactttccttgtaggagcagggctcaaggccttcctagtctccagcacagcatccagcacgttggccatcctcctcctcttgg

SEQ ID NO: 63116 - DNA, 354 bp, Zea Mays
caaataaattaatctatcataagattaaaaggggttttaaaacaattttagctctactaaaggggacatggcctttgctacctctatgaaagttgcctagagggggggtgaatatgcaagttaaaactttttcaacaaaaaaactagaagcaaactgggtaaaactgaattgatctcgaaattcacccagttaactttggaaatgagatgttctagataatccacagggttcaaagtagtagatctgagaagggcacttctcaaaatccacacaccaaaaagatatgaacaaatctttcacggaagggtgagagaatgaagaacacaaacaaacacaatgaacaagaacacaag

SEQ ID NO: 63117 - DNA, 300 bp, Zea Mays
agaacttttagcatttgtacaggatgaattgttccacaatctaatgcatgttggcctgtcaatgagccccctgatcttgtcgatattgtgcagcattgtttttactcccttttatcatctgcgccatgaacttaagctgcaaatagaggctttcttctcatgtgttatcctaagattagcacaaagtatatatggagcaagttatcagcagcaagaattgcccttgaggctctaactgatttttgccggcagaaagagtttatagctgagatgtatgcaaatatggactgtgatttacaa

SEQ ID NO: 63118 - DNA, 743 bp, Zea Mays
ggaggaggtggagcagactgaaccggaggtactgagataccagactgctgaagcataagagccatgaatgccctactctcagtccgatcctgcagaagctgctgctgaagtgcatcctgcctgtcctgcatattctgaaacatcgagagcatcctctcggataaccgggcctgctcggccgccaggtgagccagaatcgaagcaagagcagggtccatagcctgaggaggagcagaggcagcactagaactcccagcctcatgatcatgtgagcgtggaggcataggaggcggaggcggaggaggaaccccaaaatcatcatcatcatcatcatcagctgctgctgtaccctgagagtcaaactgtcgaagagcagcatcctcggcctgagagtcaaaaataggagcagaagctggcacagggatctcaggcgcaggacggtaggatccaaaaacaaggcgtgaggcctcaagggtgccctgaaatcgaggaggctgaatcagctgcgcaaagatgtggcataagtagtgagcatagggcaactgccgacgagcacgaatcccatccaaaacggtgtcctcgatctcacaaatcaggaagtccacaacgtcaaactcagagtgggagaccagggcaccaaggagccaaagctgaatatgagtggtagcctccctgtatcccatcctcggcagaagagtccgtctgataagctcatatagatacttggctgctgtagtaaaatc

SEQ ID NO: 63119 - DNA, 569 bp, Zea Mays
gttgaatacctgaaatcagaggggctctttagaaatttctgcacggcgaagggttattctccgcactggaccacacaatcacaaagcaatagagtagattagatcggatgggttataatccaggatttcccggttgtcgtccgattctatttttgtggcccagattaaatcgacgaaaggggatccttggatcgaatcctgaccgtggatcagccgatcgagggctgcctacgttcaccccaacccaagccgtgttgtcaccggagggggcagcgcctgcgcttatatcacggcgacgccatggccaacatactaaattgctgataccctgcctaaaacttctaccgaacatcgtttcgcgtagaggagacgataatagataagtggaacgggctctcaccaaatttctagatgcggagtgcgcagcccacggagagacacgtttccgcggtgcactacgagctttagcgagcaatttgcggcacaacgatgactctcgtgcccgattgcctgctcgcgcattatccacactggatggagatccttcctgtcccttcccctatcaccag

SEQ ID NO: 63120 - DNA, 389 bp, Zea Mays
attgggtgcaaatgggtgtataaagtgaagaggaaagcagatggttctattgaacgttacaaagcacggctagtggcaaaaggttacaagcaaaggtatggaattgattatgaagacacgtttagtccagttgtaaaagctgctactattcgattagtgttgtctgttgctgtgtcaaagggttggaccttaaggcagttggatgttcaaaatgctttcctccatggcattctagaagaggaggtttatatgcaacaacctccaggatatgaagaccacagatatcctaactatgtctgcaagcttgataaagctatttatggtctaaaacaagctccaagagcttggtatgctcggttatgtgctaagttagtatctttgggtttcat

SEQ ID NO: 63121 - DNA, 387 bp, Zea Mays
tgaaccctcgtgttagaggctttggttcccacatctctagtggaccacagtttccatctcgtggtgatcactaccccctatggactaggtatatttggtgtttttcttaacacttttcaggggcaaattccacgacactagtattattcacagtatactaacccctttttatgtcatttgctcaccccatatctttctattgatacaggacgaaggccagaagaacacgtggctcgtggattacggttgttcgcgccatatgaccggaagatctagatggttctatagccttggccccgtgattggcaaagagtacatcactttcaaggataagtctagaggtaaaatggtctctcgtggcaccattcagttgaatgagactttatg

SEQ ID NO: 63122 - DNA, 1218 bp, Zea Mays
cttggttacctcgactaggttggccccgaccaaaattcacaatacatgattccccgaccacaggttggctccgacctcagtcatcctagtaaaccctaacatggtcaccctaatctgatcgatcctgacctcaaatgccttaagtagcctcgatgtagtcacctcgaccaagatgacgccaaactcagttgccatgatctaggtcagcctaggccatagactcctaataagactccatgtatcggaggtgccatgaacctttgtgaaaatctaacacatttatgatccctctgaccatttagtgcacacttttgactaaggcatgcgcttggtgaaggtaattacagtaggaaggactctgaggacgacacctctatccaaccactccactctccgaaggacaacaaagacatgcagactatgacgagcctcaccataggtgaaaggcagtcatacaccccagagaagacataaataaaaggagtgaactatgaggtaaaccacccatacagctccccatggatgcacctcatatggcctcgatcgcccttctatacggaccaattacccctggtccggtcaaaccagagatgacatgacctaggggttagacgccagggatgatgggccttcaagagcgtaggagacaactagggacagattcagaaaaaattatgagggactgaattaaaccactgtagtataggagcctcttttacattgtatgtgtacacttaaaattttggtggaggctatagtgaggctctatgggctcgacagcagtaggggggcttgagccccagccgccccaacactgcatcaaccttggagacaacctacaatctaaaggcgagaaatgacacaacccatcaaaattatccatgaatgtaacagtggccactgctccctcgactatataagggaacatggcctcctatagaaacccaagccaaccaacaagcagacttagaagcctgcgaacttagcttacgaatgagccaatctgaactttcatcttactagcacaccctataatcttctcacacgagcacgagagccctgcactccaccttgtaacgctcctaacgagcaagccctgcactccaccttgtaacgctcctaacgagcaacaaagacttcaacaccatacttgccataggaggcttcctcaaaccagtctaaatcctctcccaagctcaccagagtaaggccattgag

SEQ ID NO: 63123 - DNA, 340 bp, Zea Mays
gaagtgtagatcaatctcaatgttcttggtgtactagtgctgaatgaggttggtgaagatgtaaatcgtgctaatgttgtgatagtagacaaggattgcatggtggtggggcgcgactggagctcaaggatagctagcacagccaagtagcctcgacgatagtattggccacatcatggtattctactttagtgctgaaaagagacatggtagcttgttgcttggaggatcgctaaacgaggttgtcaccaaggaatactacatatccggaagtagaactgcgtgtatctggacaaccagcctaattagcatatgaatacaccaccaagtcagattacga

SEQ ID NO: 63124 - DNA, 349 bp, Zea Mays
ctctttagaaccaaaatcgaattgagcaactataggttcatcattgccgatgatatcataatcggctgaaatgtaattacattaacattcatactcgcgtgctcgggcgaggcttcgtagttgaccagatcttctcccagtaatttgtcttccttgatgttatcctcatccataggtgttagcgcgtcatcagaggcttcttggtgaggcgcgcacggtccagactcaagggtcgaatggttcgtctacttgcgccggacagtccaccggacgtgcagagagatgtagagcttctattttatcttctattttgtggccgcttgagttgttttggcggcctttggtttcc

SEQ ID NO: 63125 - DNA, 509 bp, Zea Mays
gctcactcaaccttgatgtgtcctcctcctccatcagctctaccgtcgccattttttcctaaacgtatcttgcacgagcctcatctgcgagatagttcacgacacatccaatctctgcaatgtaatgagacaaataagtttgcaaagtcaggataaataaattgtacaagcgaaattatcatgtcatttttctcactcacttccactgagacgactggcaagattccccaacatctatttctcggctctagccgcctctggatcccattcccttgcatcttgtgctctcttctcatttgccgccttcaatctcctctactctgcacgcatcgggctttcaaaactcattgattttgcgaacctacgcatgtcctgtatacgatcgttaacgtacgaatcgacgagttgagatccacaatgcatcttctgtcccattagtctcttggactttattgtatgcatcacctcttctttgtcgtcgtatctctcccaaccgcatttcctcgtct

SEQ ID NO: 63126 - DNA, 817 bp, Zea Mays
aggggctcggcagccatgggaggaagagggttcctgcgcgctgaacagagaaaggagttgtgcgtgagagaaaaagggagaagagagagtggcggctagggggtagatgcaaattttccaaattgcaaggggaggcacttctatttatagaggaatcctagggttagggttccaaatgggctgggttgggctggcccaaaactctcaaacgggtcgcgctaatttattttccggagtaaaaatgctcccgcggaatttgtctctacggagaacagagcgaattagagttccgacgaatggacgattgcacgattaactcggtcgagagttcgatttgactttgctcgaaaataattcctcgcactcaattaggaacaaaatgaattgagaccgattagtttcggatttgtgatcgagatcaagcgggtcgggttaataaaaatcattgtcagtgttgattctgaaatcagattggatacagagatattaagccgaatcggataaaaattaattagaggatgacctgttgagtattccgtttgatagtacggactcggattaatttttggacatagatcaaacatcgagaaaattggattcagacacagctcgactagcaactgtcgagcgcttgattaaacgagctttagacgagatttataaatcaagaatgattaacaagttggcattcgcgccgagaaataaaagttttaacaggctccaatttggccgttctagagattcgaataaaatcagaaatcgatgaaaccttcacaagtaacttgataaatggatataaacgcggtcgagaaataga

SEQ ID NO: 63127 - DNA, 1363 bp, Zea Mays
ttcttcctctaccaccacaacattgagctgaatttgactccttttggttctttttgctagatgcccaggttcaaacttatccccacaagcatagcacaaaccattcaaattcctatactccctaacttgactctcctttgacaaataattggcctgatagactccctttttatccaacttattttgaaacccctaggacttagcagtggttgactgcctccgcactttgaatctatgttgatccaacatctcctgttgtagttgagccaacaaaatagccttgtccactttggttggaacttgcacttgcaccagattctgtatttccactttaagccctctcacaaactggtccataaagaatatctcatcaaactcctatttatgaacaacaactccatacctcaccttctcaaactcaaaaatgtaagattccagactattagtctgtctcaaggccatcaacctcctcaatgcccttagataagcatatgccccaaatttgctagtcatatcttctacaaaaccttgccatcctaccatcacatgctacaatttgtatcacttccaccactgtgcaacactttgctccaaatgcatggcagtagaggaaacccaaatcgactcagtaatcttgtagatggtaaagtagcctagacactgatcaatccatatgataggatcttcaccagagaatttgggaagaacatcttaggcaataattgtgatgctcgagaatccttctgcaagtcatgttgagcccttctgccagaaccactcgcctcccctttctcctgtttacctctgggatgtggaatttccccttgcaaattcaaattatccccttctccctccaaaccattgatagaatattctaactcccttcccatctccctccaaaccatcgatagaatattctaactcccttcccatctccaacctcatctaagccacaaccctaccaatttcctccgtcttacgaaacaactcggttctctccaccgtcacgtgcttatccaccaacgttgccaactccacttgtgtcatcagttgatggtgcgccttttccaccgccaccaacctgttggtgatcacatccagagatgcaaacacccaactccagttgttctgattggtgcggtccttctctgctatcgcttcaagcaggaagggagtctacaccgagggtcgagcttgtggagccgtcacgccccctccacgagaccaacgacgtactcccttcgttcaaaaatcctcatcatctaagcaaataaaaatttccaagagtctatgtcgtttaaggtagggaccacagtttcacctcatcctcaggcgcccacagttcctcgtacgtgttatcccg

SEQ ID NO: 63128 - DNA, 275 bp, Zea Mays
gaattttgtcaaggcaccagtgatcaagatggataacctgtctgcgatttctctgagcaagaatccagtgtttcacaagagaagtaaacacataaaactgaagtatcattttatcagggagttcattgatcgaggggagattgagctggaagttgttggcacctctgatcagttggccgacatcctgacgaaagctttggcaaaagtgcgatttcaagaccttcggggaaggattggagtaatcaaactgcattcgactctgaactaagggggag

SEQ ID NO: 63129 - DNA, 659 bp, Zea Mays
gatttgggcgacgacgcgcggcggccggaggtagaagaaggtactggcgcacgtgaattcgtggcatctaccgtggcagttactccgacgagccacgaagaggcacaagggttcacggcgatgcagtggaggggctgagccacgcggcgcaaggccgggaggcggctgtcgccggcgagcatatccacatccgccgtggtgagtgcgatacggcggccgggattgtttactgtccggagttatccacggcgacgatattttcgcgaccccgcagtgctatccaacaccatccgagcaccaatcgtggcgaagacggcatgaatcacggcggggacccaccggcggtgagatcttttctggtgctggcgatctgatcctcaacggtcactgtaccatgggttgcagcattcagtcaacctgacagccatagtttaggctcgattttctcacaaatttttatggcaacatacccaatgatctgcagcaaagttgtagaactacaatccatctataactttgctacaatgtgctcccacaaaaagtcactggatcttgcttaaaatcaagccctaagttcatgtcatcccattgttaatctgaatttcagacttcaagcagtctgacagtccaacttctggctcaattatctccagtttttt

SEQ ID NO: 63130 - DNA, 535 bp, Zea Mays
tcaaggtgagcatttaggtagaatacataaatatcgcaagggtcaaaggtgataacagacaagggtatgagagaacagatgaaggcatagaagagctcgtggtatgagtacaacgaagaatggagttgcgcccaagcttacacgcggtaaagaagaggatataaccaagggtgaggtaagtaaaacactgctctcaaactaagataggatattggagattttagagaacagacataatgtaattaccaagataggatcgagagatgagaaaggtaaaggtagtacccaacagaagcacaacaaaggatggagttgaaaacacgcaagcgataaggaagaggatacgaccaagggaaaataggtaaaatacaactataaaattgagatggaagagataaggttttaaaggatgggtataatataagcatcaaggtaagatataaaggcgacaagggtaaagatgatgattgtgaaagcataaccaaggatatagttaaggcaagactcttgaagtggcgaaatggataagacaatc

SEQ ID NO: 63131 - DNA, 318 bp, Zea Mays
tgagaagatggctcaagttaccaagtgcaacatcacttgaagcgtcaacatcactggactcagaggttcattcggtactgctagttggatctgctttgctgtgtttaacctcggccaaaggcttgtgggtgttcggatcaatgcctttctgccaaagcttctttttgacccttgagttccagatattcttaatctcgttatcagttcttctaggccacctagttgtaacttgggaccacctattcattgatgtgtcagcagtgccaaacgcaaagtatgtctatggaccaaggctgaggccttacaccaccgaatcac

SEQ ID NO: 63132 - DNA, 548 bp, Zea Mays
caacttgtgagctcttttgtgcatggtctatagaatttcgagccatattctttatagcaaagttagataccaagtaatagtaagtaagtttctttaagaaagcatggcctgttgttgctcagaattgggagaaaatatggtttgaagatcgggtgtcaggtgggttgtggtctgaatttggttcagtcatctgaatttcagataaaagtgtcaagtttggagctccttggtggtcaatccctttatttttaggttgtagtttctgtagaaaccttggagaccaatgttgggggagtaattcctagtgagggacatacccttgaaactgcttagaaatgagagaaaacactgcacaaagttgtgctgtcagataaaagagtattgactgttgtgcagtagcctaagtctgaaatatgtgtgtctggttaaactttggagctttgtggtgcttgatctatatggttttggactaaagttattatggaaagttttaagaccatatgttagtgaataagttcctttaagtgtgttgggcgtaaccctacaca

SEQ ID NO: 63133 - DNA, 1869 bp, Zea Mays
ggagttttcagcttcctgttttgatgtaggatccagttttcggtcatggtctaagcctatacatagggattctaaatttctactaagctatactagtacccgatatagagaagaacgtaaaagaggacaggttctctagaaggaaggcatttatctatctatctctaaatcaagctctagccctactagagaacagtggatcataaggttgcagttgcagacatctatatgcatgcatgcatagcatggagccatggactgagtttggactatggaaagacatttcatacatgctgaacacaacaaagagggatggtgtgagcaggacctcagtaagttcacatatatatgagaggcttccaatccatcctttgtgaagcaggttacatcaacatgaccttccccttttcaccttaccaaacccatacatatccctcaatcatcccctcttgcccccctttcccatcattcagtaagaacaaaggcacttttcttgcaaggttcagtgcccatcccttcgtctaagtttccgacccattccattgcaaaaagaattgcacccatgccctacagtttgctaggtagttaggaaaatccagccaaagccggccggctgagcagatgacgatgagaggccgccggccggtacgtacgtggcttctttcctcccacaccacgccccagcgcagtactcgcatcgcaggccggtgcagtaaaaagggagaaggccggacgagcaggcgagctcagctagcagtagcatcgatcgaagcaacactacacatcgcacaagaaggggggctagagctggcaacacatgcaggctgcagaggcagccatcaggtttgtacacctacgcactattcctactcctaccgcaacagtgcatagctagctaggttcgtacgccgatcgtcctccccactctcagcccatgacttactggcaggcgtaccttggtgttatgatcagtggcgccattgttggcaatgcccactagctttttacagatcactggcaaatttatctctctctctctctctctctaacttggatcccccgctgcctcagctcgaacgaactgtgcatatgtatgtatatgcagggcgaagtcgaggcccagacaatccaaactatacgtaagttggaccacagatgatgttccctttcgcatcaagaaaaaaaaagagtccttgtttattcttgctgcgctagccttctatgctgtacacatgtatcatacgcgcagagaagaagaacacaaggacagtagtagtacaataaagaggtgtccaggcctctccatagatatgagatgatgagaagatagaagtaccgatagaatgtgcgagggattttaagatcgcacctgcaatttgttgcttcaggaggcgtgtctctgctgtgaatgcgcgatcaatgtgtcctccgttaagttcgtccgtgcttctgcagtacaatttgttctagaagacatacaagatcatggcaaagatggatgctacttcctcaactgcactgcatatgattcttgtgatggaaatcttcaaatctagatacacgtttttagcagataatagacagatttgcagatgcatgttatcatatgtatgtagggattcgaatttccgatcgaatgggggcaagtacgtagtacagatgtggacgggtgtaacagcgcgaggaaattcataacatgatgagtgctgaacgaagaacatgaacacggatttggggaaaacactgatcgatcctagtgtttatatgtgtatcttctcaaaccaactcatcaaaaaagcgaagagcagccaaaaacaaggaaatcaaaacatcaagtcctagcttctataatcaaaggttataatgtat

SEQ ID NO: 63134 - DNA, 653 bp, Zea Mays
ttcgttgatggtggcatggatggagtcgtgaggtggggcagaggagagggaggcgtccgcgcccgtcgcggagaggttgtaaggggcgcggatgggccggaggagacagaggcatcagtcgcggagaggatcttggagaggaaggtgtcagtcgcagagaggagagggaggcatcagccgttggcagaacgtgcaccactgtcttgtgaacgcctacagtaggtacataagtagtagtagagattgagtggcatatagagatttatttttgtgtatgacatgtgggctaggggctcacaaggaatgagtataattttctatggcacacaaggaattgccctatagccaatctgactcttgtgtatggttagagataagtggaggtcatgtttgcttttgttttcataagccacaagatctcttccacgcgcgcgcgtacacacacacatacatattactagttaggtgttcatgcattgctacaatttttatatatcatatagaccttgtttaaatgggatgtttgtgcaaatatgtttcaaaacctttgtagttaacagtgacgcctaggagggggtgaattaggacttctaaacactatctctaaactaggtatgaaatgtaacaattagatacaaaaaatagatacacat

SEQ ID NO: 63135 - DNA, 453 bp, Zea Mays
aaatcaactaattattatatataccccttaaataagtattagttattagatgccccaacctagctaaaatcaactaacaattagctctaaaggtttagaacatggcctaaaacaaccatgtcatgagccttctcgtcggatcctctgagacaagtcctgccatctatgagtctgaccctaattttcttgacaccatctaaaccaatttttcgacgccccggttccgccgctgactcattcccgatgcgatgtcgcccgactacgccccttcctggcacctttgtctcttgtcccgttttcattacgacgccgatccgctcgataagctagatctcgtctgtcccgccccttcctgacacctctgtctcttgccccgttttcattacgacgctgatccgctcgataagctagatctcgtctgggctttatgaaccagcaagccatggctttcat

SEQ ID NO: 63136 - DNA, 350 bp, Zea Mays
caaaccaaatcctctcaaaagaatcaaagattttccaccaaaaacacaagagagggggaaaggaagaacaagtgaccaaaacaactccaaatttcagcaagtatgtaaaactgagatggagatgtaaacaaacgctgtgggccgtaccagcgacccttcctcagattaaactttcagatcacaagaacacagtcgaagtacaaaatcgctgcggatccctggctaaactagagcagtctagggatgaagatgtgagagcactaaaaccctaagccaaaacaaatggcagccaagagatactgaaataatcagccctacccctctatttatagaccatagagggttatttc

SEQ ID NO: 63137 - DNA, 273 bp, Zea Mays
gggaagactccatccaaggtggtaaatcttgaatcatctcgagatcttatttgactcctattcttccatgtcgaggttgatcttatctttcttgctctttggtgtctccatccgggtttgggtcaagaggttaagatagatctgtatgtaacacgtaggtagagcagctagtttagtagatggctatgagtttaatgagattagtcataatctgatttggtcgtttgcttctagatgggtgggataggttatataacctattatataggtcaa

SEQ ID NO: 63138 - DNA, 853 bp, Zea Mays
tggtcgtgcccctactgacgagaagtgaaccctggacctcatggtaataaccttccccgacccctaccgtttgtttactggtatttcccatgcgcaattgcttgccggagttgcactccacgcaactgttgctcctcatcgtcacgcactcacactgagccctcaccgtggctcaatccagcctcattgggttcttcgcactacaccagaccttcttcgctcggatttggcccaacttgataccctcccgcgaccacaattgctcgtaggagctggcactacctcactgagacaccccgttgtggttctctagcctttggtcctcccaccatgacttggccctcaccatcaagctacctgaacctcccctaacaaaaccactgctcgcttcatctccggcgactcccccacagcagacgcgagcgtcgccgcccgagttggctagaattggaggccagagctggccacccaatctccaccacccatcatagatccaacagtttgtttttaatcaactaaattctaatcacaaccgtccgcctgagatctgatggcacaaaattgagccagtgccccaaatcacccgcgcctctgcccctgggccccatctgttagccgtcgtgccacacccatgcctctgcctcgagggccccgcctgtcagttgctcgcgttgcactcgcacacccccctcactgatctaatctcggtcgttgatctaagacccaacgaccgatgttccccgataccctttcgctcaaacgattttccttaagagccccctgagttctaggaaatcacccaccaccccttttcttttcgccaatacccctataattttatagttaggtcctc

SEQ ID NO: 63139 - DNA, 366 bp, Zea Mays
cttaattgggcatatcttctagacgtcttaagagccctaggcttcacctaaaaatggagagattggattgctaccatccttggttcatctttgtccaaaatcatcattaatggtcagcaaaccaaagcaatcaagcacatgagaggggtgtgtcagggtgacccactagcgccttttctcttcatcctcgcaatggaacccctacaacgtatgattgaaatggcagctcatgaggggctattgggccaggtattacccaatggggcaaagtttcgttgttctctatatgcagatgatgcaggggtgtttgttagagcaaacaaactagacctcaaagttctaaaaagaattctagaagctttcgaa

SEQ ID NO: 63140 - DNA, 760 bp, Zea Mays
ggagatttggaggttagggtttcaaaccttggttgggattttgggatgttacaaacctaccccacttaaaggaatctcgccctcgagatttagactggatttgagaaaagataagggtattccctcctcaaggagtcctcactctcccaggtagcttcctcttctccttctctgctccactgaactttacagagcttcacctctgaggtgtgggtctttctgactgctgaatcaagaatcttcactggcttttcacggtattgaaggtttttctgaatctgcactgtctcttcttcgaggtgactttctggtgcttgcaggcatttgcggagctgggatatgtgaaacacattgtggatgtcagacatggattccggtaattctagacggtatgctgcgggtcctaccctgccaatgatgggatagggacctatgaatcgcggggctagctttccttttacttggaacctcttgacaccacgcattggagaaaccttgaggtagacgaagtatccttcctcaaatctgagttcccttcgcctgttgtctgcataactcttctgccgactctgagcttcaagtaaccttctgcggatcagtgcaactttctcttccgcctctttgacaaaggcaggtccttctagtgctttttcccctacgttggaccacatgagagggttctggcatttccgtccatacaatgcttcgaatggtgacatcttgatgctggcctgatagctattgttgtatgagaactttg

SEQ ID NO: 63141 - DNA, 1034 bp, Zea Mays
caaggagatggcatggctgattgggtgcctattccctgccttgtgggtatgagattgattggctgattgggcgcctaaattcctgccttgtggggaggctaggtgcccacctcctcgtctctattttgccaggggctgcgccccctcctagagttgggttttctttgatagttttagccatcgtgcaaacttcatgtactacagttgtgctcaaaggccacctatggatagcctagtgaaccccaacttgtgagtgattgatattcagttttacctacatcttgttcttgcttgtttcttcgattgctcgtaagaatagaacttcgtgttcaggttgattttcccaccagcaaggtcaataaccatttggagttggttctgcgattgctaaggcgccacgacctattcgttcatagttggatcgcgagagtcacctcctccaccaaatcaaaattacccacctcaccaaaagatcaggcactctagttctatcaagtggtatcagactttcaggttgcttggtgagttttatcgagttttatccctttagtttgagagtgttcattgtctcaacgtccaccataaaagctacaaaaaatttaggctagaaccttgtcctagaaccgtttggccttgcattttctttcagtaatcttgtattgttgaatttgtgtgcatttgtgtcaagtgttgctggttgcctcatagttccgttgtcaccgccattttatcgttcatacataccacgtctgtcgttcactaccattctttttcattcatacgccccacgtcttttttcctccctgcttgtttcgttggcacattgtcagacttgatgattggaacgctttggggcatcagatctggttactagaaaaaggaaggaaagaaacaacaaaggacagcaaaaaaaggcaaggtacaaaaaaatatttaaaaaataagaagaaagaaggaaagtgaaagaaggcaaccagaaattagtgcgccccatttccttaatcagcattgttgtgtttggcaagccgaagctg

SEQ ID NO: 63142 - DNA, 461 bp, Zea Mays
gccaaaattcatgaagaaattgttccatgtatgacgtcacctcttcatggttggtcatacatatagcatgatatgctgccactcttcatgtgtcagggtcttggtggtcgagccacttgcgctaccgagttggcctcgaaatatgctgaggttcgattcattgtcgccatgattgtaacgagggggtggattatgcacgctcggcagtttgtcatcatagtaagttgttgtgaagtttgacacctcctctagaatgtatgcctctgcaatggaagcctcgattttgcatttatttctacgtttcttttgattagtctttaaacatctctcgattggatagcaccaacgtccatgcatgaccccattcgtgcctcattagggagatgaagaatcaaatgctgcattggattgaagaagccgggtggaaagatcttctcaagcttacatagtaacacaggtgc

SEQ ID NO: 63143 - DNA, 1131 bp, Zea Mays
ctccggtcaactacttcttctcccctgtaaccgaacgtgctcagctacgcaagcgcgcgggcgaaaccacctccgcgtagcccaattagactccgcgcttccactgtgctactgtcgccgccaggtggggccggatcgctgactcgtcgtcttcagcggattcggttcacctgttgcacgaaaccagggcaagatccgatctctccgccctcccatccggactccctcacaaaaccttgatctgggccgctataaatggtgaccgcgacctcctcttctacttcaccgcgcatggcacccagccaaatccaccgcgaggaagcagagggatcaagcagagtgcagaacgccgctaccgaggacctgtgtatgcatcgtcagtcgagggtcatcgaaggaacgtggagattctttaggtgtcaaggaacgtgatggcggggtgctccgcgcggagtggtgctcttcctgggcaaccttggtattcggaggcgtcagaattcctcgccgacgttgcccaacaccattgctccacccctcaccgtgattgggatcctctactgcacgacgtccggtaagaccgcgcctatatgattcgcgtaactgtatgctatgagtagacgatctagggatggtcgtggggccctatagcgaagaaccgacgggctcgccggtgctttctgcaaccgtgagctatgcgccaccgcctgggttttgtctgagggtagaagaacgtttgtggaccgtggatccatacgtggtcggccaagattagagtagagaaaatcgtttgtgcgccgtcgatcccgtgttggacggccatgatcgtgtgtagcgtaccccttcgtcaaataaatctgagccgtaggatggtagttcgatgaccgagattagatcccatcctcatgaaaccctagccgcaggattttaatcggatgccccacgttgggtaccggttcggagtgaatcgggtctattccgcatcgtccatttgcgattgtgcggcccagatttgatcataccccttcgtgggtatgttttactaaagagcccctgtagttttacggaattaacccgccgtccaactcggggatttctgagtctgcgtaaatctttcaagttagcccctagtct

SEQ ID NO: 63144 - DNA, 571 bp, Zea Mays
ttagtgggctttgaaacaggcgccaccgaaccttcgttctgtatggcacccggtcaaagatcaaaccaactccccacctaaagaacatttgttggaccgatttaaaaacacttttttggaccggttaatcgaactctgatttttatcctgcgaccttttctaacaacctagatggctctagcgaagtttagtaatcaggatggatgtccatgtactgagcatcctccacctcgcctcgtatttggttgcatttccttgtctgcttctccgtcttctcctcctcgcctgctcaccgaggtaggccttattgctcctcctcctcctcctctctaccatccttgctctggcgccagcaaccgtggagattaaactcttcgttcctctcgttctgttcacgcgtagagtagagcggagatttaccgtacgctgctgttggatcaatccgtaggccactgctgttggatcaatccgtaggccactggacaaggccagatcctgtgtgctcggtccttgggtgccgtcagggatacctgaaactggagtccaacctcgtccccttacgattcggtag

SEQ ID NO: 63145 - DNA, 575 bp, Zea Mays
attcggtatcctaaacttgaatattatatcttgtatgaattccactgccttggctgaagttagagaatcaatgggtttgtattctatccatttggtgaatttgtcaatggcgaccaacacgtgagtgtatcctccctgagctttcttgaagggtccaatcatatccagttcccagcacgcaaatggccatgttacgggtatggtctgcagttgctgtgctggtaaatgctgctgctttgataagaattggcaagcttcacacctctagactaactcgattgcatcactctttgttgtcggccagtagaaaccagacctgaagaccttcccaactagagtcctggatgctgcgtgtatcccgcactgtccggcgtggatctcatctagcagttgcttcccaataaccgaaggaatgcacttcatgaagactcctgttgcgccccttctgtacagtgcatccacaatgagggtgtagtgggttgactgccttgcgatgcgttctgctgcggctttatcatccggttcctcttcgttctttatatacttgatgataggctccctctagtcattagagt

SEQ ID NO: 63146 - DNA, 668 bp, Zea Mays
cgttggtggatgggtcccctctgaaggtcttctcgccggcgtcgagggggtggagcctcaggacggcgacgatcgccatcttcgtgcctgttgtcgttgccaggaggaggaggtggaggggtcccatcagacagtggcttctcgactggggtgacagtcacttcaatactgtaggataaacaccgtttcacatgatccgctggcgttggctcaacaatgaccagattcatggcacgttgaagcttttctaactcgcaacaccaagcccgaagcctgaaggatgaaaaatctcttttcatggaagaatccgggtgcacatctgtgatccaacaggaattaccaagtagcagttcagctgtggaccgcccccaagcgtgcaacggaatcccttgtatctcgatgtcgaccagcgacggcaatgcggctgccgttgcatgagccagccttgtccagcgcttgaactgaatatgaaactgaggccctctgagaactcttcctccattgagcacctttgttgcagcctcctcatccgaaagaatcaggatgaagtcctccgggaaggtctgatgaatggacatggaatctgcctcgatctcaaaacttcgtgccacttcttcaatgacttcagagcctaacacctctggccttgtaccaatgatcgtgacaaa

SEQ ID NO: 63147 - DNA, 442 bp, Zea Mays
aaagagaatcaaatacttagcggcaagacatcaacacaatcctacgtaagcactagacacctataactcactaaacacaacaatcatgattttctagttttaccagatttaactcaaacatcaaggaacaataaattatacgcacgtctactttccttagctaaggcccaacaccataagactatcaaacctagattcatttattagaaaaacaatagaccatatgagttccacctttctatttgactaaagcataataccgaaagactaattacttagactcattattttggaacacaaaactcgaagtatggaccgaaacaacttaactaactatttaaaccactcttttgaattaatctttaaaatatcctaactaataaaacatcacaatatacttaatctattaagtagagaatcattacacaacatatatttttac

SEQ ID NO: 63148 - DNA, 609 bp, Zea Mays
gaggctgccgagggcctctatgatggcctcaagatcactgggtggaagggtttaggttgccggggcactgaccatctccccttcactgttgatgatgaagtcgaggctcccaaaactaatggtcattccgggggcccatgcgacgtcgtgtctggccatccaaagtctggagaagtcatcggaacgcaaggcccctacctggcgcgctaattgtcgatgtttcgaacctccactccaataaataaatttgtgagcacgttccatggtctggatggtgtgcttagtgggtgcaagatttatactggtttgggtagaacatccctacatctagtcttcagtggttcgtgctaccgacaccttattcgtcaatgctcgtagtagggcttacaagcggtcgagagagggaggagctcttaggtctcttgtgtgtgggtggacctaaagactatgggactggagtcctaactaagccttggacgtcgcggtggcttgcacgcttggcttcggcctccgggtcttctggtctcgtcaagtgtgtgtcttctgtttggtgttctccctttgttcctccattcgtattgtggtcgacctcctccttttaaaggccgg

SEQ ID NO: 63149 - DNA, 749 bp, Zea Mays
cgaagcccgtctcttcggacattacgtagtacttcaaaagattttttacttaccttgaaacattctttgattcttatcttgccactttctggtagtaacttatcttttggagtcgggtaatagagtgccaaataattgtatacataggacgtatgggatcaacaaaaaggttggttccataattattaggtcatgcatgcatcatgttcaaactatgctaaataaatcttcccctcttatggaggtatggcacataccaagaccacccaacgaaaggcaaccggaactcaaggtatgccccgacaccaattggcttctagacatgaaggaagcagtagtggaagcaatgatccaataggggatctgcaggttagggtggagcgactcatgtcagaactacgccacgggagtagggagcatgcgcgagatagtggccgcattgctgagctatcgacggaggttaatcacttgcagcaggaaattgcggaacaagacacaactattgactgggccatgaattcatgctcttttcgcctaggactgtgaggcaaacgctctagcccgggtagcggaattaagcgcgtccatggaaaatctacaatcgtactataaaatcttgcatgaagactttctgctcggctatgtcttcgcacaaaagcatgggctttggttgatctgctgaagcagccttgtctcttttatgcttatattgttgatgagctttggcttcatctatgttatggatggcc

SEQ ID NO: 63150 - DNA, 489 bp, Zea Mays
ctaagggtgcagccggaccagcacaacgagagcgctaatcgaagtcttttattcgaaagacactcatcgcagcagttacttaagggcgcagccggaataacgttattcgaagtctatcattacaaagacgctccgcatcaagtcgcccacgtacgtagccggacaaatacaagcgtacgaatacaaccaacaggccacatcaccatacaaattgcaatcacatacgcacggcgagggcatcgtccattacatacacatggcgagggcatcgcctattacatcggctcaaccttcggaatgatacctatctccctgtaattaaacagcattatcctcaattcctcaccctcaaaaagctcctaaagatccccctcgcctatgcccgcctcaatcggcgaggacaacaactctcgcttaccagccccgtctacccgaagtcggccacgctccatccccatgcgacgacgcctgccgctccgcgaaaattca

SEQ ID NO: 63151 - DNA, 649 bp, Zea Mays
gctcggaggagcgacgaacacgagggtgcaggaaggcttctagggaaaggagaaggcaggtgcttgggcgcgaagagtgtgttaatcgtaactgacaccaaccactgttccattctatttatacgtgggaacagcagaaccaagcagtgtctgaaaggtgggcctctgcgaacgacatgggaggatccactgcttcgatccataatcgcttcgggcgtcgtgcgagaaactgcacattttgcagggttcgcactgcctcggacggagcgctaggggagcacgcgataggagaggcatcagtaacggacaaggcagttaaccaccctatcacgctacctacgcacgatacgacaaataggtcgtttcgcgtcccatcaagctgcccatgccaagcggtgtcatgatgaccctctcttttaccacgtcgccacaataaccgcctcatgttaaccaaggtaaaaattgaaacttgccctgactcctcacgtagagcaaggggtggaccgagcaagctcacagcgagccgcaagctaggtggccggcccataggtcatttcctcatctccacatccaaggtcgtacctcacattctcccacggcaaacagactgacagggtggctatggggccccctttgatcggcgagaccg

SEQ ID NO: 63152 - DNA, 422 bp, Zea Mays
taagacaatgacagaaagccttgcgactcagtgcatctgccaccacattggcttttcctgggtgatagtggatttctaaatcataatctttaatcggctcaagccatcttctctgtctcatgttcagttctgactgggtaaaaatatatttcaaacttttatgatctgtatataaatggcaagtatttcctagcagataatgatgccatatcttgagggcttgaacaactgcagctaattccaaatcatgatttggatagtgctcttcatgctggtgcagttgtcttgaagcataagctatgactcgaccttcttgcattaggacacatctgagtccacttcttgatgcgtcacaatacacaaaaaaggcttctctatgtccggttgagccaatacctgagcagtggtcaatagtaccttcg

SEQ ID NO: 63153 - DNA, 808 bp, Zea Mays
ccagagccagaagccttggcgatctctcaaccctcgtcaacgacagcgcataactgcgcccatgggtcaaccgaagccctcagcctagcttgggtcataaccagctggctagaccccaagcctgcatcagcctttgtaagtaaaagacaaaaaaaaaatcagaacaaacacgcccgcaccaaaaaaagcatgaacgacactcatatctggccgcttgtccggtgtggacattgaacttgctgacgccctcgagcacgtagtcgtcaccggaaaggtcagggagcgtcctaccacccgcgcccgcttcagctgcgtttgccacctcgtcctggctagccttgctaggtgaaggtggcaccacagacgcatatggtgccgcaggcggaggcatcgtcgcaacagcagctgcagccttcgcagctttggacttcgatcctccaaccgcgccaatacgaagagcctttgtatcgcgacgagggtccaccagccacaatagagccttcgttttcttcttagaagacttctatcggtctttgtccatcacagttgttacaacagtgtcaatattccacccataaggaaaaaactttaaaataccaagctagaaaagacgtaaaatcattctcgccagaggccataggaatggggtcatctctacaccactcacccccttggtcacttccaacatccgagtagaggcttcccacaggatgagcaaagtcatgatctccatcgactcagcacatgtcttggccatctcttcagtaaacttctcccaggccttcgtgcgtctcgttgggcctttcgc

SEQ ID NO: 63154 - DNA, 375 bp, Zea Mays
atgaagcatcccctatggcgacaggctatgcatgatgaatttgatgcacttctcaagaacaagacttggcaccttgttccaccacgagctggcctcaatgttattgattctaaatgggtttttaaactcaagcataatcccgatggatctattgctcgctacaaagctcgtttagtggccaagggattcaagcagcaatatggtgttgattatgatgctacattcagtcctgttgtcaagccaaccactattcgcctactcctatctttggcggtttctcgtaattggtttattcgacaaattgacatccaaaatgcatttttgcatggtgttcttgatgaagatgtgtacatgaagcagccgccgggtttcgag

SEQ ID NO: 63155 - DNA, 475 bp, Zea Mays
ctttgccggtcagcgatagaatacgtcttgacatgcttccggagccagacctggttgcctccttggggccagtcatcgcgggtccggtggacgatactaaagatgctgcccaggagggcatgcaggacgttgtggacgcgatggtcaggcgcttccagcgggatcctactgacgttgagtagccaggcctgcgtggagaaaaacgatggttccgctggagagcgggttgtaatatatctttgatttcgtaagatactctttaggtactacttatcgggtgatattacaacttatctgcatgccacttttcctttgacgtgtgctttgttactaacttcttccctggtactcggccccccctaggatatggcttcgacgcgtcggggctggatgccaggattcataaggaggaactagtgtcgtgacccccaaggggtacccccaactaggacccgacctgcacacagtcttggct

SEQ ID NO: 63156 - DNA, 863 bp, Zea Mays
cggggagttcgtgctcttcttctcctacctttcttgtgggttggtgctaccgatctcaccgttcttcctgctgctgttggaggagttcggactctagctctagcacctcacgccccactccatcctccaggtggccatcttcgtccacctctgcgagatgttcgtgggggtggtagcctgacctccctctttcgcgcaattcttcgtgctggtgagatctgggaagggcaaggaccacctcggcgcctactatttcgaaacgaggtcagatccaaccgtggcctacatcgccactcttggcgacgcgaggtgggagaattggcgcaatgaccgggtgatcgccagtgctgaggtcaatgactgccttgccctgccgaacgacggacaaagactcgaccggaagcaatggagggccaaactgtcccttgcgccggagttcgagcacgtattggataggatcaaggaactggcggccggtggtttgaactcgatgcacgtagtcggtgatttcctgaagcgtcggatcatgtcgttgcaggggaggtcgtgtttgtgttgctggtacaccggccccaatgacattggcagggttcggcgcgggccagagaccgatctgtcctaggagctgctggagatttcagtgaaggggatcactggtgaggccattattcccgaatccttgatacctccccagggcattccgccgctctacgatgatctagggttgcggtcggcagtgttgtcctggttgccgaccctcgatgagagcggcgtggcggtcagtcaaattggtggccgggacccccaccgagggatccgtattcctgatgtacaggtcagaggttcccagcccgctgatgcgg

SEQ ID NO: 63157 - DNA, 457 bp, Zea Mays
aggaaaagtaatagcctatgcctcaaggcagttacagaagcatgaaaagaattatcctacgcatgatttggaattagctgccgtagtgcatgctttgaacatttggagccactacatgattggaaacaagtgtaaaatcttcacggatcacaaaagcttgaaacacgcagaaagaactcaacctaagacagcgaagatggcttgagttaatcaaagactatgatttgaaaatacaatatcacctaggaaaagcaaatgtagtggcagatgctttgagccgtaaaggtcaagtgaacagcatcactactcatttgatgccacaggaattgtgctgggaaatggaacaactcaaccttggtatgctcaataatatggaagccacggttatggaagcgaaatctattttggaataggagattcgtaaaggacaagaatccgatgagaaaatcaaggaaat

SEQ ID NO: 63158 - DNA, 426 bp, Zea Mays
attcctttgagttatcctcaaccaccgcttaacattatctcctatttgccgtatcctgtatttccatatcctctcgtcgtttttttttcctctgcccgctggtcgcgcaagctctagctcttgtccgtaccggccaccgccccagcctgtcgatctcatctccctgtgattttttatcagccgtcggggggagaaaaatcttccctgttcttatgatcttatcccccgtcgccctgctcagattttccagccaccgctgtactgatattttagcgcgcgatgcctattccttgcgtgctcctctctgccgagcggcttcttcacgcgtgtctctctctccctggtgcctgctcgcgacaagctcctgctcccttccgtggtcgcgtgctcagctcttctgcaggccgcgcccagcttctcaccctc

SEQ ID NO: 63159 - DNA, 318 bp, Zea Mays
cgtgggtagagcactctctatgtatgcaagccaaaattgaagtctgttcttgagtcgccttaggtcagtaatgctcaccccattgctaatttggacagccgccaccggtcatggccagtacgagctacatagtgctcgacggtgagcgcgtcgtggccatgggtctgattggagaagaaacaaaagccgagggacctatgcgtgattgtcagtgagacgatgaatagtggctaggggttcttaacggattatccaagcaattgggagcctctgtgcaaatccgccagcgcaggcgcgcgcgcgggcacgttcccgttt

SEQ ID NO: 63160 - DNA, 478 bp, Zea Mays
gtcatttgtgtgtttgaactagacatgcctttttactgttggtattctaaggctaccatattctggacttaatgcgtctatctccttgttgaaattcttaatacagagtactttgattttcagttttcaataggaaagttaatatgccgaatgaagatcgcactgaagaggttaaagtgttaacttatattgattgtcaaacttccacggaatgatgtcctactaactgcaacatgggttattaaggtctgtagtttcaaagtatgatatggcgtcataattacttgaactgtgataactgcagttgactggacattgtttggttattatggtctgtaggatcataggtatgttttcacttggcatctgtgataactgcagttgacctgtcaatattttgttagaaagaactgtagggtcttatgtgataatttctcacctttaagctttgggttcgccttgatatttctcacctgtg

SEQ ID NO: 63161 - DNA, 304 bp, Zea Mays
gtttcacactatttagcagcgccgccacatggagtagctgacgaggagctaaagaaatatccgtgttacaagttccagctgaagaaagaagttgctgcacactcagacctgtacaaataaatccgcacatgcatcacacccaatccatttacaaataaaattgcagctgaagaaagacacaatccatcacaatatattcattttgaacaacaagccaccaattcatggacaatgaagttttattcttattggcaatcctcactaataaatatagaaagcaatctagtactagtgccacttatca

SEQ ID NO: 63162 - DNA, 350 bp, Zea Mays
gttgggatggggtaataagatcagcatattgcatgttggttgagaattgaataaactaaaatttctaagcagtgaatggaaatgtggcaactggatttttttcatggacggttaagattcagtaagaatacaacacggatcagcttatgcaaatccaataatttctatattcagagaaaaagacggaaatcccaagatgagctataaaagagtaaattcaaaagggcctaaaattatttccatcaatctattctctgcatttatagcgcttcaaattagtatcaatcgaacaaagtatactttctttgtcaatcacatgtcagcacatcatccacgtacatgattcgaat

SEQ ID NO: 63163 - DNA, 300 bp, Zea Mays
aatgggaaccgaagacctgccttcataaagcttctgtaaacaacaacttcatcttcttcgggtgcggcgctgtctcccccaaccctcacaatagacatgtcacgaaagtatcttcccttcatggcatcaatctgactctatttaatggacgactttccaaagatggtatgacttggccgccagggccggtcttcggcatcttcattcccactttctacatcaaagtcatcactatcatcagaatcttcagataaatcagctagtattttgtttgtaatcttctctgtgtttgttttttcc

SEQ ID NO: 63164 - DNA, 567 bp, Zea Mays
gttgtgtaagagtactctatgctaactcatcaataaatacctaatccacagtctttgtctagatctatgaatgtcgggcgatagaggggatctagaataaatacatatgctctaatatcggggctcctgaacaaaaaagagatgcaatgcgcgatgcaatgacccgattagagagatgtataaacggatacaaatcacacatttagttggagaataagggttacaatcaaatccacttcaatcgaccgaaatgcttcaaaaaatcgacggcaaactcggtgtatttcaatgttggattacctggaacttcttgaatcgggctccaatgctgggagattgaaggatgtaagctggattggaacgacgctggattggagcagcgaaaatcgtctggcgagtcgcctccgacgaaaggaaagactacgcggctggggttttcttcctatcgacgcgggtttgcctccgttgattgcgcgaatacggttttagaaacaggaaacgtgggagaggtggctggctgacggaggaaacggtgtaacggcgctgtgactggaaactgttgacccg

SEQ ID NO: 63165 - DNA, 680 bp, Zea Mays
gagagagaggggtagacggaaagtgcagtgtgtcatgacagcaaccccagatcaaatattcatcctgacggtgagagcaggataaccaacctgtatctttgctcaattgctccccaaaggctataacagggactgtagatgcaaagaatatgtagagcgtaggtgccagtatcctgacaacagaattcatgtagcacagtgaacacaacaggctaattaagtaatgatgacatgtcaagcaattacaacatggtgttgtgcaaaccttaaaccagaacgaaatccatggttccagtcttgtttgtagcaacctgctcttcctttcaaatcatcagccactccactaaatggagatttattaggtcccgacatctgaacatggaggtaaaaaaaataatcaaatattgtgcttgccaaaccatggacgggttttacaaaccagccctaagtcaaactgtcaaagtgcatcacaaacaaaacagtattcttcacagaaatatatctggggttccagaacattacatcataatacacagcttgtgatgagatgttgtctctagaaaaaaggaagaacacaacaaaaacatcaaattttcaggcttctcttattttgagaaggatttgtctcattggcactcaaacacatcttatccaatcaaaggctcggatattctaaccac

SEQ ID NO: 63166 - DNA, 641 bp, Zea Mays
aggtactaaagatgatttaacaattttaactatcttagccagttgatgtcgtggtcacctttttatagcctaatattatttccccttttgaaccaaactggagcaaaataacacccctacttgttacagaatagactcatgtcagcatagcttcaccattattggcatctatgcagaaatgattgtttgtatgattcaagaaagaattttcaagatttatttttttatcagaacaattagtataagtgtcatagtgtactgattactgaacgaaacctgctgcatttgccaagaacctacaactttgaaagatctaaggaaggatatacccatgttcatttctgctaaaaattggtttcatttgcatcgttgaaacttcataagtcaattcatcatctacaacctttcgtcagacccttgcccatattcctgacacataaagtttacagaacaatcacaatggaactacagtgcataggcttcactaaaagactgtttggcatgcatgttttttcttttcttttctcctttactcttcagatcagttgtgaataagtaggctgatcaagttcaatcaatgttgactgttttgtttatatcttagtggtcgtataacatcagcagagacggttatgctgcag

SEQ ID NO: 63167 - DNA, 297 bp, Zea Mays
gaaataattaacaaaagggggagaatcataagtaaaacataagatgtgggagttgataagtgcattctatgtcatgagcatcacgtttattttatgacacactacaccccatgaatagtatggagttgataagtgcattctatgtcatgagcatcacgtttattttatgacacactgcaccccataaatagtatgatataagttgtctccatactttgacccaaatatgtgcttttggcatttgagtacaaaagtgttattttctgaaatgcacatatttagggggaggaaattata

SEQ ID NO: 63168 - DNA, 963 bp, Zea Mays
gtcaagcgctctgaataggcctccaatagtacacttccacacaaatatcagcaggttcagggaatatcgccgccggtgaccttacgccgtgattggcgccggcgatgtgattcgtgctcaatggagtactgatagttgctcaaggaagtaaatatcgccttgaggatgaacttaggccactgttcaaccccggccgctgtgtccgcctgactcacgaccggttcagataaggtcgccggagttggctgcctatgaaccacgtgcctaggtgccttaccacgtcgtagtaactcgtattacggatgtccgttgatcgtcgatgtgctcgccacggtgaaagccaccaattccttgcgatagtactctcccctttctccggccgccaccgcaccatctccaattcaagggccaccgctcatgaatcctataaattgagcgtgccctcagctccgctacgtagttgtgcatccagtgaaccagctctcacctccactcatcccctacagctccccaatttgaaactttccccaaatcggtccagagcaccgtactaagtaacctcatcgcggtcagcgctccacaggtccaatcatgttctcctcgctcttgttctagcattcctgtgtgcccttgaagctcatcggtccaaccaattgcactgaaccggagtagatcgatgggaacactttgaattgtccctagattacgcggtcaccgtgagcagagagtttgggggctagaaccttgcaattgaacgaggggaaacgattgttaggggttaaattaagtgtcagccaagctagagccctagtcgttgcctatttctggccagtacgagctcgctggagctcggtctatcgccgttcaccgtcggggatcgtgggctgtgaaggaatagaagtgcgagggtctcggtgtaattgtcagggactcatgaaaatagtgctacaaacttggtccaga

SEQ ID NO: 63169 - DNA, 656 bp, Zea Mays
gtcagaaataatctagtcgtggatgttttcccttttcctacgatctaagtgctaacaatgccaacatacgataatttcgacacgacactctctggccgaccgaccagcgatttaggtagctccaaccgctggattttgctcgcgtcgatggccttcgctacaaaggcggcgtccgcgacagagggcatcagcgaaagtgagatcaccaatagagtcagcacctctggctttcgacgagaggtaacagaggtaaacgagagtacaagggaacaaaggtaaaccagtcgcctatggtctatggactctgttctaaggatacttgacagagaagaacaaaggcaatatctaggccgcccacacagacttggttaccctgcccataagctagaggcccaaaagcctggtccgaagcacgtttgttttccccaatacgagcccggtccagcccgacacgaataacgggctaagctcgattagagaattaagcccggcgggaaggcccagtcgggcccatttagcacttggtccgtttttttttactaaatcgtgcttttctgcccactaaaccagcttttcgaccctttttctgtgcttaccggaccggcttagcccgtttaagtccgtagcataccagacccgttcaaagaaacaagccc

SEQ ID NO: 63170 - DNA, 506 bp, Zea Mays
gtttggaaccgttattcacctacttcagctttttggataccaactttgtagagtagatcatagtcctaactttactccctgatctgaagctttttcctccatgtacttgaaccctgacttagatcccttacttgaaaatatgctcgtacaacagttttggttaatgtggaccttcattcggagaccttcttcccaatgggttgtgttccctttcacaccacatataataaaaggagacaagaatagcacacacaccaatgttcgctagtttcttctcattactacacacttgatccgatctactcctatatggttagtgaggggaagagtcagtgccatcgtaacttcaactccaacatagaccgctgaagtctacctttccatggtgaccccctcgttcaatcgtaaaggtgactttcctccccattctcttagttttatgttttgatcaaggaaagattctacacttgctaacattggttgctttgaattttaaaagttcctat

SEQ ID NO: 63171 - DNA, 1049 bp, Zea Mays
ggaaaaatggagaaacaggcagggcaagccctcggaggaggaaaggcacaaaaacgatggcttcatgggtgtcctatgtcggaacagtcaccccacaccagattcgccaagaacacagctctttcagcggcaaaaccccagtttccacaagatgaaagagatctgactcagaaattacagacatatggttaccggcaaatggaagctggctagaaggatcaatggacggaatgattggaacaacgacactctgtctcttccgcttgggagccatcgcaatctctcgggcagagtgggcaggctcgagaactcagataacagagaagcggcgaaggagaaaagcatgatttagggttcggaactgaagaagacatgtcagcataagtataagttggctccataagttgggaattacctctaaaatgccagatcataactcggaaaagcaagaatcataatcgtcactcgggcattacctctaaaatgccagtaagccttcaagcacacgaacaaagagcgtgcaacgatggttaagtgaaataactgtgttcttcattcataaaggggtattcaacaaaacttgaagctaactcattatgagtcagcctcttccacccctggtcactacattacattacattacattacattattctactacttacactacgctatactaatactactctaatccactaatacttactactacttattgctactactaccgctatctatactaatatttaaaccagcggcattatgccactggccttgtcgccgtcgcccttgccgccgtcacctttgctgccctcgcccttgccaccgtcgcctttgttgtcgtcgcctttaccaccatcgcccttgcagccgtcgtcgttgcctttgctgtcgtcaccgttgtccttgctactgtagtcgttgccctcgccgtcaccgccgcccttaccaccgtcgtcgtcgctgttgcccttgtcgtcattgtcgccctcgccgccgccaccaccctcgtcgtcgtcatcgccgctgccgccctcgccgtcaccatc

SEQ ID NO: 63172 - DNA, 754 bp, Zea Mays
atgtcattggcatattcgacctagccattggtcatgggattggcgactgtggctcaatctatagaaatgttgaagtcatcacaaacttgaggaaggtgcacctagtgaagttggtattcttgtaggtgatgatggagtttaggaccccaaagcgatagacaatttcttggaagaagttggtagcctaggcaaaggtcatactaaccataggctttgactcgatctagttggtgaactagtcaatggtgataagcaggtgggcttagactaacagtcgtatttgccatgcatagaattggcaaccttcatatgtgtaggatgttagcttgaagttggccatcatagtgggctagtataacccttgctagaagtccttccacatgactgatcgaggagcaacatggtggtcgcaaacaccctatgggtgtcctacaaaatttatttctcattagcaatagtcatacatttttgcaagttcccaaaggactttctagtaaatttgtccatcgaccatttggaaggacttggcctggtaggataattattggacttctatttattcgtgagagagccacctagtcgttaggtggttggtgaatgtggtgcactagttctctagagttagtgggtggctgacaaccactaaggttgtctcttgcgagtcatggatgaccatggcccctaaggcagatgggcagacgatggggtcaccctcatgatcgggtagatggtcggttacggggcctaaccttgc

SEQ ID NO: 63173 - DNA, 1521 bp, Zea Mays
cttttgtttgccaactaatattaggcgatatattgtaatgcgttggatgtttgtaaagtttattattcatatgtagtggcgtgaacgagtgtgtgaatcggggaaataactgagttatgttgattggacgtgatgtgtaaatttaaaaattgtaggtttgtgtgtagggtgtattattgaacatgtatgtcgatgtattataatagtgattgcgttagagtcgtttgaagtattttgaatgcatcccgaatagggttgcattcgaaatagggaaagagacatgtagtgcgataaaaaggctagattgattttataggtcgtatgaaaaacattctattaagtgtatatatcgagtgtgctaaatggatcctacgtatgcagagtgtagtgtattggttatgcgaagagttttggaatagacgagtatgaggcgtgcagttaagtcgtgattgaagtgcaaatcctatgcaatgtgatgggattcatgattatataggagttgtatttgttgatgtgatgagtagggttaaatatataggcttgtgcgaaggatgtattattgagcttgggtcaaaatgcgaggtactagtggtacgctaggcaggcggtgttccaaataaataaatcggttgatgtggtagctgtcatgcgtggtttattgttagtgagtagttgaattacgagttatgcgagaatcatgttagaaactagtatgcggcatgtaactgtgttcgcgtggttaaataataataataataattgtaagaacagtcgttcaaattggtcagtccgattaagaatgattttgcgtgtgaggtgaggtggtgacatgccaaagtagtcatcgtttcccccatgtttataagtcaagtcaatacacattaggcgttcataaaatttcatgtcgcacatagtgtatggttgtgttcatgacttcgaatagatgttttcgagtggacaagtaggtttgtaaggtgtgtgatgatgatattcgtgatttaagtagaggtcatgtaattatgtagggaagcttaggttaagttgcaagcgatgtgggaatgttttggtaaagatatatgtgaaatatgaacgagtcattcaatgtatttggtatgccgtgtagtggtggtatgaaaaatgggttagaaatcgatcggctaaatgccaaattcggttagagttgtttcgttacttgggagagtgtggtgaaatgatggtagggctacgtagccatcacgtcatctattgtgtgactatgcttaagtgtgccttgatataagttagaggaagtcaagtccctaaaacacgacgattcctgaattaaaaaggagctgaaaattattagtgatgttttggactgcacgcagtgatttccccgtgctgtatgtttgatgaactaaatcatgttttctgtggaaaagccatatagaaaagttgtagattactttattatcttacttgtgttaaaatttgacagccataagtatgatcgtttagaagttatactttttacaaattcag

SEQ ID NO: 63174 - DNA, 480 bp, Zea Mays
agctcatgtaacatgggtggtattcttggctaaggtacctcacctagagggtcaccaatactagcgtgggaaccttagcggtggctttgtactaagtatgttttgtgaaaaccttaagatggatcccagccattcaccttgaaagtgaatacgggtcttacaatctctacagggtgtcaaactgataatcagtcgtgctcaggaccctcacatgatatttgaacttaaagatggagattaaatcgtgatctttttggttctggtggttgcttaagtgggttcaagatgatgtttgccttacgattaatggggtttggtaaatacttacacttagtaaatagatgttgctagtaaaagtttgaccaactaaaaggctaaccgcataaacccttagcctatccttggtagctatgcatcttccccctacttgctaagtacccaccgtaagtgtactcatctttgcttaattttgatcagaag

SEQ ID NO: 63175 - DNA, 853 bp, Zea Mays
cttgcctgaacgccttcccaataagggaccatggggttgtgtggtccccgcatgttccaccatgtatgtcggtgagcagatgtcatccttcttcaattgggatgcatttctgcttgattcttgaggcactcttttttgtaagtagtgcctcatagacgagcacaaaggacttcgtcttacgagagagtcacctcgcctctattgtgtccggtcgatgaagggttggcgctagtgttgttggtcggttgttgtgaccagctcctgagctggggccacacggtcgacttggtttgtttggctcttcctccgaccgcttgatcttcatggaggtctcgtagatgtcagaggcaaaaattccgtctgggatgggctttcaccttgatgtgatggtcaagagctcgtcggcctcggcattaaaatgcctaaagctatggtgcagctcgaatcctttgaacctctcttctagcttttgtacctcaccataatatgcgcatatcagtggattgtgtggctccattgccttcatgacctagtcaaagaccaaactggagtcgcaccttaccaggagctgtcgcacccccacctcggccgcgatctagagcccattgacgagggcctcatatcctactacattgttggtggcgtcaaagttgaggcgaatggtgtagcagagtttgtgtccctgatgcaacgtgagaacaatgcctgtgtcgcttcgtgtcttgaggtaggacccactgaaatacatggtgaagtattctagatcctcgaccggggaaggcacctatgcttctgtccattctatgacaaagttggctagagcctgggcttgatagttgtcctaggaacattg

SEQ ID NO: 63176 - DNA, 566 bp, Zea Mays
tgctaacacatcttagcttgattttgcaacctttgtttatcaggtgatgattgggagcacgaggagatcttcactgatgatgatgaggttgtggatgttgatatagagcaaagacctgagttagctgatcctgaggctgctcctcctgaaattaaacaggtaaacaatatatgtgatgtgcctgctgcgttatgctgctgtatgctatcactagatctgctgatactgttgccttaaccaggatcaacaattcgccattcataagatgtgatatctgatttccatcataatactcacaggatgacaacgaggatgaactaggctgcagtgacaacttgagcaagtccggccaggagctaaagaggctgctccgccgagctgctggggaaaatgagtctgatgttgacgacaaaagcacatatgtaaggatcacaatcacaattcttcttagaactcaacatattcttttataggaggtgagaagtacacattagcaaacctaatgctatggaatagaactcatctttgtatctgtttcgtccgacaggaagatgacctaccctcgc

SEQ ID NO: 63177 - DNA, 788 bp, Zea Mays
cgccagtattcaaggagaagggcggctaaggaaccgaatgccagcagggatagttaaggaaagacaatcagcaaataaggagaaaaggggcaggtaacaattgtggctacaaatcagggatacttagtttccttagctagttggttgccaaataatagcagattagttccttaaaatatctgcttgttttcttgagttgtaagtcgtctgcctctataaaggcgcaggctgtagtttgtattaggcatccaagaaataaagatcctccttagggcgggatcgtcttgggtcatcctggctgggcacaacgccagcacagggaacctagtcggtcagcgtcctcctcttccctacgcactgcttcattccaacatccccctccactcacccttgagagacaccaggaaacacaagttacggacttaccagagggaagtcggtaacatatgcttatgttcccctctctccctaaccccatgtatctttcttctatatgctttgagatgtagtacccttccaatgtaaattgccgtccccatggctaatgcaatggaatccaggcccttgacagtcaaaaaaaaagattcagaactgaacagacattgaaacaaacgaaatatcctaagcacatggaaacagaagcactagcctaagacctaagcacactgaagatgtacacaacaccaaaaactggcactgaactagacatatctttaggtttaccattcttactgaacaggtgaattaaaacatgtaacacaattcagttgtgttacaacaaatgcttc

SEQ ID NO: 63178 - DNA, 455 bp, Zea Mays
atgaattctaaatccaacacaagtctggaaatcccttgaaaaggtaaatcgcaaaggtacatcacttttgacacttatccattacctttgtgccatctaaggacccttttcatgatagcgtgtttaaatcttgcttaatcaaaatttcttccctttatatcctttgtatcctttttggagatttatgacaaagggggagaaattgtgcattaaagcttacctttagtcctatgtaactaagtgttagaagacttttgaaaaggggagtataattaacaaaagggggaatcataaaaaacataggatgtagaaagtttattagtgcattctatgtcatgagcatcacgtttattttatgacacaaagcaccctctgaatagtatgatataagttgtcttcactctttgacccaaatatgtgcttttggcatttgagtacaaaattggtattttctg

SEQ ID NO: 63179 - DNA, 558 bp, Zea Mays
ctggccttggcttgaaccaagctcacactaggagaaatgctaggaatatcccatgtaatgtacatgcatcaaaagctagatatgaaagaaaatcaacagagcaataggtgaccatttatctacaccagcagccactcttggcataaggtcatgcccagggcatgaaacaccatgaaaacaatccctatgtagctgcatagaagaagatcctaggcctagatgatagcccacctccatgagtaggtgcacttaggtaaggcatgatcatagtagacacaccaaatgattagcagtagatagtggttggagtcatcagggagcagttgagatgtcattggcccctagctacgagacaaaataggggaagattaaagtataaggaaataaaacctaggaaaaccttgagaaagcatacgacttctacgcccacaaacctctaagatataaggcattacatgggctacaaatgaggggctagcaggggaatccattggatctagatagatcaaaacctagagtagcatgacactcccaacatgaagaacactactactagac

SEQ ID NO: 63180 - DNA, 466 bp, Zea Mays
attttgccttaaatgaagaaaactggagccaagcaaacagatgagtgaatatacgcacaaacaacatagtgaaatcacacatttaattccttatggttaagaggaagtaccttgtggtaagcattgatgcatcacgagatgaggaggcagacattgctcgatcaatctcctccgttgtgaaatccatctcctcctcttcctcttccccctttcttgctcgcgcgactcagaagaaatcaaaatcttcctttctgcacccacaggaacaagagtcagatcaatcgtcgtctcatcctaggcctcccaagcaacaaactccggcgaaataataaatatggaattttttcaggcgcacgtacctcgttcaccttgtaccggtcgagggtcacctgcaccagcgaactccccgagcaaagcgtctgcgccacaagagaacgaagcgcacaatcagcaaccaacaaaccca

SEQ ID NO: 63181 - DNA, 360 bp, Zea Mays
gttttcccacctcaaatggcaatttccccgaaaccctaaaactccgccctccacgtgttcggtgaaatgcccaaaccagctaaaaatgctccaattgaacccaaatttttcaggcgccttcacaacatctccagtaacatattcgccaaatttcacgcccatctgatattccaggctttaatttcacccaattccccgtttcgagcgatcgtttccgagccgagtgcccaaatctctttttcttcgcctaaattcaaaccaagcacacacttcactcatattcacccatataaacctattcgtgaagtatcggctccattccacgtcatttcgtgcctcaattcgaattccaaacctcct

SEQ ID NO: 63182 - DNA, 434 bp, Zea Mays
ggggtccaggccgttgtcagggacatcggtcccggcggtgggtggcctaccctcatcaagaccaactacgtcgagtgggacgtggtgatgagggtacgactccaggtttgccacatgtgggaagcagttcggtacgacgacgtcgattactatgaggatcgatgggcgctagatgccctcattgttgtattcctgctcgagatgcagttttcgctttcccagaagtggactgccaaggaagcctgggacgccatcgctgcgacccgcatcggcagcaaccgtgtccgcaagaccacactgcaggcactttgcaaggagtgggagaacctagccttcaagctaggtgaggatgttgatgactttgctcttcgccttaacactctgttgcagaagatggtgcagttcggtgacaacacctacgatgaggagagagc

SEQ ID NO: 63183 - DNA, 581 bp, Zea Mays
tttttcttcaacgtgttcaaaacggtgaagatacaccctataatgatgagacagaaacaagagatgaagttaaagaatatcttgatagtagatatatttgtgataaagattcatgctggcgcgtatttggatatgacatacacagacattatccatctgttgaaagaatgcctgttcacctacccaatgagaattacatcacatatagtgctggagctaacatggtcgatgtactttcacaaacataccttcgaagaactatgttaactgaatggtttgccacaaatttgcaaaattctgatgctaggaacctcacttatcctgatttcccaacaaaatggaggtgggatgacaaaagtagatcttggcttcctagaaaaagtcgagagaaaaggataggacgtttgtattatgtccatccattggctggtgataggtactaccttagaatgttgttattaatagtcaaaggagcctttagctatgaatgtctacgaacttataacaacattgtctactcttcatttaaagaagcatgcaaagcacgtggacttcttgatgatgacaaagaatggttaagt

SEQ ID NO: 63184 - DNA, 289 bp, Zea Mays
tacctcccggcaccatgattctatttgggttattgtggatagattgaccaagaccgctcatttcttgccagtgcacaccacccacaagacatagaagtacgcggaaatttacgttgatcaaatagtgcgattgcatggtattccaaagaccattatatctgacagaggagcgctgtttgtggcacgcttttgggaacagctgcaagaatcacttgggacccaagtaatccgaagctcagcataccatccccaaacagatggccagacagaaagggtgaatcagattttg

SEQ ID NO: 63185 - DNA, 738 bp, Zea Mays
ttatgatgtcgccaaatgagcacatcctggcagcatgccaaggctcaagtgtgtcaaccttgcacgtacatgtacgtcgccggttccgttccgtccaccgggcagcacaatgagcttcagctagcgctgggccgtgcaaaccctaaccgccgcccaccgccatggatcgggcggcatgcatagagttcgtggcgagcggcggagcgctaggtagagcttagacctcatcagatttgttctactctactgaatcctggttgcatctcatggatgcatgtttcttcttctgcttattattgtctgtgcttcaagctctgtcaatgctatatatatatatgctccgccactgctcgtcgctaattcgatcggcagcgcgggcatcggagcagctagccacgcatgcatcagccaagcttggatggaatggagcagctgggacggttccagatgattaaatattatactccgtacaaattatacagcatcccaaatggattctttgtaaccgaacaagtcaggatgaatacggcgggcatcggagaaaggtgagttcatccacttctctctcacaactctgtcaagagtggtatatatatgtttaaactatattgcatattccagtgagacatgtcagctctggggcgctgcagcctggatccagaagcttcacaattctataccacccctcacttgttctgttgtttgaaaaccaggttttcgaacgacatttcaagctca

SEQ ID NO: 63186 - DNA, 480 bp, Zea Mays
tgggattcttggtttcgcaccggggcattgaagcaaacccagagaagatcaaagcaattgaggcaatgaggcctccagcccaaatcaaggacgtccagaagcttatagggtcactggccgcccttagccgcttcatctcaagactggctaagagggcgctacccttcttcaagctcttacggaagtccagcccattctcttggaccgaggaggcagaacgagcctttcaagacttgaagcagcaccttgtgtccctaccaatactggtagctccagaaccagggagccgttgtacttatacattacagcggctacagaggcggtgagcatggtgctggtcatcgaaaggacgacactacatccctaggggagtcaaaaaaaattcccctaggagaaggtggtggtccgaccaccacggtgctgatggaaggtcaggagtttgaggactcgggaccaaccgtaggggtccgaatcatccag

SEQ ID NO: 63187 - DNA, 1242 bp, Zea Mays
agtgacacctagatgaagtaattgtctctctgaccgtgtccttcctagcctaggaattgagacccctcacattccagcaaaaaaccttaaggtctaagcctaaaattggaaaaaaagaaggtaccccttgattcatagtttcctgctctttcagcacagtgacaagacagtgagcatggaaaccacaaagctggtgaacaaggtgcgttaagacattgatgatgcggggaatgcaaaaggaccacacaaaaggtgttcataccatacatcaaacacatgcagtagtatgaagcctcagcacaaaagttaggcaggaaatcaaggcctaaggttaacatgatagaagcaaaagacccttaggcacagatcactagctcatgctattgactgcagctcttcaacacgcagactcccaatgccttcttgccggtctgcaactcctgcccccatcatcgcaatcatagcagccttgaagctcttctctatcgaccctttgaggttgaaggcggacgttagggctgcaagtgtctccagtgactgagtcctttggaacatggttaggaatttttgtaaggcagcctcaaagttattggattcgttgtttagcagtccgagctttctacaaaggtttcgttgggcacgctggattacatgcataggacaagattttgcgagtcggacgctgcgtcgtactgtggtcgtgttgacagtatgaagtcggtgacacagtgttggggttgccttgcttgcttctattttagtggttactgtcttccttgtctcttgaatttctgcagtagtcatgctgagcagaatcgtccgcgcgggcggcctaaagaggcactccaccagcctatccgctgccaggtcaacagaccggtgcacaccacgataagttgtagcatccagtatcagtgatggaggatgggcatcaaggtgctgttgttgtagcacttctgcacccctctccatgctcctagaatatgtggaaagagaggaccaaattgatctgaacacatcttgtattggaatcaaacacctagcagcgggatcgttgtagcaattctctttcatagatgggttggagtgcacatcactgaaagcatttgctgataaatgcatacccaggttattgtcgacgtgttgtgcggaagtctcttgcagttgtgtggcgctcaccagttttgtgcacaattttgggtcagcacgcattcttggaggttgtggagaggggtggtagct

SEQ ID NO: 63188 - DNA, 459 bp, Zea Mays
tggagtcaagagaacaccaacccagctgaaggggatgagcctccaaagtcagccagactcggcaacaaggtacccgatgctcctcatacaactgcaccgtgtacaaagggggcgtagggtaaccagcggagttaagcacttcccacaagatggaaggaaagccatcgtgagaaaggaagtcagagctgaaacgagtgtctcctccgctggcgggggtgggtgaattcatctgcggaagggcatcaaaggtaaagattatggtggaaggaagaaaataaaagagcctagatggttttaaaagtaagagggttagctcaatattttattccttttagttttataatgcatgcatgctgaaatcaacgtctcctctccgaatgaaataaaagggtgctcctagggcatccttcaaaagctaaggactggcccacagggcctacttacttagccacctatttc

SEQ ID NO: 63189 - DNA, 422 bp, Zea Mays
cgcgaagcgcgtgtataaatagcggtgcgaccactctggccctcacaccaaattaaattagaagacaatcatatcgagagcacactgccactgcaagtaggaaagctagcgcatcacaatggcggccagaaccagcgtggttgtgctttgcttcgttgtcgcctccgcccttctcgtggcctcgtcatttgctgcccgtactccaacctttggtacgttacctatgtgtatatacacacagctctcatctagcacatgcaaatctaaagacgacgctctgaaaatattatccagttctcgccatcaattacaccatcaccatgcatgcatgctgcgtgcttccatattttgtgtcgtagaatcgagaagggagacgagggagacggttgcaggacgaaccgtgaggaatatgccagtgatca

SEQ ID NO: 63190 - DNA, 614 bp, Zea Mays
ctaaattgaagctctctggtgatcgattgaggacaatacttggtggctgggggcatgatgatcctacggagctcatggtggcctcaatttataggaggcaagagcggtggccgggaattcgagcgacgacgcgcggcggtcggaggagtggaaggttactggcgcagcggattggtgtcctatcaccgtggcagtcattccgacgatcaatggggagttacaatgggtcacgacgatgcggtggaggtgccaaggcacgtggcacaagatcgtgaggaggcagtcaccgacgaggttatccgaagtgaccgtggcaagcttggtacggtggctggagtagtttaatggccggagtttatccacgacgaggattcttactcgatcccaggtgctatccacacgatccgagcacgaatcacggcggcatgagcgagaatccgtgcgcggctcgtcggcggcgagtttctgaacttgttttccccgatgcactgtaccatggcgaggtgggttcagttggcctgacagatcaaattcagggcaaattttctctaaattttgtatggcaacacatccaaggctctgcagcaaaattgtagcccaacataccatcgtca

SEQ ID NO: 63191 - DNA, 488 bp, Zea Mays
aaaatttggcacgaaacgccgataatatccagtaagtcccaagaaacatcggatttctgagacactagagggtctcttccattccaccacagaagcaacattcttggggtcaaccgcaatgccatactgactaatcacatgacccaacagagcaacttcagacagccaaaaagcacacttcttcaattcgccatagaactgattcttcctaagagcacccagaacgagacggagatgccgctcatgatcttcctccgtttttgaataaatcagaatatcatacagaaacacgaccacaaagtcatccaagaactcatgcaacatcctattcattgcttccataaaagcagcaggggcattagttaagccaaaagacatgactataaactcgaaatgcccatacctggtgcaaaaagctatcttctcaatatcctcctcacgaatcctcaactgatgataaccagagttcaaatcaattttagagaaca

SEQ ID NO: 63192 - DNA, 415 bp, Zea Mays
cccagaacgcacacatagaaatgtacttgttggatcggaggttccaaacactgatagttggcatgctaggtagggggcttgcacgttctcgacgaactttctaggctccggataaccagcaacgatagtggcatggtttcgacccccaaaacgaccattcagtttgggagtcatcaatgacgaggggacaatggatagggccccagaagccccaattcccctaatgagcgactcgctcgacattgccgaaggcctcggcaaccttcggcttggttcccgctcaggaggtgatgagcgatgatgtgtgctgcaacctgctttcgtcgagatcgcgggaatgctagaccccgtccaggactcgttccatgacctcctcctgtcggggttagagggcgggctgagttctccatcaagc

SEQ ID NO: 63193 - DNA, 419 bp, Zea Mays
aaacaatgttttgccagaagaatttctgggcggtcttcgatgttatcgtggatacttctcttgcctcgatccacttggtgaaatactcgacggcgacgaaggtgaacttgaggttcccttgggtcgtgggtagcggcccgacaatgtccaggccccagcgctgaagaggccacgtgtgggcgattagctttgtgaactgcgaatggtttcccgagcatggagaaaatttctagcaggcttcgcaggacctcgtcacccgattcacagcgcaaatcatagcaggctagtagaagccttggcggctagggccctaggccctgcgtgagagctgcaagttccgctgtggacttcgcgcaggatctagacgccttcggtctcagtgacgcatttaagcatgggttgactgacccccttttttg

SEQ ID NO: 63194 - DNA, 629 bp, Zea Mays
gccgtggaaagaatagacagccataaggaggacctaattggaacaaaggcaagacaggagtagacaacaaggtcatacaccgctgaccactcaatagcgacctctcttttgccaatcatctctaggaggtgcttaccatcctccatctcggtcatctcaaaatggaggtcatcaaaaaagacaaaggaggggctagacatagtcagcgccatggttgagtcattgctacaccatgagagcgcatcaacggtcatgttggctttttccagaaagcactcaacaaaagtcacatccaaacaactttctcacccaggtatgttgtgaaatggtggagaggcattgatctagcaagaattttagtgcgtggtgctttgtttgcaccataaaaggacacatctagatgtagggccgctagtgccacaccgccttgaccaatctaatgagctctcttttgtatgaggccaatttggagtattgtgggtgatgggtcaattgtagaaggcaatgaggctaacatattgatggatcatgacaccaaagctaatgttggaggcattgtggtggacgatgaacacgacattgatgtccagaagctatagaggaggcccaacgactagggtctgcttgag

SEQ ID NO: 63195 - DNA, 493 bp, Zea Mays
ggacatttgaagatgctaacaaagcttggttacttcaagaacactgacatgatttgacttggtggagaagacatgacttcataggcatgagaacaagattgccatgttgaagagcttcttccatgtgaggctttggttcctggtgcattaaatggttatccaagtttttgaagaaatattagttcttcttccatcaactcatgcgcaacacaataatgcatctcatagtattcataagggtagtctaaagtcaaggaggcgaaccaagttctgaatgcttccgcgagattcatgagctccactatcagacgaaagcacatgaaaacaaaagactatataacaacttcacttgttacaattcctgatattgaaagaattatgttttcctggtccttgcctatcgaagcaagttgccgaacaactagactcgaaaatggttttacacgaaggttgacatggaaaagaggaaatatatgatagaaatcatcatgag

SEQ ID NO: 63196 - DNA, 1025 bp, Zea Mays
caccgacgcggcccgtactggccatgatcggcggtggctgtctaaaatagctacggggtgaacattcccgacctaaggcgacccaagaacaatcttcaattttggctggcacacttagagagtgttctacccacgcacacggcggaacccgtgacgtcgagcccgcgttcccgttcaatcatgcctgaattggtccaacggcggccacgacgagcttcaggggtacacagagctactaaaacaacattcaaaaagtgcatagccatacccgagtggctcggtcacggagcgcggagaacttgtcctcgccggtgacagagaaagggaaaaatggtgccgcaacggctctgggcggaattgggaggtgagattgaggctcggccgtaaggaactgtagtttcatcgtgcacactcaatttgggaagagggtgtagaggcagtgcaaattttaggcttcgatcaaactcactggtggagatgtgaataccccgtcgtggatcatggtgctatttatagccacggcggtccggctaacgatcagcaaccgtggaaggctttgttcacgcatggcaaccatgtatagaagaggtacagtaagggagatcgaggcatgggtgacaccgcggcggaaatgatcaagccccggtgaccgccggtgggatatctccggccacgcacgactgagctcgcgggatggtgccacgtccaaagtttacttctccgcgatcaaatcctcaccgattcatccgagctcatccaattcaacagtgcaaagatctttgtttcagatattttagtgtactggatcttcaaagcttgtctgaaccgacccccttccatccactcaatctcttgattcttgttaaggacagggcaaacttcactaataaagtttgttcacctatcaaccgtcttcaaacttactataagatatttgggtcaaaatcgagtgaatccaaagatatggcacgcccaaattggctccattccactgtgaccatttctagttgcagtttcagttattc

SEQ ID NO: 63197 - DNA, 367 bp, Zea Mays
ccaaaaatggcgaaaggtggtgtaggttggtaattgggaaatagtcacgtcattagccaactcatgttaagtaggagtcgattgcgttaagtgattgttatatatatgttgtgtctcgaattgcgataagaataggcaagccgacgtgtatgctgtataacagactgtcgttgctctggttaaccaacttgttagatggctttagttaagctcgtagtcgcgatgaattgcttgttgtggtctaaatgtgtatggttatggtcgcgaataaaaagtagtagtgctcatgtgatgtctacgctaaaatgcaaactattgggtgaaaagcgcttcgatattgattatcgtagagaatgcgttgttaatt

SEQ ID NO: 63198 - DNA, 1017 bp, Zea Mays
ttataaggtaatcagaaatttaataaaggaaaaccaaggtaaaaagacaggtaaaagtttcatactgaatcgagcagttttctagcttcatctccagccaactcacgcccgcccttggcccaaatttgtgtaatgaatctatttcctatgcttcgggcttcgactgggatatccactatatcttatgtcgaaagattgaaagttggcttgttaaccgtgttggcgtgagtgcatctagccttcataaatgtagtagttgtgcctcgagaagctaccagagcacagaaatctttgtgcccgcttataacttcgtcgagggcttcaacttcgttttcaatatgatcaaaggccccggggtagtctttggccgaaggtgtaactttttcagaagcagctccaaccgagttgaatatccccttaagtcggtctgcacaccgggcggcaaagtctacacacttgttctgaaggtccttaacagactcgtatagcatcgtattcttttcagcttcggctttgacccttgttttaagttccttagtctcttggtcgaagtgtcgtgtacttccgttcgaagtcattcgagcttcgttcagttcctcgcttaacttagtattttgggatcgggattctgcgagggaactttcggctgattgcagcaggatgtctttttcttttagagaggtttcaagttcctttattttatcctctaagcctttaactatgacttcgtgttttctgtcctcactatcctgctgcattttcaacgccttgcttaacagcatgctctgcaaaacaaattgaagttagagcactcaatctatcatgaaggtaataaaaatctagacgaagaccttaccttgaaattggagtaaaataggctaccgacaatgtgttgccatcggtaaccgctgatgttggcctccagcttcgggaatccaacgctcttagacagagtgccgattatctttgccccagcgcggtcacgaatacatcctaaaatttcttcatcaaccccac

SEQ ID NO: 63199 - DNA, 791 bp, Zea Mays
tgactgcttgacttgtgtcccttgttctccattctgtattcacacactacactactacagtatttcctttttttttctctctctctcgctttaggttagaggaccactcctcgatattagtctcctattctcctggctgcatgatctcaaattgcaatcttttgggggtgtccttgtcctggcctgatgtatgaggagcagaagaatggaccaggccattataagctagtttattgatttggtgcttatgcttatgcctgcattgcttgttacctttatgtcctgtcaaggcgtgggttaagcacatagtggttcatgaattgtgtcggtatggcaatcttttggtctgtcacccgtcatatggcaccacaaccaaccagagttcaatatcaaatcaagctctagtacgcagccaccggtgtgtgggctccagcgccatcagaaggcatctggtctcatttcacctgaaaccaggacgggtttcctggcacccgtgatcactaccactagcactagctacataaagactggagcagatgatgacaggttttctttctatttgtttgaggtttttagtgttgaacgaacaagatgtggctggtgctgatcgacccctctttaattttttgctctggtggctgtcggcatcgcccgtcgtggttgctgctgccgcctgccggtagcagttcggcagctggctggtgcaaacattttcgcagtggctgcatgtatgtatgaatatataattaagcgtgcttgtaactttgtcatcgtcgtatgtttcgtccccg

SEQ ID NO: 63200 - DNA, 842 bp, Zea Mays
aagaatctgactgccaagttcaaatatgttaggaaagttctgaaagaatggcagagatcgctgccaaaaattgatataacggtgaagaacattaagttgctaattgagcttattgacaacatggaagagcaccgggatctctctattgaggaatggaatttcagggaaattctgcaacaaaaggtggcagatttgcttaatattcaaaaaatttattggaagcagcatgcggctattaggtgggttactgatggagacatttgttctcgcttcttccatgcccatgccaccattaagcacaggaaaaattcaatccctactttgactgatgacaatgggaccatgttctttgagcatgatcataagtctgatcttctctgggaggctttcaagtgcagaatgggttcgttcgacttttcatatatcgggtttgatctttcagaacttttaactagcaatgagcaacttcagggactagatcatccgttttctaaactggaaattgatagcatcataaaactcttaccttcagataaatccccgggcccagatggtttcaatacaaatttcatcaagaaatgctggcatgtcattgccccggatttctatgatctgtgtgataaattctaccatgatcaggtttgcctcagaagtattaacgggtcattcattgttttgattccgaagattgagagtcctatgaaggtgggggattacaggccaatttctcttctaaacaatagtatgaaaatcttaacaaagctgttggcaaaccgtctgcaaccgttcatgccccggttaattcacaagaatcagtatggtttcatcaaggggaggtccat

SEQ ID NO: 63201 - DNA, 460 bp, Zea Mays
gaaggaaataaataaatgaatgaagtaaattgggatgattttgaaatttggaatgcagccctggtgcaccctcgatcgcgaaaagaacgacggcgactggaggctgaaggacgagaaggaccaaatcaccctcaagtttttggtgggggagacgacgagcaacgataaactggaggttgcaacaacggaggatcggaccaggcgctcttggtcatcaggtacaagaaaaaggagagcaacgtcgtcgtcgtcgacgagagcccggcgagctcgctggacgtccgcctgctgatgcctcccggctacgacagtaataagatgcaggcgataataatgtggaaaatacgggctggctagagatttctatccccaagcctaagcacgaacccaaaaccatacccatctcgccggcccagtgaccatcatcagtatgtatggatatatggatgtgtgcttcctc

SEQ ID NO: 63202 - DNA, 393 bp, Zea Mays
gttcgctcaaccacccggtttcccactaacctgtggccccttggtcggactcaactccaatcccaagcagcaggatatactcgacgaggtgagattttcctaggctcaacctcctaagccgtaacaaccaagcgataaattctcaccacggactcgtcctggcgctatataaaatctggctgcaaccctttccgatgaagctaccccgaaggacgagctagatggtggctggaaccaagcgtcatcgttgagggattgtcgtcggggcgagctatcgtgctgatatcgcagttagatttctcgggtgcttcgctgggccaagaaaagggggaaagtcatgctcgagcagcttcctagactcattggcggattgacgctctccatggttcttcg

SEQ ID NO: 63203 - DNA, 391 bp, Zea Mays
tcagagtacacaagagtaaatcgcgggaacacatgcaagaaatgcaaagataagagcgcaagtacaagatcacaaaagaacatcacagaactagtgctcgaatctatctcaaatcactagaatgcgaagtttcagagtgttggtatgctcttgaggtgcttaggtgctgattggaggcatctaggggtccattttatagcccaaagaggcctagaagccgttgtaatcttcatatggaagcacagaaattttccctatctgtgggcacactggaccgagacctttagcccacaatctggtattctgattagacactttccatacccgacgcgcactagaccgatctggtgcgccaccgggccatctgggccattgcagaggcccattgttc

SEQ ID NO: 63204 - DNA, 1274 bp, Zea Mays
gtaaaggtcaagtgaacaacatcactactcaattgatgtcacaggaattgtgctgggaaatgaaacaactcaaccttggaatgctcaataatatggaagcaatagttatggaagttgaatctactttggaataagaaattcgtaaaggacaagagtctgatgagaaaatcaaagaaattaagacacaaattagtttgggtaaagccccagatttcatagaagataaacaaggcacaatatggtttaaaaatagaatctgtgtaccagagatcgagcacctacgccaacttattttaagggaaacccatgattcggcttattctattcactttggaagtactaagatgtaccaggatctaaaggaaaagtattggtggtacagtttgaaaagagatgtggctactcatgttgcactatgtaccgtgtgacaacgagttaaagtcgaacaccaaagactagcaggattactacaacatctcaaggtaccggaatggaaatgggaagaaatcggtatggatttcatagttggactaccgcgtactcgggatggctatgattcaatatgggttatagtggacaggttgactaaagtggcacactttatacctatgaagacaacttactcaggagcccagttagcagagttatacatgttaagaattgtttgtctgcattgagtaccaaagaagatcatctcagatcgaggaacccaatttacctcgcgcatttggaaaagactacatgagcccatggataccaagctaaactttagttcagcttatcatccgcaaacgggatgggcaaactgaaagaacaaaccaagtgttggaagatatgttaagagcttgcgctctaaagcatggtagaagctaggataaaagtttgccttatgcataattctcgtacaacaatagttaccaggcaagtctaaaactggcaccatttgaagcacgttatggacgaaagtgtagaacaccgctttattggaatcagaccggagaaagtcaagtatttggcccagaaattctcgaagaagcagaaaagcaagtacagattatcagaaagaatttgaaatcaacacaatcaagacagaaaagctatgctgacaatagaagaagagagttgatctttgaagtaggagacttcgtataccttaaagtttcaccgatgagaggcatgaaaagatttaagggtaaggggaaaatatctcctcgctacattggcccgttcaaaattttggaaaagaaaaggtgaagtagcgtaccagttagagc

SEQ ID NO: 63205 - DNA, 353 bp, Zea Mays
tattccaatcaggtcaactcaacaacatgcctttgatgagatgaaacaatatttaatccatctaacaaccttgtcaccaccgtcatcaatggctccattgttgttgtatgtctctgcctctcatgccactgtgagcgcagccttagtgcagggaaagaaagaagggagatgcaaaaaaacaagttccagaatactgtctcgaaagttcttggtacttccaagcaaaactactcagaaattgataaagtattatatgttgtcctgatggcctcaagaaagctttggcattatttctagtcgcacaacatcattgtatcttcatctcgatcattgaagggcattataagaaatag

SEQ ID NO: 63206 - DNA, 823 bp, Zea Mays
atcaacatgtatgttctcccgaaagagcgcccttctccttttagtaatttcagcattctctgtgttacgcgtatctgattttgaaaaatctagtttcagttcttctctaaatttcggagcagaagctctccacagatgatcaacttcagtaatggtttggcacacgggtgactatatctcatccataaggtgaaatatctccaaatatgtttcactaagggttgcaccataaatagacaaaagcaagaaaactaattctcttcatccactcaattggctattattctgttgtctgctcttaatatcatacagtacccttagtaatctgatggtttcaactcttctcttttctgcaatagaaatttctgccttattttcttccacgaaagaaaaatcaactaatttcaaaatacttggagctggctgtagcatcccccttgtggtgttacaaggagatggatacttagaatcttcattgcatgttattgtcgatacaaaattggagtgacccagtataagttcaagaatttcatcagctgagaactttccttgtgatagcacaacaagaatacatcgaattgcttttatggcgacaagatcattgaatctatgcaagagggacgatctgatgaattgagcaaggaaaggtattgatttcagctgatttagatagctttgaatctctaaagacagttcaatgatattcttgagaaatacatattccagaaaacagatgacctttcgttccttggtagagagtgataagatattgtcactcgatgggaaattcatgagtattttatccatagttctgaccagtatg

SEQ ID NO: 63207 - DNA, 1204 bp, Zea Mays
ttgctcgggggctccacaccccaactcaagtcacaccgactcagatgactccccagtcagcataccaagaacaacctcaatatcagagtcactggcagttggccgtatcagaaaatgagtttgtttatccacttcaggcagatctcggtgcgcgacgattatggcctctatttcgtctggagaaggccccactctatggctagagctgcaaccctcttcacagatgggtgggttggacagaaagttagaaaaggactctgcatcaatgaaacagtacgatcagcacaaagcatacaataatttagcaagggtcgaatgagaaatcaagttataagaacttactagtggggaaagattccaagcaaaataagctcgaggagcaccagcatttacaatggcgcccttcagcatcatctcggcctgactcaagatgttttcctttgaaatttgtttgtccatcaccctggaaggatctcttacccgatatacacatatgcagggtaactctatccttaggaggttggatattcttgaaggccaaatcaataaccacagcttcagcagctaggcctttgtccttcaaaccagcaatttcagctaacaagatttttgcctcggcaacttcagagtcggttggggcctctatccaactcggcacgtgcacatccggttgccttccagagcgagcaagcaaggacttattatgattctctatggtgaaccactcaaagtgtcatcctttaatgttgtcctttagagggatatctaggtattcagccttcctaccccaatgaagttcaaggctggccccaccaaccacttgatgctgcccacccgcacatatacttccatagtccaaagtgcgggttaatcccgaggtaggctttgcagagatgcacgaagatggaaatttgaagaacagaattggtgttcaagtgagtaaaattgagggagtagaaatcaaggaggccgcggaaaaagggacaaacgggtaaacccaggccccgaatctagaacgagacgaagaccatggattcatgggtgcacagtgatcccttaccaaacccgccaggaacacaactccttcgacgggagaacacaaatctaaactagatgaagcaagtcggattcaaagacaacataagcgtaattaccgtaaaaaaggaagctggctattgggatcgataggggcatgacaggcgca

SEQ ID NO: 63208 - DNA, 662 bp, Zea Mays
gtgtggccacttgtggagaattgggatatgccgaaggagactgctgtcgaatctagtgaagacggcctggttcgattgaaatatacctttagatttagagagaggtttgatgagccaaatgatgactggttgaaatgtattgaagctaccagtgacgagctgcttgggacatattccaaggccgaagataatgctttatccatagccttcgggggtcagggcaagaaaagattgaacagggtatttgatgcaattggcttcgtataccctgattatcactacccgctgcgagggaaaaagagaaagactgccgcttcggccaccacagctgtgccgaagggcaaaagggtgaaggttctgacccaccggccgcgttatattgaaccggccgtagtgcctgaatttggggaaggaacctcttcaactgccgaaacaaaacaagttgctccgattgcgaagagcgctgaagagccgattgtagtgccgaaggtgcctacagtcgggccagccgaagccaaagatggtgcggacgaagaaccaaaagtggaaaagacaatgaaaatgatagaaactctgagcccaccagcaggggcagaattatcgaaggtacaaaaagctgctaccgcaactcccaagagaaggaggatggccagcgtactaga

SEQ ID NO: 63209 - DNA, 760 bp, Zea Mays
ccctttttgcagatcaccaggtgaggaggcagaaaggagatgtcataaggaagagcggtgcctcaccaggcgaagcccgacgctaccttgtatcttgtgaacatagcatgaaccatcggggctattaacctctggagtgcaatgcaactcagcattaactgcagacaagacgtatacctgcccactctagtggcgggtgctacaaccgaagtacacagaccacacagtggctcacgttttaccgaggtgggacctttgactctttccattgcgtgggctactgccatcatgacctccattgtagtgcgcgaggtaccaaggcgaagggtggcaggtggagaagacaggacgacgttgccagagcatccctacacacggtagcgctttggcctatgccacaacctactcctgcgctctgcccgattagatgaggcaagggtacaatgggcagcagtacttcagcctacgccacaacctattcctgcgctttgcatcgattagacgaggcaagggcacgacgagccaggaaatcttcatgaagaccaaaagaagatctattcccccgcgcgtctggccgatgcgatcacgcacgcctgagagactgatggacttgcgctcggtgcgtgacgaaccatcgtaggaaaggatccaccccttatactgcttaaccccccaagcaatccatgaggatcactcgagagctaaaggactacgtctagcagatgcacccacgcgcgcccaagagaccgatcgagtcatg

SEQ ID NO: 63210 - DNA, 1068 bp, Zea Mays
agttggtcatcagagttggtcattggagttggtcattgtagttgatcatcggggagttggtcagccggtctgcctcgtagagttggtcggtggagttggtcggtggagtttgttatcagagagttggtctgccggtccgcctcgcagagttggtcgacagagagttagttagctagtctgcctcgtagagttggtcgacggagttggtcagtggagttggttatcagagagttggtcagctggtccacctcgtagagttggtcatcagagagttggtcagcgggttcacctcgtagagttggtcggtggagttggtaatttttgaagggcccattttgggtacccggtttccgagtacccgacagttactctcaacctcaaaaaagacgaataaagtgcacacatacaaatcaccaaaatcgactactggtttgatgatatgagaaggttcatggtcaaattagaaacatgcctaaacaaacgggtcgaagtttggacactagactcaaaaaacacacaaaacacaaattgcacaaagcaaaggtggtatggccaggtctagccttccctagttggaccaaagttgtcctagccaagctgtagagtcagctcagttggaatcctaggccgatcgggattgaagggcgacctaactaggtccagcctgtttaatcaccaaaactttttctctaaaaatgaaaacaccttaaatgaacttggatcgagataaaattccgcataagggttaggaagggagttaggaaggttaacctagaagatcaattccaaaatctaaacgaaactccgcggatttgggaagttccaaactgaattgagcatcaagtgccctatagccctttgttagactatcatgaacaatgtatgtacttggtcttcaactgttctcaagatgttcgagtttttcttgtggcgataaggatttttttgatcgactgattttagttagggttttgtccttttttcttaatttacttgtgttctagtttccctatcgggggtgtttggcatggctccactctaccttagatcagctctactctaaaaatc

SEQ ID NO: 63211 - DNA, 602 bp, Zea Mays
gcagttgaatttcatggccaaatgatcgatttttttcttcctccacgagtcacgtggtttcgtatgatgaagctccgtacctgttgtttgggtggtttggttccttttctagctggtctttgttagattcggatttggaattgggtttcctggacggaatgagacaccggagtggcgtcctggccgcattgggttttgtcgatttctatgggttgctgcttaaagttaatgctggtcctgtggcttaattagtgcttaatgctggtcctgtggggagggatttgcaattttacctctcggagagcgttgggcttcgttaatttgccattgggaccctaaatcataggtactagttgcaattatctatctctactgtattaatgcacgagtttcaatagcccgcgtcatctttttatagataatcccttgtatttcttcaaaattaaccctcgtcccatatcatatacagacttctagccatttaactgtggaacattgctagagcataactatgaaaaagttttgttcatgtcgaattcatttcacattgaattttaagtgaaatcaactatacaattgaagtacaaggctctgtaaaagca

SEQ ID NO: 63212 - DNA, 1037 bp, Zea Mays
cttgagttggtggcaacaacaaatttattgagtgttcgaaagcatgggttaccttatccttgccatggtttttggtgctctatggtgtctgagaagaggtacctttagttgggatagagtctactgatgtagacttggatgcagcccacacagacgaaatggatgatggttgggatccactgggtgaaattggaacttgacctccatcaccaatcttggcaacaatcatcttaacttggaagcacacattacctaaagcaatggtgctgtctgtgaagcttacgttgaatgtgtacaccttttccatcagcctagttatttcattgggaataaatccagctggattatccgtgatcaagatgtcaagtggtttcttaacaatgcgttgtgccatacgtccaaatagtatgaaatcagtctcgcctgtctcatctcctactgtgatgagcaacctgtacctacgcataaagtagcagtcacagatgtatgattaaggagtcagcaggcatagatgtaccagaccaagaaacatcacagaccttggattaggcagaccaacatggccacaaccagcgtccgagaatttgtaggcatcaccatgaggctttgttttcttgaggcactttctacaggactcgtaccaccatagttgatcaatcttaagaacggtaactgttaccaaccacccaactttctatggaacagttaaatgaggcagtacaggggttagcattgttattttaggcacataagaagagtgaataaaaagatgtaatcaattagcatgaaaggaaccacctcatgcttgaatggatgcaggtgtttgattttagatactttcttatgctcagcggtagaaatcctcggcacacgctgcgttgaaccagtagcagacataattgggctccttttatgctgcaagctaaaaatggagacgagtgaactggacatataaagggtagacctatattttttggcactcaagggaagcgggcgacatgtttatggtacctggttgcaaggcttgttgcctctag

SEQ ID NO: 63213 - DNA, 403 bp, Zea Mays
ccttcatgaattctggcatcgatcaagggaccccactccacaggaatatgacactcttcttagaaagggtgcgagaaatgggttgctcgatttcatttcctggttcaaacgtaaggtacgtgcttagtttgtaaaagacaacgtttttgaactcattttagcgtcttttaacttgcgaatacttgcaggaccaaagagatccgtctatgagtgccgagttgagacaagtagccaacgactttgcttatagggtcaagaaatattctggatatgacgtcaatggataccgttttcgcacaacaaactacgacaaaagtcggcccaatcggaaaacaacgtgttatggagtctttacgcccagccttgacaatgtcgattattttggacggatcgaagaaatata

SEQ ID NO: 63214 - DNA, 504 bp, Zea Mays
gagagagagaagtgagggagaggcttgggcgaggggagagagctctggctcgaccggtcctttttatagaggaagaggggaaggggagagggcgtcgggggagagaggtggccaacggcgacaccatcaatggtgtcattactgtcccctctgtcccgttggaggtgttggcggcagtggagaagttgcatcccttcacaaggcaggcacaacgatagcctatcgagttacctctatgccaggagcctatggacatcgctgagcctttcgtaaacacttacctaatggtatctcctagcgtagtatcgagtgaaggtcaggagcctctgactgcttgtattccctctcatgaacacttggtatctcagacatcttagagggtgactagtaaatatcgatggaccttggccactactatgccctcccatgaacgattagagccctaggaggatcttgatgccccctagccgctgttcagccctcccctgagcccttgggtttcga

SEQ ID NO: 63215 - DNA, 593 bp, Zea Mays
tccttggacggaggagtcctcggatgaaggcttggattattttgttgcgttggatgtggctgcggcggagacttcgccgcgtgtgcagggtgttggggatcttcctagtgcgagtactggttataggcggcgaagagtggtgggaacatgtagtgtgggtgactttttgcaaagtggtaggcaccatcgtatggggatggagcgtggccgtctccgagtagaccgggctggtaaacgagaattgctgtcctcgccgattggggcgagcataggcgagggggatcttcagaatctttttgagggtgaggaattgaggataatgctgttcaattatagggagatgggtatcatcccgaaggttgagccgatgtaatatatgatgccctcgccgtgtgtatgtaactataatttgtatggtaatgtggcgtgttggtcgtattcgtacgcctgtgttgatccggctgcacccgtgggcgacttttcgcgcggagtgtcttttaaataaaagacttcgattgatgcagttgttgtgctattccggctgcacccttgggcgacttttgcgcggagactctttagtaggagacttcgat

SEQ ID NO: 63216 - DNA, 1359 bp, Zea Mays
tcgggcccagcggcccgaatgtacacctatactctgagtacatcagcgatgcacttaagtactgagtgataatagatatgcaaacttcactaaacactaggcctaaacctagagcaagcgcataatcgatgttctaactagcctaaacacctcataaaaagcacctatattaatcccctgatattttcctaagcacttttggtggctagagaataaatggatgagcctcaactctccacatatttcactcagttatagcacatccttagccaaaatggaggtgtataaatagccccaactccaataactagtcattacaactctttcaggagtgtcaaaccacatggtgccctatttagttcagttcagcaaacatcaaatcgcgagagggggaatcacaccattattatcgaatcatacgacgcccctgtttatttagttcattgagcgtcgaaccattctctaccttgtttcaacatgtcatattttcatattttagccataacttttaactctagactctagttttgatgatctttgactctttgaaaagataatgaaaagctctacgacttacatatgaagtaatgtccatttgagcatatcaacaatcatgagaaaatttcaaatcatccacctttttgtctctactttagtggcctcaattttgttgatgttttgcatctaggcttctacttcttagtgtcttagaattcttagaatgtcttgtaagtattaaacatggattataatgtcttgattgaggtgttatcattcgaaccatcactttgcctaagtccaattccaccttgcgtccatttgaagtgtaccttgtatactagcaaacaacattattcaaaatggtctagttgttcatcaaacaccaaaaatccaaacttaatgacccatagggtccattttttatagggtgaagttctctctatttagtatcgacatagcatcaaatcattgatcgttagtataatggttggcttgtaggcaacatcggactaatgggctctactattcaccagggaggcccattatcaagtgcatgggaacatttaaatgtaggaattagatggtcctatgtgtgtcatcagattaatccaatggtttagggagctctctggaaactttctcgacaacatcatattacatagggcattagtgtgatgaccccatcagactataaactccactaaccattggctaatccaacatctagtatctaacaacatgagctctatgaataataacatcagactaatggctacagaggatgtaaaacataatatatatagtctggtgtatggagttataggtcattggtttaatattatgaccccataatcttcc

SEQ ID NO: 63217 - DNA, 471 bp, Zea Mays
gtcgacatcctctggaactttttctggtgttacatggtttattcttccctaactctggttttgcggagtcttgttctgtgcagtaccacgagcaggtgtattctgatcaactctttgactatagttcctctggggtgtctatgggttgcgctttgggcagttgttggcataatggccaatttctccacacttgaaacatccactaggctgaactgaggtagttgtattgttatttctgaccggtgtgttaatagcgcttccttgacgattctgttggtaaccactagatctttgactggtctgagagctgttcatctgttggttctggtaatggttgcttctttgaccttgttgtctagagcattgcatttgataattattatttccactctgatttctagagcaaaactgagaaccttgagagttgttatgcagacgagtgtttctgctagactgtccctagaatttcag

SEQ ID NO: 63218 - DNA, 720 bp, Zea Mays
ctcgcatgttgtcccgtgcccaccaggttcttagtgaaactgaggcagcaatcttgtgggagtgggaggcacttgaagctgagcaccagcgcctcagtgattggcgcacccaactggaggagcacaccaagacggcgtcccgatagttcacctccgagcggtcccaactcgagcgggaccgcaagaagtacaagaaagacctccagagggtgtgtgccagggagctggaggtgacccgaagggagaagaaagtggccaagagggaggaagccgtgacctagagggaggccctcacgacagagtaccagaccaagctgagtgctctggacaagactctggaagcccaacgggcccagcaggtaaaggccgtggaaaggttgcagaaatggtagcaagagctcgcgggcaaggccagcgacgtcgccctcgccgaggaaaaccttaaggagaaggagctgtccttggacaggcgggagacggatctcgccaggcgagagacagatctcgcctttagggaagaaatgctcacccggcgaggcgagttgctggtcgagcacgagctcgaagcagaggaaaaggagaggaagctggaggagcagatccgccagttcgatgcggcacaggcgacgccgggcccccaggcaatggaggccaccagaaaggccctcaaagatctccaagcagaacaccgcgccggggtccagcgcattgccgagtggg

SEQ ID NO: 63219 - DNA, 387 bp, Zea Mays
tttatgagcttcagcctgggcgttgtatttcgcctcatcttccttcactttattcaacaatgaaattagaattttgtccttctcctggggcttcgtttcttagttggattacctctgatcgaaggttgccaagagctattgtgcaaatttgatcctcaaaattcttttgagccctcagggcgttgctcaagattaagccctctgaaaaagaaagataaatgtttagcatgaggataaaggctttattcccaaattcataaattttaagtttacaattcctgtaccttcaggctgttgtacgcaaggttgtccgcgaggtcatcctttgacatggcggaaaggccaacttcgagctttggaaatcccatacttttagtcatctcccgg

SEQ ID NO: 63220 - DNA, 412 bp, Zea Mays
ggacagtcacaccggtcaccgtttgccacctgcagtgctggtaagaaccttgtaagagcggggtaagacgctttataatttgtgttccaccaccaccaccctgagagatagttgtagggttcacattgtttgttgcctttttgtctctgttttgtgctaacaatgaccggaccaaagaaccaaatggacaaggagaaggggcctaagattaacgacgatgagtgtgtctctcaactagaattgaaggagatgatacgcaagatgactgaagcttttaaaaaataccaggactctgcggcgacatcctatgagtagcttgatcgacgagttgctgaacttgttacacgcatggacgtactggaggctcgtcccccatcaccaactccagccccagctactggagcagtactgc

SEQ ID NO: 63221 - DNA, 1576 bp, Zea Mays
gaacttggctctgtagtgaactgaacaagttctgagcagtccaaaaacctggaaatatctccatccactaactaatctaggaagtgctgggtgtgtggcatgcaaaggggctggtgtagaagagggtgtcacctgccattgcttcacaccacttgggatgaacttgaggaggtgtaaaagtccatttcctagctgactcagctagttagctgctgccttgatgtccaacatgcagcaagggagcttcaacttttttcctttgtgtctttcttggcgtggtggacatgcagagagtatgtggagcaccccggccgttgtttgtctctgtgttaaccccagtaaaaaccccaacagccccaaccattgtgactccttgccattgtaacttaagacaccaacccgagctccctaggcctttgttaattttctactctcaccgtgccatgcccttcacgtacgtctaggtcaggtcctcaagccctctccacccctctaattccctgtgaaagcttgaacacaaagtgagccctggcagtggtgaccacatcaacaaatccctcgactcatcgtggccagcttcccctggaaggtaatatgctcggtttgttcacatttcataacccatgtgtgatggtgatgcccacgatgttgtccttttgaatgctaccgtggtaccccgaccaaaacgctgtcgagttttgtctagaacgccgccgcgggccatcttcacttcgatcagctgaaccatagtttctccgagccaaaccatgtgagcaccgtgtgctagatggatactgatgctcgttgtagctttaggttgaactctatcgtattgcaaatatccgtctgcaaccatattcatggttgcaaccaatatctgcccgcgatcgtacccgcgggtagatatttatatccatgcctgtgcccatcgaatttcggacgggttttggatatccgtcggatatggcagacacaatcatttattcaacaattcaatagcataattagtcaaatttcttctcaattcatcatcatacacaattaaaacttaataaaaagaattattatgggcttgcgggcctcagttaggagcactagagcttggaagggccaaccgttagtggtgctacggtctatgagacttagaagggccacggggcacaacacaggaagccagcaagactgtaaggggtagccaacagttggaaattgggagtattaggcgtggtggggtttatggtgttaggatttgttatttgctatgtaatatgtgctaggccaaaaaaatacactatgggtcaattttggatatccaacggataacccgcgggtagaaggtaatatcataatccgtgctcgtccgacttcgggtcagattcaggtctgacccacgggtcaaaacatgtatccatatctggctccgtcaggtcggatatctgatcgatattcaaatctatgggtcaaattgtcatccctaggttttggtgcagtgtcagagagacgcgggaatagtgctcggggctcttaattagttagttgattcggcaaggaggtttatgcaaagcgtgtaccgtgg

SEQ ID NO: 63222 - DNA, 1195 bp, Zea Mays
taccaatgtgatccccgagacatacctcctatttcctctaagttaattgacctaaaaccacctagagcctcactagccacgtcgacagcgcatcgacgagcaccggtgaggtgtaccaaggtctcgagcacggtagggttcaatccaaggtcatgacgagaaccaataattcatcaaacatacgatgctcacctaggtttgcccagagaagatacggtttggccggtcgacgtggacactgccctcagcggcgttcaccgaacgacataacggtgttccagttaaccctgcacggtagagttcaaacaggcaagcacataagcttcaccatgaactatagactacgaaacacaagttaaacaactatgaccaaccttcggaaaggttgaccacgcaggtgcaccactcggcggcgctggggaccaccgatggggaaaaactggtgttcttggctaccgacagttgaacaggggaaacaaagggtggcttgggtgcgtaacggagagataagactgagagcaagctcaatttaaagggagtcaccacgacggtggtcaatttgaccgctaaatcacggtggcggtgatagcctgaggagctccacgttagcttttacggtgtcctcaagccaataatgtggcagacttatcagggaccctttacgagggtgcaacacgagggcctccaaccagctacgtggacggtcggagcgtccggtggcatgctatggcggcgttgaatgaagcacggtgaggacacgtggtgtctgtggctagagcggtaacttgatcaccgaatccgagccagagatctttcaccacttcattgatccatgtctcaacgacaccaattgtggtgcgagctcgaatcacggcgcccgatcatcggcggagaaatacactgcaccaaggatcttcttcagtgcactgtaccatggcgatgttcattcagcgcacctgacagagcgatttgaggagttcctttctcaaatttttatgtgacaacttgtttatcagactacatcaaagttgttgtccatcatgccagcttcaattttgttataaggttcttgctcatacctccactcgatcaagcaaaattcggttccaaaattaatctaatgccactgtcagtctaacatttagaccaacacacgactggcaacccaacttccagccattttgccccaatttct

SEQ ID NO: 63223 - DNA, 514 bp, Zea Mays
tacgaggattagtaaagcttttggtttatgtaacaatattatatacatatgttctatatgatgtaagttaattttcatatttacggtgaactaatggaaatccaaatagagatctatcttggtttgtataatcacaagtttgttttctgaggagacgttgattggagagctactcataatactgtaattgaatgggtaatttttaatgattgcaaaaaacctaagtttggaagaagtaaaagaacatactattgaaatggaaaacagagtcaaagatcatagggtaatagtggagtccattttctaatctcaaacttattttcacctttagaacctttctaattggcaatttttataatgaaggaaggaaaagaaggacttagggaggatgtgactacatggccaatgatctttgattatgtcaagcctgacattgtacttgaatatccaactaatgaaatcgtctcaactgctcccgctactccatccaacataaagagatttaagatgtctc

SEQ ID NO: 63224 - DNA, 1016 bp, Zea Mays
gagcagcatctgcgtctcgttctaggtgctctaaggaagaatcagttctatggcaagttgaagaagtgtgccttttggctatccgaagtggctttcctggggcacatgattaatcaatagggcattgcggttgatcccaagaatgttgcggctgtggtggagtggaagagaccctctagtgtctttgaaatccgaagtttcttggggctcgctggatattatcggcgcttcgtaccaaatttttctagcattgctaagcctttgactagacacttggagaaggttgttcccttcgtctggtccgacgattgtgaggtcagttatcagacattgaagagcaagttggtggacgcccctatcctagctttgcctgagagcggtaagcgtttcatagtttatacggatgcttcgcgtattggtcttagctgtgtgttgatgcaggaaggcagagtgattgcttatggctcaaggcagttgaggaagcatgaggggaattacccaactcatgatcttgaattggctgcggtggtttttgctctaaagtcgtggaggcattacctttatggcgaggcttgtgacatttacaccgatcataaaagtcttaagtatatttttactcagaaggagctgaatttgaggcagtgtcggtggctggaattgattaaagattatgatttgtccattcattatcacccggggaaggctaatgtagtggctgatgcccttagcgggtccggggttccaaaggtggccttgtcgttgatcgctgatctagaccgtttggggatcgctttgtgttatttcggcaccgctagcgaggagactcggatgcttattcaatcctctctcatggagagagtgcctgcggctcagcagcaggatcgtctattgcaggaagctcgaaagagggttggtgatggtaaaccgtgggagttcaccattgatgagaatgatctggttcgtttcaggggccgtctatgtgtgcctcagaaatcagaggtgaagatggatatctt

SEQ ID NO: 63225 - DNA, 811 bp, Zea Mays
cagccagtgggtttgaacagactttagcccaattctaagcaggatccagcaagaatttgttctggaatattatagcaaagatgaagatggtatgttggacaacaactttgctgtagagccttggataggttgtcaaatgaaattaggagaaaatcaagcttcaagttgctctgtcaggacaactgaagatgaatgccattgtacagtgatctgaacaggatcagatcgacagcacaatccctcgccgtcgatgatctttacgctgtgattcacgttgccatcgtgattcgtgttcactggagaggggataactacggtgaggtaaagatcttggcatgggatcagcttgagctcggttgcggctaagcccgccgtacccccttgctcatcggtcgatcgggataagagctcgcagccgttggttgatcactgccatgcgccgtgtgtccaggctctttaccacgtcgcgtttagtcacgcttggggatccggtgatcgccggaggaagcaccacggtgaaaaccattatgcacttgcgccagtgctcctccccttctacgaacgccatgcgtcatcgctcaaattcccggccaccgctcttgcctagtataaattaaagccaccgtgagctccgtaggatcattacgtatccagccaccaagtattgccctcaatcgatcatcggtgagctccaattttggatttccccaaaaatactcaagaacaccgtagcaaggacctcaccgtggccagctcgattcagatctgctcataccttttgttccctcgtttgagtgttcttatgtaccct

SEQ ID NO: 63226 - DNA, 807 bp, Zea Mays
tgaaaacgtgggtgataaagctgggtgtgagcctggtgcatcaaatgctttagtaagagttgaacatgtaagaatttatgcattataataattgcatttatgttaaatacaatagtaaattatgtatctctaatatggtgacaggatggcgttcgcaaaagtaaaatgctgggaggtgaaccccttttgcgtggaggaattggaatagaagattggggtggttgcgaaacagacaaacaatctaggaaggtaataaacgagaatacaatgttatatagataacaactaatatgttgaagggcacaactgagttgtatgatgtaataatgtgcatattattttattgtgcagaagctagattttaacattggaggagtgagtatggataaaccaataaatgagaaaccaaaaggaagaatgataagaagtgatgaggtaaggactgtaaaattaggcgccaaaggagaaaaaagatgaacagaaggtgcaagaagtgtggggttgcagatggtcataatagcagaacctgcctttcagttgaagaaaatagagttcgtttggtaagccttgctaacccaagaaaaaagggcgtccaccagggtcgaggaacattaatacatcgagagatcccgaatggaatgaaacaactacttcaaagaaggatgcgatgagtgtagatacgactgatgagtcttatagtgaaatttaattgtacttgagttggagggcttgttgattactgttaaaaatttatgagatggatataaaatggataataatgtggttcaatatggtttgctgttgcgc

SEQ ID NO: 63227 - DNA, 500 bp, Zea Mays
gtggccgtgtggcggtcggaataattatcttccaccgcgacgatcttacccacttcaagaatatcatcgcgaggagatgctcgccgaacgctcaacccgaccacgacacaaatcacggcgcagatcggtaccggcggcgaggtgtgcggtactagagatttttcttgctactgtaccattgggacttctgcttaaagcgcctgacagagcataatcaaggcataatttctccataatctatgtgacaacctcataatgcatctgcatcaaagttatagatctataatccatcttcatttttgctatagcatccctagtcgaattcctactgaatccaacccaaacttgaacttcaaacgtgaccaatgtcactggtggtcatacttttctgaaattggtgttcagaactgtccaattgacttctgacagcacgccttctcactcatttatcttcaatttctattcaacaccagtgcttagttacttaatcaaaattgttc

SEQ ID NO: 63228 - DNA, 1371 bp, Zea Mays
ttggaatctacctccttcgagtcctttttctgaattcatttccaaccctcctgttcaagatggcagtccgggtcatagagtgcgaccctcattggataacacagaggctttcatcgctccattctggagtctccctgaggctgagaggcagacctacttccagatgccgaccagcactgatgaggctgagatggatgctgttctcaacatgctggctggagaatcatctaactctgcccgcacggagttgatggctattgcgattgggtagaaccttggtgaagacgaagaagttcagatcctgaaggtgctcgtcgccagcgatcacgccggacaagctatctggctgcgcctgatgaggagaaaagagaaagatacgactccaacggttatcatgcttagaacaagatgctggtccctcaacatcactcctcggtgatggcccggcgagcaccaccctcgaggatgatgttagaggctgtgacgatgctagggttggcggttgtgtgcttgatgaggatgaagaggaggaggaagaagaaattctcttgattcataagaatagccatcgtagcaggagtagtgtcatcccgatgcagaccctatcaggacttgtcagcctctaggggttgttgatgtctccttttgaccatgcgttagaagagattatccctaagaaccttttatcggagccccctgaggttgatagttccatcgtccgctcagaggtcccggatgatgttcctttgccatgcgatcctgtcgggcaagaggtaacccagatagtttctcacgcttcattgaccttggagggcggtctagctcgtgaggacatgctggtcctcgacactgctgatcagagttacccagctcctctgggcacggccgagtgtgctttagcttcagatgttgccgctaaggacaacccagcccccgagggtggtgctgaggacgacacagcccctaagggtgctaggccaggctccttttcgactgcttctatggacgttcacgttggatcaccactagttcaatctgaggaactcgtggtgacaaatttggctgccgctctcgtcggtccggtcaccttagaggctagtgacccagatgctaggaatccgctgcctgctgatggagctaaggcctctctgagtcgtgctctcaacattgttcatgttgatggcccctcaacaagcagtgcaccgatgcttccagctttgggtctttccctatttctctccaatcttcaggttagtcgacttttgcttattactattcacgttagcaaactggttctctctctaatttttgaaattgcagaatgtcctcgattctgtgtctgtccaactgaaatcctatggcactcctatc

SEQ ID NO: 63229 - DNA, 522 bp, Zea Mays
ttttcaaagataacttttgaaatggtatcagacatgtccggtgagtaggcagaaactacaatcagctttcaacgactactttggagtgggaaggctataaataccccaccaactgggcataactcgatccatgagttgagaaacattgcgaataagttagaggatgttctctttagcattcaagccttccaagttctccaagatcattgtgtgcttagtatatacatcttgcagaagcttgaggtagtgaaagagctgctaaagcacttgtaatgagttgatattcaaagaaaagatagagggattatgatcatcctcttatggagttgttgctctaggttgtaagaagtgataaagagcctccgacttcgtgtggagtggcctagagagattgccctcacccattgataagagaagaacttaagttcgatctttgtgatcccttgagtgagaaagggttgaaagggacctagttctttatgaactcctcaatagggatgtgggattctttgtgaatatgaa

SEQ ID NO: 63230 - DNA, 937 bp, Zea Mays
caatcgccctaattttctctgggtttgcttcaatgccccggtgtgaaaccaggaaccccagaaacttccctgtggagaccccaaagacacacttgtccgggttcagctttgtgcgggttgcccgtaacttgtcgaagaccagggttaagtcttccactagggtcgaccttgccttagtcttgactacgatgtcatcgatgtacacctccactttgtccctaatgaggtcctcgaaagtattactcatcgcccgcacaaatgttggcaaggcgtttttcagaccgtaaggcataccaacatagcagtaaagaccatccactgttacaaaagcggtatgcttcctatcttccctagacatctggatttgatggaaaccagagtaagcatctaagaagaacaataggtcgcacccggaggtagaatccacgatctgatctatacatggaagtggatacgggtccttgggacaggccttattcaggctggtgtagtcgatgcacatccgaagcttcccgtttgccttggggacgatgatcgggttggccagccacactaggtgatgaacctcttcgatgaagccggcatcaagcagctttctgacctccttgcggatgaagtcctgccgctcaacggactgtctgcgaggcttctgactcaccggtctggcgtcagggttgatcttcagatggtgctcgatcacctccctagggatcccaggcatctatgacggctcccatgcgaacacgttggcatttgcctggaggaaggcgacgagcgcgagttcctatttttcgtccagatcacccgcaatgcgagtggtctgggaggaatccgcggtgagccggacggccttgacggggacgtcgtccaccccagatggtcgcacctttggcaccttggtcggcgccttggtgccggaggtcaaggggtccctccc

SEQ ID NO: 63231 - DNA, 275 bp, Zea Mays
aataaagctgcacaatgtccctggtggaggttcttctagatggcacctggaaacgtggacaggccctagacatgaactttctaaatcctgccttctcaccaaaagcaaagggcaactcatcctctacgaccatctcagcaaaagcctctcttagtgcatcttgatcaaacctccaagtggttggagcttccccgtctgttgcttgcaaagtgccctgctttggatctttattgaaaatatttggattcctcttgcaaatgttgaagtgcttcctc

SEQ ID NO: 63232 - DNA, 412 bp, Zea Mays
cgaacatcaacaacgtcaggaggccgtaatatctatatcttacctataatatcagaattagtgctcttttatcttcctcttgttctggcgtattttaaatacacgagagctaatagttaactgctaaaattacttgtagacatctaaatagccaagctgatagtccaaacacctcagctaatagtctagctaattattagctccactctcaactaccctttagttcattagctgatcaacccaacaaaaatcacctaatagttagctagctaattctacaatcaatttttagacgactaactattagctctaatggcctaatgcatttaaacatgccttagtccatcactctcctccctatttgttgtctgtcacacccatacctttttctgtccttcaatgagttctcatt

SEQ ID NO: 63233 - DNA, 556 bp, Zea Mays
ctctctctctctctctctctctattttcaatccttctatagatgcaaggcttcaccttgagctccacttgtgtattccacttgtatgtcttgtgggggaaccaacacccctgtttatagtggcatgtagtggagggggtatttgtagttgagcatggttggtggagctgacatggtgggtcagatgatcttctttattgtaggttgacccttgaatacacctgcttggcgcattagctaaggagcgtccctagaggtggtggatagttggtaaaggtggtttggtggccccctacatcaaccaacctaggtgggggtcagcctatgctgcccaatcatgtttgtcattgatattgaggcattgtagtcattttcggttgtcctaagcttgcacacaaagtttggttgaattgaacttctctttctttaattaatgggcccattgacccatgcaggaggctacatggcaccatctcatcccttgttccttgaatcagtgtgtggaatgcctcttgaatatggccaccagataacctaccaccatagatccattgtca

SEQ ID NO: 63234 - DNA, 630 bp, Zea Mays
atcttctatgctcatgccgaaatcaatttctcctatagctttaacatgttaacagccaacattttcaagaatagaagccatgccacgagatccaaccattgcacaatagtcgctttgggcattgataatggtttcaagagcgcctaattcgtttttcatccaatcaagtgcccctttggtgtcaccattagcaaaagagccagcccttgaagtagcaccaactaaggagatgattttcttcatagtttcacagcatcgggaggcaatagcgaagcagttacaccaaagttggtctagagttcccaatattttctgattctcagcgactttgttagcaatattcctttttgtcgcctcaaggctgatatgaagttttttaatagaattttcatgttcttctatcttcgtcacgtcatccttatgaagtatttctgctcgcctttttgccttgtcagcttcggctattttttcttttaaagacgctatctcctcatctttttccctcaaagaatttcagagctttccagcttcgtcctatatctttgatagctcttcatcttatttttcctatagtactctcaaagctttacttagcatttgtccttgcataatgaaaacaacgcaacttag

SEQ ID NO: 63235 - DNA, 579 bp, Zea Mays
ctgtctgttggggaaactgtcccagtaatagtggttgaagcagtggtgagtatggcgaaaagctcttggtaatacgtcagctctgctgtttctggtgacgtaggacgctccttcgttggtattatcgaggctgaagccatgctcgggtgaggcggaagttttcctgaggccgatgctgagcctgctccggggctcgcaactgtgcatgacacagttgaaggaatggccttctgcgggattcgcggagggcaggaagccgatgccaggatcgggcgaggcgaagtttgttccgaggctaaaccggcctcgggcgaggcgtagtttcttcccgaggtccagacggtgtgtgggggggcagtaaccgttattctcggcacgcgccatcgtagctggtgaaagtggacaggatcacggtcttgttgctgctgttcgcctgtgatatcgcgtggggtaggtatgcacattgaatgctcatgccccctgcggccttgggatgaggcttggctcggggttgtcttgctcgccgagatgggttcgggcgaggcggaaacgacaatttcgtggagaggggacctcggg

SEQ ID NO: 63236 - DNA, 279 bp, Zea Mays
tgcaagagactatataagaaaatactaggataaagtaatagtctcaatataatcaaaatataataatggactccccctaaagatatgcatcaagtaattgaaagaattgattttgatgcatttacttttaaggacataaaggaagactcattatacatcttgatcgaggcttatgaatttttcaataaacaacttaagcctggtactctcataatgaaaggatttagaatacttacaatcacaccatagattattttgtaggtcttactatccaagtag

SEQ ID NO: 63237 - DNA, 883 bp, Zea Mays
ctggaagatgcttcgggagttgaagagagagttttttcaggcagaatttgctttgtagcctcttttttcgtttcttcttcggtttccaaggatttctccttggcgagctctgaaggcccagcttcggcctcggtatggctctttgcagcttcgtcttctgatggttttgtctcaatttgtgtttttggcgcttcggcaggtttcttcggagtggtacttgaagactttattgtctccagcacatctagtacattgaccatcctttttctcttcggagtcgccgtgaggtctttttgtgccttcggcactgtcattcctgccgaagggcttgtaacttctattatctttgttttctcagcctctatttcttcaatattatcggccttcggcatcatagtcagctcttcattcttctgtgcaagagcaggtcctttggcttcagtagccgtagaggtctcaccaccaaattcgggcactgtggccggttcaatgaagcgtggtcggtgagtaaggaccttcacctttttcctctttggcgcggactcacttagagtaactgaagcatcacttttcccagaagttgcactttttctcttttgccctttcagcgggtagcggtaatcagggtacatatacccaatagcatcgaaaactctattcagcctcttcttcttccggcctccgaaggccgcagataacgcgttatcttctgcctttgaatatggcccaagcagttcgtcgcttgtagcttcgatgcacttcagccaatcatcatctggctcaataaacataccttcatatctgaaggtgtatttcaacctaaccagcccactttcgtcagacttgctgatagtttcctctggcatttcccatttctctacaa

SEQ ID NO: 63238 - DNA, 589 bp, Zea Mays
agcctcgcgctcagactgattagtccacaagaccttaacatacttgattgatctcttcctcaaaacacgctccgaggattccaagatacgcaccaaacgacactccagagtcagatcctgctgcacaacaattggttccatctcgatctgatgatccggatcccgcaagaacttcctcaacatagagacatgcaaaaccgggtgtacccctgccatggaatccggcaattgcaagcgataagccaagttgcccacaggggccaagatagtgaacggtccaatgtatctcgggctaagctttccggagacaccgaaccgaacaacccctttagtaggtgatactctgagaaggacttggtcacccactgcaaattccaaatcccgcctcctcacatcagcataactcttctgacagctctgagcgaccaaaatagtctgacgaatttcccgaaccttctcagaagtctgctgaacccaattaggaccaaccaaggatctctctcccaaagtctcccagcacagaggggagatacaccacctgccatataaagcctcaaatggtgccatcttgatgctagcctcgtagctg

SEQ ID NO: 63239 - DNA, 512 bp, Zea Mays
ttgtaaacatactcaatccttgtagacaaaatactttttatgtgcatcagtgcatgtgcgtcctgtgctgactacgggctcattggtcttcatctctgtctacttcattaggattatgaattcagatttgttcttaacgtcaatgttccttcccttcaatccatagatgtgtctctgtaaaaagagcaaaaggtagtcaatacacttacttttcaaccatcatttttatagtagcaatatgatgatccaagcctccaacaacttcacatcgtcagaatcaaagaacacatagtgcactgtaaaccattttaatacagatgaaactggactttacactctccaaattgcacaagcttctcagccccttaacccacccacctgcataaacatgtacacagaaaaacgccaaggctgttggagaagttcttgctgctcacagcatttctaaaattaagggacctcaccatcagtgatattccaaacatataaaggtggctgacaactctatcaac

SEQ ID NO: 63240 - DNA, 557 bp, Zea Mays
gggcctcaattactgtaaagcgcagcagtctcagggtaaaactcctaagactcagagaacaagcccgaggaccgcgggttcaatccgagaaagtccaaggtttcatttacaaaactgcctggtcgaagggttacgggtctgttctggccgtccgattagagatcgagcgccaagatcaaaacagcgccgcgcgaatcggtattctacactgaccgtcagatccagatctatggtcagtatccactgctacgtgatcccatgcaagccgttagatatcgatcggtcgttccacccccaatcggtatgcgcgagccactcccattcattcgataggcatccgacgatcgagcttcattttccccccagaccaaccccggcggcagcgcaagtatcacacagcggcgcgccatggccggagaaatcgcggtgaggcccggctacaccaactctgaaggaagtccgctccacacgaagttaagactatggcgaacccatggggaatgactgctccaatcaccttacggcctaaccctactgcccacgatacgggtggtgcc

SEQ ID NO: 63241 - DNA, 291 bp, Zea Mays
gatcccaagctaggatcagcaagaaacaacactactattcaaaggattgaataccgcaaagtaaggatcccagttgtgagctgctaagcaccgatccttggccacaacagggatcgacccctggtctgatcatagcctcaagcttccaaggttaccgatatcccagggggccagctgagggaaataaaaacttgttttaacaacaggaagagaggtgcaggaccacttacctaaacccctatgcgagatccggtttttattaccttcatgaaaactagatcatgcttccac

SEQ ID NO: 63242 - DNA, 893 bp, Zea Mays
cctgctcttgctgaagccaagggagagtcggccaaagtgtcgaaaccgaaggtaacaacgaagcagcagaaaattgagacggccgaggtgccgaagcgtcctgccgaagctagggaaaacggccgaagaaccaaaattagggaaatcggcagagcgaccaaaaactctaagctcgccgcaagagttggagctgccaaaggtgtcaaaaattcctgcaataacgccaaaaaggaggagaatggtcaacgtactggacgctgttatggaatcttcaaagtacaaactcctgcttcagtgcctgatagaaagggtgaaatcccaaagaaatctggggaagctggcataacactagatactgccgaagctggtccatcatctcttattgaggcatattctttacgagctattcctctgaccttggaaaaagaaagtgcgcccaagaaagttaagtctcctgctctcgaagtgcctgctgaagagctggaatttatcgtgcgacatgcttcggggaagcagctgtcgaaagagcagattgctgaagctaaacaatacgccaaggatctaaagtacccagagagatccttggtatacaacgacactgatgaagacgactttttatattgccttccagacaataaggagatatctgtctgccgggagatggcagatagtataggatatccgaagcttgagctcggcctgtctgtaatgtcgaaggatcaacttgccatcagccttgcctataacagtctgaaggtgagaatgttttagcttataaacagattattttttgtatcttttcttattattgtgtgttgatccttcattttttgtagggcttaatcctaagtaaggctttaagggcacaaaagaacgcagaagatgaaagctgc

SEQ ID NO: 63243 - DNA, 518 bp, Zea Mays
agagataccaagagttcctgatctgaatgtccatcagaaactaggaggaggggacataggtgttagccgagagagatcagatcagtacatatagatgaacaaccaagcagagtgaagtttgaaaaaaaaaaagatgagatagagagtctgttgaatatagcctaacattaagcgagcacgtcgttagtgatcgagctactatagacctgcagttaacgcagacgtgggaaacggtggatcacacgttcttggtaggtaggtagcatagtgttacgagtgctcgtttttaagctgcccgccatctttcgatctgggactccaacgtcgtccagaaatttccacgtttccagccgcagtacatcacaagaatctcgcttgtgacaattgaacactgatgaatgccacacctagcgaaacctacgcgtcagatcagtacagtacagtacagtacagtaggccagtagctcaccgagcgaagcctacgcgtcagaagcatcctccatggcctgcagcgtgcg

SEQ ID NO: 63244 - DNA, 329 bp, Zea Mays
tgcccactaaaaccttgtagtcgcaaaagctctgcctgacatccaccccacacagtatcaaccttaggattttctgttgcgcatgctatcctaacttgccctccattgcgccacacaaactggcacctcactttggtatctgtgtgtttctaggctactccctagactgcaaaggctatcagtgcctcaatctctctaaccatgtcataatctcccaacttatagtctttgacgagtcatttccgtattaatctacgtcctctagccctttcttcacaagttcgtgctcgtctttttcgatgatattttaatctactgttcgtcgtggt

SEQ ID NO: 63245 - DNA, 675 bp, Zea Mays
ggatagatatcccctgaatcaccacagtttggttatgttctgtgggctgcctgaaaggtccccagttggccgggcgcacagccttcaggagtttttagtcgggcgcaacggaaagcggacgaggaagacagaagcgtgggcgtgaagacttttggaccgcgtttcgcgcatgcagagaatgtgtgaatctcctgacgactcgctgacctcaaggaaagtcagcatgactccagcaaaggcgggcagactgagaatgtgtatcgcgtggtgtgtgtaactcatcttctgtcaggaataagacggaggaggggcccctacgaaaacaggagacgccattcagcagcatggccatcttctacctcaagaactccctgtaatcgcgaccaccgagtaatacacatccatcaactcacaagatgtagggtattacgccaagcgacccgaacctgtataatccttcgtgtttccttgtgcactgcacagaccatcaagttgtgatcgatctcgtcattctcccaaaagcactaaatggtataccccgtagtgtgtcgtcagtaccaaacaccgacatcaataggtcgttgtcgggtcgggtggagcaaaaatctgcccacgattgcacatgtaaaatctacctaaacctgctcgtggtcacacccttgggtgcaactccaa

SEQ ID NO: 63246 - DNA, 1172 bp, Zea Mays
gtgagctagcaccacacatgcaatgagagaaatagcaggagtaccttgggcacccacaaccctagggagagaaacgacgatgacgactagagcgagtctctagcatgttatgcctttcatatatgtagacctcttctaatgggcttttacgctaaatgactattaccattctcataggtcatgattgccttttatacatatattcaacacataatccccaacaaggttctacttgaacttgattattcctccatgtattaactttgtatagaataaacaaagtctttctttgtaggatctggccaccacccatactttgatattgggtctatagatcgagccttcctcgtaggatcaatagattggtcgtgaagttctactagtagttttgctatagctttctcaactaaggaagaatgacctagagcagttgaggctacataggaattaccagttgtggcaacaaagttctctaggattagaaattatcatttccacccttgcatgctattattctatatccacttctacacatgaagaggtattcagttatacacatgaataacatgcaagagagcatagcagcaacaacaagaaaaaaggggtacatgtgtacataggagtagcaagccaacaacaagcaccaaggggcagagggtagaacaatagcatcacgcaaacataaagacaacaactaagaaacatcaataagataagagcatacaacatgtagtagatctaggcttccggcaacatcaagcatgacaatcaaaggcaaagaaagaagatcgaggactgtgaaggtaagaagtagtgaagtacactcaccgatggaggatgagctcaaaactagagaggcaatgagggagcataaggcttggtgtaatggtgtgcttgtgcctctcccttgatcctattttgtgtgttgtgtataaccctattagactgagaagccagaaacccagcccaatttttctctcctaagcccacttgagaatcctagagtggtcgctccaccacctaatcaaacgattaatctcatttactcgatgaccaatcaaataaatgaccaggtttttggtcgaggtggtagggtcagtagtcttggatgggtaggagaaccgattagctcgagtaatcatgactaatctgatgacttataaacagtgagc

SEQ ID NO: 63247 - DNA, 400 bp, Zea Mays
cgatccttcggcttcagcctcagcgggaacagcttgattcgcttcgacagcggaggaagccccttcaccaaattcaggcactacggtcgtttcaatatatcatggctggtgggtcagaaccttcattttcttgcccttcggcactgcagtggtggtagaagcggtagtttttctcttttttccttgcctttgcagtgggtagcaataatcagggtatatgaagccaattgcatcaaaaaccctgttcaatcttttcttgccccgacccccgaaggccgaggataaagcatcatctttggctctggtatatgtcccaagtaactcgtcgctaatagcctcaatacttttcagccaatcgtcatttggctcatcaaaccggtccctaaatctgaaggtgtat

SEQ ID NO: 63248 - DNA, 578 bp, Zea Mays
gcaagtttcactgtccttttacagcgaagaaagttctaatcgctgggttcattaggtgattaggtccagtgaatctggagttggagaagctgctcactgttttcaacaaagtgagatttatttcctttttggtcagcatgctgttcatgaatccatatgggccaacaggtcagaaaaccatggagtattgatgcctaattcattccatattgtgcatgacgacaaaaatgaacctgacaatgaatttgaataccttttactcatcattatttctttttgacagcagtaatggaatgtttctccatcgcactggaatggcgaaccaagtataactgaaaggtattcaaaataggttggctgtttagacacctgggagatgtaatggtttagtgctgcctgagatccatatatgtgtctatacaccagactacaggtaagcgatggtactggaagagcggcgggatacagtatgaaccctaatcatatataccagactgtctgaagtatataaagaagacgttattatgaacactcaagaaaattatcatgatacaagtatcatcatatagagcagcaag

SEQ ID NO: 63249 - DNA, 494 bp, Zea Mays
gggccttcagcactatttgctcttttattgggacaagggatttaattcaagaacatatagccttcagggtgtggccgcttgtagaaagctggtaaatgccgaaggagaccatcactaactctagcaaaggtgatttggtccggctaaaatatacaatcaggtttggggataagttcgatgaaccaaacgacgactggctgaaatgtatcgaagctacaagtgatgaactgcttggagcatattccaaggcagaagataatgcaatgtccatagccttcagaggtcagggaaagaagagactgaacaaagtttttgatgcgattggcttcgtttaccccgactacctctacccgctacggggacaagggaaaaagaggaaagctgctgcttcggctgccaaaacaaaagagactgctcctcctgcgcagaggactgaagagccagctataatgccgaagttaccttcagttaaattagttgagacgacagatgat

SEQ ID NO: 63250 - DNA, 653 bp, Zea Mays
ttcgtcttcctcgactaccactacccgctgcagggacaggggaagaacagaaaagctgctgctttggatgccccagctgaacctgtgccgaaggctgcgggcaaaaagatgaaggtacttacccaccggtcgcgttacattgaaccggctgtggtgcctgagtttggcggggaggcctcttcagctgctgaatcaagagaaactgttcctccaatctagaggactgaagagccggctataatgccaaaggaaccttcggttgagctagttgaaacaaaggttgacaatgataaggctgaaaggtcaaaagctgaagaagtaataaagatgtcagggattttaagttcttcaacagaagcaacagcgctgaaggcacaaaagagttctgccacaactcctaagaggaggaggatggtaaatgtattagatgtattggaaacaaccgactccataagtctcgctcccatagggaatgttgccaaagctgacaaaacgcaacccaaagctgatactaagcaaatagaagttgaagctacaataacccaggaagaaaccaaggcagggcccatagtgcctgctgagacaaagcttgccacaaccgagcagggggacgaaggaataactccagatactaatatagcttttgagaaaag

SEQ ID NO: 63251 - DNA, 494 bp, Zea Mays
cccgtacccattgtcatccctaatccggaggtgacaccgaacatcctcaatcaattatgaaaagcattgcgcgggaaacaacgttgctatacagtacaaagtgcgattccaaacagaaaatactaagttttgccgtccaaaacagtcacttcgacacccgccacgtgttcgttacttcgtctctatggaaggcaagctctcctagtcaccaccttacccaccaatgtctaaagctcaccagccctttatatccctccccaatagctcgcccctcccagtcatctcccccacggtcctcgccggcccaggaccgatcgccccagcagcttgtcccagacccttgtttccagtggtgctcgacgctgccctttcctcactgcgccatgaccgtcgcggctacacaccatcgactagcagcaccttgctatcctcctctccctctccttctcttctccactctccctcggcaagctccgtgcgcactgctcaccgag

SEQ ID NO: 63252 - DNA, 1509 bp, Zea Mays
gagaaccctacccgacagagagagagagagagagatgcccaaacaccgcttcccggcaagagttgctcgcggaattaatggtttcgcttgcgcgtcaaatgactttatgagagacccatgcccacctgtcgatgtaggagcacagcagaagttgatgcatggccgtgtaatttcagaggcggacataactgaaaacagcgacgcttccgtcgttcacattaatcgagatcgttaaggcctgatatagcaatttcatatacgcattcccactgacaatattggattggatggaattgtcgaatcactgtactactactactactatagtactatttgagaacagcatgagcctcctcctatgttcttcatccaagacttcgagaaatcctttcctttccttggttaactgaggcttttaaaactactagtacgggtaaaattgcttcctcttttatctgacgcctttcagctgctccggtttttcatattgagagatgtaagatgttcactttttggtcattcagaaagcttatgcatattttcaggtggtgtctgtcttgcacagatatttatcagtattcatctttctttattgatgccgacctcctacccatagccctgtccagagtcctgacccatatactaatcttgcgagagatattaccattacgactttataataatatttacagcacttggatatttcaggtgcctggattttccggtaatttttaggcaacactttcatacaacaaactggtacagataaattattacttcatgatttattatctgtcttcgtatatccttgtctgactatagaaataattgtagattgttaattatcttcgtaccgacgtaaataaaattttgccgggtttatggtcttgcctaacggatactattactacaagatataattattcaaaatgcagggagctgctcagctgcctatctagaagcaatgacacacataacttgttttacgtttcgaccaaagttaacaaaatctagatccctgcctttatttgtaaaaacagaattatgtctgcgaatttaaacagaataaggaacacagcaaacagaatgttacacttactgctgcttctagctcttgccgcgcacgtgtaattcaagagtttacacaaatgaaaactccatatccaattactctaccactaaggtgtcttggatcaactgaacgaaaacaaccaccaaagtttcaccgtttgcacttaattttcttgcattgtcttccttgcgcgaggtttctttttgggcaaatttcagtcgagcggagcggagtgttccttgttatttcggcaggatgtaaaacttctgtgctttgtgtttctgtttgatttgatgtaaaccagtttagccttgctcaaaactgacactgtcttttgttcgttgccatacagggccaaaaagtaaaacagcagttattgccggtaagcactacgccgcatttatctacaaaatgtttggtccgctgttggcttcctg

SEQ ID NO: 63253 - DNA, 469 bp, Zea Mays
ccaccatctgacatagtcgcctcgaacatcctgggtccgatgtcatatgtaggttgtctagcagctatgtcatctcttgtagcaggggccattttgatagtctgtgctatgtttgtcagttagaccgccatgctcgtctccctttctccggttcctcttcccgggctgctcaagcttttgatcttaaacaccgtgatatgtggacatcacctattttcagcctctcggggtataaatattacttgttgattctagatgatttccgcactttctttggactttcccactgcgtttgaaatctgacactttcaccactctcttgcacttctttgcttaggtctccacctagttcgaccaccctatttgtgctctccagtgtgaaaatgatcacaagttcgatgactcctcctgctccttcatccattctcatggtgttcagctgcgactctcgtacccctacaccacccct

SEQ ID NO: 63254 - DNA, 1081 bp, Zea Mays
gaatggtgtaaggcgttttatgagcttctctcaagatatccatcttcacctctgatttctgaggcacacaaaggcgacccctgaaatgaaccaaatcattctcatcaatagagaactcccggggtttaccatcgccaaccctctttcgagcttcctgcaataaacgatcctgctgctgagccgcacgcactctctccatgagggaagattgaataagcatacgagtctcctcactagcggtgccgacatagcacaaagtgacccccaaacggtccagatcagcaatcaactgcaaggccacttttggaaccccggacctgctaagggcatcagccaccacatttgccttccccgtgtgataatgaatagacaaatcataatctttaatcaattcgagccaccaacgctgcctcaaattcagctccttctgagtgaaaatatacttgagacttttatgatcggtgtaaatgtcacaagcctcgccataaagataatgcctccacgactttagagcaaaaaccaccgcggccaattcgagatcatgagttggataattcccctcatgcttcctcaactgccttgagccataagcaatcactctgccttcctgcatcaacacacagccaagaccaattcacgaagcatccgtataaactgtgaaacgcttaccgctctcaggcaaagctaggataggggcgtccaccaacttgctcttcaatgtctgataactgacctcgcaatcactggaccagacgaagagaacacccttctccaagagtctagtcaaaggcttagcaatgctggaaaaatttggtacgaagcaccgataatatccagtgagccccaagaaacttcggatttcagagacactagagggtctcttccactccaccacagttgcaacattcttgggatcaactgcaatgccctgctgattaatcacatgccccaggaaagccacttcggacagccaaaaggcacacttcttcaacttgccataaaactgattcttccttagggcacccagaacgagacggagatgatgctcatgctcagcctcagtctttgaataaatcagaat

SEQ ID NO: 63255 - DNA, 324 bp, Zea Mays
ggacagtaaaaaaaatatctggaaaaaaggttagatctatatctatctcttccccctttatcccctctttatatattttacctgaagatgaatctgtagtgtgtggctttggaaggttttgagctttgactggctggatcctcttcctccaagaagtaaaccaggatccatgtgggttgttttggagaaagcgtcgcaagtggacgctttggtacaccttacgcacacgctgtgatcatctttgaaacagcagctgaagcagccatcccacaccttcgtctccgtgtgtctcgctcgcggtacgaggattcctgcctgcccacc

SEQ ID NO: 63256 - DNA, 305 bp, Zea Mays
tcgttcgtgaaaatatcagaaacacagatatgaaatcggttcggtaattaaatcttttaattacaagatataacaaaaaaaccaacaaaaccaacatctcgatttgcgtgctggagtaaacagtcggctcagtcaagcctggccgagcgcgtgcaaccgcgccgggcctgactcgcggtgttttgaggttcgtgctggcctgtctcttgcaatacagcgaaccaaacaaacactgcattttgtatatgcagatacaattgcatccacagggaagggaaccaaacacatggagaatgaaggtctgg

SEQ ID NO: 63257 - DNA, 299 bp, Zea Mays
gacggactgcatgagaacttcggctgctacaactttgcttatcgcaagacaagaagacaccggcggtcagctatcacactaaatggccgaccggttggaaattttaatggtttatgttaaaattgatgataaaaaggagaagctaatgtagagcccgctggagttaaccttcgggctgactaggcctcagtgcaacatgacgccgggggcaccatgcccagatgctgtgtatgagtttagagttgtatctgaacacattggaactagggatttagttcaagaatacttggccaaccgag

SEQ ID NO: 63258 - DNA, 599 bp, Zea Mays
gttgtgttcgattactcttcggaatcagttctctcatactataatttccatataaaaaacgaggaacacatagcttggtgatgagcaaccaaccaactttgaattgcgacttttgactaatatagtgataaggatctaacacgtgttttgtagagattgagagcggcaaatgttaggggtctcttatgtcgaagataactcgtttaacatgctacttcggcacaaacaattgtgtttcaaaaacatttctaccggaggaggaagataaccttcaaccaaagtagtgtacataaaaggttcatctatgggcaagtgacgaggacaacagccgaagtcaacaatttcagacgcaacccaaaggcgaagcggttaaccaagagaaaattccatcaatgccatcaaaagttataagttttcttcgatgccattagtttagattttaaatcccttcaaagcatcaccgtcactgatgccatctactacggttactggtttatttggacacactcgtcatactctaaccttgttcctatccctttctttattgatctccatgactcgcacaccggaggaaaaaaggtgtggctgctacccatcag

SEQ ID NO: 63259 - DNA, 370 bp, Zea Mays
ttatattttgaaaattgaagtccttttcatccgaaatatcttcggtgatctccttccattttccaagcactgtggtcagggtttcttcggcagcaacaacagcttcttcagtggccatattcaacatcattttatcaatatcagaaaatatgctctccagatttgtatcttcggccgttgcagcttcggcagttgtagctttggtgggagcagctttggtagctgtagcaactttggcagcaggtgttatctttgacgctgaggccggcggtggtgtttcttcaatagattcaattacagtaataatcctccgcttttttggcctagcagacttcttggctgccgaaggctccttctttttctgtaaaag

SEQ ID NO: 63260 - DNA, 702 bp, Zea Mays
tacggtttcaacattaaaaaaataccgattttcttatggcgtaggacaaatgttctctcatcaagacaaagggtcacccatggaggagtgtttggaagtggagaatgaaagttgttgactcatggaacctgaaacaccatgtgatttccttttataaaagactgaggaagttaaagcgacgcatgattacagaatgattcctaatctttgatccgagtctatagactcgagagttgcatgaatgagagagtctcgaccaaaggcagatcgatagagacatgataactcaaggcattctataagaaaagtatcatttgcttgaatcaagaactcaaccaaataaaacgagggggctcttgttaataatatgtaccatgaatatccaaatcaagcttaatgaagcagagcctatatggaagggctcatgagctctatacaagccaaagggctcaacaatactatcaggaggaagtctatagtcagaagggttctagaagtgcatatatgacaaagatcccaatatagtaagagataagcatgtaaacatagagttggaactgtatacaactcggtaccaatctagtttcatcataaacttggtaaccgactctgtgcctaccatgtaaccattgcccctctttaggatataaaaagagggcgagggaactcgctgatcatcaaaacatacaaccatagatccac

SEQ ID NO: 63261 - DNA, 1036 bp, Zea Mays
tttggagataattcagctcaaagtcgggctgtcaggctgtttgcagtctgaaattcagactaacagtgatactgagccaactttgaactagaaatcagccctgatctaataagaatttggccatggttgctataacaagattgttgttggatcatcagacaataactttgttactatccaatcaactggttgccattgaaaatcgggaggaaattgggtttcaaatcgctcggtcaggctaactgaataagaaatgccatggtacagtatctgcataagatcgactgctagccgttcactgtcgccggtcactcgccgccacgatgagcgctgatcgtcgtgattcgtgcaccgtggtaagaagataagcacgggcaggtaaaaatcttggcgcccggattgagttgggtctcgtggcggctaagcttgccgtactccccccagctcataggtcgatcggataaccttcgccgtcgtcgatctgtcacctttgcgcgccacgtgattaagctttagccgcatcgtgatgaaccatggggtgcatgtccggtgaccgccggagtgattgccacggtgaaagccacctgttccaagcacagagctctttttcccctccagccgccagcacaactttgcccaaattgatcaccaccgctcgagcatcctataaattgaagccttcagcatgttccgctaggtaattgtgcgtccagtaaaccaactatcagctccgatcattccccacaactccccaatttgggattacccccaaatcggtcgaagaacgccgcaagaacacctagccgtggctagcgcgatacaggttagctcgtcccctctgctctctcttttgagtgatctcacatacccatgatgctcgtcaacccatccgattgaactaaaccaccaccaatcgccgggaacgagttcaactgtccgcatggtctacggtcactgcgtccagagtaaaccaagtagcctttggtgaaattgtgttgggggaaatgcgcgggcagggtccgatttggtgtctgcc

SEQ ID NO: 63262 - DNA, 511 bp, Zea Mays
agtagcattgatgccatcttgaaaaaaagcttttcccgaaacaacctctaactcagactaatttatcaaagaaaacaatacaccttgacaacaatcataaaataatataaaatgaaacccaaggcattgtcatagatgcaatcaacactaggatttcccatcatcaaatttggatgcagctccccagtctttaaacaacacttcaccaagtacgttagaatactaagcacaacaatcatcgaattcaacaacctcgtttgttaatgccattaaggccaaacatccatatatcgtcaatgtatgaaacacctcacataccgctctcaagcactataaaacatggttgttattacattagaatccaactactagagacctccaaactattctgttgacatgaagcaaatggtgttcatgtcatataacgtccttttctcctctcaaaagagataaaatttgcaagactcataaagcaatgaagggataacgtcaagaaaaactaatgtacttc

SEQ ID NO: 63263 - DNA, 558 bp, Zea Mays
aaaatctggaatcaatccaatatgcattagtgtattagttaaaacctcatattcataggtgacaaattagcacaagagttcattctagccacatgctcttttcaataacaaatgacttaaagactcaaacaagatcggtcatagctatatgtacacaactaacaagcaaacaaccattgaatgttgcctctatgtatctattagtttggacaacaactaatatgcaatcaaaacttaagtgcaagcgagcatcctgatatattggatcatgatccaaccgtatattacatttaacaattaaattattccaccgctcattcgtatagatttataaagaagactctaacaaaccacaactatatatatagttgaatcatgatccaacagatcgcgatgctcgcttgcacataagacctaattgcatattagttattgccattagtttcatgttggagtcactagttgggcatcagtatcatgtgtgtcatattaattacgagttttctcttaatgttatcgttcgtttttgtacacttgtttatcccactcatgtttctg

SEQ ID NO: 63264 - DNA, 396 bp, Zea Mays
attttttctacgatgtcttctttttctactcatatgatcctgttgtaccaatagggtacacctatccatgctaagatccaagtagataaagaatatgaactcatcttaagtatgtactatgtcgtatactataatgtttatcgggttgacaaccagcatcgtcactttaaatacaatcgtactacagttctaccgataaactgatttactgttcgccacgcgcgcatgatacactagttttataaatactgagaaagagaacacacgcactgaggcagcacgattcgtcgtcgtccaaagtccaaccggccgtatggcccatcatcagcgctcctttccccccagccctcccacctcacgcgtgctatcctggggcctgactcgtctcatgtgatg

SEQ ID NO: 63265 - DNA, 501 bp, Zea Mays
caatataagtgattgcataagatattttccctgctatgtgcgagcgagcgactgtcattttttgaattcagcatgtaaatcccttgctatagctttggcctatagcggcagatagagctacacggcttcaacttgcaattcaaaattgtacctggcacaggacaaaatcttgtagcttgttggtcttgccattttcgaattcaaccgctttggcttgtaacatgctaacggcagatggagccataagactctaggacttgggcttgtagcggcggatagagccacaaccatcgaattcatcatgaaaaacccctcatcaaagctctggcggctttggctcagatggagccgcataactttggcttgtagcagcaaatggagccacacgactttaacttgtggcaaaagatggagccacaaccatcgatttcatcataaaaaccccttatggcaacttcggctcgtagctacagacggagccacccaactttgtcttacagc

SEQ ID NO: 63266 - DNA, 424 bp, Zea Mays
cgtgtagacagtgcgacgacgcgcacgactcacaagagtcgctaatagacatcgcgtttatactaaacactaaataggtggtaaataccacatctaagtcgttaagatcacattaccacatatttacaatcgcctaactaaaataatgattttaatccaattgagtattcagtttactaaccaacaattaaataggaaattaattagcccaggggtagacaaggtagacaggggtagacgggagtcgtctagggggtagacggatgtcgtcgggaccctgacgacgcgctgcgcgtgcacgaaacaacgcgcacaacagcgtgcgacacgcgcgagtcaacacgactacgcgcgcgaaaagcacgctgacgcgcaaacgagagctactacatagatgtcgcctctatactagacaagtattaaa

SEQ ID NO: 63267 - DNA, 433 bp, Zea Mays
gaatgatcggacctaaaacgagctagccacggcgaagactctttcacggtggcggaaaatagatttggggggactgagcaattcgtgggctcaggtgagtaattggaggcacgagcgggtgggttggatgctggaatacttagagtcgagggggtgcttaatttataggactcttgatcggtggctcgtgaatttgaaggagacgcgtggcagccggagagggggaagagtactggcgcaagcgattggtggcatttaccgtggcgggctcaccggcgatgaccggacgtgctagagcgagtcactacgacgaagtatagcatctaggcacgtgtcatccgagcggcaaacggctaactccggttaacttatccacaacggttgtgacccaggtgggtacggcggccggagttcatccacgacgcgatatttc

SEQ ID NO: 63268 - DNA, 545 bp, Zea Mays
tactaagtctggcagaaaaagaaaaatagaaaaggtcaatagtagtgggctcaattcaacccgagccagcccaataccggcggaatgcgcccgcgcgtgcgccctcgcttgcgtctttgcacatagacccctggctattcgaataacttgtaaagactcctccctactgtatctatgtctcactgacatttccaataagacccctcctctttctattctttacaacctgtgatcctcgacggtggatggcgacagcccgagctcggatgagcttgtactggccggaataggcaacgaccagccctttcctctgcttgacacccaattcaacccctgaggaccatttcccctcaattaattgcaagactctaacgcctaatcactctgtccatggtgacagcgcaatccggggacaattcatagtgttcccgtcgatctactccggttcagtgcaattggttgggccgatgagcttcaatagcacacaggaatgctagaataagagcgaggagaacatgatcagacctatggagcgctgaccgcga

SEQ ID NO: 63269 - DNA, 666 bp, Zea Mays
cagaaatgtgtagatccttggcttcatccctggtgggagggcgaaagtcatggatcttgatcttgtctccagagatatcctcatcagaaaatcccaaaatgtgagcaaatcttttgtagctcactttataccaacttccttcaatgaagaaatttagataaggaaagttgtatggacttttctcatcagcatgcttaatccacaaagtagaataaaactgagcaatgatttcatcattccaatcatattggaatgtcatgatagtcttcatcctcttttgctcataggccctcaatgcctgtgtcatctcaggatccccaatagcttcgcacccgctccagttgatgaaacgctgatggaggattggctggtgcttctttggaaggataactgaattatagaaattaacatgaaggagagtccagaagcgattaccatcaatcctggcatcacgaacacggaaggtaggattctagaatcgcatatcttgaagaagggcagacccttcgctggcactgaaatcaataacctgttcattggcggaacgacgggcctgcgctttgtgaagcactaacccctggataatgggggcatgagcagagggggttaacatcatcatcctttcctccttcgtcatcactagtagcctcccaggcctgtggattt

SEQ ID NO: 63270 - DNA, 391 bp, Zea Mays
gtttaggagagcttgtttttgtaatgatatttgacttgacatctatatcaaactttgatctgcttgtcacaatcggaacttgtggggaaggtacttttatcttctttgcacggtttttttctgaaggggaaggtgaggctgatctgaattggcgcttcaaagttggagcatccatgaaatcatcatcggataatgtggatggagctgaacgaggatttttttacacgacaagctagtgcctttctacaaacacgatgaactggtgctggttgtggatcagtctgctgctggttatgtggattatcagcttgatgtgctgagctgctagatcgagttcgtcttgaaatgtcaacggaaaaaacctcatgacttactcaatggttagtctttt

SEQ ID NO: 63271 - DNA, 599 bp, Zea Mays
cttaattataattatttgagtaaaaaccttatctacacctcacgtgcacggttatctcaaccacacagttatccttttatccatgcaacatgtgcttccctcaggcagacacatgcaagaattttctccgtgataacgcgcttccctcgggcacaaacatgcaagaattttctccgtgataacgctatagccgcgcgatgcgctcgtcacgcagtcggctttcacgggcagccactgcttccactcgtctgcggatttcagatccactagcgtagcctgtttcctctctcccaccagggcgccacaaacggacatgcaaacagcaccttgcatgcatgcatggtccttgctgcctcacacgcgatttcatcggacaacatgcatgcatgcagtcatggaggaggaggaggggtaggggtggtgtgcgggagataaagttgttgctttttatttgtgtcagcccctttgactggatgtgtatggcaccatttttatctcaactgctccgcacataccactctttttttatctcaacatagccacttcgactgggcatctagccagggagaggcccacgctgaaaaccagtcttgttttta

SEQ ID NO: 63272 - DNA, 750 bp, Zea Mays
acaagtctaggaagatggcccgttttctgaaagggctaagagcttaagaccatcctcgccagccaacatttcctcaacttctctcacctctccaacaaagccatccaagtgtaaagggcaaaagaggaagaaaaagggcacctcaagaggaaattccatgttctccaagctcagcagcaagactgtcaccagagagctcgatcctttgggcttccacccaggggaccaagcttcaatagaccagctggactcactccgtcacgctacagtcagcagagtcagagctcccttcaggccccctctgttgcaagcaaccaaccgccagcaaatgcctgttggcactgcagagaccccattcacttcaagaataactgcccccagttgaaggcacccggacctacctactccaactcggtgaatggccccaagattccctcggcactgcctccaaggcacctccctccaacagtcagcagagcaggacccagtaccagggcagagcacgagtcaaccacctcgacgctcaagaggcccagcaagctccaggagtagtgctcggtgagttccttgttgaatttactcccgctactgtgctttttgattcaagagcatcccattcatttatagccactagttttgtggaaaaacatggcatcccctctacacccctagaaattcctttggtcacccgaaccccggggtcagaccttctatgccagctcaagtgctcccatgtcagaatccttttaa

SEQ ID NO: 63273 - DNA, 538 bp, Zea Mays
ccggtcgaaagcaatggcatgttcagacattctgaggaaggttggggctattaatcaggcattgaatgcctcccatcactcaagtttccagtgtctcttccaagtgtagtggtcataccccccccccccccaatgaacagcacacaatcggtttttacgagaaaacggggtctcttctccttagctcttcgtccttttgaggctcagacccctcccgggcggcgtatcctagtttaggaacttactaagcaacctgcaatccttgtagatgtgtcgaaccgggtgtcggtggttcaggcacggggttttaaggagcttctcgaaagggtcggtggcctcctcagttggagccctccttctcctctggcccaccgtagccaccatcatatcgtcttgcctcctctagtctcccttccttcctgcttgaagttgaccaccaaaacctccgtcagactccttgtcgtgtttggccttctgcttgcggtggtcgaagattactcccaccgcgtcttctcctaatgtgtggctagttgcgatg

SEQ ID NO: 63274 - DNA, 528 bp, Zea Mays
gccgcggtggtttttgctctaaagtcgtggaggcattacctttatggcgaggcttgtgacatttacaccgatcataaaagtctcaagtatatttttactcagaaggagctgattttgaggcagcgtcggtggctggaattgattaaagattatgatttgtccattcattatcacccgggaaggctaatgtagtggctgatgccctaagcaggtccggggttccaaaggtggccttgccgttgatcattgatctggaccgtttgggaattgctatatgttatgtcggtaccgctagcgaggagactcggatgcttattcaatcctctctcatggagagagtgtgtgcggctcagcagcaggatcgtctattacaggaagctcgaaagagggttggtgatggtaaaccacgtgagttcaccattgatgagaatgatttggttcgtttcagaggccgtctttgtgtgcctcagaaatcagaggtgaagatggatatcttgagagaagctcataaaacgccttacaccgtcc

SEQ ID NO: 63275 - DNA, 421 bp, Zea Mays
caccagttccgtaaggtcctaagctaaccagccaccgctaatcggccacaatcattcactcgtgtgctcgaattcggagtttcccccaaatccgatttccgccaccgtgaaaccaagctcaccgtcgccagccatactctggttagtccctcccctctgctcccttgtttaagcattctcgtgcatctacgatgcttgccgagccattgaattgaactaagggctctccggtcgccgggaacgcgaccatatagccgctatgcttacggccaccgtggccagagctccatagttaaccaatagcgcaattaagttaggggaaatggtcaggctgaccccaatttcatgtccggcgctcggagaacccagccgtagccccaatcgaccggtccaggacctcgccggagtctctccgtgcgcg

SEQ ID NO: 63276 - DNA, 754 bp, Zea Mays
cccacaatgaatgatcctgacatctcaactagatgcaaacttttttggggaaaccgaacaattggttttattcctctgagctcctttgaacatattgcaatgtatctcctttgaacagttgttcctttttattcctttgaggagctaagtacccttttattcctttgtttatgtttatgctgtaagtatatttgaaatatgatttgtgctggagatatttattaacttatctgttgttttatcttcaaggcccaacgattgtggttcagctctgtttatcaactccctttcgagaagagatggccaccggcagcaacaactcatcgacattagtggccatgggacatgacgtacaggtacctgctctgctctacttactcccctaccaagccatggtgttccactaaaattcattacgaacttgcttactgaaacagattgatcgagatagtcatttgttctttgttgcgaataatcgtattatttacgtctgatccattcttcaggtccaccacacgtcttcaattttctctaagcttccttttgttcacatggctttcttggctgatccaccatgcttgcaaattcaagaaccacaaaaatattgatcttctttcatagggtgcaatgtggatcatctaaggcgggtatctaaacatatcaagcaatgataactgtgctttccaattcagtaattcacagtaaaaaacaaggtctggaacagtattttgctgtcctaaggtgcttcattttc

SEQ ID NO: 63277 - DNA, 362 bp, Zea Mays
gaagaaaccaccccagcgccgaaggatgatgaagtagtggttttcaagagttttttcaaagcaggattacgacttcctctgaacgagatgataggggaagttttgaaaaattttgaaatatatcttcatcagctgacccctaatgccattgttaggcttagtgttttcatctgggcccttcgaagccaagggatgagcccagatgccgaagcattctgccgagtgcacgagttgcactaccagacgaaggctagggcagacggtctgcatgaaaattttggctgctacaattttgcgtatcgcaaggatacgaaggctccagttcttagctaccgcaccaaatggccaaccggttggaaagg

SEQ ID NO: 63278 - DNA, 465 bp, Zea Mays
ctcgagactcccgaacctgatcaccgtcccaagcctgagtgggtggtggaaacttgccatctataattctggtgagagctcgaagtgtttcacgcgacaatcccctacctagcgcgccaactgtcggtgtttggaccacgggtccttgaccaactagtaaaatgtgtcgcgtggcctaactctagatggtgtgcgagaagacacaagcaattatcctggttcaggcaacacaaggccctacttccagtagagggggatgagtattatattactcgcactgtggtgcttgtagtaggggtttacaagcacaacgggagaggggaagtccccaagtccctagagatgattgaggcaagtgccaatatctaagacaaagtggaggagtgagcgttcggctgcatgtccttcttgtggttgttgtccccgtgccctggagggaccactgccctatttatacatgaaggg

SEQ ID NO: 63279 - DNA, 957 bp, Zea Mays
gtggtcccactggggggctcgacccactaggggcatctcatttagtccttccttattcaatcctatcttggccctttggtcggtctggctgaccaaagagggcctcgtggccaccccgtcagctgggtgttcataggagaatgtgaggttcgaccttggatgtggatacgagcaaatgacctatgggtcgtcacctagcttgcgactcactgggagcttcttggttcacccctcgctctgtgtgaggagttgatgtgtattttgggttttttatctggctagcacgatgtagttactagggtagcgtggtaaaagaggagccatcatgacgccgcttagcgtgggcggtttgatgggaacaaaatggcttgttcgccgttttgtcctcaagtggcgtgactaggtggttagccatcctaccagttaccatcgcctctcctgttgtgtgctcctctggcgctccacccgatgcggtttgtgccctgcaaaatgtccagtcctctgctttggcttctgaggtagtgatgtcctgaaggagtggatcctcccaagtagcccacaggggcctacctctcaggcgtcgcttggctttcccattcctgcataaaacagagtgggagggcacttgggttcagttacgcttaccacattctcatgcctaagcatttgcctccttccttccctggtagtctctctgttctcctttgttcgtcttcctccctttgctcaccttccttccttgcaacatcctcctgtttgtgctcatggatgcctttcccctatgctccctcacccaaggttggctcaaggatttgaagggaagggattccttcccctctaactagcctctagttggcacctggaggaagaaggcagtggcttctaatgatttgagcatggctatcggcttggcctcgatccacttcttgaagttatccatctctacgattaggtggg

SEQ ID NO: 63280 - DNA, 685 bp, Zea Mays
ctagaaaaagaaaaagaagttgatgcaaagcgcatagccgacttagaatatgctctatctgcgcaagtggagcttcataagtctgaggtgctaagattagaaaagaagcttgatgaagtgagtgagaattttgaagttgaaaaggaaaaacgtgaaatagtcgagactgagcggaatagagttcaaaagaacattgaagagcttcatcaatcgaaagaagaaggtttttctgtcgctatgcaatgttgtaataagctgaagagtatgtttgctaaagttggtgcattcttgaatgagcaaaattttattcgcgacgatctcgaaggggtaattagatggatagagggtgaagtcaaggcttttaatgaagtcctcactggccgaggtgattactgtgcccgcgtaggggcccgtggagcagtctctgcttgagaaagctggctgcgaacatgcaaaggttgtaattcaaccgaattttgtagtgtccgccgaagatgtaaaagaaccttctgccgaagctattagtctaggaggaaaattctattatgaagttaagctcaatggtcgaagggagatagacagaatgaagaagaggtcatttcaaattctgaacccttactttttgcatctgcgagttactatctgcgtttatcttactcttacatttttcttaggctcatcaggc

SEQ ID NO: 63281 - DNA, 295 bp, Zea Mays
ctggtcgtgcagtcggtagagaagaggaggggcgtggcttccatagggccgacttgattgcacctccctgctattcctccctcacctactctctaacatagatgagtacgatttcgttttaaatgagaagggtgaggccacgaggagcagcgaggaggatacatgtgtggctcgacctacacagcgacgacgaccagtcttgaggtcacggcggtgatggccgattgtctggtgatttgaatatggatagataagatttagagagttaattggtttatcccatcgtttaagaggt

SEQ ID NO: 63282 - DNA, 329 bp, Zea Mays
gggagctagaggtgacccggagggagaagaaagtggccaagagggaggaagccgtgacccagagggaggccctcacgacggagtaccagaccaagctgagtgctttggacaagactctagaagcccagtgggcccagcaggtaaaggtcgtggaaaggctacagaaatggcagcaagagctcgagggcaaggccagtgatgtcgccctcgccgaggaaaaccttaaggagaaggagttgtccttggacaggcgggagacggatctcgctaggcgagagacagatctcgccttcagggaagaaatgctcacccagcgaggcgagttgctg

SEQ ID NO: 63283 - DNA, 1536 bp, Zea Mays
gggggctgggtaaccgccagcaccacccttgaggattgggttttcttcaacagccacctttaaggctgaaggatcctcagtcacctccatgggagttgggcagtctggaccaacctcttgacactgaagaccgccctccaaggtcgacgacgcgcgagatgctgcccgggatacctctaatcccacatctggaatgtcagaacaaacatccatcatatcaccattagtcggctctgacagcatatcctcaggaatgtcatcctcaagggtctgatcaaaatctgttatagataaatcctgaaggctaacaagagcagacagggctggagaaggaatatcactatctcctctactacctctgtagagtcggctatttttgcgaattaatggaacttcttcttctttttcttcgtcatcataaaaaatgcggacaaaagatggtgcaggatcgcacccattgggctcagctgcaacaggattacacccattgggttcagattcagtagggccgcacccattggggtcagtcagtgcacgatcacacccattggggtcaacttcagcaggtacaccaccagtgggatcaactccagtaaagacctctgccaatacttcttcagcaataggagcagaaaggctagcaccctaattcaagcatgacaatcgttgaagttgtctccttttcttcttcttttcttcagcaggcgcagctggacgactgagttggcgacgacgctttgggcgagtaccctcaggcttttgggcgtccgttgctttgtccagctctggtatagcggcaacaaccattgtttcagtagggcccaagtcagatgattctccagccaacatgtcaagcattgcattcatttctgcatcatctggactcgctggcatctcaaaatgaacttgcctctcatcattgggaagatcacaaagagaagcaaccaagacctcaatatcttcgggagagggtcgcactctaagacccaggccactatcactagaaggaggattagacacaaaattgaaaaatgacttaggaggtggcagattccaagcagagtaggcaacaggagcaccaacatttgatactttgcctctcaaaatcatgtctagccggctcaccaaatccttagcaggaattctcctattggtaacccgagtggagtaagtaacaccactgtacaagtaagccaggtatgctctgtcctttaggggctggatgttcttaaaaacaaaattagcaaccaaagcttcagcggtcagacctctttccttcagcagacagacttcagcaagcagaaccttagcctctgttacttccagggcagtgggagactcaatccaacttggagtgcacacatctggttgtcttcccgaccgggggggaggaacttgccatggttttccataataaacaattcaagacgccaccccttaatgttgtccttaagcggaatatcaagatattctgttttccttccgcgccgcatttccagactcgcaccacccacgagttggtgctgacccccagcc

SEQ ID NO: 63284 - DNA, 816 bp, Zea Mays
ctttgttattgggtattgtatcaagctgcatatatcgaagttctttataaagaagcggaaaatatgtaatgtcttttaacaaatgtaaatagaacaatagtagagtatgggactctattgaaatagatatatttgataaattgaaattggtgtattgattggaataaagaatatgatgacatcctattgagttataatatttgaacaaaactattcaaatgtacagaagatggcgtacagtagtaacaacaacacttgccattcatcatgtcaataattggaaatggttgtgtgaaatagctattgttatttgaaagataggtaggaataaagtaagtaatgtcaaattattgagccataaaatataaacataaggctcgtttagcatagaaggtagatcagagcaagtatatatagtattataatagtatatatatctatagtagtgaggtatgtatattgcattataaggtgtatgatttgtttttgctcactgaaacttggatgctggatgctttgtaaaacttgtataaaagtatgcatgcgtatgcaatgaaaggaggaactgcattgaatagaagagttattttcaattatatattggtatcaggtttaaataagctatgaaaatgttaatttgtataagatgaataaactatgttagacgtaatacatgatgtataataagattacattgcacaatacccaagtaaatgaaacgtaaggataataattgagattctttcacacaacacattaaccaagacatggaaagcaaaatgtttggatctctaacagatagattttatctgatta

SEQ ID NO: 63285 - DNA, 307 bp, Zea Mays
atatatatttggtcagtcaacgttatgtattaacactagctggagagtggtaacgaaaagatatagctaaatcgttatgaaccggcccaaccaaacacaaaagaaagggaatagatgccactgtaaatggaccacagacaaaaacatctaactagacatcctctaaacgtcaacccattggcattggcaaaccgatacagacgaggaaaacgagtcgagacaaaacgcgagtagacaagttgcttcctccgtgcacagatagcgagcgacatctaaagtgctttctagtagactcatcgaaagagct

SEQ ID NO: 63286 - DNA, 629 bp, Zea Mays
tgaatctccaacaaaacttccaagggtttgatggcacaaatgtgttttggtttgtggtgaaagtgagaggaagagagaggaaaaatgtaggctcggcggctggaagaagtgaatgggtaagaagtgaaaggaggaaaggggaggagaaaaaggggcggcgtcggctggtcaacagacccaaaaccggttcaaccggttttgcgttagactgagcagtaaatgcgcgcagaaaaagtgactgactgcacggattttctgccagactgacagcgcagtctgcgagactaacggcgcagacctcggcgttgactgacagcacggacgcggaggcggccaaaaccggttcaaccggtttccacgaggggaaaaccggttgagtggcctactcagccgatttactcaacctattttgagatattgctcggtaaggctttaataacacttaacaaatatgacatgagtaattctaataataaaaacagtatttctcatgacattttatgcatacaatcattttatatccatcaatcatgtgatcaaaattttaattttatgacacgtttcgagaatccaagatatttagctcactcctaagaaagcaaaacctagtctcatcaaggggttttgtg

SEQ ID NO: 63287 - DNA, 843 bp, Zea Mays
cttccttcttagtatagttcccaaggatttcattacacagtgtttcaataacttccaaccatttgacacaagggccgctgaaggttttttgaaatttaaagcggaagggcaatctcaccagttcaaattttttcccttcatcttttctcttaggaattccccacccacctgatgtgggaaaatttttgttggccaggtattcttgcactaagcctcgactactaatgtgctcgaccacaactctgaattctacttcagctaactagcatggggagtcgagttgcatgttgcacagtgaccttgtcatgccaaagcttaagttcaagggactcatcaccatgctcataagtttctccctcctcttctcatcagcctttaaataaaaccactcgtttgtccagccattaggccacttggtgcggtacccaatcacaggagccttcgtatctttttgataggcaaagttgtagcatccaaagtttctatgtagaccatctgctctcgctttggtctggaagtggagttcatggactctgtaggatccttcagcattggtactattttcctggcttcggagagcccatatgtagaaactgagcctgactatggcatttggtgtcagctgatgaagatatatctcaaatcattttaatacttcaccaatcatctcatacaatgggaatcgaagcctggcacggaataagctcttgaaaaccaccacctcattatccttcggctctggaattatttcttcacctgcgaaccttatcgagtcatcattgtcctttccaaaataaccaagcttcttcattaaaactaagtccttaggtttcactgtggatc

SEQ ID NO: 63288 - DNA, 295 bp, Zea Mays
tcggtttggaatacctaactccatcttaaacgataatagaactcagtttataggagaacccttcctccagttttgtgacaacttcaacattcacgtcgtctatgccgatgtggcacacccatgaatcaatggccaggtcaagctcgctaacggcctaatcctataatgcctcaagtcacggatattcgacaagtcaaagaagttcgccgggcgatgggcaacagagttgctagccgtactctggagcttatgtaccaccccttttagggcaatgggttgcacgcctttcttcctt

SEQ ID NO: 63289 - DNA, 301 bp, Zea Mays
agagggccgatgaggtgatctccattcgatgctttgttaattgttatagcagtatgcaatacatatagatatagcatactcataattggagtagcaaaccatcttacttattgtttagagtgagaaaactatagacagcagaacattttgtctacaagatgacaatgtgcttgtggttgtgctcctttttttgtgctttttagttgaaatctgatgctacttaaagctaactaatttctcagcagacaacttgccttctgttgcactattttctgagcgcataattgactctctctgccta

SEQ ID NO: 63290 - DNA, 749 bp, Zea Mays
attacattgcagtctccttaggctagcacttgctcacccaccatacccaagctagcagtagtgtagtaccagagtcctacgaggagtcgcatgcaagtcaagaggggcggtcaacatggttcacatgcaccaaacaaatggcacccacatacatcacacattcgaaatcaaggggtgaaatcagtttaaacctctcatttctctcactcactcaaatctaataaacaaacttatttgcatcccacatcgtcatcaatcatcaatcatgcaagtcaagaggggcgatcgacatggttcacatgcaccaaacaaatggcacccacatacatcacacattcgaaatcaaggggtgaaatcagtttaaacctctcatttctctcactcactcaaatctaataaacaatcttatttgcatcccacatcgtcatcaatcatcaatcatcaatcacaaaaacaaaaatgactgggacaaaaaaagagccaacaatcttcacgtttaatgattctatctacaagtttggtgtggtccactgtcggagttggaaccatgcaagagtataccctaagtttgtgctcttttcttttctggtatgtaaaatagaaaatctcatctagattgatgttttacaagttgtagcatatgaactttagtgtattagatttgtgtcaatatttatgctttatcatggtaggtatactgtatatacactatcagagaaagaagatcaaaaccaaatgtatggtactag

SEQ ID NO: 63291 - DNA, 467 bp, Zea Mays
gtcgttatcagcggtagattttgtcagaatattttcttgatgatacttaagctgttaagctgtcagacagtccgttgctgaactgggagcttccagtgtactcaagttgttcattggtcataataacagagtgatgtttcttgaactctcgcttgattttctaatcatatattagatggtttaatagtgatgtgagaaattagtgttgagattgatgctccaacaagctctgtacaactagatcactgtgcgtctgtgtgagcctttcctttcatgatgcagcttgtggcattatgtatgtagggcttgtgagaaaactaaaaacattcacataaatatgcttggtaatttattgttaattgctccagaaactgttttagttaataatgatgtaaagacctactccctcggtcctataatataaggtgtaacttgtctcataatatatttgtcccatagtataaggc

SEQ ID NO: 63292 - DNA, 480 bp, Zea Mays
gcatttctccgagtttagcttggtgcgggttgcccgcagcttgtcaaaaactagggttaggtcttctactatagtcgacccctttctagtcttaaccacgatgtcatcgacgtaaacctccaccttgtcctgaatcaggtccccgaaggtcttactcatcgcccaaacaaatgttggcaaggcgtttttcagaccgtagggcattacaacataacagtacagcccatccaccgtcacaaaagcggtatgcttcctatcctccctagacatccggatttgatagaaaccgaagtaggcatccaagaaagacaaaaggtcacactccaaggtagagtccacgatctgatctatatgtggcagtggatacgggtccttgggacatgccttattcaggctggtgtagtcgatgcacatctaaagcttcccgtttgcctttggcacgatgactgggttggccagccacacggggtgatgaacctc

SEQ ID NO: 63293 - DNA, 791 bp, Zea Mays
cggggacacctgcgaatatgatccgttggtcttagtcaaagcatatgttctgattgcagattcatgtggtctgtaataactctcctacggtgaactcgccctgctggtgatttgctcgcgaagaggttcatcttgatgatgaaattcctagcaaagcgcgcaatatcactgtgctgggaatacggaacaatgaatcctacgtttttgggaaatgacagagatcattattaaatgtgggagacaaatgtgtcgacacctatcctgcctctctagattgcaaaggaattcaaaacaaagtcctaggcatgagtgctttaagctctcttatcgggtcattgataaatgcaatcgaggctgaaccaataatcgcaaaatgaaagtcgtgagcttgaagttcggacatttatgggcactattgaaataatgtgtggtgaatacgatggttcaagtggtcttgtgagagacccatcccacatatgtgttgaataaacactgttctgctatgtaatatatctggcaaatggcatgaattaaaatatgcagttaataggattctgaagatccatcatgagatcctatgaggattcgtatctttgatttataaatatgcaacatataaatctcatatcggataatgcattcctgaggaatgaccactctccagtgtagagagaatatctcatagttgagattatatttcccaactggaaccttccaagaggaaacaaagtctgtgttcaacaccaaagtttgataaccccaataaagggataaagacccatacagaccca

SEQ ID NO: 63294 - DNA, 938 bp, Zea Mays
cggcgccccgagatcggtgttgaggcatccatccttgagtgcaccgccatggacccagccacatccgccatcgacaaactctgggccctcggccatactaagcctcgattggtgctagtggtgattcctcgccggagttcggattcgcgggcaaaccgccgtgtgctgcggctagctttcctctctaccttccgtcaatggtatgtacctccctcaagttcacaatcagcctctatacgtatagcgtctgtcggattggggattcgggcagtggggcctagcttggggggtagctgaccatggcgccaccacgtctatactcgcacgccgccgtctgtgcggtctggaggtggaggacgccatggctaccgtcgctcggtagatgaacggttcagattagataaaccatgtaccgcttcgaggaatggttctaggccgtgggtttggatcgagcggtccctggtcaatctcgcccacttaaaaatctcactcgtatattctggatcgggcgactctgggcgcataccgattcacttatatggcgatctaatctagaccacccactcatgatcggatggccgtagtcctcgcgtaccccttcgtgggtgcattttactaaagagcccctgtagttttatggaattaactcgccgtcccctcggggtgtttactgagtctggggatttattgcacctaggcccctggactttctcgtaagggtgcgctcggtccagataattagaaaatcaaataaattcattaggaaaatactttctagtgtaaaaataaatgctagaacttgtttaatttatataaaatgcatacttggtccaaattgacccatttcagtctctataattttgtaataatagtatctatcacttagtacaactgtttttgacatgaatgtcacaataaaatttatatcctatttaaac

SEQ ID NO: 63295 - DNA, 358 bp, Zea Mays
caaacccatcctgattatagcttcaggcataagttgatgaagaaaaatttgaaatgtcttcagcacttcaaccaagaacctgcttaatggaaactgaagccctgctttcaaaaagcttcggtagataaccacttcatttgctttaggagcaggagtagtgttgtcccctccaaccctcacaatagtcatatcacggaagtatcttcctctcatagcatcaacatgactctgtttaatagacgatttcccgaaaatggtatgactgggccaccagggcctatcttcagaatcttcgtctccgctttccgcatcataactatcactatcactagtatctttggataaaccttccagtgtc

SEQ ID NO: 63296 - DNA, 404 bp, Zea Mays
taaaagaaaagttagaacaggccaagtgaatgatctagatcaggcaaatctaaattcaagaaagaacttaacttgatgactaaaatatggcttaatgatctactttagttagcttttatgtgaaatgagtccttgaaacttgtttagcttcaccttgactcctaaaaaccaacatatctttggagtatctttcttaatcgggtaagacttatgaaagtaccttcgtactcagggttctttgaactcatgttgttgcgggtgatgagcagcattatatttgtttttattgtttgaaggtggtcccaacttatgaagatgatcagtaatgtgtgtgtttgtgcttttaggaaggttgctaccttccaagtaatgtaataagtgttatgcactttgaactatcaaag

SEQ ID NO: 63297 - DNA, 412 bp, Zea Mays
tcccaggccaccgccgcctaggccgccctcgcctaggtagccattaccctcgtccagtccaccgtcgccctcatctggccaccattgtcatcgtccaggccgccatcgccctctcctaggtcgtcgccgccctcgtccaggccaccctccccacgccgccatcagtcttgccctggtaactatctccctcgcctatgccaccttcggcctcacctagatcatgcatcgccgtcacctagacagccatcattcaggccgccatcgcccaggttgctgagatcatctcttctatttattattctctggtaattcttgtttctctgctatttgtcatgagtttattatttcgtttgacaacgcatgaacatcaacggacggttcgagtcagcaggacatacaacctagaatgttc

SEQ ID NO: 63298 - DNA, 294 bp, Zea Mays
gccccaatttgggatttcccccaaatcggtccgaaacaccgcgcatagtgacctcgccgtggctagctcgttccaggtccgttcatgctctttgccctcctatttcagtacccatatgtcctcctgatgctcctcgacccgttcaattaagctagaccgcgctagatcgccgggaacacttctgttcatctgtagttcgcgctgtctctgtggacggggtgatttagagcccaattccagcaattaagtaaggggaaatggtcgcgtagggttgaattcggtgtccagcaaagg

SEQ ID NO: 63299 - DNA, 631 bp, Zea Mays
tcaactgggatacatagaagacatcatgtacatccgcaagatggtcgggtagttctagttggtaggcaacttcccccactcgctttaggatcatgaagggtacaataaagcgaggggacaacttccctttaactttaaacctcctcataccccggattggtgacacctttaggtacacgtgatcaccctccttgaattctaactgccttctccgggtatctgcatagcttttctgccttgattgcgcagttctcaagttctcccatttaaaccatacttgttcttctgcctttcaccagtttgatcccaatatagaggagtcctgcactttctgccatataaagcttcaaacgaggacaacttcaaactggcttgctaactgttattgtaagagaactccgcataggacaaactcttatcctaactgccaccatgtttaagagcacaagctcttaacatatcttcttgtacttggttggttctctcggtctgcccatcggtttgaggatggtaggccgagttgaaattcaacttcctgtccaaacactcgtgcaacttctgccaaaaacgagaagtgaactgggatccctggtctgacacgatcttcttaggcactccgtgtagacaaact

SEQ ID NO: 63300 - DNA, 799 bp, Zea Mays
cttgtgcgagatggcgggtaatcagttccagcagcatggcgggagaattcctccacaaggaccgcgcgaaacctcatatctggaattctctgagacgtgccccccgctctttgttaaagcagaagaccctcttgatgctgatgagtggataagagtaatggagcagaagttcggattgatccgttgcacagagacacagaagccgttatttgctgcccaacaactgagaggccctgccagtacttggtgggcaaattttgtagcagttccatcggctggacatcaagtcacttggggagaattcaagctagcattccatgaacactatgttctagagggagtgcttcacatgaaacaagaggagttcattcgactaaagcaagggggagatactataatgcagtatctcaacaagtttaaccatctatcccaatatgccatcaaccaagtgaatattgatctgaagaaaaggaattgttttatgaggggactcaatgccaggctccaacggaaaatggccacctgcctggatcttacttacagcagagctgtcagcacgacattggccgtagaagccaagaacacaggccatggaaaatcaaagggatttggaggtgataggtctaaacagggacctgagaagcgaaccaggttggtaatccgaccttttaatcagaatcgttcttcgcctcgtccaccctcctatccgttcaaacagcctgttttcattcgtcctaccactgcccccacttctacaaatcagccgagtgcccctggtactcgtttccccgctcttcct

SEQ ID NO: 63301 - DNA, 316 bp, Zea Mays
ggtatactatactataatagtcgttggagcatgtgatttcagaaactctgaatcgcctgttaaaactctgaatgtatgtgatttcataaggaaagaaacgttgaatgaatattcttcgttaaagcacagtagtagtatggatgcatgatagaaaaagtctttggtcagaggatggatggcgtgcagaggtgaggtcaagtcatgcaatgcattggttggagtcgtctcctctcgtgttctgttcctgtatctgcttgtcagagccctgctgtctgtagcttgagtctgcgtgcaactacaacttggtggtcagttg

SEQ ID NO: 63302 - DNA, 659 bp, Zea Mays
gtggattatataatatagatacttagtgttgggataagatccttgggcccctgggggcccacgagtcagaggaaggaagtggaaggttccactttggaagaagccgctcccgagtaacctcgagggtcgaggcaccgagcccaaagtcgagcaagacagaactaaaacgggggtcggtcgaaccgagagaaagccactcgagtggattctgcacctaggctaggactgtccgtcataaatgatcgaccgcattaaacacgtctacgccgggccatggcggggaagtcggtcctccttccacatatgatcgatgaacctaggccagaaccccactcatgacctatgaggttgtagacttgcgacccacttagggcctaccgaggctagacctgagtcccctagtggtctataagactcgcaacacgacgagccacgtcgaggttcaggctacgaaggccaggggtcagcgcaacaaaggaagggtaatgatgacgcctgagctcctcgccgcccacatgcagctagacttattaaagagcctagccagatagctcagacgatcaggacgaataccgacgaacacgtttctaccaagggtaaatgcttcgttctaccccgacacaatgaactccttccacgagaagccacttgtaaccggc

SEQ ID NO: 63303 - DNA, 517 bp, Zea Mays
atgagggttaattcggtcggtggtaaagtgcaagcagataaaatatgctcaaatgtaagggtggaaataagggggatagggttccctagtgacctaatagtaatagacaccgctggggtagatgtcatcctagggatgaattggttaatgaagtatgaagcgaatgttagctgtgacaagaggaccgtaacattgaagtccccgcccggagagaaggtagtggctgagctaaggatgcctaaaatagcgaaaggtgattgtcaccagatttcagttgatagcaaggaggccaacccgctcgaggctatcagggttgcatcgaacttcccagatgtgtttcccgaggaactaacgggcatgccacccgagagaaaagtcgaatttgccatagagcttatccctagcaccgcccccatttctaaaagagtctatcgagtgtctgggccagaattggtggaactcaagaaacagatagatgagctgttagagaagggttacatcagaccaagtacctcgc

SEQ ID NO: 63304 - DNA, 485 bp, Zea Mays
gccagtgcactttacacaattgaaatactagccatgctcataaacaagagcagtttagacttctttgagattagcggatttcttgagaatagatggttcaatttgaaacttggatggaatccaagtactgattaactcaaatggaatatgagtgttggttcgatggtttttgtgagaagatgatggattcacctagtaaataggttctaagatttaaggtctattaggatgtgtcacttaagtgattgcattaaaccttgtcagcctttccttgtgttagcctcatatcatattttcctacatttagggagtatattttcgtgtgctcacccatctctttgtctctcatgtcgtctcacccagctgtccggacttgaagacagagttttcgaaatatagtgtgttataaagatggtgtcgatgctaggttgatataccctcggtcgactccctgcggagatcttgcaatgacaaattttgtttta

SEQ ID NO: 63305 - DNA, 531 bp, Zea Mays
cggatcggaagctcatccgcccaatctatgccatcgctaaaaccctacgatccagatccaatggccgtattaaatgaaacgaagaggtacacggtttttaatctaggccgcccattattgatccgagtaccataatatcatctccttcacttgctagcaaacctggtggcgccgcccaccaccgtatacggacagcggcggtgatgcaggccccaacggtggcgccatcaccaggctcccgcaacccatgacctgtcagcatactgtcatgtggggcctcgacaggttggcaatgggtcacctccagctacaaaagagggagttgtacagggaaacaggcatcgaataatcattttgagaacctagactctatcttccaactactgctcatcttcttcctcccttctctcatgtacccggattctcttccttctagaacacgacagctattgtgcttctccattctacttctcttgctgttaccctccctaaactcctctctgattgtaccagattatatgcttagcgttt

SEQ ID NO: 63306 - DNA, 300 bp, Zea Mays
ccacacgacacgagtccaaacatcgcataaacaggtccaaacatcacataaaaagtctagaagtccacaagtccatcaaaaggtgtggtacatatgttatcgtatagatgtagcttgatttactacattttagttaactaaagctcaaagtagacttaacttaccattccaggtgatggaggtggttgtgtcggccatgaagcatatctccaaggcatttgtgacgattccataggaggatatccccacgacatatatgtcggccatgaaccatatccccaaggcatttgtgacgacccc

SEQ ID NO: 63307 - DNA, 503 bp, Zea Mays
ctggatgattgtggttggggatattatctctatgcttttagaacatctcggcattagggggagataaatgtccatctagtgtaatgcctcaatattctattaaacgcacaaaagctaaactgaacctgtcattcggtgtgtactcctgtgtatagggagtctgccagaaatcgttggggagtaaccatattggtttgaatgcttctacctgatgtagatgtggatatacccgggattaatatcgtatccacatttgccttattggtatttgatctattctcggggacgcctgcgaatatgatccatcagccttagtcaaagcatatgttctgattgcagattcacgtggtctgtgataactcttcttcgattaattcaccctgatagtgatttgcctcacgaagaggttcatcttgataacgaaattcctagcaatgcgcgcaatatcattatgctgggaatacggaacaatgcatctttcgttttgggaaatgacgaagatc

SEQ ID NO: 63308 - DNA, 493 bp, Zea Mays
catctcataaaagggaacataagtcctgccctaaagaagcttttgaagactacgacttcatcctcctttggttctggaatcacttcctctcgagcaaaacgaaccagttcgtcatcattctccccaaagtatcctagtttcttcattaaaactagatcatctgcctttactgtggatctcctgaactcgatatggctgggtttgctcgggcttaggatgctatcatcatcctcactttcatttttgctttcagcttcggcagcagtctgttcagcttcggcatgagcagcaccttcggtgacagtctcttcttacacaaccaatccagaacgcttcatcacctccaaaatcggcactgtcttagaagttccaacttcatctccttcacgcgccaccctagcagtagatcttactctggccattttagtgttcatactctagcagacgaagttgcacttgagaggtggaacgtttgtccaaagtacaaagccgc

SEQ ID NO: 63309 - DNA, 516 bp, Zea Mays
agtgacacggaccttctcgcggttatagcgcaccaagtgtcagccgaaacaaaatatgttttttggttgatcttgcatgtcaggctcaacacaagagatatgctcaaaatacggaatatggagttggaatcatacacatgtgagaattgtattgtgcaaaacttgaaacctagtcccacttgttcctgaggtgcagctttgcaaaaagatgttagcagatcgtcagaattactccccctaggttgactaacccccacttggtggtcgacagaatctcgatggagctaaggaagaagtggtctatggagattgtcataatcatgatgtggagtatctggaaatgtcaaaatgggtggatctttaatgaaatccctcccacgtccagcggtgcaaaaacatgttcattgaagatatgatcctcatgcttaaaatcgctagtccacactgttaaaacttgggtgcaaacattgtgagcggttacctcgaatgaggttgtaaatttgtacattcccaacc

SEQ ID NO: 63310 - DNA, 1227 bp, Zea Mays
cacggggcaggggcaggggcagggagagggatgatagatgatccaaataatattgattattatatttgagtgagtaaaggtgagggggttatgcagcgatctgaaccattggttttgatgatatgtttagtttgggtgtaatttatttggtagatgtagtgaaggttatgggtgtggaggtgatttggttggctaggttttgcaaagtttaaactattgttaggtcatatagtggtatagattcacagcaggggctaatctctcatgttatgccataaataaaaatagcaaaatttatatactactgacaacacgtagggaggacatccactgcctggaaaacacagtgagtttgttccttctatctacacatatagatagaaccaggtcccatggatcggtactcgcactacactaaaaagcatggcccaccttgagttctatagtaccagtgctagccacgatccggtagtaattccatgcttgggccaccataccagtgtgtggcgtcagcccggacacgacacgacctataaagttgacactgtcgtgatacgatgctctcgctccagttgttgatcaacctcccaccgctccgtctcaaacattgatttaatcattcagagggaagggtatataaatcatatcgcatccatctctctgtatccgcttaaaccctaatcaatgtaccatgccactctctcgctctctcactcttctctcttggctctctttggctgtgactctcctgcctcccctttcgtctctagccttttgtcttcttctcgtcctccagtggcttcttgagccactaatgtttggtattgtctcattacacaaccatctatacccccaatgctcgtgtttcaactcacgtgcactatatcttcatctactctcactactccaaccgaaggtataactcccaagtttttcacattcatctagtggttaatgagcgagggatatcctaagtttattaagtactatcattggtatccgttagcctaagatccctaaccctaaaactctaagaaccttcggtttcattcaagcctcgagcaaatcaaagtctacaagtaggaagtaaggtattatttgaaccaaatcgaagaagacaaaaaaatcataaaacatcaaattagcaaaccttaaccctaagttttgaaagaaatatctcagcctagtcgagggaaacaatcccatggtgacggtagagctcgctgg

SEQ ID NO: 63311 - DNA, 1388 bp, Zea Mays
taatcattcaacgcccacccgatttggatactgcttactctttggcaatgttgcaggaggacgtgctgcagcacacaagacaccgggaaatcaagcgatcagacttcagcaatttttctcgaacaccaacgaagtctacaccaatgccattgcctttacctccatttcctgtgactcgagccagtggagcaacagaagagcgtagaagtcagcaacaacattagaacaagggagaagatagtaagttatcaactctaagggcatatcgaagggctaagggtctgtgtttcaagtgtggggagcgctggagtcattcacaccgttgttccaccgctgttccattacatgtggtggaggagatgtgggagctggctagaaaagaggaagatattgctgaaggaactgaagaaaacaatggaggtggtattgagcagagtctagatagcatccatgcgatatttacggctgcagtcgatggcagtgaaggtattcaaactattcgattgtgggctttagtgcattgccaacaagttttaatactggtggattcgggcagcactgccagttttcttggaagtcatctcatgggaattatgccggaagtgcaattgctcaacaaaccactgaaaataagggtggcagatgggagagttctattaagcaaatactttgttccggattgcaagtggctctatggaggtctgactttctctatgcattttaaaattattcctttggggggttatgatatcatactgggcatggattggttggaacgtcatagtccaatgtctgtacactgggccgaaaagtggttggaatttgagtatggacagagaaaggtccagttgcaaggggtgcaacccagaattcagacatgttacagcctcaagtgtggtcagttggactctctgatcaagcaggaagcagtagagcagttgttgatactgaagaacgttgaaaatggtgaagttattatcgaattggtgccagaaccaatacagcagttgatcgatcaatatcaacaccttttcttgaaacctgaaggtttacctcctcgaagaccagtggaccatgccattgatttactacctggtgcccaaccatttcgactgagacctcatagatatactccacaacagaaagatgaaatcgaaaagcaagtttgggaaatgttagctagtggagtaattcaacaaagctctagtccttttgcatcacccattctgctagtcaaaaaagatggtgagtggcgtctatgtgttgattacaggaagttaaatgcccacactgtcaaaaataggtacccactgcctatctttgatgagataattgacgagctgacgggagcatctattttcaccaaactggatcatcattcgggttat

SEQ ID NO: 63312 - DNA, 1438 bp, Zea Mays
aatccttcatggtgaattcatgttgaaggacagcgatgatttggtgcaggatgtccaaagaggaggcagtgaccacgatgtcatcgacatataggaggaggtacacaatgttattgccgcaccgatagatgaacaaagatctgtccgacttgaccttaattaaatcagggggcaaatatgtggcacaacagatgtaccaagtgtgagggcttgctttagaccacaaggagacttgttgagcttgcataccatatcgggatgagtagggtgaacaaagccagcatactgactgcagtagacggtctttgtgagtctcatggagaaaagcattcttgacatctagttgatgaactgtccaagaacgggagaggaccaaagtgtgaactgcatggacggtagcaggctttatgatgggaccgaacgtctcatcatagtcaaagccataacaccaatgggccttgtactgtttagagagtcattcgccttccgcttatgtgtccaaacccactttgttctcatcacattatcgcctgcaggacagggcactagatcccaagtgtgattagcaaggagtgcctgatattgttcctccacagagaggtgccagtgaggattagcaagggagcaatggacgaaagatggcataggggagacagatgaggaggaggtcacgaagaggacaaggcgaaggaccctagtgggttggagagtgaccattaggtggatgtggtgaggatcgtgatgaagaaggggttatacactgttacccacctaggcacgtcactgataaacatggaaaggttggatgtagcaacgaggagtcgacataggtgagggcactagagagggccccaagggtgggggtgaggtcaaaggagtggacgctaggaccgaaggtgaggccacatgagccaatagggctctaactggggttgatgaggtgacacacgagttggcgaggggcgaagggacagcctagagggagttggggcacaggagccacgatggcactaggccatgggctaaagtggtgtgggggaacctgaatggtgaaaaaaacaatggctgatcagagggcgccacgaagtcaggatcatgaagaaaatccaactcggtaagggaggtagtagtgggatgagaggtagacaagaagggaaaatcagtctcgacaaagttgacgtgacaggagatcaagagacgatgggttgtgaggtttaaagggaaataggcaattaagccatttctatacgttttggtgattgaatgtccaacacaacatcttggactaacttgtttgctaagtgtatgagtataggttcactcgagcgtaatttgaagattctaagtccaaatgaacttaaacgaggccaggaaatgcaaccttgtgaaaaaggtaaaaccatgaggtttgaggcaaattttggttgttcgaaatggt

SEQ ID NO: 63313 - DNA, 397 bp, Zea Mays
ggggctagtggtggtggtggtggtaattgagcccagaaagcttgagagtgactcgtcgaagcaacggaagtcgtaggccattgattgcctacatactccgtgatatacagagagtagcacgaagtagtatgcaagacctgcttcggcgggttctgccgtgcttcggcttcagcaatttccttctatttctggatcgtgacttggcacgttcttgtggtatgtcccttatctttgccacagaataggcaaaacagcctcctgtgtaggtgcacatcgtgttgaaagccgcctggcatgcttgcacatcattcccaagtgcagtggctggcctcctgatgccgaagcgataccatatagggcattgaataatccctttcacatcctccctttgactcgg

SEQ ID NO: 63314 - DNA, 891 bp, Zea Mays
attcgtccgagcggggtcgcttgccacctaggcgtgatgccatgaaatggacccccattatccggaggtgatcttgactggggcccatggagtcaaatgcgatggagtagagaatattgagcctgctgcccccatccatgagtacctttggtagtcatactgacccaacgatgggattgatgataagaggatatcgctcgagacaggggacgtgctcggggatggttggagcgatcgaaggtaatgtcatggttggactagttgaggaaggtcgagaccgcttgtcatacgttgaatacctcacattgttcgagcttctagtgtttttttgaagtgtagtagtcagacccgtcaaaggtcagcagacactcgtttcatcatggaatgcggggcccctactctcctgttcgccatccttctgggggttagaccctttttcggacgatgcctctttgcttaagaacttcctaagaaaacgacaatccttgtaggcatgtcgaactaggtaccaatatttcgggtatggggcttcgagtagatctttgaaatgattgatggtctcctcaataggatgcttacttcccttctggcccattatggctactagtaattcgtcgtgcccccacatgtccttctttctcttatcaggctattcgtcgaagcccccgttggactctttgtcgagtttggccttctgcttatgatggtcaaagatcgccccaccacatcttccctggacgcgtggctagttgctatgtcgaagagctccttcgtagttcgcatactcatttgccccaacttatgcactagagtatctgttatggtccctgagatgaaagcgctcataacgtcgacgtcgatgaggttagtaaactcgttgcattgccatga

SEQ ID NO: 63315 - DNA, 1968 bp, Zea Mays
cgccgacaactggatcatgagaaatctgtatatcactcaagttatcacataacagagtgtaggagtgtcacaaaagacaccaagatcagccaatagccaacgcagctaaataatttcagcagtggtagtagcaagagtccgaagttcggcttcagcactagaacgagatatggttgcttgcttcttggatttccaggcaataggagaggatccaagaagaatacaataacctacagtagaacaacggtcaacaagatcacttgcccaagtggcatcagaatacgcatgtagctgaagtgggctatcagaagcatagagtaaacatctggatcttgtcccgcgtaaatatcgaagcacacgaagcaaatgaccataatgaactgaggttggtgtggatacaaattggctcaacatatgaacatcatgagcaatattaggtctggtcgaagttttaaatgaatatccattggtgttgcaactgtgcgtgtatcagtaattccagagcgatcaagaagatcttgtatatacttggaccgagacaaataaaagccttttggagtttgatgaacttcaatgcctaagaaataactaagtggacccaaatcagacatctgaaattccttactaagatgctgcttgacatgagaaatatgttctgagttgtcacctgtaatcagcacatcatccacataatagaagtaaagtgcgtccttttggagagacatgaacaaacaatgtaggatcatgttcactagaagaaaaacctgcagccgtgatgacagagatgaatcgctcaaaccaagcacgaggagcttgtttcacccatacaatgcgcgatggagacgacaaacgtgccctgagggagtatcaaccctcagaggagggtgcatataaacttcttcatgtagatcaccattgagaaaaacatttttgacatccatctgggagatagtccaagaagatgaggctgcaactgcaatcaaggttcgaacaatagtcatatgcgcaacaggtgcaaaagtctcatcataatcaagttcttgagtctgttggaaaccacgagccacatgacgagctttatacctcaatggaaccatctgataggaacaacatgcgagggtaaaggaacgatatcccatgtaccagtgcgttcaagagcagccaattcatcaatcatagctagttgccactcaagaattccagaagcttcttgataagtagtgggttcaacaattgccacaccagctcgtggaaaaccatagcgatctggaggttcaatggtaccacgatcacgaagacgatatccctgactaaaaacatcattagactcattgttagtacaataatcgggtacaagattagtatcaggaccagccgtaggaatagagcgagaaccacgaatgtaggtttggatgataggtggtttggaagagtaagaagaagatcacgtggaggtggaaggtggtgttatgggaatgagaacatcagatgtggatgtagaaaatgatggttcagatgcaggaatggaaggaagacacatgaaataagtagattctgtgggataatatgaggagtgagtagactggttgtgaaagaagggacgattttcattgaaactcacatctctagaaattcgaatacggcgagtagatggattataacaacgatagcctttgtgttcaggtctgtatccaagaaatacacaccctacaacaaggttatattaagcgctaggcgttaggccactgcttagtgcctagagaggttaagcatagattaatcgtgcttaagcgtttataggaatataatatatatatatagttgcatagaaaaacagttttagctaggctcagatgaagacatcttatacaaagcatgtgcatgtactaattaagctttcaagtcaaagcatccgtcttaaacatagaacataacagaggagatagaggatcagcagataaatagcaa

SEQ ID NO: 63316 - DNA, 285 bp, Zea Mays
gtgaaccaactaggacctaagactgactccaacagaggccatgcaaatcgagcagccattcaagcctttggctagcgtctctggtttgcctgtcccagccatatggtatacgctttcaacaacacaggcaaaaaagcagcggtagtatagtccaacaaatggagcagatggtggggtcatgttctcagacacagaaaaaggaaatggctgccagccacagtacaagctattatgattttcctctctctttccatcctttttgtctagcttgtttggctgccctgt

SEQ ID NO: 63317 - DNA, 329 bp, Zea Mays
ctgaattgcatatttggtatcatttggttgcttcaaagaggtgcatcaccggccaaggctttcattgccgagggaaagtttgctgttgatccagttgataattgttgcctcctctcctattgctttgctctttcacattttgttgatgggctagcttttgttcatgacagcgcacaagagtttaggtatagttgtaggtgtgaattcaaattttgaagtagatagtgggcatccaattctgatatgaggtttcaatatggaatattccataattttattgtgtgtgtttggctgaagtagggcacatgattggaatatgaattcaaaaa

SEQ ID NO: 63318 - DNA, 654 bp, Zea Mays
aacaaacttgtaaagtgactgttggagaacaatccttattaagtgtaccagccctaaaactatatgcaactggctgaaatagtggtccaatttagggctgtcagatttcagacttagtgtaaaatgcaaatcctgaatttcagtgttttggtgtaagtttagagctctctattgctctgtccatagggttataggttatgatcattataacaaagttacagagctacctgaggagtataattttggttaagccacctagccctaaaacgttttggaacttagagaaaacctggtccaaagtaaagctgtcagaaattgtaggtttcagacttagtgaaattcagattctgaatttcagcaattggagcaaactttgggctattgtagtttgggatccaaggggttttggttattgatcactataccaaacttgtagaggaactataggagtataaaccttattaagcaattgtcccctagaaacatttggaacccaggaaaaagagtggttcaaagtggtgctgctgtgtttctgaattttcagattggaaacagtaactgaatttcagtgttgatagcagttttggagctagtttgtggctgttctataatgttttgtgctggggtgtttatagagaagttgaagcctatatg

SEQ ID NO: 63319 - DNA, 822 bp, Zea Mays
tattgcatgtgccatcccacaggcggcctgtgttcgtgcggataggcagcacaaaactctcccctctaccacaacgattctaaatggcaactctggattacaagttacaagcataccaacaagaccaaatgtatatggatttattcgagcaggagacatcacctaggaagttattattagaattaggcacacttgtgtgtggcccaattcaataaagaaaccaaggtggtgtgtagagatggtatgagactttagtcccatattgctcatttagctagaagagaactaacttatatgtgggagtgttcgctactctaaataacatgatacaaataaaaggctatgaaggctaccaaacgcgctcgctcgctcgcgtttcgcgttttttcgcgttatttatcgcgtgacttgtgacttgtgtcgatgcgcgatcgcgtcatgacgtattctaaacaacattttattctaaacaaaaagtataatcagctctatacagagttcgtaagttcagttcattatctaatattcataacaaaagtaaaattatatcacatactctaattcaaaactacaaaaaacatctaactgacatcatctctatctttgtgttctttatcaagtacatgaaagtttggaataaagtgtggtttaatgaatatatgggtatttttgtgtctctatatgggccatttcgtgactgccttaaacgggtcgtgctcgtgcctgcccatgggccgcgacctcagcccaaacccgacccgtcactagaatatttcggggcgtgccgtgccgtgcctggaccatgctttgtttcatgcttcg

SEQ ID NO: 63320 - DNA, 564 bp, Zea Mays
gatcattctggcgggcatctagttattagttggttcgagagtattttttggagtttttaagagttatttaggacggtgaccattccaaagaaattctgcccagctgtcgtcgccttacacttgttattaaaccagaagaggtcacaaggcatctagttattagctggttcaagggtattttactcgtaagacttggagttttaaagagttactagtattttaggacggtgaccattccaacgaaattttgaccggctgtcctcgccttgcacttgtcaataaaccaggagaggtcgccggatgcgctgtcagcctgtctccgtcacgagctgcgctaactctgcatccttgcaggattcggtgggatttggccgtatcgtaagcctatccgtggtgtttccgtctagttttctctctcatatattccagggcggattcgtcctgcttcttgtcacgtagtactcggcagcaatgcctcctctgaacgtatgtagaaactgcatcaaaaaagattgaaactggaggtcacggagctttggcgtgagaaccgaggatcatcgccgg

SEQ ID NO: 63321 - DNA, 812 bp, Zea Mays
ggagagagagggagagacgggtgcgggcccttgtggtgtatgattgattgagatttgcgagagggatgaaagaaaagaaaagcagacgctcaacaaggaagaattaaaacgatgcacgcatgggatctgtacaaatggtcgttcatgcctttttgggttttgatctgctgcactgacgcatgatggaaaagcgtccatcttgtcgcctggcgacttgcattggcgagctatccttctgttttcagagttactatccggcatggaactttcttcccaattcccatgcatgcaagctacgaatgcgtacaacagtgggtcataaatttaggattcattatcatgaatcctaacgtacatttatgattaactttgtccgcctctatctgttttatttatttcgtatgattaacgctcataactttataataaaatacgtacagatgtcggccccggttgcttgacaaagtaaggtaatcaatgtcagtgcagtgcttatgaggcatcatcatcatgttcttgagagttttcgtcgtccacgacgagcgtcagcaggcggccgggaaacgcgcgatagatcacgccagctacccccaaatccgcgggcacccgaacatgcatttgtttgcttcgtggacggattagactcctagccgcgcgcctacgttacattacattataatacttacacgtactgcatatggatcattgagaaagcctttcttcagacgcatgattatgccattctttttttttcccctctgcgccatatatatgcttggtatgagtgctagctagtagtagtccgtaacaaa

SEQ ID NO: 63322 - DNA, 546 bp, Zea Mays
ccctcgggggctgggtcatagctcgcgctacccatccgagccggatcatctccggcaacaccctcgggggctgggcaagcgctagcgccatccttgagggccgagccctctgtaacagccacctctaaggctgaaggaccttcaaccactttcatgggagcagagcaatccagaccagcctcttgacccttaagaccgagctccaaggtcgatgaggcacgggacgctgctcgagataaatccaacccgacatcaggcacatcagcgcaaacttccatcattccaccatctgccggctctgacaacagatcttctgggaccatgtcttcaagagtctgatcaaagttttccagagacaattcttgtagaccaatgagggcagacaaagctggagaaggaacaccactactctccccgctggctatgtagcgctggctgttcttgagggatttcatcctcctcttcctcatcttcatcaacaatgcggacggtacacccattggggtcagctttggccgaattacacccattggggtcagctttggc

SEQ ID NO: 63323 - DNA, 696 bp, Zea Mays
ggcagaatcactccaatgcgctccgtacgattaggatgataaacaaataaacttttttgaatatttatcatccgttagtttatttataaaaaatagaacgagacaaattaaaaaagcagagggaagtagtttattatcctaggtgacaaatagtaatatcctacatacgtatatatttgctctgacttattagctctcgcatcaaattacatccggtcaaaataaattaaaatatcgtcggtgataaggccaatcattggacagccggacaggaatgtgactgtgctacctgataaatgccgtttcagggttgctaaatcaccaccaaatcaggcaaaagaagcaacagatcattgttgcttatatatcgagaggagaaacgcaacttgagagagggagagagatgtgcagacagctaatttcaatattccatgcctgtacgtggcaatccaaatactactagtacttacgtgtactccaaacaacggcgggaaaggtttatggtgctgttcacttttttcaaggttttaaatagccggctatagcgatcgatatatcctgatatatcctttttagcagtgaaaagttacatcgtttagctcgatatatctcaatatatccagctatatcgcgatatatctcgatatttgcactttttggaagtttggggataaattcattttcgcgctatttaaa

SEQ ID NO: 63324 - DNA, 712 bp, Zea Mays
gggatttcctaagcttgaagaaggcctttcggtcttgtcgaaggatgatcttgctgatagccttgcgtacaacagtataaaggtatagaagttaaatttgaagttgaaaatgaagtactttattgccatgctcaattctttcttcttctttgcagggcttaattcttagtaatgccttgagggcacaaaagagcgttgaagacgaaggcaatacgatggctcttaacaaccttcgctcagaggtgattgagctaagaaacgaaggtctagagaaagacaagattttgatttcattggtaaataagataaaagaagacgaagctcaatacaaagctcaagccaaaatccaaaaagctgaggttgaagaccttcggaggcaactggccgaagctaatgagaggtgcgcactcgcacaggctaatcaagagatcagtgaatactagaaaaataagctagagaaaaatgttgaagaacttcgcgaatccaaggaaatgtgctttgagaaatccttggattgcgtgaagaaattaaaaactagcttcgccaaagtgggcgcctactctgctgaagaaaacttcatacgaggcgaccccgagggcattgttgaatggataagtggataagtcgaagccttcgaggaaattttgagtgatcgcgaagatatttgcgcgttttccggtgcgcggggaatctcagctattctggagaaggc

SEQ ID NO: 63325 - DNA, 729 bp, Zea Mays
ataatgatgtgcataaacagaatgatataattggaaattcaacgaaaacgaaaaaagagttagggttcaacatatggatggcctttaggttccaaaaaagattagacgacagatgttcataatattccaacagactaataggcactcagacagcaaaacagcaacacgtacattcaacaattgtctcattccaacattccaacgatcaaatgagctaagtctgcaaggcagtaataacaataacaatccaacgttcaacaattgtctcaattcaaaaaatgttcgtaatatggtcgccaactcataaaataagtccacaaagcacaaatgtctaaattcaacaagtccactgaccattgtctacacttgacactccacaacccacatgcatttagttcaggcacaatagcatactcacactcacatagagagagacataataaaaatcaacggtcaataaacattcaatgatataaacaccatttcgccatggcatcaagtatttgcaagatttctccatagctcaccatcttcattcatgaattttggatcactctcatggtcgtgttcctatattttagaatacatgtatatgagtatttgcaaatgatagataggaggcacgcaagtattgcaaaagcaaccaaaatacctcatcatccattgggttactagcattaggagataaagaaacagtctccgagggttttggttcagccacaattaaag

SEQ ID NO: 63326 - DNA, 602 bp, Zea Mays
tgaaaaggtatgaagtatccagggccaccagatcgagtctggatggtcgagattagattcccatcaatccaaacgggtacgcaatgaaaggcgtcaaatccgaaatggacggcccagatcatattagggttcaactccaacccaaccgcccgaccctagatctatggtcccgattcgatcgcgcgacgagcaccgtccgatgaagcgatctacgaccacgttttaacacgccgaagggtaggctttacttctaatcctaaccgcccaaagtcaatcggacggtcccgagattgtcttcccacacgtcggacagagcagcagcgcaggggggtcctatcgtggcggcgtgctcatcgaagagtagtgcatgccgcgccctagcctgttctaatgaccgcggctaaacgtaaacgaacagagggagataggtgaacttgagggaggcctctatacctggaatcgagcaacggaacacgctgcccatggagccatgcggactcgaggcatcactgaactccggcaagcaattacattgcctccggccacccaagccgcacgaggaagctcccggaccatgcgacatacaccggtgtagattcccg

SEQ ID NO: 63327 - DNA, 353 bp, Zea Mays
gtcatgactgcgttgagggattagccttgggcgagtcgcgactacgacgagatgctgcctcaagcgagttgtgacctcaggcgagtcatgactgcctcggccgtgtcatcgctacctcgggcgggtcgtgactgcatcgatcgtggcctagggcgggtcgtggcttaggttctttgtgtcttgttcggtgtgacagacgaccaaaggcacacaacggtcagctcgaccattaaaggaaacatatcgttgattgttaaatctgatgcacgtacatagggaaggttgattcctttccaaatgaagaaccaacggctcctaggctccttggggctataaaaggacctcctgggtgc

SEQ ID NO: 63328 - DNA, 291 bp, Zea Mays
aagcgaaagagcgcgaatttacgacctagtcaatagccgtatctcgttccgcaatttcctgctgcaagcgattaacttccgccgatagctcagcaatgcggcggctatctcgcgcacgctccctactcccgtggcacagttctgacataagtcgttccaccctggcctccagatcccctattggatcattgcttccactgctgctcccctcatgtctaggggccagctggtgctagggcacaccttgaggtctggttgcttttcgttaggtggtcttagtacgcgccatac

SEQ ID NO: 63329 - DNA, 276 bp, Zea Mays
tgccatttagcgccatcttattacatggggcttatattattaatctacaggctgcagggtggggggttaccattcgggacgatcgttttaggtgaataaaatctgaaagaaatggctgttggtctgatcgctacctacacaccaacgccttagcggcaaggttaatcttggagtatcgtgtgcatatatgtttgcgtcatcgactaaaattagtgtacagttactcagtcctagtcgcaaataaaggagatctgcgacgtatctctaaaatattat

SEQ ID NO: 63330 - DNA, 748 bp, Zea Mays
gaagatgtgtgatgacatttggtaaatggaaaaagaccttcatcaaaaatgacgtcatgagatttataaacacgcccagaagtgacatcaagacatttgtagcctttatgaatggaactatagccaataaaaacacactccttagatcggaaagagagcttggtgttgttatagggacgcaagtgtggccaacatgcgcacccaaaaatgcgtagtatggaataatttggaggtgtatggaaaatcctttctaaaggagtggtattgtggatcacacgactcggaagcctattaattagataggtggctgttaaaaaagcttcatcccagaattttaagggaacatgggcatgtgcaagaagggctaaacctgtttccacgatgtggcgatgcttgcgttccgcggaaccattctgttggtgcgtatgggggcaagacacataatgaccaatgccaagagaacaaaaaaaacttattgtgaacagattgatactccccaccccaatcagactgcacaaatttgattttagtttccaatagacgttcaacatgagcttggaattgcaagaatatttgagcaacttcagaacggttatgcaatagatatatccaagaaaacttgctaaaatcatcaataaaactaatataatatttatatccgccaacaaacgtaggagcagggccccaaacatcagaaaagaccaactctaaagggcgagtagagcgatgagtggataaactatagggt

SEQ ID NO: 63331 - DNA, 768 bp, Zea Mays
cctcagtatatcacccacaatctaacggtgtcgtggagcgcgccaacggcaaaattttcacggccatcaagaaaatgcttctcgacgacaagaagggcaaatgggctgacctgctacctgaggcagtctgggcgctgaacacgaccgagtgccgggcgactaggttcactcccttccgcatgctatatggatctgaggccatgaccccacaggaaataaaacatgggtcaccgcggacaagcacttcagccgtccccgacgtagacgaaccaacttccaatgacctcatcgacggagaccgtgtcttctccctgtaggccctcaacaagtaccaagctcaaacaaaagcatggcgcgaccacacagtcgtcccaagagaattcaacgaaggggacctcgtactcgtccggacaactcggacagagtcacggggcaagctggagccaaagtgggagggtcccttcatcgtcaagacgaaggcgtcccccagcgcgtacaggctaacaacgccatcaggcgaagacttagagcatttctggaatattgataatctccgtaaattttttgtttgaatcctcagggctaacacgcccttgtaattcaccaaacattattatttcggcccgcactcttttcctcccggggggtgaggtttttaatgaggtggagccatgtaatatacacacaaaattcccccgcaaaaatttagacaatgtcgaaaaagaccgcatcgacggtcttcggcattcgaccacatcgaagtcaccg

SEQ ID NO: 63332 - DNA, 697 bp, Zea Mays
tttggcatcatcattgttttctccaattctggctctctggccgtatcatccttggcttcggctggcccgactgtagccacctttggcactacaatcgattcttcagcgctctgcatgacgggagcagcttgttttgcttcggcagttgaagaagtcccttcgccaaatttaggcactacggccggttcaatatatcgcggccggtgggccagaacctttattttcttgcccttcggcacatcagtggtggctgaagcggcaatttttctcttctttccttgccttcgaagtgggtagtgataatcagggtatacgaagccaattgcatcaaatgccctattcaatcttttcttcccccgacccccgaaagctgcggacaaggcatcatcttcagccttggaatatgtcccaagcagctcatcgctggtagcttcaatgcatttcaaccagtcatcatttggttcgtcaaacttctctctaaatctgaaggtatatttcaatcgaactaggccaccttcactggatttggcagtagtctccttcggcatatcccagctctccataagtggccacactttgtacgctatgtgctcttgaattatatctcttgtgccaatgaaggcgcaaacattgctaaaggccttctgacatgcttcgatgtcactttcaatagctaccttcggccttcggaggccga

SEQ ID NO: 63333 - DNA, 487 bp, Zea Mays
ttcggtttgccttctaaaaccgggtgtgacagccttattatatagaacaagccgacggagtccgactcgggtttgcgtgacgataactactcatcctttccgatttccacgctcatctgcattaaaaaataaatctcagtcgctgatcattaaaaaaggctcagatttaatatgcatatacgtgcactagatgcatcacgtgcatttgatttgatgcgtttgaaaggctcatatttccacgtgcaccgaccctagccatatcggctggggtacattcctgctgtactaactagcacaagcgcgcccgcgagataagatccttcagctctcaaaccgttcgtaactttctaaaatgaaaaactcatgaaatcgccgttaaaagtaatttattttatctccatttattttatacatttctattaaccatttagatgtaacatattattaccagtgtggtctatttatcatattttttttccaatttttt

SEQ ID NO: 63334 - DNA, 548 bp, Zea Mays
atttaaggttagtcgctctgaagaactaagttttgacagattagtctctataaaccaaatacctcctaaataaataaactattcagattgaaggaccacagaatgatcgtcacaggccccaacccctgcatctgacaaaaggaacggaccggccgatagatcaactctaatcgatgtcctatacttcttgatcctaactaactaacgggtgatgagtgcatgcctcgtgagatatcatatgcgctggagagcgtgcggcacctccaggtccagggaccagggtccatggaggtcagcttcagcttggtgttaattagaaataatcacgcgacaacctttcgtctaattcctcctcaaatcacgccccggccaactacaactccgctactttttgtgattttaacacttcacctgccattctattgtacgacaacctttgtaattagattagtatctcccatgaattttcagcataaagattaacacctaaagtcgctgtttcgagatgaaggattataaagtcagtggtaaattaaatcacatttcag

SEQ ID NO: 63335 - DNA, 1124 bp, Zea Mays
tcactatatatctcataacatctactactttaaagagggagtagttgacatgtactccctttcgaggtccattagcagcgacaccactagcaccgctagtcctgcatctgtctgctcgctctccttctgctctgtattatgtcctccctctccgagcacaccaacaccgctcggttcacacatcctcccactcccatgtcttttcctctccgcattttgactagcggtggcccgtcgctccaccctcaatccgatcgcacaccggccaccatgtcgtatctagcctcacctcctcctccccatttcccccttatctttccctgccttcacatctaggcaatggtggtcgccgctccgcccccgatctagctcctccgtgtttccccgttctccttcgggtcatgccatcacctcctcgtcaccgtatcagccctacatttcgcccaaatccaatcaatggtggcacatcgctccacccctgatctggctcctccccatttccccacctcgttcgaccgcgccctcaccttctcctcctctccgcacgtggcccacatccgacaacagtggtagtcctcaatgtggctcctttttatttccccattctcttttggctgcaccatcgcctcctctctacatccatcccgcatccgaccggcactagttcatccctgatccatccgcacctccaccaccacgcctttgatcaagtcgtacccctgccaccatggcgcatcgagcctcgcctcgcctcctcctcgtttcacacttctccttcatcgcttgcacattcattcaccatggatcctctcccaccgctcaagccaccctcccctactccacgtccattgcaacaaccttgaccatgatttgagatggcaatcgccttgaccatgccatagacccatgaacaagtgcacaagctacactaccctcacacattaaaaagtagcaacactgctcccggtttccatctcatatatagaagatgccatcattgtacgccaattgttgaggtcttcattgacgacaagcaaccaataagtatgcccaccatgcccaccattctcttcccttcgctacctaaaaaatttcatagagattccaatgctttgtagaaaaca

SEQ ID NO: 63336 - DNA, 342 bp, Zea Mays
ctgtggccgccttcgttaatccatgcgggcatcgacattgtggcatctacgtccggctgggggtgctctgcgggtcggctggatgacgaccatgcccttatcgaatgggatcgacaccggggacgcccgggatagctcggcggactttgctggtcatcaccaagccgcatggcgacgtggtcgagctccctgcgttgatgtctgctcaaggtaagccctccgttgggttcccctcggtcccctctgtgcataacttcaattggagttgtggattacccactatacctcaatttcgcccaacaccggcgatggcgccgccacggtggagttctggccgccgcg

SEQ ID NO: 63337 - DNA, 450 bp, Zea Mays
caggaactgaaaatcgtggatagtccgactaaaccgcggactgtccgactatacagtgcggaccgtccgactataattcacggaccgtccgcatgtgaagacctggttcagcccgaaggtgacaagttgagaaaaaggaattatagagctggcgcggaccgtccgggaccaatggcggaacgtccgcgtggtgtgaccaaggcagatagccgttgatctgtcagacgtatccgttggagatgtcagaatcgaccgttggagggtcgcggaccgtccgggccctaacagcggaccgtccgccagtgcattttctggcagatgcgccccaacggctataagggtggttgagggctataaaagctaccccaaccagcccattcaccagcattgattgatccatttcatacacaagagttgggtattccctcctatctactagagcaacacttc

SEQ ID NO: 63338 - DNA, 787 bp, Zea Mays
tgatatttgactcatacacaaatattaattttcctagtaaaacaagaatctagtcttccttcagaattctttcagcggcatcacgtaaaagtttgtcgacgacttcgtcaacaacttcgttagaaatttgcataacatctaaagcttctttcataattggatcaactttggggttgtacggctccggtgggggagagaggccggctgtaataaatatatgatggtgagttacgaaggtaaaaacgaacaacaaggcaaaatgtttcaaataaaagtacctataatcatggcgcgttcggcagcttcttcagcttgtttagcttcctcatgggcgtcgtgagattctttctcattctttttaatggcttcatcagccatctcatgtccgcccttcatccacacatcggagtagaatttgccaccccagggtagaagcttcaactgaagggtccttagtactgtcaacagagagaatggattctggctaggccgcgaccttgacatgttcacacccagccttttctaagattgtcgtaatccctcgagcaccggaaaaagcacaaaagtcttcacgatcgctaaggatctcatcgaaagcttcggcttcttcacctatccattggataaccccttcaggatcgacgcgaataaatttttgttctgaggaatacacccccaccttcgcaaagctatcttttagcttctttgcgcagtccaagatttttcataacacctttccctggaatcatgaagctcttaaatattcttttctagccttgaacttgtc

SEQ ID NO: 63339 - DNA, 326 bp, Zea Mays
tccatgcaattcatctagaaagacatcaggatactcacaaactatgggaatcctttccaagggtgattcaatcatggagaaagcataagaatgtgtgccaccttggctaggaagatataagatgagctctccacaagtaggggagtgtattttgagagctcgggctgcgacatctagtagaacttggtgatgggtcatccaatcagttcctaagataatgtccacattttctagccctagaataatgaggtcaattttgaataatttattccccaactttataggtgtttgctggacaatttgatgagatgcaatcttgccccctg

SEQ ID NO: 63340 - DNA, 411 bp, Zea Mays
tgtaaagtgagatattaacaggttagttaatctggtgatatgggttagacactgcttcctcaaacataacctaacctaaattaatgtcttataccaactcgtccgtaaacaacaaacctaacctacatcataggttacctaatccagatatcccaaaagcaaagtaaaattatgtttaaacctaactacctcatgtaccctagctatcctagctatatgtcctcagccatatgtcctcaactcggatggcaactccaggattgagggccaaagaagaccaaccacgtcaagggaagataagcaccaactcaagtcttcaaagggcaaaacggaatcaccaagatgagtcaggatccaccattcataatggaatttttctttgtcctaataattattatcgcaacctcccct

SEQ ID NO: 63341 - DNA, 294 bp, Zea Mays
atttactttacataaggacactacttaaactacactattctaattatcttcgtccttggccgcgccactgccagcctcgggagaatgttcatctgcgaggttcatggaaggaggggctccaaaaaggtccaactccccatcaggtcctccactagctgctccagatggtccggctcccattgctgcaacttctggtggtacattcggatgcagccggtcgtataacacgttcacctcttcatatatggtgttacaatacgcttgcagattttccagggatgtgcttagttccgc

SEQ ID NO: 63342 - DNA, 339 bp, Zea Mays
caagcaacacacagatggcacttttacatactctgtggtacggtcctctgattcagctcctacttctcacatttttgctcttaatgatcctctttggagacgggctatggatgatgagtattgtgctcttgttaaaatgctacttggcaccttattcctcctcgacctgggttgaatgtggtcgattgcaaatgggtcttcaaaataaagcagaaacatgatggctcggttgatcgctctaaggctctactggttgctagaggattcaagtagcaatatggtgtggattatgatgacaccttcagtccagttgtaaagcccactatgattcgacttctt

SEQ ID NO: 63343 - DNA, 698 bp, Zea Mays
aaatgaaaggaaaactggcaccacgtttcgtcggtccctaccccgtcatttcccgaataggacccgcaacataccgtcttgagctaccagaatccatgtcagatattcacaatgtgttccatgtgtctcaactccgcaaatgcctaaaggtaccagaaacccacatcgaggcagatgcaattcagattcaaaaggatctacagtaccgagaaaagccagtgaagattctcgactcagcagttagaaggacccgcaactcagaagtaaaactctgtaaggtttagtggagcagagatggagaagaggaagccacctgggaaagtgaggactctctgaggaaggaatacccttaccttttctcgagccacgtttgaatctcgagggcgagattcctttaagtggggtaggtttgtacattcccaaaaatcctaacctaggtttgaaaccctaaactacccctcttccctttttatcctctaaactccaagaactcccttaaattttctttcatcatatgcatacaccttgtttgatcacaagcacctcacttagattttatttttcagcacctaagattatctaataattgttcaaaggaaaaagatataaaaaatggataaaggaattagaaaataaaaagaaaaagagaaaagccctccccccctctgctgggctgaatccagcccatgccgcggccg

SEQ ID NO: 63344 - DNA, 315 bp, Zea Mays
cgtcaatcatataaaacctggcccaagataccacagcccacccagaccagaataccacagtattccaaccatttgggtcccgccttactgttgtcctatgtgacacagtaggtaggaacacttgccacaaatataaatctctgcccaagaatagaacaaaataattcttagcactccgctcaaaaatacaattgtattttttattttccaaatatctctaaatattcaaattctggaatattccaggaatattccttttcccttttctttgtattcctatgattataaaatccaaaactcctccatccaaactca

SEQ ID NO: 63345 - DNA, 607 bp, Zea Mays
ggcgggttgattttaggaaactataggggctcttttgcgaagcatacaagccgaagggggtatcgggtggcatcaaccgtccgatccacatcagacggcccggattagacgatgaagggggtatgcatccagagccattcagattaggcccaatagccaggatttaaagcgtgaagtgatacacggggatctaatctacaccgttcgattctcaatacgcggccctgatctatcctgcgaagcaatcttcctacttcttatcacaaccgtctatcctaggatggacggcgaagaggcttcttctccatccagccacctgacgcgacggggtaagcacgggcgcggcggcgccatggtcagatccccccaagctaggccccaacgtcccaaactcaatgcaatcgggtgctaacctatacgggatcgatggctaacacgtgggaggaggacataccggcgatggcgcagcagagacccccggccacgcaacacgacggatacacagaggagttcacaccctggttgaccaaatcctgggctcccgatcaccaaaccttcacagcgagaacccaggtactgtcctcggggcgcggcggggcttataagc

SEQ ID NO: 63346 - DNA, 544 bp, Zea Mays
gcgagactgctcttcggcagcagcaaggagagcttgacacccatgttcgtaagctcgatcgagtttatggcgacattgagcataaatgcctcggggccgaacgacctagggcaaagaagatttatgattagcttgccaagagtagtgacggggcacaatacttcctcaaccctggtggctacaaccatgatgcttcggtccatccccgagcctaacgaactagaggcgaaggcgatataccgaaacctctgcaacctagtggagaaggctacggtatagcaggctgagatcgatcggcaagctcccatcggcgcggatagctacaacacgcgcacgacctcgtcttagagcagggggcacaaccctcccagtccgcaaaatatagcatccccgcgaagaaccatatcggggagatccgcaacgctcgacacctcctcaacaaccaccgctggaagtaggaggaggttgagcaggcccacgagcgaagccctatccctcccgggccagggccacgtgccttcgagcgcgtgatccacaagcacag

SEQ ID NO: 63347 - DNA, 437 bp, Zea Mays
ggcaaagccaacatgacgcacatggtcggctagtaaaagtcggccctactttcgatcaattgctagccaaaaatgctagcaagaagactgttccatgtgatcggtcaatgaagaaaccccggtcacctgctaaaacgaaacggctgaacaaaatggcccaaaaggcgacacaacaagcatcgcctgttcatcctatgagaccagggtactttccacccgtttattcatcgtcggtatattatcatgttcaaatatggaatggtacgacgatgaatccaaggcacatgtatagtccctttgtctatccaaactaggggcacctccattatagtccttttgatccattgatcaaatggtcatggccgaggaagatacaatccgaaacgacctttatacattggtgctttattgaatgatctccattttgaaaaaccggt

SEQ ID NO: 63348 - DNA, 755 bp, Zea Mays
gccacatgcaacttggctccccgtgccagctagccgaagttgaatttagagtggtagctgtcgagattagcaccagggacttaatgcaagaatatttggcaaatagaacatttccaacttctagcggctgggggatgccgaagaaaaaggaagggggaaaaagtatgagcttgttcggctcccctatagcttcaaatttgagaaacagttcaagaaaccatgcaatgaatggctggaaatgatcgaaaccatgtgtaatgagatccttggcaactatatgaagaaggaggaccagcttatggctgctgccttcggtacccgaccaagacgaaggctgaaccgggtaatggatgcgttaaacttcgaatacctagattatgagaggtttgacagaggggctggggtgtgaaaagaaaaagggttgttagtatcctaagaaggtagaccgctcgctcagtaaaagaagatgagaaggccttgaagaaaacaaaaacagtgccagagccaaaggcaacaattaagaagcacaagcttgaccaaacaccctctgttgaaccgaaggtcgacgaagcagcagagaaaacccctccgtcgttaactgctgccgaagtggttgaaattttgaaggtaatgactaattctccgccattcaagctgctaagtcctctgggattggaactgacaaaacttttacagaggaaggaaacgccctcggctacaggagagaagattgaaggacaaaataaacgacgaat

SEQ ID NO: 63349 - DNA, 520 bp, Zea Mays
atggctcacttgactgagctatacatgacgcgcttcggtattgctccttccctttttcatccgttcacgaactcaaaatggccgccctaaacttttgtttgttagcatggctcacttgactgagctatacatgacgcgcttcggtatttctccttcccttttcatccgttcacgaactcaaaatggtctcactaaactttcgttttgtttgtcagcatggctcacttgactgagctatacatgatgcgcttcggtattgctccttccctttttcatccgttcacgaactcaaaatggccgcactaaactttcattttgtttgtcagcatggctcacttgactgagctatacatgacgcgcttcggtattgctccttccctttttcatccgttcacgaactcaaaatggtcgcactaaacattcgttttgtttgtcaccttggctcacttgactgagctatacatgacgcgcttcgatattgctccttccctttttcctctgttcacgaactcaaaatggt

SEQ ID NO: 63350 - DNA, 497 bp, Zea Mays
actggaattcgacccatcttcttttttatccattgcgcgccaaccatctccgcgtggcccaactcgcgtgttgcgcgcgcacactcactatcacatgggccccattggccagatgttaaccgcgcgtacgcaagcctccagcgccgacctttgggctcggtcccgtttgcgctatgcatctccttcgcgtactcgctgcctgtggggccgatacgtcatctctatcccgtaccagtcttcaacacacagaccacgctcctcgcaacagaacaccaccaaactcgccgggacgttgagctacctctgccgttctcgcgctcgtgctgaccgcttcatctcgcttctcagtgcataaaagccatgcgtccagtcccctcctccctccatcttcttacacttgcgaccctctcgattcagccacaggggcatgacaccagggagaccgagctccgctgccgccgtagaaattcgtgcactggttgcggttcggggccctc

SEQ ID NO: 63351 - DNA, 430 bp, Zea Mays
aaaattcgcttgcacgattgcatataattaaggactgcttaccagcctcattttactcttgctcttttattgcttgatgaagtcagccggtaatgtatgtatggtgcagccttgcaataattctagactccccattatttgagtcaacttcttcgatcatagaggtccttgtatgttaggtgtacactgtttgtctccctctccttccctccgagcacgtggtcaacacgaggtttggcgtcaacgatttgctgcctctatcctgtcctgtcttgtccttgtcctgtgctatcattttctttcctcgatctcctctatcttctctcattgtcttggttccttgaccggcatatagaacatttgaatgtaaattaccagtattaaatatactttaattgtaaactaattataaagacaaagattatatgac

SEQ ID NO: 63352 - DNA, 852 bp, Zea Mays
gtcataaccaaagtcaatgggcatgaactcgagactcccgaaccagatcgtcgtgacaaggtgccaagggtgctgaggattggctatatggagtcttggtgggaatgtggtgtctgcacacagcgagctcctacttggcgcgtcaactgtcagtgttttgaccaagggggtcctcaaccgactcgtgaattagtgttgtgtgccctggcctagatgggtgatgcaagaaaacacaagtctttatctttgttcgagcaagagaaggtcatacttccagtagaggggatgagacttatattacttgcatctaagtgcttgcagtagagaattcaagctggccgagagagggaaaggaacccaagtccctggggctgattgaggcaagtgtcaatatccgcgtgaaggtgaaaaccgtgaagtcttcctctccacgcctgaagctctgggctcctgtatttatagcctcaaggagggctacaaggagcgtcggggcttgtcgcatatggtagaggcggccgagctcggacgaggcggagtttcctcccgagggtcagaccgtgctttgtcgtacgcgtgtcccatccggagttgtttgaactcagcagacgacatgggggagcagtagctgttattcccaggcatgcgtcatcgtagtcgatgaaagtgaacgacaccgcggtcctgtcactcctgtttgactgcggtatcacgtgggggtagatattcgcattgaatgctcatgtctccgtggttcccacgacctttgactgagggcaggctcggggttgtcctcctgcccgagaagggttcgaacgaggcagaaacaattgttccatggagaggggacatcgg

SEQ ID NO: 63353 - DNA, 782 bp, Zea Mays
gcagtggctccggcgagcctataccggccaagatacgtaatgaccggtgctcagaagtggttgacacctaattcgacccctaataatcatttcccctcaaccaatttcaagattctaggccccaatctctctgcccacggtgacagtgcgatcaactgacaacttgaagcgttcccggtgatcctatgggttctagcttaatcgatcgggtcagggagtatcaagagcacatcagagtactgaaacgagtgaacggacctgtggatcgctgaccgcgacaagctcacacacgcattgtttttgaccgatttgggggaaatcccaaattggagctcactagtgaacaatccgagacacgagtgggtgcgttggatgcttgaatacctagcggagctgatggcacgctcaatttataggattcgagagtggtggcccgtgaattggagatggcgcggtggcggccggagagggaagaggttactggcgcaagctattcgtggatgttaccgtggcaagttcttgggcgaccaatgggctatgtattgtgattaattgtgacgtggtgagatggccgacggcatgtcatgaccgcgaggaacggcggtacgatggtgagggtcgcgtggtcacgtcgccggtaaccggataagcgacagagcgttcactgtgcctcaagttcatccatggtgagatctttttacccggggattgttatctgcgcttaacagagcgtgaatcgcggcgctggcgcgaatccgaacgcaaggtcaccggcggcgagg

SEQ ID NO: 63354 - DNA, 559 bp, Zea Mays
gcaaggtcatcgctcgagttggaagagcagaaacggggacagggagtcggatgacagagagcagtcaaagacggatcactatcgatcctacgcccgcgtagactccatgcgccggcccaaaatcgtctcttgcgttgggtatggcctggcgagaagaggagcgtcgatctgcaaacgaagccaacaacaggcacaactagtggattggtggtgagccgaacaaaaacaggccttgcattgcgtccttggttgggatgggccagacactctgtacttgagtggccaatctgctcgttcacttccgaaagggagtcacacgccaacaaatcacgaaaacaacggtgccatggctctttctcacgcctagccagcacctcaacacaccttccttcctagcttccacgccatcgctttaggtcgagctcgcccccgctgtcaccctccaggagctcggcacctccaggtgttcatgtgcttcgccatgctctacgagtaaacgctcgaacttgtcgtactagctcctctttcactggaatccgcccccttccctatcatccgc

SEQ ID NO: 63355 - DNA, 730 bp, Zea Mays
cttaacaagagtctcgtcctcgagatttagtaggaacgagggaaaagatggggaaaatctatgtgaagctcttcttctctttcccatgttgcttcatcttctccatggtgactccattgtactttgcacatctttatcaccttattttcttgtaactcgagtaaaagtgtcaagaatcttgataggatactccgtgtaagtcaaatcaccctgaacactgagctcttccattggtaactgtttctcagggacacggagacacttcttaagttgagacacgtaaattacattatacacatcggatatattatcatgtagctcgagttgataggccatctctccaactcgcctaaaaactctggatggtccaataaagtgaggggacaatttgcccttgactttaaatctcttcattccatgaagtggtgacaccttgaggtatacataatctccctcttcaaattccagtggtcttcttctattatcagcgtagctattttgcctggtttgagctaccctcaaattctttcgaattatacggacttgttcttctgcctcttgaataagttcaggtccaaagaattgtctttctctagtctgatcccagtatagaggagtcctgcacttcctgccatataaagcttccaaaggtgacatcttcagactggcctgatagctattattatatgaaaactcagcatagggtagactcttatcccaacttcctcca

SEQ ID NO: 63356 - DNA, 524 bp, Zea Mays
tgagcacagccaggctcccgacgaacgcggatttcttccgtttctagcgagccaggctgagaccggtgatttgcatgcacagagcctggtccaaaactgtatccaggtatccaaacaaaacgggccgtcgagatgctgcacctcatgggccttgcacgctcaaatacagtaaaccaaacagccggtaagtgaagacgtaaagtaaaaaaactccaacaatctaggacgtcaagtagacattttcaatggacagattgtaacatgtggatatacatatataggatgcttgtggagactgcatattttgtgttgataccttcaatggacggacgaagctgctttaagcactcagcatggctgaagagatcgataggcactgattgatatagtgcctaacctgtgtatgcattggcttggacgacacacctgtttgtttgtctttatttgtatcgcttctactacttgtttagtggttttgtctgaattacaaccatctaaacaattgactttaatctgaagcgaac

SEQ ID NO: 63357 - DNA, 545 bp, Zea Mays
cgttggctgcatggtcgtgctcgctgcaatggtcgtgccgtcaattcgctgccgtcgggctgccagggggtaccaggaagattcgttgtgatgctcgcgcggtgcccatggcctcacggtggcgggattgcaccccgtatagccgggattgctcgccgtgcatcaaattcatcactgtaccgcaccgcaccgtggacagagctcatgtgttcgtaattcgaggtaagtggacctccgctgcattctcttgggtctcctccatgtgtgggccctgccctcgttcgaaatcgggtatcgggtggggcagtccgcctgctcaccggcgctccgccgctggtgcgcgtggttccgtcgtctgcggttggtgagtggggaaaggtgagagatgatggacggaccgttgatacgggttttggcgactaggatttgtccgggtgaccgcttcagccggacgcatttcggggcgttgatctcccatcgggcggtcagcgggtatcgcgcatctcattgaacctgtgccgtgggatcgggatccaacaaccgtg

SEQ ID NO: 63358 - DNA, 538 bp, Zea Mays
acgagatactaccgctaatcgacgtaaagcggggcatgcagttcacacttgcgagtccggtctgtgactgcaaaagagatagatacagctgttcagttcaggttcagccttaccccacctctgctccggcgagagagagcagcagcatttagcgtaggcgatcacgagcgctgtatttggcgtccgcagtgctggagagagaagatagagttggatttacagtcaccgctgcaggcctccagctactgcaaaaatttacgggttccatttccagctctctggtgtgggcagcctaacccaggaatccgaacaacgactatagactccatgcacaaactatataaaattgaagtattcgtgcaaacaaacaggacaaccggaaagaaatggcagccggttcagacacagttgattattcttaaaaggcaggcaactagtcccctgaaaccaggagcaagcgatatggatactgccataccggaggcaagcagataacaacaattacaagcatgcatcagtgcatggaagctacagtagc

SEQ ID NO: 63359 - DNA, 531 bp, Zea Mays
cgcgtacccaatcccggtggtcgacgaactgctcgacgagctccacggcgatcgtttcttctccaaactagacctccgatccggctaccatcaagtccggatgcgcaccgacgacatcgccaagacggcattccacacgcatgacggcttctatgagtttctggtcatgccgttcgggctctgcaatgccccgacgacatttcaggcactcatgaacgacatcctgcgaccgttcctgcgccggttcttcctcgtcttcttcgacgacatcctcatttatagcaggacatggaccgatcatctgcgatacgtgtgcgccgtcctcgacatcctccaccaccaccacctcttcgtcaagcgctctaagtgcgagttcgacgtcacctccatctcctaccttgggcatgtcatctctgtggcaggcatcgccatggatccgaccaaagtccaagtcgtcgtcgagtggccgatccctcgttccccacgagcggtgcgcagcttcctcagcctagccggctactaccacaagtt

SEQ ID NO: 63360 - DNA, 1186 bp, Zea Mays
ctttcctgtagtgtatggtaaattagttctttccatgttttgaaaaaaagatcgcaatggaagtaaaggactgcaacacattatatgcgtgaaaatgaagctaatcagatcatacatttttcattgtcaggttcgttttcttcaaaactgaactgtacggatttgtgccaagccctggttccaaaaaaagagtagtgaaatgatgaatctaagtagtgagaatattgttattctatgcatttcaattagaacctttttggtggtgactcaaaatactgtaagtactgcccttcattctcaagtatattctattgatggtatgtaaattaatgtgttagcatagaaatgtatatgttatggtgggtaaaacatatgaaaggcggcccaagcagcccataggccaggccatgctaggagatcaggattagagggataaggataagtttgttagattagatatcaaaaggagagatagtaggaatttgttagagaataagtaggggcagcacagtttatgtgcgcctgtactggactatataaagtccttagtttgtacctaggaagattagcaaagatcaatctaagaagagtattgctccttgccacattctatctcagccgtgcgccaacatggctccctctcgccctcaatcctcaaggcctcgccctactacccactcatacaacctcagaagtcgagatcattagaatctggtatcagatatgtcaggtcatgatgatgaagatagcatggcagccactgccctgcagccgtccctggcgtccatcgccacgacactaggtgaagtccaacgttagctctgcgactttgcctagcagatgtcctccatctcctcccgtgttgcggtcgtcgaggcatgtccatcttcatccacgccggccatcccgcaggacattccctatggcctgccgggctacggcagcatccccaaggtaccgatgaataccaatcatttgccagtcacgacacattctacctccatagcccccttccaatccatcgtctaccccttactcattccacatcaccactaccatcatccccccaccaccggaatattcaggagcaccattctctcgcaaccagcgacaagtgttcctcgctttcatcgactggagttttcattgtttgatggtaaagaagaccccattggatggaccaaca

SEQ ID NO: 63361 - DNA, 500 bp, Zea Mays
cgtggtgaggaatactgcatatagtagtttggacttgagggtatctgatcttggagggcccaaggactttgttgatgaagtacacggggtgctagactgaatgtgcatgccctttttctgtctgctcgactactaatgcgatgcttaccatgtgagtcgtgcataagatgtacaacaacatatctttagctggtcggtcggcgatggctcgtttgggtggttttaggattggcggagtgttcaagattttcttgggtgcctccaatgcttcttgagtttagagggtccactggaatctatccacattcttgagaagtttgtagaatggcaagcctctctaaccgagtcgtgagatgaagcgactcagtgttgccatgcagccagtaagcttctggaccttcttttgtgatcatggcggttccatccttaggatggctttgattttctttgggttggccttgattccctagtgactgacgatgaactcgagtagcttcccg

SEQ ID NO: 63362 - DNA, 316 bp, Zea Mays
aagccaaggtctccaattgactcaatctctacgctttcatataccagctttatagtgcagacccgatacgagttgagctacaccttgcagtacaggattcacctcctcacgacttcgtaatggacaaagccttaaattgctagtcttgtgtaagttggtttcacctataggcatcattgatactaggtcgcctaaagccatgcctctggttggagcattacggtcatgctcccgtgtcttttagtgaatttatttgagattacccacatctcatagactgcgacctcacagtcaaactcacataggtgtattctta

SEQ ID NO: 63363 - DNA, 693 bp, Zea Mays
gaaagcttagcccgagatatattggactgttccctatcttggcccgggtgggcagcttggcttatcgcttgcaattgccggattccatggcaggggtacacccagttttcatgtctctatgctgaggaagttcttgcgggatccggaccatcagattgagatggaaccaattgcggtgcagcaggatctgaccttggagtgtcgtccagtgcgtatcttggaatcctcggagcgtgttttgaggaaaagaacaattaagtatgtcaaggtcttatggactaatcagtctgagcgcgaggctacgtgggaacttgaggagctgatgcgacagaaatatctggaactttttgttgtgggtaagtgttgttgattcattatttttttccttttgtcgttccaatagaagcgtcagaatttgaggtcgaattctttttaagggggtagagtgtgatacccggtttgcaagaggagaagtggaggttattctttttgttctttttcctcattcgggtgatgcactttgggaatttggaatttgtggaaaatattcacctataagacagtagaatttctttggttagttgtttgcgacggggtcgggagctgtcacatgggcgagttgggccttgaaccttgatccgacccattagtctcccctaaccctagccgcccccctttccccttgggattttt

SEQ ID NO: 63364 - DNA, 1534 bp, Zea Mays
gtccaagggcttctcctacctcccggtagccatggacgagggagcagtggccggcgacggcgctccctggccggacctccctcccccacacacggctgcgcaaactcgaatcctatgggtgctacatactgagaagacaaaggcgaacactatgggagggtattaccggcgtataagacgacgcagaggcctagtgacggtgaatggcggcgccgcgtcgatttggagctccaatggacaattcaccggacactgatggccctagcgaccgaggtattgcccgaccacgcacaccggcggcacacctcgaccccacccgcggttctctatgtcgtcggcgaagaggccccggcttctctctctccccaatttctctctcccttccgccgaattacccagcctggtggaggagtagacgccaacgcaggctacggcaagatggccaagggttgagtcgtgatggcttcctacttataccctgaagtctggtttgttcatgggatcgcagcgaactcgatcttggcgggattgagcagtgttcggggtttgttaggcgatgaaggaagtccgagcaggaggaagaccctggcgcgcaggccccacatgtcatcgggcaagtctgttgcagagggaaagggatgaagttgatccatgggccccaccggcagaggcagtagttccgcggcacaatggcacaccgcgtgcgagcgcgcccgtgagtgcgtgggcttgtgtgggccggatgggggagaattggcccacgcgtaagtgactcagagaaaaatataagggcgctgatgggccagtggggtgcgatttagtcttgggccaggcaggaaaatagggcccagatgcggttttggtcccattcctgttttcttttcttttttatgatttctatttcaaattcaaccatgattcatctttgaatttcaagcaaaattctgatgtggacagaaatcatatcttcatatttattcttattactgttactattattatttttattatttatcttcctcctcaccctttatttcaaaaaggaataaaggattatcataattacctttctcaaattctttactatatatatatatatatatatatatatatgtgaattgaggtcaaattaagtcttgattcctttgttcaaacaaaaatgctcatcacaaaatcatcggcatgagatgcatatttctaaactcatttatttgttacgtgaccaatataattccattatttgaatatgcacaaataggagttcaaatgatctccaaggttccataaattctcaaacactaagaataattatatttatttatttattttcctgatacaaattttgggctttacaagaactgtcgctatagatgtgggctaggctaaaacacctaatatttagatcgatctagtccaaaattgcaggatatgtcgtggcccatctgacataccctataactccgcccataaacctaaggctagagagatgggatggttaggagtagccaccctcttatttatatatctactacac

SEQ ID NO: 63365 - DNA, 682 bp, Zea Mays
cttgtgaaaagcacaactcctaaacgatcaggtttatggctgtcaaattttagtacaagcaagataataaggttatctacgattctcctatatggctttcctacagaaaacctgattcagttcatcaaacatacaggacgacgaaaacagtatgcagctcaaaacagcaattaataaaattcagctcctatataattcaagaattgctgcgttttagagacttgacttactctaacttatatcaaggaacacttaagcatagtcacacaatagatggcgtgatggctacgtagtcatgccattatgccaccacacaatctctgtgacaccccagtgtcacctagggtttctcttgtaaaagcccaaccaagaaccattatttcatgtaaatcaaagtaagcatgagcatcaaattaacttaagtaataaagaattcaccaagtatatacttaaaagtgtcatgatcaaaacaaatgagtctttgaaaagataagaatgtgcaaccctaattaagaactctaagtgaaccccatgagcaaaattcaaaaagaataagcaaaagggaatgaaaagtttaaaattttgagttgagccaattatataagttaaagtatatttaataagcaacaagaaagattgagaaagcttagccaaaataattcaagaaaacccccaaatcaaa

SEQ ID NO: 63366 - DNA, 539 bp, Zea Mays
tttttttttcttatacagattttgggtcttacaaatcctaccccccttaacaaaaatctcgtcctcgagatttgtaaggaatgggtgtatatatgtatgtccactttattatgtaggatagaagataggttagggcaagaatagcctaaggtaagaaagtttatggtgagaaagaatttcgtgttgagtggtaatgcatttgaagattgagtttaacttctctccttccttgacgaggttgatcttgtccttcttcgatcttggtctcattgatttgaggttagcgtatatcatctgagttggggaataaggttaagatagaatctgccaaggtgagatagatattgactatatgatgtaggtcaaaagttagtttgatgttaggtggggatgaacagattatgcaatccatcaagactatattggttgggttggtctctcattctttatttagtgtagggtgaactaagttaaaacatgtggagagggtctaatctatttcacaagtattaactggtccattaagtaactcactttag

SEQ ID NO: 63367 - DNA, 575 bp, Zea Mays
ctaaaacgctcaatacaggatattgagtggattagttcgaacgtgggcgacgacggcatgcgtaccttcttggaggtaagtttcttaccagccttcatagtcaattagtttaaacttatgttctacaacatgctattggttcatagcgcttgtctacatgactacatagagtggtcgctcgttgtggttgcagcaacgccatgccacagtacgtacatgtcccatccattggtgtgcctgcgaagggtacctcaacacacacagctgtgatgcctgcatgcgaaggatttgtctatgacaaccttccagacgagattgggccttctcatctcccagatgctccgttggcataaccttcgcaaccataagagtgtaggcgccaccgctcgctgggcagttacactacaggcaccgccgctctatgtaaggctaagactagaaggcattgacggttcatctttgacatctattgtctttggttgaaatggatgcatgaagactttatagagttccatggatatggactgattatgggctttgtgttatggacttgtatgattatttatgatatggac

SEQ ID NO: 63368 - DNA, 1161 bp, Zea Mays
caatgtgattggctacagaatgtgctcacatttgtggacaagggagtgactgttcagctaagaggagatgcgggtcagcagaaggaggttccacaaatttccattctacaagtgaataaatggttgaaaggcaatgaggtttgggctttggttatgctagagcaagtggtggataagaaagaagcaatagtccctgagcagttacaaaggttgctggcagtggcggacgcaaggggtgggcaatgggggccacggccccaccttgatttttataaacttttatacatagacatagatatataataaaataaataaacttttatatagactttgatataataaaatatatcaacttttatatagtaagttagactaaatttaatgaaaattagactttgatctaattttttcttggtgcttcactacttagcccacttctcacctgagtcatggtgctcgtcgccacgtcgagatcctgcacgcagtacaactgctttgccttctaatccgcaccggcggatgggtaggctattagtgggattctaccttggcatcacagcaccacccgccctcgctatctcacaagggtcccatcgcaccgtcgtaacgcgataatggctattgcttgctgccaccgcctttcgtctcatcgtcgccatctaccgtcgcatcgtcgcctaccctcgctatcccatgcctattgtcacctcaccgtcgtcattttgcggtggagtcgctgactctccacaccgacgtgctaatgcgcccgcttcgccctaacgtctagtccccgctagtccacccctttgttctctccaactctcctttagggtggccaaaataaagtttcgatattcatgttattttagaacactactcatactatcacttaatctctaggttattatcatggaactatttttatcaaatggtctagtatattgatttgtctcctacgttatcgcctcacctaaaattttgtcctacgtccgccactggttgctggtggagtttgaggatatttttgctgtccctactggtttgcctccttccagagattatgatcatcatatttctttggtaccaggacatatacctgtgaactcaaggccctacaggtactcaccattgcacaaaacagagatagagaagcaggtctct

SEQ ID NO: 63369 - DNA, 517 bp, Zea Mays
tccggaatggccttagcctggtgggataccttcaatgttgccatcagagatgctacctgggcagagtttgaaacggctttccgagagcaccatgtgccccaagggatcgttcagctcaaggaagatgaattccaggaactaactcaagacggaagatctgtcagtgagtacatgcacaaattcatagagttggcccgctacgcgtcggatgacgtcagcaccgaagtcaagaagatggcccactttttgaaggggcttagaccagaactcaagaccatcctagccagccaagacttcctcagcttctcgcacctctccaacaaagccatgcaagtggaaagggcaaaggaagaagaaaaaggtcatctcaagaggaaattccaagtcctccgagctcagcagcaagaccggcaccagaaaactcgatcctttggatttccacccaagggaccaagcttcattaggccagctggacccactccatcgcggtttagccagcagagtcagagctcctttc

SEQ ID NO: 63370 - DNA, 544 bp, Zea Mays
tgcccgttagctctcgggtgtgccactaatgcatacttaatctggatgctcctctgctcgtagaaatcaaagaactctaagctagtgaagttagatcccaggtctgtgatgatgctgttgggtatcctgaatctgaacattatttcttgaattaacaacactgcttttgctgaagtcagagaggcgattggtttgtactctatccactttgtaaatttgttgatggcgacgagtacatgagtgtaacctcaccgagctttcttgaatgacccgatcgtatctagcccctagtatgcaaatggccaggttatacaaatagtttgcacatgttgggcgggtaagtgttgttgctttgataggaattggcacgcttcgcacttctggactaagtctgctgcatctttctttgttgttagccaatagaaacctgacttgaaagcttctcctaccaaggtctttgatgccgcgtgtattccgcactgcctcgcatgaatttcttccaccagttgtctccccgtagccgagtgaatgcatttcatgagga

SEQ ID NO: 63371 - DNA, 501 bp, Zea Mays
gtttgatgtggggaggtagctctgtccctatgaagaaatgagagaaaaagagggtgaatctggctctgcagtcgaactgaagtagatcaggcagtctgaaaatatctcaggaaaaagatctacatccactagctgtttccagatgacttccgataagtgcagaacaaaaaaaggattcagtcctggtaaaagggggtgttttggacgatttttacagcccaaggggtgttttggattggatcaacctgcagcctgacagcaatgactcgcctgcttgtactgtgttggtttgctgtccatgggaggattgaccacctctgcgatttccctgtgcatctacccctacgtggtggtcatgcaaagtgttatggatcatgttggcacccgttattcctccctgaaagcctcaatgaagccccaagcaagccactaactcctatgccttctcatagtgtgcaaaagttcaaaacctgaactccctcatgttgcgactgtccccat

SEQ ID NO: 63372 - DNA, 533 bp, Zea Mays
ctcttgcggcggaaatgaagaggcgcgctaccgtgtgcggtggttcgctcttcaagtgcgtgcggcgattcgttccttctgcacccgaaatccgactcacaaagtgtatcgcctagggacccggcgccgcttgtgtcgcctagaactgttggatccgctcctccagctctttttctttcttctccgactcgagctcatgctcggccagcatctcgcctcgccgggtcagcatttcctcctagaaggtgagatccgtctcccgcctggcgaggtcagtctcccgcctgtccaaggactgttccttcgctttaagcttctcctcagtaagggcggcgtcgctggccttgccctcgagctcttgctgcaacttttgcagcctctccacagccttggtctgctagacccgctgctcttccagggtctggtccagggcactcagcttggcccggaactctatcgcgagagcctcccactgagacaaggcctcctccctcctggccaccttcttctccctccggtgcgcctccagctcc

SEQ ID NO: 63373 - DNA, 395 bp, Zea Mays
ccgtcggacggtgatgcgtggaaggcatttgacgagtttgatcctgaatttgcaaacgaccctaggagtgtacggcttggtctatcgacggacagattcacacctttcaatagcagtgcaagcccttactcgtgttggcctgtcttgattgtgccatataatcttcctcctgagttggtcaataaagaacagttcatgttccttgcactagtcatcccaggccccgagcatctaggaccaaagctgaatatgtttgttccccctttaattgaagagctgaaacaattgtggagaggtgtgaaggcatatgacagctatactgaaaaggggttcaccatgcgcactgcttatttgtggtcagtgcatgatctactggcgtagtatggagattggtc

SEQ ID NO: 63374 - DNA, 615 bp, Zea Mays
ctctgcagttccatagggtgtgctgcatgtccttgtgatacgggcactaggaatcgaggatctcatccaatgtttgtacccctccacgaggcgcaccgcgggctcgagcagtaagtggcccagcggtatatcctcctcgcgaggtctcttttcccagcgtttgtccagttgttggttcgtgtcacgccatggtgcgggcggcacgtgcttcgcgcctccaatgaggtcctgggcccgctcatccgtgatgatgtagacgtccgcctcccagaacagttgttcggatgtggcaggttctttttgaagtatggcctggacaaaggctgggttgttggatccccgatagaagtcttcaatcacagccgcctcagcgacttcgggaagtatggcccagacaaaggttgggtcgttgagtaaggttcctcatcgtttgaaatcttttgaggaatgattggagagtctcatcattttgccgcctaatggatttgaggtccatggctgcgccagtttattagagagagactggaagtttgtgatagatcggcgactgaagtcactccaatcgtcgatgtagtgttgaggtaggtgtcagagccattgcaacgcatcctgccg

SEQ ID NO: 63375 - DNA, 399 bp, Zea Mays
cctaggggtgctataccaagttggtagggctatagttagagagtatctttgattaatggaggtgggtctgttgttaagggtaattgtgagatccaagggcttaaatagtgaggagtggaatggagcagcagtgctgtttcaattaacttcagagtttggttttagaaactgaacaagatcctctctctgttgtactccagccatgtgctcgagttgggatacatccctgaatatctagggctcgccatactgtaaatatccagggtttggacagttgtgggggctgtgagtagtagagtccttatccattttgttcactgtctctagtacgggacagggggagatatttgtgtatgctgaagagctggcctggtgttgggtgtttgtttgacacgtatg

SEQ ID NO: 63376 - DNA, 1118 bp, Zea Mays
gggggatgaggcttatattactcgaactgaggtgcctgtagtaggggtttacaagcacaacggtagagggaaagtctctaagtccttagagatgactgaggcaagttccaatatctaagacaaagtggaggaatgaatgttcgtctgcgtgttcctctctcttttgccatggagggaccacttccctatttatacatgaaggggagcgtccacagtgaagccgagtgttgtatccggaggagagatgtcctagcgtctacaagccgatgtcatagtgaaatgtgttgttgacttgtgcctgctgatttcgcgtagagagccgaggcgaagtccgagggaatgtctgtacgcccgagccccccgagggataggttgcccatgtcgtagttgatgtaacagcgcaagggtatgggccaaaggctgcttatggggtgcgtcagtgtcctggcataggatggcatcgatattccctgctacgcttatcgagatcagagcccctccttggttgaggcaggagtcttcccgaggtgttagccgagtcgtctcttgacgtgctccatagttgggcggagtgaccatttgcgggattcacggcgtagtaggtggccgaggctgagatccggtgtggcggagtattcacccgagggtcgaacttgaagtcgggcgaggcggagcaatcacccgaaggcttgacccggggttgggcgaggcggagaggttgtgcccgtgggctgaatcctgcttcaggcgacgcagagagattgcgcccgaaggccagtctgctcggcttgtcgtattaggcgtcccattggagggtggcaggcagcatgcacacactgtagtgtagacataatcatgttgttgcgccagacatgatcgtcgtcttgtcagtcactatgctttgttgtcgcagtgtgggttggcacacgcattaaatgcacatgttcccttcatgttttcgggcggccttgtcttatctgcctgagattggttcgggcgagactgatggagcggcggcgacctcgggcaaggcagaatcctgctcaagctgggagactctcggggagatgtctcggtttttataggtagctcggttgtcacccctcgagagtttcgtc

SEQ ID NO: 63377 - DNA, 419 bp, Zea Mays
taagtcgaaggctggtggatgctgaaacaaggtacactttcatcgagaagttatgcttatgcctattttatgcatgcaccaagtgtagatgttatttgctgtctagtcattgcaccatttccggtcaaaccgatgtgaccaactacatgttgcaaaacccgattatgagtggtagaattggtaaatgggcttatgcactcatagaatatgacttggcttatgaaccattgaaatctatgaaaggccaggtcatagcagactttattgtagaacatcggattgatgatactcataaactagacatatcataccctcactgtcactccctggattttatatttcgatggatcagtttgcaatgaaggacaaggaattgacatcgtgcttgtttcaccaagtaatgtctctttcgacttctc

SEQ ID NO: 63378 - DNA, 355 bp, Zea Mays
ggctcctgcctccgcttcacctaggctctccgcggccagtggcgatggcgtgaggcaatttgtcaggacgctgggctcaaagagagcatgatggttattatccacccctggataagtctctacttatttgaagtttcttcagagatgggccttggcgtagacctcctcttgggatgtgacaatggcgcggtgatgtgatggacatggactatcgccaccacgacgagtacgagggtgccgacgaggaggaggatgagtaagtggggccagtagcatggatggtgatgtggatggggacaacgtgttggtggctagtgagggcgaatatagcttcagcgacaatctcgatggcgac

SEQ ID NO: 63379 - DNA, 511 bp, Zea Mays
ttgtcatattattttgtattttctactacctgcagagtaagcgtcacttattctgaatcatgacactgcatcaaaatgacattgcacaatcaccacatatgtatttagaatgaagacactgaaggaaaataacttattatttattcaatggcttatttagaatcatgacactgttgaaaaatacagaaaattccagtaacatttagtatcttattcagaaacatgacagcaactcctattgagaaataatgattgttgtaagccatttcagtgacttacaacctaaaatgatctgtagcagaacacaaactacgactgcctattcctgtaacgccgagcgagaatttcctctttcaataacttatagtactgttttgactcgttgtccattgtgttggtgtttgtttccattattttcagttcatgttgctcccgttctagctctagtctatttttctcaatctccaatagttcatcttcacgagcttttcgatctctttctgtttcaaac

SEQ ID NO: 63380 - DNA, 398 bp, Zea Mays
cattcgcctcgcaatcccaggctatagagcacgaatttacgacccaatctatagccctgtctcgttccacgatctcccgctgcaagggatcaaactctgccgacagttcagcaatacggcggctatctcgcgcatgttccatgtttccatggcgcagttccgacgtgactccttcaactctgacctctagatcccctatgggatcattacttctactactgctcccctcatggtaaggagccaactagtgtcggggcatgcctcgaggtctggtttccttccgttcggtagtcttggtacgtgccatacctccacaagaggggaagacccatttagtatggtttaaacatgatcccctacctcctacgtatactattatttggcactctattacccga

SEQ ID NO: 63381 - DNA, 1334 bp, Zea Mays
cctaaatccaaaccctaggggcctatatgcaaaaacagtgcatatttggactaaagtgtaaaaactatagtattaaggcatactaagtcctttggttcacaaatatgtgaatttgcaagttaaaccttaagttttgggcttatttgcaaaaatcacctcttaagtcctaaatagcctaagtctgaatttcagagttttggctcaactttggggctttgtatctttcaaattctagggttttttccctaggtcaccacataaaagttgtagagcaaacaaaggagaacaattttgcttaagagtgcaagccatgttcttgtgaaaaatctggagataatcatgctcaaaatctggttgtcacgctgttaaggtctgaattttcagactgacagtggactgacatcaacttcaagctcaattctgagcatgatcctgtgactgtttgtggatgcacgatgtatcaaagttggagctggtctattaagctataattttgctgtagagtgttggtcacgttgctatagaaatctgagaggaatttggccctgaacttcgactgtcaggtgcactgaatcagattttgccatggtacagtgacctgataaggatcagaacgccagcgcaaaatgctcaccgccggtgacctcttctccgggattcatgccacgggcgtatggatttcgttcaccgggtaaatatctcgtcgcggatgtgcatgagctactgtggcctcgctgtcccctgccccttttcaccggcgacgtggcctcatggtcgtcaccggagttgtcgtgcttcactgcggctgtgccacgctccaagtcttccaccacgtcgtccctagccgtaacagctcactggtaaccgctgtagctcctcaaccggtgatcaccggaggaagcgccacggtgaaagccacccatcccttgctccagtatccctgttccccccggccgccagcacgaccttgcgaaattggacaccaccgtcgatgggacctataaattgagccccccctcggcttcgccatgtatcccagcagctaccgcacccacctgcatcccaaatcccccactagcgagcacaaattttggattctccccaaaccggttctagaacaccgtgaactcaatctcgtcgtggccagcctgttctggtaaaactctgcccaattcaaccttgtttaagtgctcttgtatgcctgtgatgcccatcgacccacttaattgcacggagtagactctggtcgccgggaacacgacggtatagccgttatgctcacggtcaccgtggccagagcaagccattgggccatagatgaaattaggttgggg

SEQ ID NO: 63382 - DNA, 451 bp, Zea Mays
tcctaattcaacaccgaagaagtgtttccccttgatcaattgcactagcagagctctaaatcatcctgcccacggagacaacgcgaacaacggatgaacacgggtgttttcaacgacctggtgcagcttagctcaattgaatgggtcaaggagcatcaggagaacctaaggacactgaaacgggagagcagagagcatgaacagacctgggagtagctggccacggagcgcggaggatatttgttcgctggtgatagaaaaggggaaaacgacgtcgcgacggttccaggtggaattaggaggtgaggttggggctacatggtcgcaaaggactatggtttcaccgtacacaaccaattttgggagaggtggagaggatttcacggatttgtgcttcaaccgagttcactggtgaagatgtgaatacctcgccgtgggtggtggggctatt

SEQ ID NO: 63383 - DNA, 684 bp, Zea Mays
acgacacccagtgaggataggacgagtagtggtcacttgttgcatacgtcctgttcgttcctaacaagcaacctctctcgcctatggatcgcctgcaggggccaagctagacatgtcgtacgtacgtagcaaataaagggccgagagcatgccacaaacagacacacactgacgtggctctcgagtggcttctaggccatatggtttccaggcctgctgcacaagggaacacattcagacgtacgcaagtgactgatgaccaatatatatatacacccaccaaatgcacatgcatgctgttgtagtccagaccacacactacaattaatacatagggactacgtacatacgcttagcacaatccagatcatagtatatatatggaactaatacttgttatacatgcatgtgggggaaatacatctcccgatgataatatcttcttgcccacgaaaacatatacaacgtgattggttgccctaacgagtgcatccaggtccattgcatcccgttgaccatgctgcagccgttgattggtttcctgtatacagggaggatatatagcttgtacgcgcagatacaactcaggcaaaaaaaacacatatcggctgcatgcgtagagatacggagacagagcttcgctagccgtgcagggcgacgcgagccgggctccctccagccaag

SEQ ID NO: 63384 - DNA, 938 bp, Zea Mays
gagaaggcccatctgcaggcaaggggcgagcagtcttgaaccacaactgcggggggaattcctaagcgacgtctgcaaacttactggggaaggtaagaaaatctcttttacaattttgtctaggaaatccgaatatttggcagatattgcctaaaaaagagttggtcctgttggaatgagaatcatccgacacagtagcagaggcagcattaatgctgagggcagatttattcataacggtatcctggcgacgattcagtatcttcttgggccgccaaattaatttccacgaggcccaaggacgcgctcgagaactcctcaaagaataccaaaggttaggccttacaatgtggccggaactaagatttgaatgattttgaaaagaagtacgtctagcaatctgctcatgagagtatgaacgagtggccggctgatcaacacgatgacgagcagggaaagagatccgattgaacaccgagaaacgtggctgcaaacgcccagccccgacgagaccacctagggggaccaaattcgcaccagacagaactggcgagcgaacaatatcagcaaatgaagctttctgagtgcaaccacgggaaaccagagtccaagagcatgattcttcatccgagaagagctgccattctttgatccaattagggccaccataattccaaagatggagataagctttgaaagatgaacagttaaatgaatggcgcctataaactgcaaagcccacttccttgcaggaaagcgaaaatcgaaaaacccggtctgacagctgaagagtcctgaaaagctttgcagaaccaccaatgaaggattgaagcagaagacccaccgactcttcacacaaacgcgaacagcacctgccgaaagaaacgacaagaaagaactcatggcggttgaaagtgcccggaagcaagttaaccggg

SEQ ID NO: 63385 - DNA, 1341 bp, Zea Mays
caaagatgggctgtcagactgcttggagtctgaaattcaaactgacagtggaactgcctgaacttagggctcgaattcaatcatgatccagtgggaatttgactagggatgctatagcaaaagtgaagatggtttgtagggctacaactttgctgcaaagcattggttgtgtttccatgaaaaattgggagaaaatctgtcctgaacatcgactgtcaagctgtctactgaaacgtcccatggtacagtagctgaatcagatcctgaatgcatccccctcgccgccggtgatctttacgccatgattcacaccgtcggcgcgattcgtgttcgctggtaagaggataaccatgatggagtaaaaatcttggcactggatcagctcgggctcgggcgcagatgacattcaccgtacccacttgctcgtcgtgcgaccgggatagatttcaccgccgttgatcgctcaccgttgtgcgccacgtgcttaagcgctagcccacgtcacggtgaatcatggtatgcatgtccggtgatcgccggagggctgccacggtgaaagccactcgtcccgagcgccagtacctctttttccctccggccgccaacacatcctcatgaaattggacgccaccgccgttggaggctataaattgccgcccccgtccgctccgctaggtaattgcgcaaccagtgaagcaactcgtgcctcaaatcctcccctagaactccccaatttaggatttcccccagatccctcaagaacaccgtgccttgggaccttgccgtggctagtccaattcaggtccgatcctaccctctgctttcttatttctgcacccttgcttgttcctgatgctcactgacccgttcaattgagctgagctatcatagatcaccgggaatgcattagaatgtctgttgtccatacggtcaccatggtcagggcgtgttagtgcaccattagtgaaattaattgaggggaaactttggttaaggcttgaattaggtgccagtcgacggagagtgctggtctttgcgtaatccagtcggtacaagctcgtcggagctctgcacgtcgtcgtccaccgttgtgggcttcagagtgtgaagaattagaagttcaggggtctaaccgtaaactttcagcgactcaaggaatagtgatgtgaccccgcttcagattattcaaaaggacagggcctttctgcaaaacctacagcgcgggcacgcacgtgggcgcgcttctgccctagctgggccggttcgggccggattcagcccagaactattcatcattttcctttttctttttctattagactttggaaatctataagaaat

SEQ ID NO: 63386 - DNA, 587 bp, Zea Mays
cgagtgtttaagagaggagcgactgttggatcacgctgaacaggtaaccatgactccactagcacgtgatggaaatgttgaaccctggcagctatgactctctgaagatcgaacaatcaagggtccgcaacaagaggttgcacctcagtctcgtcacgctctcggaaacgaggtggaggaataggtggagtggaagagtgagcgagagtagtggaagcaggtgtggtggaggctaggggcgcaataggtgtggtggaaggctcaagagtggcggaagctgtcgtagtggaggaaggtggagtggtagtggtgactggggctgatgggtcaaagcgagcaggagtggagcgagtccgagacgagaggcgacagaccctgaaggcaatctgatcagaagcaatccttagctcacctccctgctctacctaatttgttgttgttgctattgttgcatgagtggctctgtccaatttcctcttcttcttgcctcccttctgctcaaggtacacatccttgcccttgtcttgtctaaagggggtggagggtcctggtcgtcttctccccgtaacagtgtaatattcttcgtc

SEQ ID NO: 63387 - DNA, 720 bp, Zea Mays
tgagtaacacctagggtgttacagtattcttgcactagatccctggtgctgatttgttcagccaccactctgaattctgctatggccagctggcatggtgaccctggcttcatgttgcacaagggtctggtcatcccgaagcttaaagacagtgggataatgaccatcgtcttcagtttctccctcttcttctcatcggcctcgatataaaaccactcactcttctagccggttggccacttggtgcgatagctgaggacgagagccttcgtatccttgcgatacgcgaaattatagcagccaaaatttttgtgtagcccgtctgctctggccttcgtttgatagtgcaactcatgcactcggcaaaatgctttgacatttgggttcatcccttggcttcgaagggcctagatgaagatgctgagcctaacgatagcattaggggtcagctgatgaagatagatttcataattatccaaaacttctccaatcatcttgttcagcggaaaccgtaatcctgctctgaaaaagcttttgaaaactactacttcatcatattttggcgatggagtggtttcttccccgacaaaacgaataagcttcttctcagcttctccgaagtagcccagtttcatcatcatgggcacgtcggcttcagacacagtagatttctcaaaatctaggtggctgggttttgatgggatcaaaatgctataatct

SEQ ID NO: 63388 - DNA, 333 bp, Zea Mays
gcgggagaggggaaggccccaagtcccagaatgtgattgaggcaagtgccaatatcgaaatctaggagaagactaccaagtgttcgcccctcccctagaggggccatgggctaccctatttatacgtctaaggggagcttggccttgttgatgggggctgcttctctgctgtggaggatgcctttgcgtattgatgacaacatggcctttgtactttattgttgactttgagcctgtttgtttcccgctgagagccgaggccgagggctcggtcgtatacccgagcccccctgggcaggggttgcccataccgtagtggttgacataatgttt

SEQ ID NO: 63389 - DNA, 327 bp, Zea Mays
ggaaagggttgagcaccggaatgaggaggaaatgaccttgtctctgaatgccatgaatggtactgacacttcaaagtgtatcaggcttagggcaatggttaagaaccataccattttgcagttgcttgattcagggagctccaatacttttatcagtgagatagctctagctaaaatgggttgtaaggtccaggaaatacaaccattagatgtgaaggtagccaatggacaggctatcaggtgtgaaaagagagctttgcagctggaatggtgctgttgtggaaagactttttgtgctgatgcttatgtgctccctgtcactgcctt

SEQ ID NO: 63390 - DNA, 418 bp, Zea Mays
acaagatgtaggttacaagtttgttttaggtgggggttgatagactatgcaatccatcattactctattggttgggttgttatgcaacttgttatataggtcaagttgttggatatggccgagttgatctaggtcaccaatttaggtttaagtgaattttggagtatagccttatcctttgtatcagcattaagtatctcaatctagcttagatcatactggattagatagaatccagattaggttggtatgactagattaaactagttaagattagctagatctaccagggtaggataaatattattgggatatgttagaatcttttaagataggatggattatatgatataggtaggccattgttcaaggatgagttggtataagacattaatttaggttaagatatatttgtaga

SEQ ID NO: 63391 - DNA, 632 bp, Zea Mays
gacaagatgaagaaggtcggactcagaaacaacagacatgtggttacctgcgaaaggcaactggctgttgggatcgatgagaggaatagtcgcggcagatgaactctagttcttccgcttgggcgccatctcaatctcgttggcgaactgagcggaagcaagattacaaggaagcagagaaggtatggatgcagaaaagcagggctagggctcagaatgcagaggcatgcgacggcacagtacaaatggggctttcccgggccagatgccatttctaaaaagtgcccagtcatcactcggtcgttgtttccataaacgccgacattgcccaatacaactcagctgttatttctaaaacgctgaagtgccaagtcatcactcggctgttatttccaaaacggtcggcgtggcccaatgtaactcagctgttatttctaaaacgctgacgttaccagtcttcactcggtcgttatatctaaaaaaccgacgtggcccgttatcactcggttgttatttctaaaaccctgacgtcgcaagtaatcactcggccgttatttctaaaacgacaacgtgcctcaaaaggactcggctgttacctctaaaacaccggcatcgcaaaaagaaccactcgg

SEQ ID NO: 63392 - DNA, 902 bp, Zea Mays
tttcccctcaatcaatttcaccagcgggtctttgaatcaaccggtttatggcgacagtgcggatgatcggatggataaacgcgtttcgaacaaccgacagcatggatgaccaaattaaagcttggggaagcttcacgggttcaccagaggttatgtacacgctagaatttggactaggcaagagtagaaaagtgggtcgacagggagggtgtcgcggcggtgttctacggagcagaggagtgttccggtgatggggctctggcaaacttcaattggtcggttccaagagcaatagaaggttgaagacaagctaaaacagaacgcaatttggtaggtactaacccgacgagcgctggccacggaggagtccttcacggcaacgcgaagaacagggcggaatggatttgtggactgtgtaagctcttctggtgaaattgagttgattgctcaagtgcttgtgtgcgtgatgtggtgaagaagcagggtctgggctcaatctataggccgatggccggagttggatgagatttacggcggtgtaaccgcgctggcgagctcacccacgcggacagagccacatcgatggtctggtggccgccgacttaccgcgcaacgccacctcaacgttttgacgccacgccacggaagatctttaccgtggccatagacccatcccctagccgcggtggcaatcttatcgccggcgagatctttctgaagtccgatgaacagtgcgccaggtttcagttaaaaaaatcgcctgacagcccatctttggatcaagttatctccaaattcctcatggcaccaagacttaatacctgtagcaaagttgttcttctacaatggctctacaactttgttacattgacccagggaaaaatccttatggtttggaagtt

SEQ ID NO: 63393 - DNA, 306 bp, Zea Mays
catgcttgcgaagctcacggtggcgtctgtttgctctattcgaccatggtttggcgggaacatgtgctcacaaactcggtgtccgccacgatcgtgggcagacggctcccagaggggttcctgtccaattaacggttgttcatagatcgtcttaggtcggtaaagcctccccgatagttagcttgagcaatcatcgccggccaaggccggtatgaaccacggcagggatgaacaatgagcgcgtcgcggtcggggagctccttggagaagaaatagaaatcgaggggcttatctgcaagttgtcag

SEQ ID NO: 63394 - DNA, 356 bp, Zea Mays
tgatgatgaggacctggggatcccgccaccgcctcctgtgccacctcgctcccatgatcacgaggctgatattacagtgctgctcctcctgcccctccagctattgaccctgccctggctactattcttcattctcttactcagcagcaggctcatctagcagtagagtaggcccgacaggtagctattcagcagcagatgtccgagcggatgttatcgatgtctcagactattcagcaccgccaggacaccctacatcatcagctcttagcaaacagggtagagcactaggcattcatgatgcatattctccagcataccggtgttcagcttccaccagtgcagtctgctccccc

SEQ ID NO: 63395 - DNA, 528 bp, Zea Mays
cttgatttcgattttttttaatgttaaccttcaattgatttagtcgttagtgttatgttgttataagcaatgatcaatattagaatagattaatctctactcttttaacacaacaatttcttgcatctcgtgttgggtggaatttcatgtgtcatctacatccttcgcctaatccatctgtgtcctctgcctcttgcgcctacgcaactcgcgctgccgacgcttatccatacgcgccctttctcccccccatccaggcatagtggttggccacctgcagcggcagcgcatcaaccactctgccctatcttctcttccacatcatatatatatatcaattcaccatggcccgactctcctctcagctcgctcgatcgcataccaaacccctgccccactacacaacaccactcaccaccacaccacgctcgccgaatctgatgtgaagctagcacgatggccgctctcgccgccgcagccaccagttccaatggccgacgtcagccaagtcgcacgtagggactgtgc

SEQ ID NO: 63396 - DNA, 459 bp, Zea Mays
ggggaagttttgaataattatgaaatttatcttcatcagctgactcctaacgctatcggtaggctcaacatcttcatttggcccttcgaagccatggaatggatccaaatgctgaagccttctgccgagtacatgagctacattatcagacgaaggccagagaagatgggcttcatgagaattttggctgttacaacttcgcttaccgcaaggatatgaaggccccggtgctaagctaccgcaccaagtggccaactagctggaaaagtaagtggttctatgttaaagctgatgagaagaaaagggagaagctgaagacgttaatactgagcccgctgagtttgagctacgggttgactaggcccttgtgtcgtatgtcgtcggggtcaccatgccaacaggctgtggcagaaatcagagttgtgtctgagcagatcggcactagagatctagtgcaag

SEQ ID NO: 63397 - DNA, 316 bp, Zea Mays
gtcttatctttccaatgagtacttatgcgcttgatttggaattatattttaaaagttatcgctgtttgaatccgggtatgttgctgtccaaaaaacagatttttcaggtgggtgaacagcagtagtattagccgtttctgggaatttttcgtgggtaattagtgataaccagtatgataatcatgtagggatttgtcttatctttccaatgagtatttatgcgcttgatttggaattatattttgaaagttatcgctgtttgaatccgggtatgtcgctgtccaaaagagaaaaaaaacagattacagggtttatc

SEQ ID NO: 63398 - DNA, 491 bp, Zea Mays
caaaggtgttgaggccttgggactagacaaagaatttgtgtaggttatccacattccccgagtgctctaagtcttcgtcggatggtgaagtgagcatgtaggcgtttggggatgttttggtcctgacgatgtagggcccctcccatttgggttcaagattgccccaagactctattctggtagttttagtgaggactaagtctccttcctggaactctctggggatgatggtgttgttgcgccatgtcttcgcctgcgcttggtatttgttcagtgcctctagggcgaggacacggtctccatcgatgaggtccttagaggttggctcgtcgacgtcaagagtggatgtggggcttgctcatggggatccatgctttagctcttgcgacgtcattgcttcagatctatacatcaagcggaaaggtgtgaacctgatcgctctagattttgttgtgttcagtgcccatacaactttgggaagttggtccgcc

SEQ ID NO: 63399 - DNA, 357 bp, Zea Mays
ttggacataccatgttgatcatagaacgttgagcatatggctaaagcttgagcagcactagatcacatgcttggaattgtctttctgtcctgaacctgtcagtctgcatcttcatcctgttctaagcaccagctaactgttctttcaaaatgttggtgaaagcaggcctctcagctaacagttgtgccacatcagtctcaatattaaccgggatcagaggagcggcatcaaatgggagggtcatacccatacaagactttgaaaggagaacatcctagtgaagagtgataagatgcattataccaaaactcagcaagggttaaccaaaatttccatttgtggggctaagcattcaca

SEQ ID NO: 63400 - DNA, 349 bp, Zea Mays
catggagtactggtaccaaacatgcattctgaagtttgtctttgtagctcggtcatacgtccataccccttcctcccaggaacgtaccaattcatcgatcaaaggctccatgtacacgcccattttatttcccgggtgtctgggaattatcaacgacacgaatatgttctgccttcgaaagcacacaccagggggagattgattgggataacaaacacgggccaacatgtgtacggggcaacgctcattccatagggattgaacccatctgtggccagcgcaacacgtacattacgagcctcttcggctttctcacggtgaatggcatcaaagtgtttccatgcttcac

SEQ ID NO: 63401 - DNA, 864 bp, Zea Mays
ccccgccatgcgccgggtggtgcaagacttcgtccgcagctgtgcaacttgccagcacaacaaatcggagcatctacatccggcgggactgctgctgcccctgcccattccacaggccgtgtggaccgacatcggtctggacttcatcgaagctttgccccgtgtggggggcaagtcggtgatcctcaccgtggtggaccgttttagcaaatattgccatttcattccgctggcgcacccttacagtgccgagtccgtggcacaagcgttcttcaaagagattgttcgcctccatgggatgcctcaatccatggtgtcggacagggattccgtgttcacttcgacatttgggcaggagttgatgaggctctccggggccaaactacatatgacgtccaccttccacccacagtcggacggccaaacagaggcagccaacaaagtcatcgtcatgtatcttcggtgcttcacaggggaccgacccaagcagtggctgcgctggctgccatgggcggagtacatctacaacactgcgtaccaatcatcacttcgggacacccccttcaaggtagtgtatggcagggaccctccatctatccggtcctatgaaccgggcgagatgcgggtggctgcgatggccaagaccatggctgctcgggaggaactcctcgctgacgtccgcatgcggctggaacaagctcaagccatccagaagaagttctatgacaagctgcaccgaccggtctcctatgccgtgggcgactgggtgcttctacgcctccgacagcgcgctgcatcttcactaccgcagctgtccaagggcaagctcaaaccacggttcgtcgggccatatcgcatcatcga

SEQ ID NO: 63402 - DNA, 358 bp, Zea Mays
cggttttgaccggcactatgttgtgcaagctattattggtatcaacattttgatatgcaacagtgaacgttggggctctagttgactagtgcagatgattcggtgaatgtacctcgtcattcagttgttctacgtgaatatgcatgaggatctagtcctcacgaaccacgatcgttgtcttggtcgtagccacagaactaagcctaagacagtgaatccaaaaagggaacgcgtgtcgcgtgttctcttttttgatcaagatacaaggacgtcatgaactcacaccactacacgctacacttgtgtgttctcttttttgatccgggtacaacaacgtcacgaacacacaccactacac

SEQ ID NO: 63403 - DNA, 272 bp, Zea Mays
gatagagtggcggagcccgcgaaaacagtccaggtgcgcaagatagcttgtgtccgtaggttacgaaggtatacaaattattcgatacaaactacataaaaacaaacaatacatattatcattaactacgaacctatctattggcatgaacactaagcatgacattaatctcaaacaaatatgatgaatactataccgttgatattttacaatacatgatcacaatttttctccactttcagaggcaagtatagcacgactatagtaaaaac

SEQ ID NO: 63404 - DNA, 325 bp, Zea Mays
gcactgctacatccagagagaaggtggtacatgacacttgctggtttttgcagaaaagttactccgacacatatagcgatccaatttgcacatgcttggacatttttacacacgtgctcattgtacgtgttggcaatgcaggtgaggaaataatggcgaggtgcacccgcgcatacatgcagcatgggattcaatttggctacgaccggatataggaggttggcaccataaatcatggcaccgagctcagccacataagtgctagcgcagcagaaaagtccagcgcaccaggtacctcggcgtcataggttatggcgacgagctg

SEQ ID NO: 63405 - DNA, 379 bp, Zea Mays
cctatctggtctcgcttcggccttcggaggccgaaggtgacaatcgatcagaatgacgaagcatgccagaaggcttttagcaatgtttgcgccttcatcggtacaagggatatagttcaagagcacatagcgtacataatatggccacttgtagaatactgggatatgccgatggatactaccgctgagtcaactgaaggtgggttggttcgattgaaatacaccttcaggttcagagaccagtttgatgagccaaatgacaattggctaaaaagtattgaggctattagcgacgaactacttggagcatatagcagggctgaagatgatgccttgtccgcagccttcgggggccgagggaagaaaagattaaacagag

SEQ ID NO: 63406 - DNA, 633 bp, Zea Mays
gggcttcagaagaagacttcagcctaggcatgtcagaacaatccacaaccccaacacaaatgatgacaaggcaaaccacactcaaggcaaccaacaaagctcacaatctttaggaatgtagcaaacctcttacaggccaccagctccacggggtagaggaggaagaagctttggaggaagattcagcactcaacccaggagattgttttgtttattctgtggggaggataagggacatacaacaaggacgtgccaagtcacgatccaaaagcaaaaggagatagttgaagccaaagcacgacagaattagccgaagtaggtcttgcatactgcctcatgctattcgccatatatccctaagtatgtgggcaaccagcaacccacgacatcatttgctttggcaagtcattctcaagtggcatgggctcatttaccaccaccaccattggcacctaccttggatcataatcagtagctagaagggcatcgccaagcgccacaacagcgtgacactcgagaggagtccaaagctcgcacaatcaacaacactgtgcctgaatcgagacatatttactaaagcaacataggggctcgactagaaagtttccaatttaaatgtatttttactttttt

SEQ ID NO: 63407 - DNA, 1026 bp, Zea Mays
gttttattatttagtattgaaacctaatgtttatatttttataagagtataaatgaagtaaaagtttatttttgttttaaaaaatatttgtcaaagttatattttttaaaaccgtgtcgatgttctaaacgacaactaataggataccgaaatgaatacttaatatctgcgccattcatttttagttttttttaaaaaaataggaatgggaaaataaaaccgtatcaaatctcttgattacggcaggcagagagcgagcgagcgtcaccttgcttcttttatttttccgtctccttcatttccgttatgcaatgaccctggcgcgcggttagaaccggcaatgatactgacaataccaacacacgtacgctgctgtcgcagggatggaatgcacgcagtacgctgtacgtataggtgagatatatatagcacatgaaggcatggaccaggcatgcatgcgtggtccatatgacgatatacgtgaagccggccgacgtacggtacgtacgtactatacctgtgaacagcccttagcctccaacgcccctgccgtctccggcagcagccagtatatggcaggcagggagcggattacaccggtgctcttctgatagtgataactaattaaatggtactgtaatactactaacagctggtagtaaaaaccatgttgtacgtgcactgataatccgtaaagaccaaaaaggtggcagtacgacggattcagcttaactctgcattacccgctggctagcttttttgagatgatgatggtcaagatttgcagagagctcgtagtaatcatcgggagcagtaattatgtgtaatggcctctctaccaacttccgccaggacgcacacgtatacggcgtctgccgcgcacttccggccggccgcggctattgtgcgtgtttgagtacgatttacgcatccggccggccggcctgcctctagcttatccgcgaccaaacaaacaatcagatcattattactgtgggtttaaaacaagtggcatttgaatttatc

SEQ ID NO: 63408 - DNA, 410 bp, Zea Mays
ccgcaattgatcatcgtctcctgccttcatgagtgagtctgggtaaagctagctattggtgtttctagaactaaccacattttattcctgcaatagtgatgggtggagatgaagaaagcgggggcagatgattaggcagagaggaggcataaaaaataaattgtgaaaaatggtttctagataaagactcgtagaacatagagacgtgagtgtccagaggccattactgatttctacattgagcatgttgcgcaccacaatgttgggggctcaccaagtccgatgcacggtaccgagggtccctttttgcatagccttttgccatggatccaaatataaaaatgccatagaaacggggcagaaatttgcctcagatgtagtcacgtagaggccacatgagcaagcttgtt

SEQ ID NO: 63409 - DNA, 623 bp, Zea Mays
ggctgaccagggtatgtaaatgagccgagccgtacgcaccgaatgggtcgagccagacggtacgaatggtggaatgcatttatgcaagaataaatgttgggcaaaaaatgcgtaacagaacgtgggccgatgacgtggcacctgagtattatggaggcggatctaaatagtgatttacgacagcataagacctacgtcgaacttgcataaattgctgttacgcccacgatcctataatgtagcatatacgcacgcgaactcgccgtgattatcgcgtccacgataatggatatgtgcatgggcaaaaaggaaaggatcccacacttccagaaaagttagataacaagaatcatttgttagggtgcgcctggctgaaggaagtaaccggagctggaagatggcggcgccatggggtaaagagccaatcagagagtacacgacgccgaaatcagttcatcgatcaaatccatgcttggatatcgtaccaatggtgcaggaagatcaactaggagggaaccagtttgcctcagatgcaagtgcacatatgcaaacagctactgccgtaagggcaattactccaccagtagcattgagggcgccgggggttgatgatcagaacacat

SEQ ID NO: 63410 - DNA, 737 bp, Zea Mays
tccgagttccgacgacatcgcccatatccagagttccagacacacgcggctgtcgtactctgctgtatacactgcacgtctgcacggctccgaggactatatattggcacttgctacgattgatgatagaagaccgcaggcacttcgttattactactactacagatacatacaccgacagcgcagagagccggcagtaatagactaatagttgcgctgaaatcacacctctttcttgattggctgtatatgacccggccggcctgctgatttcaacgctgctgaatgctgacactgtgcacatacagatacagctgcacgacgtacgcgcgatagatcctgcacataatgtgcggacactgttccgaattttctcgcctcactgtgcttgcatgaaaatatggttggcagagtacgtaggagaggccggtgctagctagctagctagctagcattgaatcgtcgatgatagccaccttgacaattttctgaagttgcaagtagcagcccatctatctatctatctatgctactatatatgacaacgacagatgatagcgacggtgtgtatacggaccaggagttgttgtttagctagcctgcgtacaagcaaaggtttaaagcaactatatagtccgctgctggtatgttgtaatggcgggtatgcacttagctttgttcgtggtaaactggtttggtcatgattaggaagaactgagaagaggccccatgtcgac

SEQ ID NO: 63411 - DNA, 582 bp, Zea Mays
ttaatcgtctaaagcgcttccttgagaaccgggtcggcttctgggttgtagggctccagtgggggagaaagttcagctacatcataaaatgtctttgttacttctgaagatgtaaacggattatgaggctaaacctcgataaaagtacctataagcctcgcatgctcagcagcttcttcatctcttttggcctcctcttgagcgtcatgagattttttttcattctttccaatagcttcatcagctatctcacgaccgcccttcatccatacctcggagtaaaatttcccgcctagtgcagaagcttcggctgaagggtttttaatgtcatcggctaagaaaacaaattctggctgaactacagccttggcatgttcgcaaccagccttctccaaaatggacgtggccccccacgcaccagcaaaggtgcagaaatcttgtcggtcatttagaatttcgtcaaaagctttggcttccccgctgatccactggacaactcaatcaggatcgccgcggatgaatctctgctcagaggaatatgccccaaccctagcaaagatgtcctttaatttcctggcgctt

SEQ ID NO: 63412 - DNA, 1054 bp, Zea Mays
tattctaggaatgtagtagataactaggggcataatagtatttagggaccttatacccctcttggttacctataaatactcctaccctatacacagatgggacacagataacaaagctctatagttctctgcttgctgtctcattgtgcacctaatcccacttgtctcctgagtgttgggcccacgtgaccacatgtcaagatagttccaacattgagacacctgaatcttgagactggttggcatagtctgcggcagtgtggtgcctgaccgtggtttggttatgatcataggcagagccatagtaggctcgaccgagtgttctctccaaatcgtggtggaggttgcatgcttcgtggcttcttgccccacaccggcgatgcagtgcaggatcctgcttttattggcgatgcaggtaaatgactcgtagtgaaatgtttcacttgacgtgaagtcgaaggcattggtgaagacgatggccatggagctaatctgtgtcgatgcctacctggcgtgtcggcggtcgatgtttagcactagcaatgcactatgggaggcttcacgcagtactttgtgattaaggacatcgactttttgcttgatggttcgtgcggtgcatgacgaaatgcaaagatcacggagatttatactggttcgggccacgaaaatgcgtagtaccctatgtcttgtgtgctactaaggtggaattgatctcgggtttgaggttacaatatggtgaagtctcagctttagatattcctaacagaggattcaatcatcttgttggggtccctactccgccttatatagacgacagagttagagtttacattgttgagctcgttgctataatccaccctacatacatggaactgtctgactcatattgtatcgtgtaaatcctctatgaagctttatcttatccctacctgaatgatagttggttgctatgctttaggtccagacgtacggattcccatgtctcgttttggccaggtccgactaattggcctatgttgtttactctgcccggcccatggaggcccttttaatg

SEQ ID NO: 63413 - DNA, 595 bp, Zea Mays
gcatgagcatgtcgcaccgacttaaggcgttcctgacttaagtcgatttctctgttagtagggtatagtgatcaccctaagacaagtaggcgtgagcatgtcacactgacttaaggcattcccgacttaagccgattgctccgttagtaggatatagtgatcacccttagtcaagtaggcatgagcatgtcgcaccgacttaaggcgttcccgacttaagctgattgctccgttagtagggtatagtgatcacccttagtcatgtcatgccgatttcaagtcgagcccaatctaagtcagttgtcaatcaagagcttgaacgcctttggaaaatgaaagctttattgatggtgaaaccttctggttacagagtacaactttttcgagagttttgaggcatcgctaagggtagaactttctgaggtgctcaatgttccatgtgttccccacttctgtgttgtccatctgagtaagccgatatgatcccgaccgtgtgacctctactaagatgaatggtccttcccatggtggtgacaacttgtgtcgcccctcccccgttagaactcggcggaggaccaagtctcccacttcaaag

SEQ ID NO: 63414 - DNA, 274 bp, Zea Mays
gtcgtgagcagcgaggaagaaggcagggagtatggctggtggcggctagggaaaaaatggagggtgggagtgcaaaatagcccaagtgcaaggaaatggcacccctatttatagaagatggctagggttagggtttccttagtgggccaaatgggccgaaatggacttggcccaaaacgctaagtcgtgccgcgctgaattatttccagagtaaaaatgctcctgcggaattcgtcgctacggaaaaatagagcgaaatagagttcgaacgaac

SEQ ID NO: 63415 - DNA, 362 bp, Zea Mays
gtttttactaatttcctgattccctggtctgagcacgaattatagagaaactcggggttaaaccataaaattctcccagactcagtctacacccccccttggacggcgggttgattttcactttggccacagactctttagcaaattgcatccacgaaggggtatgcatcaattctggctgttggattagatttggaaacgctagattagatctgccaaactgaagtattcccatgccatcccagccacctgtggcaggatcaatgggcgatcggccacctgaccacgcaccccatccggaaccttggatctccaatcgacggtcacgagtgaacgtggccgaatcggtatcaggatctaat

SEQ ID NO: 63416 - DNA, 665 bp, Zea Mays
ggctttacatgacagcccagtaggaggacactcggggtttcctgttacatatcgcaggatcaaacaattattttcctggccatcaatgaaagcaataatcagagcatatgtgacatcctgtacaatatgccaacagtccaaaccaaaccgaaataaatatcctggacttttgcaaccgttgccagttcctggtcaggcttgggaagtgatcaatatagattttgtggaaggtcctcctcggtcgggcagtgctaacactattatggtggtggtggacacattttcgaagtatgctcactttgttccattattacacccattttctgctttgaaggtggctcagctcttcattgatgcggtgtacaagttacatggtcttcctcaagctattgtgtcggaccgagatcgcattttcacaagtaagctttggcaggagcttttctgtttggctagtaccacattgaagatgagttccttgtatcatccacaaaccgacggacaaacggaacgagtcaatcaatgtttggagacttttcttcacagttttgttcatgcgtgtccatccaaatggtctggttggttgtcagtggcagagtattggtataacaccagttttcattcctcacttgggcgttccccttttgaggttttatatggacacactc

SEQ ID NO: 63417 - DNA, 602 bp, Zea Mays
cctgtagaaatagaactagcggtggataaccgaatccgcatgtaaaaattagatcccaccataggttttgagcttttttctactagtgtcatactcctcatacggtcaatcagcgatactcatacgtggatagtaattcaaacataattgagatcacgagaatgtttattggacagatggttaggtcaagaaataaacgtactatttgctctaattcggggccaaacaatatgagtgtatcatctgccggtgctgtctatgaaggcgtggacgacccgtggctagggccgaacggtccgcgatcttgctgcaggagcgagtctcctttgtgtcgtcgtgcaccggggccagattgtccacgaccacgctgtaggagcgagtctcctctgtgtcaccgtgcacagtggtcggacggtctgcgatagtgcatggtcgctttcctcatcacaaaaacctagatctcactcctagggggagatatcttaaggcgctccggggtcggcaagccacccagggcttcctcggatggcgtagagtcatcttgggttaagaaattaggctgaggaagagacataaaggtattcaccctcctagcagataac

SEQ ID NO: 63418 - DNA, 708 bp, Zea Mays
tttcaccctatatataccacttttgcgccacataagcaatctctctccccctatacacctcttactgcaacgtttcgcctatatttttctcctataccccactctatgtcacacgtgcatttcatcgagcgcattggaggcacggaagaaggcctcctgcacaacgagggggatgtcactatgcttggtgatgcagcgggtggccctcaacgattggcgtctcctggaacgagtcggtaaaaatcacgcgtgcgggcttgctctggtcgccaggggctagccactagagcctctccagcgaaggccgacaccctagccccaacaccaccaacaggggcggagggcccagtgtggctcggtattgccccagcaataccttagcctaacccaacaacggaccagcagtaaaacaaatcccaaccctagccggctatttcctgttcactccgaaggaggcgcaagccacgactgtcaacgcctaccaatccacacgaccacaaccgcccccagcctaaggtccgagctccgtcagtcgtgtgctggtggcccgaccacaatattcatgacgacgcacctcctcccatcggtccagaccatccgcctgcattgagatccttcccgcagccaagctcctccccgacaactacgtcgtgctgagctcgtcctatagaacgttgctcctcccacttcctaggatgctgcaccaat

SEQ ID NO: 63419 - DNA, 571 bp, Zea Mays
cgacagtcgcctgaaaccctctccgactttagatcttagaactgggcgaggaaatagagagatagctaggtactgctggtcacttctcacctctctctgtcatctctcgcattaaactcgtggagcgcggtgagcgagcgggaggtgacagcggcgccggagtggacagcgttgaggaagggccacatcgcgggctcgcggcaacaggggagggagagggggagaagttgaggcagcggagcatgcggaggcatgtgactcgagggagccagctgtgcggcgagagagacgacgtgtgagagggtgggggcacggacacacggtatagctcagaaccaaaacgaataatgtttccgggtccgaggtcaaggcccaggtgtcagcaccctttggccaacagccgcgcgaaacgcggagggggctccaaactggagtgtcttttaagactttagatacataacttcccttgtaatgttaaatttaattcctaattggcggattttgatggattcggcgagcggtaccacgtcgtcattcctccatgtgacgcaggcgcgacggtgctccagat

SEQ ID NO: 63420 - DNA, 1945 bp, Zea Mays
tttccttatctttttcccatttttccccttttcccaccaccccctatgctgggtatccacagaagctctctttcccaagttaccactctcttcattccaaccttcctcttcaacgccatcaattttgaaaaaaaatgtcaaacaggtaaggttttaccccaacttcaagcacaggggggatcatagagatgcttttgacatgcaccttgaacctcacgcaattttgcatttctaaagcttttagatccacctcctcaacagcacccaatgccgagcctagctcgcaaatagcctggaaattacgtaactcctcaggaacattttctgccaccacccatatcgtatgtagtcttgccttggcagtggctgaagatatccatggaaccactgagattttcactcctgacatcttcatttttaactctggaaattgaaccatttcatccagtctctcctgtgaaggaaattgcatgatgtacccaacctggcacttggttgctttccaaacacgtccccacgggaaatggaagtcaaagtcctttaccaactcttctgcagagactccaccctccagaatttttaccaaacctaaggcattaggttttggttttttgagttgagatttagcaaattgcatcatgtagaagcctaatccatctgctgccatcccgactataggcatggtcggtttggtctgtttaggccaaacacacttcgtcgtaacatgggtgtctttcctacaaatctcacaccataaatttttgctacagtctctagcatgatgaccttcatccccacatttctgacagaacaatttccttcccgaatcaatctcagtaagcgatgatggggcaatgggattaggaatacctgcgctctcgatttcccctgatgtcgacgaccccgggagaataaccttggggccacccctacccagaggtgggctgagccgccagctcagattccgatttcttccccatgggggagtcacctgctgatcacggggtcctctcctgtcccatccttgactccgctgcttcggatccatcatccggagacccttagctcccaacctcggccactcttcaagcacggatgggggtctgaatggtaaacgatgccagccacctccgtaaagagaaacgtaatcagtgggtaggagccacatccgagagacgaatgcggcgaggtgtgggagggtacgtgaacccactaggtcattcggacagctagaatccacgaccgtcggatgcaaattcggatgtgaacgaccccacgtgtcacccaacggagccttctcaaactgggccgtaaccctgttcccagctgggctgaaatccccaccactggaaaacgtctgcgcgatttcaacacccggcatccatcccgtccaaatttttccttgcaaatcatggaaagagcctgtacgatcatcagcttcaaactcccaatgctccagattcctggtattcgactcaggaagcggagccacagtgagtgaagcatgaattgacaaatgacggaaatcgcttctcatccccaatgctgaggaatggataaacacagaggagaaggaaggacaggggaaacgaccgacacgttcgtctgagttgtagaagaccgaatgatttctcgcaactcagaaccaccactaccaaatcacacccacccgaccaaacgaaatgaaatacaatcgacgaactcgaggaaaaaaatgtagaagcaaaacagagagcaatccactaagaacgagaagcggaaaaggcctcaaacctgccgacgggtactcagacccacctgaggagcgacccaagtctccgatagattcagcagcccgagattgcacaccaccagacgacgggggacgcgatgaagcagcgacgaggagggtggtgcgacgggtgaccgggatggagagccggagaggaaacgccctttccctcct

SEQ ID NO: 63421 - DNA, 805 bp, Zea Mays
ggacatcgagatggcaggacttgcagaaaaggctagcaaggaacaacttccggatctcaggacagatgaaaagggggccctttggttcagaaaccgtctgtgtgccgaaaggagaggcacgaggaatcctgctcgacgaggcccacaactcagcctattctatccacccagggactaccaagatgtacctagacctcaagaccagatactggtggagaggaatgaaaaaggagatagctcagtatgtggcccggtgtgatacttgtcaatgaactaaggcagagcatcagaggcctgcaggcctactgcaacccctcccagtgcccaaatagaagtgggaagaaacatgcatggatttcataatcgaactgccccggacccaaaaaggtgaatgattctatctgggttataattgatcgtcttaccaaggtagttcacttcattctagtaaaaactaccttcgggggagccacccttgcccggatttatctcaaagaaatagtcagacttcatggcatcccacgaagaatagtgtcagacaagagaacacaattcacctcaaaattttggttgagcgttcaacaagctatgggcacaaagctagacttcagcaccgcctaccaccccagtcagatggatagacagaaagagtcaacaaagtcctcgaggatttattgagagcttgtgtgttgaccttcgacagaaactgggagtccagtttgccgtatgcagaattttcatataacaacagttaccaagacagtatcaagatgtcaccttttgaagccttgtatggaagaaagtg

SEQ ID NO: 63422 - DNA, 1536 bp, Zea Mays
gttgtagagctactaagttggttaagggacctagccctaaaatcgtgtggaacctagtgtaaaatgttcccaaagtcgggttgtcagtcaaggggtgatctgaaattggactgtcagtgatatttgaccaactttggaactaaattatgcttgatctagtgagcaaatgactaggatccttatgacaaagttgaagctggcatataggagaacaactttgccaaagggtggtaggtgtgtcactgcttggaacaggaaataaaattgacccaaacttgctctatcagactactttggaatgggattcagaatgtttagttaacgaaagaagatcataggtgtagtgcaccttgtggccgctgatcccatgccatgattcgcgcccatcggtaaagatcatgatgcgtttgagcgtggataaacgttagaggtgaaaatatttgtggaggggtggatttggtcactggccggctcgaccaccgtacccacttgcccgcgcgatcggccgagctatcgccgctggaggtctccattttcctttacacgccacgcaagtacatgcttaccacgtcgctgtgaaggtgtccgatggtaaaacacgtcccaaagccctccgtttacccgcgtgccacgacgaccgaccctagtgaaaaatctaagcaccatcgtgagcactcctatcccaaattcgcgaagcaagcgatcaatccttttaaattgagtgccctccctgctcttgttacgcacccagcgtaccacccctcactctagatcatcgaccatagcccgagaattccggatttcccaaaaatcagttggaacgccatcgtgaaacacctcgccatggccagtccttcttaggttagttcatgtccctctggtccatgttttagcatcctctagtgttagtgaagctcactgagctccccgattgaacgctactacaacagagcatcgagaacatcatgtcgccgcctcagagcaccatcgagaacgccctcacgtcgaacagccctcccgtgctcccttcgtccaaattcgctcacgtaccacacctttggtgagccaatgatactcaacttcaatttaaatgctaccacattatgttgcttgtaatgggctcgtcagaactctagcccgatcgtggctagggcagatgcaaattaagaccaggccagtcgaactaggttaggggatatgctcgggtagtctcagcaggcatggagtctggctgcttattacctcaagagggggtcgtcggcgatgagaacacgtgactccggccaggtgtttgaccggggcgccgtcagggacctaaagtcgtgaagaaatagaaataggtggacctatatgaagttgtcagtgacatagtggaacagtgccgcgggcgctttactagatgtttaaaacaccaggggcctttgagccaagtcacgtacgcgggcgcggacacgaacacgtttcctccgtccgtgggccggtttgggccagattaggctcaaccctattcattgttttcctttttctttttcccga

SEQ ID NO: 63423 - DNA, 348 bp, Zea Mays
tggccacggtgagcgcgcggatgaaccaaagatccatgcgttcccgacggttagtggacccctagtccaattggatgggtcagcaagcatcgtagacatgtgagaatgcttaaacgagggagagggagggttggactgaccggagtacggctggccgcggtgaggttgggcttcgggtggcggagaacagatttggggcgaacgtgaaattggagagctgtggggagtaatcggagctacgcgtgggttctctggacgtacaattacctagcggcactggccgaggctccaatttataggcagctttgacagtggccgggaattttaacggtgatgtatggcggtcgg

SEQ ID NO: 63424 - DNA, 417 bp, Zea Mays
tccctccgatcggtcccgacccgcgacaaatccacaagcttgggaagcaacaagtgatgatgatggtgggaaagatgatgagattgatcttccccctgcccacgcccctgttattcgagggttggtcctccaccgggcggaggcccgtcgttctggcaatgaaccagttactgactttactgccagcgggggttctgcacttcttcaggacatccgctttcagaatcctgcattgcacattcgtgatgccaggattgatgggaaccgtttctggactctccagcatgtggatttttacaactcagtgatcctccccaagaaacatcagcccatactacatcaacggtacatcaactgggaaggatgtgaggctattggggacccggagatgacacaggcgttgagggcctgtgaaag

SEQ ID NO: 63425 - DNA, 595 bp, Zea Mays
gggaagcagcgttagactccgaggcgatcctcgccggcgatggggagaagccgacaacgcctgctgtcgttccctaaagatgacattgagcggcggcagagcgaggagggagcagggacacagaggctgagaagggacgcagatctagcaggggaggaagaaagcgtggctgcatgattatagggagtggggagggaggagatttagagctgaattaacactattgatggtgaattgaagaacgacgattactcagcgaaggaacgactgtagccattaaagcttttaacaatggcggctgcaaaaatttaaggaagaaaccgatcttgtggagccacaagggaatggccgttgcgaggcaccggggccacgagcactgctgctacaggccgtgttgactgacgctgccacattggtcactggccgcgggtgggcgtcgcaagcaagcgactgagaatcgaacacatgcgatccaattctgttttggagaggaaaagggaccttacaactggaccccatatgtcataggaagaagggatgggaataagcaaacatcaaacgtgagtgaggctactggagtgctagccaaatgggc

SEQ ID NO: 63426 - DNA, 391 bp, Zea Mays
gcgacatctgcactttcatctaaggttgaggtgggggttgctgccgctgcacctgttgcataactgctattgtctaaccaatcatttggactgtctgggtctacatcagaaacatctacccaatggtcattaggggtggtggtggcaactgcagttggggtgcctcgtcttgggtgcttactgctcctgctgatcacgccttccacctctgcgacaattgtcagacatcttagaaagcatacacacatcagatctgaccttgtagtctttcaacataagaaaagatatatagaagtcttcacaatactgaacaaatgagcatcttcactgactctcaacacagccaaacacagcctctcagataaagaggaaagtggaaataaaaggttgc

SEQ ID NO: 63427 - DNA, 361 bp, Zea Mays
ctaagagcttcatccctagaattgtctcagaggatggaaaggttttcactgcccaggaggagaaggcggacttgttcacggatttctatatgaatctgcttggttctgcaattaatagaggggctgcggttgatttggaacagcttggagttcccacatttgatctagaagctcttgacagccctttctcggcggatgaggtctggaatacaattattagtcttcctctggataaggcgccaggtccagacgggttcacaggtcgtttttacaaggtctgctggtccataatcaagattgatgtcatggctgcaatttcctgtgtatgggccagaaagtttgccaacatgaattgcctgaa

SEQ ID NO: 63428 - DNA, 1428 bp, Zea Mays
tgtgtagtttagcagcttttgtttactgtttacatgctattcaaatggcaattttgtcctaactgatagatctactaaggcccagtcccctttaatgttctaagctctgtgagtccatctaattacatgtgtgtacatgcacctaccaacttcgatccctttcaaagattattatgcgtacatgagcacacccatgtcctttactcgatctgcgcctgtagtcaggtgtgctttgcattgaatatttgtagccctttctattcttcatcctccccacagtggtggcatttgaataggcagtgcaagtgggatcaggatatgggttagcctctcaataacttagttttaaatggtctacgttgacatgtctttgtctaaaagtttattggtacttgcattatcaacctaccaagaaataaagtttgttctgttttttctgctcctttgatctctttgctaaaattcatgcggtgatttgtgttccaggccaatcaagaggctgaacagagctgtgcaggtgagcatgcattcattatattcccacggttgatattctttgcggtactacatctatggtagatttagtcgctgctgccatacaccagatacccagatcttctttaggcccttcgtcggcgaggagtatcacaaggtacgccaatcgcttggtcttatcttcctgctctacgaaaacaagcacacaaacccaatttactatgttacacccttggcttccgacgaggtggacgaggcgtgaggctgacggtggcgctggtagtccgcaaggaaccggatttggacgcgctctccctcgtcgctaggtaagagacccaggtaaggaacatataagtggttgttctgattttggatattagccaatttccccctccaatctgttactgatttatatgcccttctagggatcagcagatcccacacctattacatgatttgtccttctagaatagaatccgctttctatcttctgaaccggcactgccttcttcaatatcggccaccggtcggtccacctcttcaataatcgtccttcacttcagttgtgagttgtgacatactatttatattcggatctgatctattacaagtatacatgcatattatagggtgtgcgtctgtatacccatgttctttacaaggttcgtccctaggtgatatgagtagtaagtctaaacttgcttcttaccaagagttaggttgtatgtgtgtatgtattttttagtacaatagtattcaagctgatatccaagtagggatgtttcatcactgatatcctgtttgaaaaatcaagctgaagcattttctacacacatgaatacaaacggtcaacacaactttttccttttttttagaaaccaaatatagcttatagtttcatgttcaagggcatggtgaagcatccaaatggaa

SEQ ID NO: 63429 - DNA, 1131 bp, Zea Mays
atcagtccatcactagatttgcaaaggcaaaggttgttgttaagtgttgattatatgtctaagaggtaattatattttgtgataatgttaatatgcctttaggtgaaagcatattagcagagatggggggctaacgtgctagcagagggactcgatctagccgccaccaaccattgccgcctctcttcctagaagggccacgtacgttaaggcgtcttgtatatttcctcttgctacgcgtacaatgctggcacaccagtatcatgtgtttcatccccggataccatagagaacctgctgctgttgatgtggcattgattaacaacgaacgtgaggtgcacgtgtggatatgttgcttttggtggtacacgaggatgtacaactaatctcattgtaccgtcacgctcttctttcatcacgatgcgtgtcgaatggtaacaattcatagatgtgttttcttggttgaacgtggtatatgtatgctagtgcataacatacccatttcctatagtgataccagagttgtccatgcacaatttcttatctatatggtttgcatataagtggtatgactggtgtattaaatctacttttgcttttgttgtaacacaaattgagacaacaattgatgttgatgtagttgtcgaaatagtcgcataacttgtttgcgtctacgggttagaattcccatcgggtgtataaaatcagtttgctttctctcctgaccactcacataacttgttctcattagttggcatcaccgttggggctaacaatatgtacccttcaggttggaaatagcgggatggtcattgttgtaagtgtgtcctcacttctattttatcctaggaccgctcggtggtattatgtaggagtgttgtgctatttcggcttcctgtcctatttggtttaggaggtttaggtgatttttgatagcctatctatagtgtaagagtaactccaacaactcccaagaaaattacttcaacaactgcagacttagggagattggatgaagtgcgtatgcgacaaaatggcgtgggaacggaaaccaccagctagattgggagcctgcaggtcagcggaaatttgcgcactggctgagattgtattcgcacgtgagactttagg

SEQ ID NO: 63430 - DNA, 844 bp, Zea Mays
cgtgacactatttatatgtttcactaacgcttacggaaacccccttctacttctgtttcttcgcagtgctaagtccacgacggtggacggcgacgacacacctccggtaaactcgtactggccggagaacgcaacgactagacttctcctttgcttgtcacttaattcaaccctccccaacactaatccctcagctaatttcactgatccagaccagagcacatctgctcacgacgacgacggaaaccgaggataatccaaggtgttctaggcaatttatggcggtctagttcaatcgaataggtcggtgagcttcaggggacatgaggaaagctagaacaccaattaagaaagcttgaactgacctgcagaagggtggccacggcgaggtgttcacgcggcggtattttggctgatttgggagaaatctgaaattggcgagctctagtgagcgtttggaggcacggcttggtggcttgggtgcttgactaccttacggacccgaagtcacgctcaatttataggctccgggggcggtggcacgtgaatttgtaatggcacggtggcggccggagaaggagagttgcactggtgcgagcgattagtggctgcaaccgtggcgacctcacctttgatcactggataggtgagtatgagtcacggcggcgtggttaaagtgccgaggcacgtggcacaagaccacgaggtgtctaactccggcgtgggttgattcaaagcgatcagggcagagcggacacggcggccggacggaacagtgtcttaagctcatccgtggtggagatcttttcacagcgagacgttatctgggcaccggtgagcacga

SEQ ID NO: 63431 - DNA, 657 bp, Zea Mays
gcggagtggacaggacgcaataaatgctgagggggcacatcgcctgtcagcagggtggacaggcggcgcgtcctttccgcaataaatgtagagaccgcacaacctagagatcttacgtcaggctccgcccgctggcttacgtcacgggcaacaagccacgtggcagcatcgggtctccgcctgagcggggagcgcaagtgtacaggataaggcccaaacatgtatcagcaccggacccttgcttacgccaaggtatcccctgttctgggaccttgtcgtggcccggaccttactcggagggatctggaccccatccgagggacctggcatgcttacttgggagttctgggccataatcgggggtccaggttgtgtgtacaggggtccggtgtttccttgcggaggtccggctcaactgacgcatcctgggatgtatcatccttgagctgcccacgtggtggggtcgggtgatgttcaccgtgcggctagagaacgccgaacgggcaccgcgtcttcatactgtatcaaggggtacccctgattcagggtaccgacattggcccccgggcccgcctcatgggaggacatgagcctgtaggtggggccaaagtttgactggcgattggcttgctgaccctgcgcgcccgtagatgcaat

SEQ ID NO: 63432 - DNA, 422 bp, Zea Mays
gggagcagcaggtgggtgggatcggatcgccagggtagacagcattcatcgtcgtcctgttcctgcatgatcgacccgaccccggccgccatgttagggtaacatgtcatggtccctggactggaacagaagagattagtaggtgcttgtcttggtcctgtcacgtgatgaccacgagacgcagacaccatggaccatctgtaccatgctacgccactgacgatcattgctggacgcgcgagttgcgttgcgtgcggttcatcatcatgatgtgattaatccgcgttagccaaagccaatgacgcctctcgaattgaagaagcggacgagacgacgcacacgacgacgacggcggcgacgacgcgacgtataccaatgcacggttgcccgaccgcgcgcgcaagcaacagccgagtttgaaa

SEQ ID NO: 63433 - DNA, 750 bp, Zea Mays
aacaacatcgtgcactaatgtcaccaaaagaaagcttcgagcaacatgatgctgtcaaatgccaaatttaagtttatgcatacccttataaacatgggaaaacactgagttggatgattccatgttagccatatttcttctacttatacatatgggataatagataaaacaacaaaaattcaagtaagtttgcagagaaacatatggaaggggaacaaagctccagtacctatgactgaatgaaaggtgcgtccaagaaagaggcaaattgatatttctccaaaaaatctgacggatctaatatacacaagcttatgctccatgacaatattgattagtgccgctgctcctcttgctcgcactaatcccatagcaggccgttaaaaccacaaaaattcaagtaagtttgcagaggaaacatatggaaggggaacaaagctccagtacctatgactgaatgaaaggtgcgtccaagaaagaggcaaattgatatttctccaaaaatctgacggatctaatatacacaagcttatgctccatggcaataataatcagtgtcgtgctgctcctcttgctcgcactaatcctagagtgtttgtcctccagcttggcgcccatgccgttgtagatgcacacgtcagaatgcggttcggagctccgccccgaagcaaaagatccggtgcgagtgcgaagcgggcattccatttccagcgatgctgagcgcgacccgcgagtggtgcccaaccacca

SEQ ID NO: 63434 - DNA, 376 bp, Zea Mays
caagatctcgacagctgtagaatagtacatctgataatgatcgaagactggtgggtatccatcaccttataccttcaaggtcaccatcacccctctaaccaaagcgaagtcaaaaggttgaaacatagaagctatgacttcacagtgatcgactgataattatacaagaagggaataacccaacccatgctcaaatgcatcacagaagtcgaaggcataaaactccttcgcgaggtccaaagaggaacatgcggatcacactcgggacctagggctctcgctgctaaggccatgtgataaggtttctacaggtcagccattgtgtgcgtagccaacagagtggtccgctcgtgcgaggcgtgccaaaaattctcac

SEQ ID NO: 63435 - DNA, 640 bp, Zea Mays
catcatcctcaaccttttctttcttaacaatataatttatttactaaaatgcatggcttaattgttgcatttgtttttagcgcccttctaaacactttaaatgatgtatgctctaagacacgtgacagtatagcaagctggcgagtgccgtcaatttaaaccgtgaaacagtgagtttgaaaattaaatattttgcttcataatacttcctgtctccctacatttcacattttccatcatgttggaatatattgtacaaaaatatacatctgttcagggaaaaaaaacgtaactattgtaatgcttccgctctaccctcgacttcgaagctacaaaagaagcttagtgattatagcatgcaatgtaaatggtgcatggtcatttctcattaactctttaatttagttctcccaggcccatgtttcaaagtactaaatctaagaaaaacactacacatgttcttaaagaacatgcaacaagcatcaatattcttcgcagaatttaaataaatagcattcaaggagtgaaattattgtaatatctatgctcctgtctttcataatgctctaaaatggataaacatagcgaaatggagggaatactaaccaaacaacagatgactctgcacctcaagaaatac

SEQ ID NO: 63436 - DNA, 748 bp, Zea Mays
tcgcaccgtactcaagtgtagtactgcttggagcgtgttacaactgttgtgcttgtgtgtccagagaaggagggagccctgtcttttaatacctcaaaggtaggacattatagaggtggtctgtactctacaggtgtgatggtcatctgtcccttggtttgacgtagtgcttctgatgcagtcgtagggtcgtgcgtagccgtacttctgacacagcatatcccattgctcgtttgtcgtacgagtccatgcagcgaatcctcctgacatccttttgtagtggtgtgtggcgcaccccatgggttagcccaacaatgcgggagtgcgtaggcttcacccgtcatcacagacctgtgtcacctacttgcactacttgcatgcgtaggcatgcatcggtatgaggtattcgttacatatttttcgatatgtcggtcacggttgagactttgatgctgagatctcttcgattaggattgactggccccacttgtcagtggtggtttgcttgagacaatgtgcggtgggggaggaacacgctgccacgtgcctcggtggagggggtacaagaggtagagctcgtccgtttccgtatgttttttccgaccgtttccatcatttacataggttgcagaaagcacgataaacattaataggtgacactgtagttaattgaagtaggctctgtttgtttcattttttagcttctgtccaccagaagctactgtagactatcaaacgtctagctttt

SEQ ID NO: 63437 - DNA, 995 bp, Zea Mays
aaattattgagaatttgccttaggtcaccacataaatattatagacctatcaaaggagaacaacttttcttaagagtgtaagcatagttgttgagaagaatttgtagataattaagcccaaagttggactgtcaaactacttaaagtctgaaatcagactaacagtggagttgcatgaacttcaagctcaatactgagcatgatcctgtgactgtttgtggatgcacgatgtatcaaagttggagctggtctattaagctataattttgctgtagagtgttggtcacgttgctatagaaatctgagaggaatttggccctaaactgtgactgtcaggcacactgaagaagtattccatggtacagtacccccccaaactgaaacagattgcggttcattccccctgccgtcgccggtgatccgtcgccggtggttgattgctcgccgtgattcgtgcaccgtggtcagcagataagcacgggtaggtaaaaatcttggcataggatcaactcgagctcgattgcggctaagcttgtcgtaccccccagcttgtcggtcgatcggataactctcacctccgtcgagctgtcgccgttgcgcgccacgtgcttaagcgctggccctcatcatggtgaaccatggggtacatgtccggtgaaagccacctgtttcacacaccgagctctttttctcctccagccgccagcgctcctcgaccgaattgatcaccaccgctcaagtatcctataaattgaagcctcagcatgttctactaggtaatcgtgcgtccagtgaaccaactcgtagctccgatcgttccccacagctccccaatttgggatttcccccaaatcggttgaagaacgccgcgaaatccagctcgccgtggccagcccaaatcaggtccattctcgccatctgcgttcttgtttcggcattcttacttgctctggatgatcgtcgacccgtccaattaagctagaacctcgttaatc

SEQ ID NO: 63438 - DNA, 357 bp, Zea Mays
atttgagtaggtcttcaacatcttgaggcgctaccaatggaagctgaacccagagaaatgtgtgtatggagtaccagctggaaagctacttaggtttatcgtcagcgatcgaggaatagaggcaaacccagaaaatattgaagccataatgagaatggagccaccacggtcacagaagaaagtatagaggctcactgggtgcatggcagcgctgagtcatttcatttcaaggcctagcgaaagaggaatgcattctataaactgctcaagaaggtggataaattccagtggactacagaagctcaagaaaccctagaagtgatagataagtttcttactacaccactagtactcaag

SEQ ID NO: 63439 - DNA, 348 bp, Zea Mays
ggaagtgttgacgatttaccttcccacctgcggcactgctgaagctgcagctgccgaagatgccacgaccgaagatgtacatttagaaaagcacaatttctaacattgataagatacttctggacatggccacagaagaagctgctgcaaccactgaagaaaccatggctacagtacctgagaaggagaaggaaatagctgaagaagcttcgaaagaagaaaacattaactttcaaaacttaattgggcaggaattgacggaggctgagaaagaagagttgagagaatacgccatatcctgcaggtatcaaccaggggcactactcttcggcggtgttgacgatgaaa

SEQ ID NO: 63440 - DNA, 596 bp, Zea Mays
acgagatattaggccggcaaccatcttccacatgccatctgacagcgtctcgatatctgagggcatatgttatcatacctaccctagaggtagatgaggtagccatcttagaaaagaactactatagaagggcacacattaaacgtgaacacgacattacaggcacactcctatccttatacacgcactaggtgtacccaaggctgttgttcgagcatactttaacatttatgagcgtatatgttcaggcaattttgcatgttgtgggatatagaaaataggggctctaataaaccatactaggaaccgttaatatggtttccttactctagatagacatgcgactacatactaaggtgggaatgattacgttgatgcatgcttgttgcgagacttaggatcacgagactaagacaagacaaatgttgttggtagggatggcaacaagttaggttcggaccgggtaaagtaaatactcgcccgtgaccatatccatagggattatctatgtccgcccgtgactatactcgcgtgtaaaattctgtactcgtacctgtcagtttttggtacccgtcggatatagcagcttggtgcac

SEQ ID NO: 63441 - DNA, 784 bp, Zea Mays
gtatatttccattagcattctcttcatcccattattacgtacttctactaaatattcatatttgataatattcatctcctgttagaaaccataaagcaatagcaaaaaggactctagaacaaatactttacacaaggtatgtatgttttattgtctgaatagaacaaaactatatccaatcatacttttagaacttcaaaggagcatattctgatgttcaataacaaacatgaaacatgcctttaagttctgcagcgcacatgacttcaggggaactaaacaccccttcagtttcaccctagtgattcgttctttctaactaaaaatcatttgttttattgggaaacatgcttgtgtgttgcaatagaaccaaatatatattagaacagattcggactctacaggcgcgagttcttttttagcttgtgtatactcatgagtcctgatcatatataactgacctacaagatctctttaggtattttaaccggccaaatgatcttatgtctttcctctgaattaattctacttgaattatcttattgccacctcttctttttattaaagacatgagagccgcagtattttgtttattatttaaaaaaacaaaaacatctgctgagttggaaagccgaatttctctcacacgtgaccattgattttatgcatttcggattacaacagtgtgaaatgtgctcgatgtgaattcttttaaataccacaaagtacatgccgctagctgctgataggactactccatttatgtcaactgtaattttaagcc

SEQ ID NO: 63442 - DNA, 566 bp, Zea Mays
gcgccggcagatccgaatggtacgtgctgatccctcctctccttggctgctctgttcttggtttccgttctctggctgcgagatgtagaatttgctttgcttcgctccgctgaagctgaacggggtcgctcggtcatctaatcgcatttgtatcgaattggattgaattgaattgaatcacacggattaaactccgttaatctcaattagccatgtctccagtagccagcacagcagtatgaacctacctacagtacctacctatccatccattccattggcgtagcggacaaagaaaggaacaaacaaatcagcgaaagatgcacgtgtggcccacgttggtagggcaagattggagtgccaagtgtgctttccaccgtggacctgattttggagtaggccgtgtctcatccttcaagacttcgcataataaatcttgtctgctctataacatgagccgattaattagctgcagcactgaaaagaaaccatcttgtttgaatccagtaaacaacacagtcatctgatcgtcataaaatgatataatctgtctataccgcacccaa

SEQ ID NO: 63443 - DNA, 348 bp, Zea Mays
tagctcgtattactcatgtccgttaatcgccggtgagctcgccacgatgaaagccaccaatttcttgcgatagtgctctcctctctctccgaccgccaccgcgccatcccaaattcacgggccactgcccccggagcctataaattgagtgtaacgtcggctccgcaaggtagtcaagtaaccaatacaccaactcatgcctcaaatcgtccaccagagctcgccaattcgagacttcccccaaatcggtccagagcaccgtactaagtgagctcgccgtggccagcgtgctacaggtccattcatgtcctctgctctcttgtttcagtacccttatgtggccttgat

SEQ ID NO: 63444 - DNA, 1084 bp, Zea Mays
ctcgaatgcaacaaaggctttttgatttgaaccaataaaagcatgggctggtatattgacactgatggtgtcgatgccaactgaagatgcccgcatgtaccaatcatgcaaccttttaatattagccgggaccttcattagtttctcaaaagtgagtagtggtctgcccgacacatattttttaggcacgcttttataatctgccttagttggcttctttatctttgcggccattgtctcagcttttttgcggactcctcgagatcggccaaatcaacagtgtctgacgtgaggctccgtccaatccctttcaaaaaacgagctgtgccagcagtggatttactcttctttttcttctcgaacggggacactaattttggtatagaaactttagatttctttgatggtcgtggatcccttgatggctgtggagaaggtggatccctgaagggcgatgtatgtggcggagaaggagggtcagaaagaggatgaggagcagcatgtgaagtttgaggaggtgatgatggatgtacaataggaacagcaatttgagaaggcggagacggttgggcctgcgacgacggctgtcgtggtggatcaaccaattcgacatcccttcgaggccaaaggataaaattcttgatagcttgtccaagtgtctcaataccttcgggcccagggatgtctagcatgtcgtcctcggatccttggacgactgttgtcacttctaccctacaatattcttctggaatgtcgtttccatggaacttgcgtcctgggatcgcaaggcctatggctactttctttgtacgctgattgttaataccatatcttataactagtatgcatgccacaggccttgtgatgtcatcaactggatagcggaccttatttcccgttgacgcgatagagcttgggatggtcgtactctcggtggaagccggcgtttgagctgctggaattatttgcatctgtggagtggtcatatgttgaacagacatcacactcgccatcgccaattgttgcatcaattctagaggaggattcgatagcatttcagacatcaggcctttgaactctttct

SEQ ID NO: 63445 - DNA, 778 bp, Zea Mays
gtggaagggtaagcagaaccaacatgctaggatggggtgcccgaggttggggcccatgccttggccgccagctctgaggtggtgcctaggctagtggtgcccaatccattggtggctaggccggtagtgtccaggctcgtgtccaagtcgacgtggcctaagccaccaccaccagtagggtcatgggtggtaggcctaggataggaagggccagtggaggcagtgataatggctcgaaggtggtgaatgtgggggcaatagttggggagagagcaggtccaatagccatcaaagtccaatgacaagggggagaagaggggagaagaggtgtaaagccagtaggagggaggtgttggccatggggtgataaccctagatcttggctagtggaggctaggagagagagagagaggaagagaacctgtaggttgataccatgttagagaatgaaaatcctaatccattgatagtgggatgcagtattgaatatactttaaccctaatgggctccatgggctgggctctaggtccttaacacatatatagtctaacagtatggtcagcagactttgtagggaaaatggaatcattgcctacaatcatgaaggagatgtacaattaggatgtcgaatcagggaaacattaccatcatctggtgtcttgtagttggaagcactagagccgacctagtaggtgacagcgggagggttgagggccactattctaaacaagttagccagagactgttgatccaagaatcagtctaggacgaccagct

SEQ ID NO: 63446 - DNA, 441 bp, Zea Mays
atttttttctttataccaattttgggctttacagagggttagttcaattggtgggagaacccaaacagatagattttgccccagtgcaagagttcaaatagggggatagagttcctcgctgatctaatagctatgggtaaccaggatgtgactatagatgtcatcctagggatgaattggctaaccaagtatcaagccagtcttagctataacaagagaacagtgaagttagtgtccttattaggagaggaagtgttagtggagttggtcttgtctagactaaggaaaggaagatgtcaccaagtcaccgcccatattgaggaaattgaaccatcagaaactatcaacgtagtatcagaatttctagacgtgtttctcgaggagttaccaggcatgccccctgcgaggaaagttgaatttgccatagagcttatacctggc

SEQ ID NO: 63447 - DNA, 700 bp, Zea Mays
ctccgcttgaaggcgaatgtaataacttttgtttttgtaagatacttttgggaactatcaattaaacaactcttatctgtatggtgcttgttcttgttgtgtgtggttttatcaactcctctcctggtacttggccccctaggatgtaggctcgtcatgtcgaggctagataccagcatacctaagaaagagttggtgtcccagcccccaggaggtagcctcaactaggacctggacctgcacatagcttcggctaggaagtgttagtagcacacccattaggacccatcgtttggtatcagccaccctttgattcatgcaacaggacctgcaggatttggcctgggaagcccagtcgtgtgcccagaccccctgaatcacagttccagatactaggacacccatcgcatagtggtggagcatgtaggcttacagtacgagactaggctaagcagctacacggcttcggaccaccccaggggacgtgcatccattctctagaaccggaccctaggttcccggacccacagggctatagttccaaatactaggatacccatcacagagtggtggagcgtgcaggcttagggtgcggaaccaagctaagcggctacacagctctggaccaccccaagagacgagtacccattctctagaactggcccccaggctgctggacccccttgctttcgtagagggg

SEQ ID NO: 63448 - DNA, 402 bp, Zea Mays
atttggttgccgctctcgtcggtccggtcaccttagaggccagtgacccggatgctaggaatccgctgcctgctgatggagccgaggcctctccaagtcgtgctctcaacattgttcatgttgatgccccctcaacaagcagtgcgtcgatgcttccagctttgggtcttcccctatttctctccaatcttcaggtgagtcgacttttgtttcttaccgttcatgttagcaaactggttctcttgctaatttttgaaattgcagaatgtcttcgattctgtgtctgcccaactgaaatcctgtggcgctcctgtccccaaccaagtttcgtctttgacgcagtggaaccctctactgcttcataagcagatagaagatctgaaggcgtccagccttggttag

SEQ ID NO: 63449 - DNA, 619 bp, Zea Mays
gtgcgatatggagtggataacgtcggggagggataacccatacgtggcgccatctcccaagcccagtcggagtcttcaccagtggccaccgtgaccagtaaattttgccgcggtgtcgcccatgcctcaatctccctcactgtatctctttccgacgtggtaggcatgcgcttgcgatgctatccgtggccggaggtcgtctgttgggtcgccgtgactataaatcgcacggtggtccacggcgaggtgtttacctcttcaccagtgaaccgatcgcaaagccaaattcgcgctgcctctgccccctcctcccaaattgattgtgcaggataaaactagagtcccttgccgccgtatagtcccaagctccatcctcaatttcacccgagcacaccacgacgccgttttcccccaaattggtccgccgcaccgcgaagaacagcccgcccgtggctagcccactctggtgagttcctatccaattcaagtgttgtttccatgcctctacatgcttgcgaagctcatggtggcatccgtttgctctagtcgaccatggtgtggcgggaacgtgtgctcccaagctcggtgtccgccgtgatcgtgggcagacggctctcag

SEQ ID NO: 63450 - DNA, 474 bp, Zea Mays
gcagaaacgagcgaaaaaattgaagttgcaatggtgaagcatgagataagcgaaattgaaaaatcaagggcacaaaagaatgccgaagagctcggcgactccaaagagagatgctacgaaatatccttggaatgcgccaagaatctaaagaacagttttggaaaggtgggagaatactcttccgagcagaagttcatccgcggtgaccccgatggggttatccagtggatcagcggggaggccgaagcttttgacgaggtactcagcgatcgaggggatttctgtgcttttgctggtgcccgcggggctgtatcaattttgaaaaaggtcggttgtgaccatgcgagggctgttgttcaaccagaatttgttatctcagctgacgacattaagaatccttcagccgaagcgtcttcgttaagcggtaaattttactccgaagtatggataaagggcgatcgtgagatagctgac

SEQ ID NO: 63451 - DNA, 643 bp, Zea Mays
gcgacgagcgcgagttcctatttttcctctagatcacccgcaatgcgagtggtctagggggaatctgcgcagagccggatggccttgacgggtacgttgtccgctccagatggtcgcacctttggcaccttggtaggcgccttggtaccggaggtcgaggggtccctccctccgtcgtccggacgagcagtttctgcagccagggcatgcagcttctccacagccgtaagagcggcagcgcggtcgctctgcacggtgaggacctcggatggggatgacatcttgaggaccaaatactcgtaatgggcaatgtccatgaaccggtacagggtcggcctgccaatgatggcattgaacgggaggttaacctccacaacatcgaactggacgttctctgtgcggaagttttcctctgtcccgaatgtaaccgggagcgtgatgctcgcaagggaatacaccggttgagcgcccactccggagaatggacgagagggtcccagtcgggacccctaggatctgcagctgcctgaacgcagcatggctgatgacgttgagcccagccccaccgtcgatcaaaacatgatgcaacttgatgttggcaatgataggggcggtgatgagcggtagtatgccagcccctgcc

SEQ ID NO: 63452 - DNA, 476 bp, Zea Mays
cagtggtgttgcccgcacgcaattggaaggccccggggcatcgtctagcccacacccatccaatttaggggcttcttgttgtgttctcaggccccagtaagaaccccaatccctagatcttttttcgtgtgttaagttgtgcttaagaactgctgatgcagacataaggttagggcaaggattttggttaattggaataaggcagcgctttaaccttagttcctcagtttcagctttaacatgtgctgtctccatagtatatgctctggttaacatatgctcagtttcagacactattggttgttttcaaatcctaggattcttttagctcggtaccttacatttctgctgcttgtgctcttctccgaggttattttcgcagactacaacaacgatggtggtcggatgtagctcatccaagcttgcactgaaggagacaagatgaagaggattttgcagaagcactaacgtcgatc

SEQ ID NO: 63453 - DNA, 748 bp, Zea Mays
ggactgaagataaatcagctaattctaacccatgctctcctcagaaaaagtgtgcattaattttctgctctaattgctcctaagaatttatagagttaggcggtagtgttgtgtaccatgcgaatgtggtactagtaagggacaacgataataaacagacacggtgtgtgctttttcctccttcaccagaaaacttagagaaatctgataatctggtcccttgcggatatggcacagcctcaaatcggtgaatataaggtttcccatatgactgccatgtgtcggacatactaacaccgagttttgtctctggacaacctggctacctcgtctataattttcacaccacgtctggtgaccatccattaagtttggggtgaaaacctcatgttgctggacattattttgtgggctttcctcccaaggatgttcaaaaggcgtgttgcatgtcctattaatgccacctcgcttgttctatatctctcgggctctcgggtggccaaataatgttcagccctgagcacataaggtgacatgacatggttataatatgttgttagtgtggtaacgtaacgatgctacgatgggtgtgaaaagtgtgcacattgtgcagcccctggttctgcgtacgcgtatccgaacggtccagtgtaaggagctggacggtccacgaccgggccgaatagtctgagggtatacctggacagttcgaccatgtatggcgccacctgggtggtctgtgtgcggg

SEQ ID NO: 63454 - DNA, 579 bp, Zea Mays
ctcgatatccccctcaaggacaacattaagggctgacgtattgagtggttcatagtggaaaatcacggcaaatccctccccccttggtcagggaggcaaccagatgttcgtacgcccagctgggtagaggctcccaccttttcagagataaccgaggccaaagtgctacttactgaaatctgcttgttgaaagataggggtctgactgctgaggctgtggtcgctgactttgtcttcaagaacattcaacccttgaagggcagagtttatcccgcttatttgtataccagcatcaatgattccacccgagtcacaaacagacatattcccaatgaggacttgctggatcgattggatatgattttgagggctagggtatcaaatgctggtgctcctttagcttactatgcgtggaacctgcctccagataggctattctctgaatttgtctccaaccctcctgctcgtgatggtagcccgggccatagagttcgaccctcccccaaggatattgaagccttgattgtgtgtcagaaccacccaaattattccaccttaagtgcctaagtaacgcatcag

SEQ ID NO: 63455 - DNA, 753 bp, Zea Mays
gcagacacagggaacagggcccctggacgtcgggttcaaatctctaattcgagaggggctcttttgtaagatgcgcggccgaagcggtatcgcgagaatctggccgtccgatcagcgatggatgcgccagattagatctagtttaaaacaatcagtacacgatgaccgccctcggattgaggatctacggcccagatctacccactcataccacgaaccggtacgcaacgtggacctacggattaagatctaacggtagagattttaaagggacacgacgacccccgatccgtccgattgagatcaatggttggatcaacacgttgaaccggtatgagctcgtgaccgccagatcttgatccgacggccgcggaagcctcgtcttcgaccctgcccgagccacccaactaaccaccgcgcacggcggcggggtcaccggagcccacgattccggccaacccgagcgccagacccaaattcgttcgacccccacgagattgacgactccctgaacacaattcccacccaaatttcggttgtcctcgagcgtaggacccggtacacggtgtaccgcggcgacgccatggtcggccagtgctccccggaattcggctatgccatactccaattcgctagggcataatgtgggggagaggaagacaaacacgatggaaactcacttgtgaccagccgaggtgaggtgatgcccgaccacggaagaacggtagtacagcggtgaaagctcacggcgag

SEQ ID NO: 63456 - DNA, 281 bp, Zea Mays
gagcgtgaagccaaattagacattaacatgtccttggtcctcggagccagaagagtcatatgtcttgaccaatagactactagtgatgataatttgtgatagaaatatgaagatcttgtagagacctattgtatcctctctactcctgatgatttcttcatatgagagcagtaatatctgttgttgaagatggatcctggcggacaccagtcctattttcattcttgccaagcagttatcatcatttgcttcatcaaaagctagttatatggtgattttcc

SEQ ID NO: 63457 - DNA, 685 bp, Zea Mays
ctcaagatgaaatagagaatccttctgaatctgccattattttcacttagtaaacaatcaaatataattattgtatgcatagcattgaataacttcattcgagatagtgttatacacgatcgtgactttgaccagtttgtatctagcacgacgtatgttcaagatgtaggtataggtgagagtagtactagcacatcagatggattagacatgagtgcatttagagatgaaattgctaatgcattagtgttgtagttatttatgttaaccaatgcatagtaatggtgtagtggacatatctgtctaattgtagtcaagtgttgtttattgtgtctttccctgtttcaatttttttcagtctatacttacagtctcagaatctacgtatccaaacacctagattctaatcaccagtttctctctaagccaaaccaaacactcagacatcttctcaccacagccagcttttcaccacatcttctcagaaaaaagccgaaccaatcagacccaaaacagtctgctgcgccgacattactgcagccgaaccaaacactcaccacagccaacttttcaccacagccaactttttagaaaaactactcagaaaaaagactgaaccaaacagacccaaaacagccagttgagccgacgttactgcagccggagctgtgaaacgtgactgggc

SEQ ID NO: 63458 - DNA, 752 bp, Zea Mays
tgggagtaattctggacgaaatgttctgggtttctgcttgaaaggtctgaaaccggacttaatatgcagccgatgctctactatctctcggcttaatcctagcatctcaatgtaattccaagcaaagcaaacagaatattcttttaatagactgatcatttcatctctaggatcggtctccagggtcttgttcacaaaagtcggccttggagttttaccatctcctatgttgatttcctccaaaggatcggccgatgtaaacccctgtcctaacttatcaagatctatgaattcctctattatgcctcactcagaggaactagatggtctctacgtggttgcggaccgtccggtcttggaggccggattgtccacgacattggatccatgctgcgacgcttccccgaccttaagggccgaaccatcctatgaaagacttgaccatccggcctcaagggccggactgttcgtgacttgggacatgtttcttatgagtgtactcatcatttaaactttacttgggatttagccgattttctatcggctctagcattacaggggtgaagcctttcctatctattcttatgaatttataattagaaaagtcaactcttgtgagacatgtagcggtctcataggtccaaagtacaggggcatcggccacggcgatgcagaccgatgcatcagcatgtacttgttctacatcattgcctacccattgtagtaacatttgatgtaaagtagaaggtata

SEQ ID NO: 63459 - DNA, 380 bp, Zea Mays
tgcttgtggggctgtatcaattctcgagaaggtcggttgtgatcatgccaaggctgtagtttagctagaatttgccttctcagccgacgatattaaaaacccttcagccaaagcttctgcattaggtgggaaattttactccgaagtattgatgaagggcgaccgtgagatagctgatgaagctattagaaagaatgagaaagaatctcacaatgctcaagaagaaaagagttgaagaagatgttgagagtgcgaggcttatagatacctttattgaagtttagcttcgtaattcgtttttagctttggaattaacaaacatattttatgatgtagttgaactttcacctccaccggagcaatacaaccctgaagtcgac

SEQ ID NO: 63460 - DNA, 643 bp, Zea Mays
gatttttatgaaggctgggcttcgttttcccttgcacaagatgctggttaaagtgttaaagacatttgagatatacctttatcagcttactcccgaagctttaattaaagtgggagtttttatttgggctatgaggagccaagggctggagccagatgccaagtgtttctgcaacatgcatgaattatcctaccagatgaaggcaattgggaagaagcagtatcacaacaacttcgggtgctatagctttctgcaccgctttgatgtgaggtgtaccgtgccaacgtttcgaaagaaatggccgagctcttggatgaaacaatggttttatgtcaaaattgatttgagcaagagggaagatgtgaggggtataatccagcgccccatacggtcacgcttcggcatcaggaggccgttgattgcaagtgggaatgaagtgcaagcgtgtttgatggctttcaatacggtgtgtacttacatcagtaccagggatttggttcaggagcatattgcttataaggtgtggctgctcgttaatgactgggggatgccgaaggagaccgctggttctagcgaaggtggtctggtttacctaagatacacctatcgctacaaaaatcagttttatgagtcgaatgatgac

SEQ ID NO: 63461 - DNA, 505 bp, Zea Mays
tgggggctttcaccgtggctaactggggttaaattgttcctctatatcaactgcaggcttcccatgcagagccaagcacataggaaactttacttctccttctgttgaatgttggacagcaagacaaatagtgaagcaactgagtcactatggccaagattattacctccttgctctgatccatgaagtggtaaagctgggacaagttatcccccctaggctacaagttcctttcggtgcaatcactagaaacctccagagcactggtggagatggatatgtttctcagatttcacaaccctgaactacttcagtcgacagcagtaccaacctcattcgctcctttgctcccttctccaaacaatgacagacctatattactgaagcaattttgttccttaactataggtctataagtttacaatagttttccagggtcaaggatacaagaatcacaaactataggtccccaaagttggctgaaattcacaggaaccatacccag

SEQ ID NO: 63462 - DNA, 374 bp, Zea Mays
attttgatgcttgtcatgatgaacttgtgatgaagttggatctttgtaatgattgtcaccaaggtgtgggcatccgctgccacttggtgtagttattaataaagtcagttgtttagttgggcaacctatttattcccactttcctctttattcgagaagctgtgttggttgtgttgagagttagtgaagatgatcaattgttcagtgctatgaagatttccatatatcttttcttatgctgaaagactgtggagtcagatctaatatgtgtgtgctttctatagatgtctgagaacaggggcagaggtggaaggcgtgctcagcatgagcagtaggcaccccaaaaggaggcagcctagcagcagatgccactg

SEQ ID NO: 63463 - DNA, 455 bp, Zea Mays
ggtttatatccacaggatatggcatatttcttcagctcttctttttcatcgcctgttaactcttgtccaagtaaatcttgaaagttaaaatttccttcctccaaaatgtcttcaacctgctcttttcctttttcagtagtcgtgttcacagcagccacatcagcttcttcttcagccattttcagaagtatattgtcaataacatcaagtgtggtttccaggttagaatcttcggtggtcccagcttcggctccgatggcttcggctccggcggtttcagcttcagtggtttcggctccggtagcttcggttgcggcggcttcggctccggtggtctctgcaatgacaatttttgacaccgatgttggtggcggtgtctgatgaatcacatctgccacttggataattctttgttttttcggctttgcaggactttctgctgccgaagcttcttt

SEQ ID NO: 63464 - DNA, 345 bp, Zea Mays
gcttcaagaaccaggtcaggtccaaaaagttccctttctccagcttgtgaccaatttagcggtgtctgacaccttctccgatacaaggcctcgaaaggtgccatctttagactggattggtagctgttgttataagaaaattctgccaaggaaagacacttgtcccaatcctttccatagtgtagcacacaagccctcaacatgtcttccaaaatctgattcaccctttctgtctgaccatctgtctgaggatggtatgctgagcttcttattacatgagtcccaagtgattcttgcaattgcttccagaagcgtgccatgaatggtgctcccttgtcaggtaca

SEQ ID NO: 63465 - DNA, 353 bp, Zea Mays
ccttaagatcttcccaagtcgtaggtgctctaccatccccaactagaccagtccactagacaatagcaaaatctttaaattcagtagtagcttgtctaacttgatgtcgttcaagtaccaggtgggcagcaaatttctgttctatcgtcatctcccaatcaagatatccctcagcatcataatgacacgaaaaagatggtatagaaaatttaaacttagcataagggtcgtcaggagcacgattgttattaccttgctggcggtgtgccataccttctgtgttttgatgaagacgacgacgtaggcgcaaatctctggtggccacttcatcataattaccttcttcatcaaac

SEQ ID NO: 63466 - DNA, 696 bp, Zea Mays
cctacgacgcacttatggcctatcggactaggcctgagtacgcagacctcccacagggcactacatgatggtctgcgccgagccctagggtacagaagccaggggtcacataaccaaaatgatgatgtctgggaccatcaccgtccccacgtcatccgccacggtaaatatgagacatctaggtagccccggcaccacgagtacgtgtggctccacccggggtaaaacacttgttttacccttgtcttatggctccttcccagggaagccatcgctggtcaacccctctcccagcctataaaagagagaggctggccttagggcaagggagatgaaaaggagagagctcttggggaaaccgaacgcctcagacggacacgagcccacaaggacgaataggaggaggaggagcgtcgtcgaggactaggaggccggagcctcaccgagccaagacttagctaggactccacccagcagcttctaagctccacttccaccccaataaatagacttggatagcctctcctctctctctcaaccgcttgtaacccctactatgtgtttgatcatcaatgtgtcggtagggcaagccaccgatgactggaagtaggaacgttctgtccgaaccagtataaaccttgcgccctccgtgcacaccctttagtgactagaacacatacaataactttacttgtg

SEQ ID NO: 63467 - DNA, 539 bp, Zea Mays
taggcatttcacggacggacataccattaactctacccacaaagtggcttacaagtgggaccaggcggcctagagcggttttacatgggcacgctgtcttaacaacgcgcggttggctacatgatgccttcgtgctccatgtgccaggtcttcgacagtcggagaggccttcgcggtttctggctctaataggtacgtgcaaggccttcgcctgcttcgtctgctccctccttcttggggccttcgctccatcagtctttgtctgccttcgctttttctccgtcatgatttatccctgtcatgaaacagtcgagcaagggggaagtatgcctttgccccaacaatacactaagtcaggccaacgacccaattagaaggtgactgaggtgaggcaggagcagcattagtaggcgcacctccccagcggtgtggaggacaccactagaacttctcgatggtatgtgtcaatgccttgcagtagcgttagaagacaacaataacatcgcccctttgggcaagatggaccgttgctgagtcag

SEQ ID NO: 63468 - DNA, 278 bp, Zea Mays
aagaaatccatttgggtgccaaagacctttgtcactaacatccaaggacccaaacaagtttgggtacctaaaagagattgatttcctttttgtaggtaaactacaagactggagggaatcattgggtgttagatagtggttgcacttaacacatgaccatggatatgaggatgttcaccctaatgtgtgaggaaggttgttcaaattatgatagcatcacatttggagataatcacaaaggaaaggttaaaggtttgggtaaaattgctatctcaaat

SEQ ID NO: 63469 - DNA, 438 bp, Zea Mays
acgaagcatgatattaatctcaaacaaatatgatgaatattatatgcggttgtccagtgagatgagaaatggtggggttagatgggaggggaaagcgttaggcccagtgagatgaaaaatagcatgactaacaaatattgccttatagtaacactatgtatgtgcctgtgcgttgccgcgtgagttaaaaattagtataaaatatagatatagaacgacaaatacaactgtttattccagcttgggagtcattctgctctaaatgagttaccgcggacacctcatctgacttgactgtcttatcatctgattatgcaatgctaccttgagctaagccaccgtgttgagaaaaatctattgcaggaacaccaggcattcccatattattatcagaacacctagttgactcttccgagacatcgcacgcgtccaagttaa

SEQ ID NO: 63470 - DNA, 318 bp, Zea Mays
tatgcctccactcacacacctggcgctcttgatcagtcaccaggctgtggtagcgatgatgggaagtccaaatcccggctcgtgctggatccccattgctctttccttgcgggcatgtcacaggagagtgaggccgcgtggaccttgtcaggacatgcagccaaccgtttgttcctgaatgagactgcatctcgggctggaatggtcgccggtatggatggtgaggcggtctatgctcagccaaaggttggagtcggattggataatgatcattttaaagctgctggtaacttactaattcaccagaatattttacct

SEQ ID NO: 63471 - DNA, 702 bp, Zea Mays
atcttgaattgatgttgtccccacacaattttattagatctttttgtatgttgtacgatccaatctttatcacaaccgtctgtgtcctttaatattttgtatgcagtggcgtatttcattgattcctcaaatctattcataacagctctggtgtatgccctagagactctcacttcgaatctatacaacgtatcggttgtccttggtccctataagacgttaacatcataattaaataacgtatttacataaacatgtatgccattgattattgataacaaacacgatataccttgctcatcaatgcctcctttgattctttcattttcctgctatgcaacattttcatcatttgtttagcaaactcatgcagaggggtgttcgcatctacatgtgatttcttcactaatttgttcatgctctcactgcgttgtgtagacaccattaccccacaaaagtcattttttaaaaatgccggtatccattctttccttatttcatataatttgcgtagagtcatatcttcatgcatatcgtattcttctagcatcatttcctaggcacattcaaactcacgaggagttaaaggatgatgtataatagattggatttttttttaaaatccttatcagcaaaccttgcatataattcatttaagaatggcataaatcggttctgaacattccataaacacaatctatg

SEQ ID NO: 63472 - DNA, 291 bp, Zea Mays
attatttggtcaatatagatctccgtgtatttttctgtcttgtgggtggtatgcactggcaagaaatgtgctatcttagttagcctatccacaatgacccaaatggaatcgtggtgccgggaggtgttgggcaatcccacaataaagtccatgcaaatgtcctcccatttccaagatggtattgggaggggttgtaaggtacccgctacctttaaatgactggctttgattctttggcaagtgtcgcactcagatatgtacttagaaatctctctcttcatcctagtccac

SEQ ID NO: 63473 - DNA, 457 bp, Zea Mays
ccatcggtgagccatcctttcctctgtgtaccctcttcaccgcttgttgatgcttccggggctaggctgggcaacctgtgatttcgtggggaagaagcctggcgcagagaagaatggcgggccgctacggtcagtccctgtcctggctgccggttcgccgttggggcctccaaactccctggggatgttcgccggtgccctttgagactttgtgtggcatcggtgagccggttgcgtccggagcactgctccaaactactcatcggagcatggcggcatggtggaatcacccctcaacgtggtcaggactcccctcgctgccatacgcggtaagaagaccttcgtcgagttcgctgatatctctactacgcgtagcgctagggaatcgagagctgaacatatgtgcgtgtggttggggagctccggtgatgtcctccgccgcggtatgcccggcgcc

SEQ ID NO: 63474 - DNA, 542 bp, Zea Mays
cattttctgtaacgtacaggggtcattctataaaaatacctaggcatagagggcaccaacgcaggatggtaggttgattccaagaaaaatcagggtctctttagacaatatgccacgcgaaggggtatggacggtttctggccgtcagatttcgcgctggcggtatggattagatctgcgcggatcaaaccaagagcgccgcagaaccatccgattggggatcgacggcgaggattttaaatgctaggatcactacgcgcccgtccgtttatgaactaacggcagggattcgtcttaacgaaggggtacacattgatctaatctacaccgttccttttgcatcctacgtcccatgtgctccttctacctccagacggccaagcagcggcggcgcggcaacaaccgcaaggagcgcccctcggcgaactccggacgggtccctcagatccccaaaatcgtcgcagaaagaccctacgcaaagctgaggcaagtgcgaaatcagtgggggaatctttaccggcgtcgaagtgaaggtgatgcgc

SEQ ID NO: 63475 - DNA, 642 bp, Zea Mays
ttgtagttggggaagatgctaatgtaactgttggaagcaaaagaaagctcaaatctgatgtatgtgaacaagtgacattaggaggcaaattaaaagcagaatgcaattggtgtaaaaagcattttgttggagatagtaaatctggcacaactcacttgcgtagtcatcttaaaacttgtcaacctaagcagtgtcaaaaaggcctaaagcaatcaatattgaagttgggcaaaaatgagaagggagttgtggttgaaaagtatgtttttgatcaagtagttgctagaaaagaacttgcactaatgatttgtgtgcatgagtacccactttctatggttgatcatgttgggttcagaagattttgtgcagcactacaaccccttttcaaagtagtgtccagaaacactattaaaatagacatatgggatatgtatgaggtgcaaagactttctatgaattccttccaacagtaccaatcttgaattgcgaattgttgtaactactgatatgtggacaacatatcaccaaaaaaaaggatacatgtcggttaaagtacattttatcaatgatgattggaagctgaaatcttttcttttaaggtaatattttgtttcgtttcatgttatctattgtagtcttgta

SEQ ID NO: 63476 - DNA, 619 bp, Zea Mays
gggatattcatctttaggagttgctctattcaaattgtgaaaatcaatgcatactctgaacttacctaattctttcttctccaccggcacaatattggagacccactctgcgtatctgcaaggtctaatacaattagcttctaacagctgatgaatttcgtcctttattcgtgagagaaggtctagacgaaatgttctagttttatgcttgaaaggtctgaaactagacttaatgggcagccgatgctctactatctcacggcttaaccctggcatctcagtgtagttccaagcaaagcaatcagaatattccttcaatagaccgatcatttcatccctaggatcggtctccagggtcttgttcacaaaagtcggccttggagttttaccatcccccatatcgatctcctccaacggatcagtcgatgtaaacccctatcctaatttgtcgagatatctgaattcctctattatgtctcccacaagggaattagatgatctctgtgtgacggcgaaccgtccggtctcgagagttggatcgtccgcaacactggttttatgttgtgatgactgctcggccttaaagtcgaaccgttttgcgacaaaccgaaccgtctag

SEQ ID NO: 63477 - DNA, 532 bp, Zea Mays
tttgccattggcacgctcgacgacgtcgttggactgtgggtggtataccgaggcgaagacgggcttggtgccgatggaaaaacagaaatccctgaagtcttggctatcgaattgtttgccattgtcgactgtgagtttggacgggactctaaagcggcaaacaatgttttgccagaagaatttttgtgcagtcttcgacgttatggtggatactgccttggcctcgatccactttgtgaaatattcgacggcgacgaaggcaaacttgaggttcccttgagctataggcagcggtccgacgatgtccagcccccagcgctgaagtggccatgtgtgggcgataagtttggtgagttgcaaggggctgcccgagcgaggtgagaatttttggcatgcttcacatgactcttcttgtagtcttgttgtccatactttatctgaggactcttcttgttgtcgtgttggtcccatccagtcaacgatgaagtctgccaggacctgtgacttgatcgctgttctgggttcaaaggtg

SEQ ID NO: 63478 - DNA, 978 bp, Zea Mays
gcgatgtgtgacaaagcaatggacaaagttgtccgcgccgagcgaatcctgatgagaagacctggtgttgtggtgcctgaggacatcgttgctgacgttctcgctgtatctactggtgtgagcaaaccttcttcctctggtaatcctgctggcgaggttccctgcaaaaattctcctgcacagtgatttgtttggatgagaaaatacttttcattgagttagtattcatagcgaaacagtgtatcatggattccacgtgtgtgtggtcacgctacgcttgaactgattattccattagtagggcgttgaaatcatcctcgaatatgtgagcatgttgtattactttgaggcattcctgacttgagctgactgttttgttagttgggcatagtaatcacccctaatcatgtaagcatgagcatgttgcaccgacttaaagcgtatctgacttaagccggttgctccgttagtagggtatagtgatcaccctaagtcgtgtaagcgtgagcatgtcgcaccgacttaaggtgtttccgacttaagctaattgcttcgttagtagggtatagtgatcaccctaagtcgtgtaggcgtgagcatgtcgcaccgacttaaggagttttcgactctagccgattgctccgttagtagggtatagtgatcaccctaagtcatgtaagtgtgagcatgtgtcaccgacttaaggcgtttgcgacttaaaccaattgctccgttagtagggtatagtgatcaccctaagtcgagtaagagcgagcatgtcacaccgacttaaggcatttccgacttaagccgattgctccgttagtagggtatagtgatcaccctaagtcgtgtaagcgtgagcatgtcgcactgacttaaggcatttccgacttaagccaattgctccgttactagggcatagtgatcaccctaagtcgtgtaagcatgagcatgtcgcacggacttaaggatttt

SEQ ID NO: 63479 - DNA, 340 bp, Zea Mays
gtcagcttgtagtggatctgggaagctacaaaaggtgggtggtttgtggctcatgaactcacggtgtttgtctcagggtggtggttggtgcgagtgttgctgattattattgagctgggcttgcatgttggccattgcattatccatctactgaagtagatgggtttgggcagcgaagaaggctttcgacccagtgggtggaggatttgggggattcacttgtgattctggattaattattgcccttcttcgacgtatgcatgccaattaatcaacatatcctcctctggtattgaccatatgtgttagatatatagggtaagatagatttgtagataag

SEQ ID NO: 63480 - DNA, 309 bp, Zea Mays
ttcgaattaggaaacaaacaatacatcattacaagagaacaaatagagtagatatgcatagagtatcacatacgatattgcatatgccaagattagagaagaaaggtctcgcagtggttaaagccttacccaaggcgtattacgggtagacgcataactagccattacgtgctctagtttcgcttcgttccaataataagaattagtcacatgcgttaataggatcataactcttactacattgacgacttgctatgctcctgttaagagaaagaacgaacttagccactacatttcatgtagtcaaac

SEQ ID NO: 63481 - DNA, 757 bp, Zea Mays
agcaactgactagtatatatacaagcgcgggtgtcgacgggtaggatcggatcgatagtgacccaacgacaacgtcgtgggtggggttatgaactctctcctcgctcggctgaccgtccatttctgcacagagtggagattattctgcctcgcgcgtgcaggaagaaggtggcgtcctggacctcgatcgatcggtatattcaactcgtgaccgccgatcggcaaacgtgatccagataaccgcgcgactgggcgcgcacctcagatccgtcccgatcttttcatcaaccccaacctttattactatgagacaggattcttatgtggcctatcgcattaccgcgatatactatactaatcacgggtgaatcaacgggataagcatacgaatgaaatcaagacaggtcgccaagaaagacaaagaacgcgtacagtccgaatactcgacgcacctgctcaccgtgccggaagcataataatggccgcttttccgcatggcgcatctcactctcaccggaaagcagcaaccagtttccagccgtgcaccgccctaacaataataaatccaccgtcgccgcagctgagacgaagacaataaatagaatgctaaactctcctgccaacacgtcgcgcgcgcgccctatatatataataaagttatccctcaagcgatccgatcctaacctatccgtttcacacaacacatcctgtttttgtccaaaatacgggcgcggcagactcgctcccccaactgaca

SEQ ID NO: 63482 - DNA, 746 bp, Zea Mays
ggcgcgcagcgagccaatataatccctccgatagtgtatgaaaagttttaaaaaagtagtagaacatatagcgtgcttttgtttgtttgcttatttgtttgggccaggaataaacttcaaatgacagattccatttgaaacctgaacatgtagcgtgtaagactgtcaggctgcgctctgcgcaggttcttaccagccaaacgaccgcgaattcgatctgattcctctcacacgatctctcttccgtcgaaggtgaacaaggtcgaccaatgaatagtgcacctaatgaatcaattttatgaaactgtggactccgcgacactgcaatgacttcgatcaaccgtttccgccacaccgtaatgagctcggacaagaaactacaaattattcggctataactcgctgaccgttcggatataatttgcagatcgtccacctgtattgatttgcttcagcccgaaggtgcaaaaagatttttggagctggcgcggaccgtctgggaccaaggacagactttccacgtctcgtcaaggggggaagacacccgttgatctagccgttgggttgtattgtatgacataactgttgtagtgtcagatccgaccgttagaggatcacggactgtccgggccctactgtccgcccatacacaatttgatagatgcgccataacaactatatggatggttgagggctataaaagacaccccaatcagctcattcacatgattcattgaaacatatca

SEQ ID NO: 63483 - DNA, 515 bp, Zea Mays
catgttttaatcttaattgacatgatgtgcacgtttagacatgcttactttttgtatacatttgtcgtcatggtcttgctttatttttggattaaattaaaaccaattgtcctaatttttctaacatgtgggcccaacgccaactcgctacacgagtacaaggacatcgatgccatcaaggtggagtcattcggatcccacgtcgacatcctcgcgacctcttctcttagcgtgcaacacgcacactagcttgcccacgacgtccaacaaagtcattgtttgccctcacaatgaagttgtcattgaagcacaaggatgtgtgcgcatctaggaggactggtcatcacactgctaggcctagcactagttaggggggtgtcgctcgctgtgcgacaccacctctatcatgccttggatcacttggttgaagagtactcatgctgatgacatgttagtataaaatgagtgatagtaaaaagtagagagattaaatattccatattttcgtaatgatc

SEQ ID NO: 63484 - DNA, 596 bp, Zea Mays
gctcgtgaggaattgtccaaactatttggtaaggaaatcttcaaagatcctttgtttagcatgtcatgactactagtcttcaaactcaaccaaacccgatcatctgcttccccatcctcgtgttgtgatatctatttctgagccttcactcaaatacttgaaccatgcatggcccaattctaatcgtcatatatgaaggcatttaccttcgtctcttcgattctataaaacgttattaaagtccccacttggattttgacacgattttttttaatttgaccctagacggtccaaacatccatatttgaaatactctattattttatatttcataaatttaaattccttgcattgttattcagtttcaaaaggtattggttaattcaaatatcacgaaaatccccacttagccggcggttgttgctagcgatggttaatctttattcggcgttgtgcttgcgcatgtagatcgagacacgcccactatgtgcatgcacctcttgtgacttctgagcaagagcaggggatgactattggtacacttattggcccgacccgatccctatatataaagtagctatatataacaacaaaca

SEQ ID NO: 63485 - DNA, 384 bp, Zea Mays
gggggatgagggtccatcgccgatacacaccgcacctatccgtggccttcgcgggctaaggcatcaaccggaacacaaccaattgctcaccatggatccatctccgttgtcgtccacgtcacgtcgttgttgggttccttcatagctcaatcggctggtaagtaccccacacaccaatcgccccgttgccctcaacgttttgaacctgttcggccatgggttggtgtagcggtgggtcattgctccttcgccagccatggcctctgtcgtggctatgggcggcgccgccgaggctcggccgtggggaggagcctcacgtgtggacgtctatctatgcagcaatggtcccgatttgatcaagccgataccctttcgcctttaatc

SEQ ID NO: 63486 - DNA, 553 bp, Zea Mays
atgaggggaattatccaactcatgatctggaattggccgcggtggtttttgctctaaagtcgtggaggcattacctttatggcgaggcttgtgacattttcaccgatcacaaaagtctcaagtatatttttactcagaaggagctgaatttgcggcagcgtcggtggctagaattgattaaagactatgagttgtccattcattatcacccggggaaggctaatgtggtggcggatgcccttagcaggtccggggttccaaaggtggccttgccattgatcgctgatctggaccgtttggggatcgctttgtgttatgtcggcaccgctagcgaggagactcagatgcttattcaatcctctctcatggagagggtgcgtgcggctcagcagcaggatcgtcttttgcaggaagctcaaaagagggttggtgatggtaaaccgcgggagttcaccattgacgagaatgatttggttcttttcaggggccgcctctgtgtgcctcagaaatcagaggtgaagatggatatcttgagagaagctcataaaacgcc

SEQ ID NO: 63487 - DNA, 754 bp, Zea Mays
gctgaatattcttgaagacaaaatcgatgacaacggcctcgacagtcaaaccattgtctttcaaacaactatttcatcaagcagaatcttggcttcggcaacctccgagtcagttggggcctttattcaactcgacactcgaacatcgggctgtctcccagagcgagcaggtagagacttgttgtggttttccatattgaaccactcgaagctccatcccttaatgttatccttcaatataatgtcaacatactcagttttcctaccgcgacgaagctcaaggcttgcgctgccaaccaaccggtgttgcccctggccataccaggcttgcagtggtacaaatatttccataacccaaagtggagattaatccccagaaaggccgcacagagatggacgaagatagaaatttggagtacataattggtattcagatgggttaagttgagggagtagaaatcgagaaggccgcggaagaagggagaaactggcagacctagacttcagatcaagaagggaacaaaaactaacgacttgtgggtatcctccgttgagacggcgatcccctgccatccccgccaaggtacatctccttctacagcaaaacctcgatttcaaccaactaaagcaaatcggattcagaaacgacagaggcatagttatcgcagaatggaaattggttgttgtggtcaattggaggaatgacaggtgcggtagctccttgcttcttcttcataggcgccatcaggacttg

SEQ ID NO: 63488 - DNA, 698 bp, Zea Mays
ccgaagccttgaccctctctcctcaccacgcctcagtcgatctcgtcgtggattgggtttgtgagagaaaaggggagggaagggagatttaggtcatcaccgtgccttcccatccatatgtcgtcgctggatgccgtaggaggggtcaggggccatcaccggggtaccccaaatacgtgtgcgggatccgcgggcatcggaggggaaacactgctgggaatcgctcgccggagtacgacaaccacgccgtgccacagttcaccgcggactgacctcctgtacgcaccatcctcggtgagtattggctcccccgttttgttctgctcagagctacatgatgcaaccgattgattggaggatagggcgttaggacgagcgatcgtagtggccggccatggtgtgccaccgtggaatttttgcgcggccgccggggttggcctggggggggggactggagttcgaccgtcggattcctatcagactgatgagattaattcgcgcataccgattggggggaagggcggtaaagcgaccgatcgaaacctaacggcttggattggatcgtgtagcatttgatactgaccgtagatcctgatccgacggtcaacgtagaataccggttcatttattagccgatctgatctgcgccgttcgtctctaatcggacggccgatatcgttccataccccttcgccgaa

SEQ ID NO: 63489 - DNA, 1146 bp, Zea Mays
tgattatctcgcgcccgagtcttggtgctcctaaaacccgggtgtgacatagtgctaacaagactctgattgtgtctagtctagccactggtacaaaaacttcatcataatccacaccttctttcagtgcataacccttggcaacaagtctagttttgtgtttgacatcattacctgcatcatctttcttaagtttgaaaacccacttcaaacctatggctttgtgacctctaggcaaatcagaccaaaacaaagtgttgttgtcttctattgaatgaagttttgatttcatagcttctctccacttctgactcttcagggcagtttcaacattcacatgttcatccactgctaacatacacacaccattgtactcataatcgagtatttctttagtattttcaaacagattagtcaatgtcttgtatttcacaggaaccattcctgagctttctgaacttgatgggtgtgaatggtgatttgtaactgaaactgagcctggattttgtgcttgtgatcctgaaggtatatcttgaatttgtgaattttgaggggttacaagtgattgtggtagtggtgacaccgatggcacttcaccactcccagaactctcaccctcttcacatgtatcagctggattcagtattgcctgaccgggtacaatgaactgaaattgaaaatttgagttgtctgagtccacttcagtcgactgagctttgttgtaactatcccagtgccatgcctcatcttcttcaaacttcacatccctactaatgcatagtttttcagtgattgggtcaaccattctatagccttttgtccctggttcatagcccagcatgaccattctgatggatctatctgccaacttgtctacctcgggacctattttcttgacatatttaatacagccaaaagttctgaggtgagccacttgaggtttcctgccatgccaggcctcataaggtgttttcccttgtacacttttagtaggtgatcgattcagtaaatacatagtagtggaaactgcctctccccaatatcttggagggacacccttacttttcaacaaacatcttgccatttcaaccactgactggtttctcctctctaccaccccattctcctgaggggagtagggtgtgg

SEQ ID NO: 63490 - DNA, 424 bp, Zea Mays
gattgttgaaggtagaagatgaaaatggcctatgagtctagcggggtctaatgttttcgtaggggtatcattttagccttatataaccaactaaagagatcaccctgtgcagtttagaaccctatacatgtctacccacttccgctatagatgtgtcgagtcttctgatgttcatttggcttcttgcgaggcttgcacacggcttcatgcacgggatcttgactcggcacgcgatcgctttagtcgcctttggttgcacccaacggaggcccacgaagtgcctcacgggagactcatcaggggccttataggtggcccatggaacgtaactatgccatgatgacccgggggatattcatcccacacacctccttctccaagcaaaaactagttaaaacttcctttaatcgcactcctttaaatt

SEQ ID NO: 63491 - DNA, 747 bp, Zea Mays
gaagaatgaaaaggtagacgaacgtgacgtcctagctggtaggcatggcatatgggggtgtttttattcggggtacaaggaatgacagaagactgagctagctgagtgaggactgcagatcctggatgtccaagtcgttgatgccacaatgaagaggtggtagcatggagagaagatgttgtgctcctgagtgggtagagtgggctggagctatcacaccgaaggatcatgcgccgagtgggaagatccttcacagagcagccaagagggtcaaattccacagaacaattattgtcagtggtgaattggcgaacagaaattaaatctttaatgagagacggtgaaacaaggacattgttaagacgaaaattgtgagaaagttgagtggtgccagtggaagtgacaggaagaaggttgccattgccaacaacaatgttagagggtagatgatgataagaggagaggtgggaaagtataccagcgtcggaagtcatgtgactggaggcacctgtgtcgaagaaccactcttgctactggggatgttgaagagtggtggtttgggaattggtgacgagttgttggagatcccaaccaggagggggtggagcagcgccagtgtagtcaggggccggcccatatgcctgagggggggccaggagcctgcccactggccgggaggaccagcaagaaaggcctgaggcggttgagttggagcaagaggccctgaggtcggtggacgaggtgctg

SEQ ID NO: 63492 - DNA, 917 bp, Zea Mays
cggggattcagtcattaccttcagaatttcggctacttcagcggcagagggcgttggaggagcttcttctcctgtctcatctaccttcggctcagaatagggcgctgtgtcaagctttcgctttttagagattgtcgcctttggctcaggtgctgtttttgttttcttcaaaactttttcatcttccttcactagccgagcagcttgcctactcaggatgttgacaatccttttcctttttaccccttcggcccctttgtcaagcctctcgtaatccgggtattcgaagtttaatgcgtccatcacccaattcagccttcgtttcggccgggtgccgaaggtagcattcattaattggtcttccttcttggtgtagttgccaagaatttcgttacacattgtttcgatcatttctagccactctttgcatggcttcttgaattgcttctcaaatttaaattgataagggagccgaacaagtttgtactttttgcccccctcttttttcttaggcattctccaaccactagaggtcggaaatattctatttgccaagtactcttgtactagacctctagtgctgatttcggcagctaccactctgaattccacttcggctggctggcatggggagccaagctgcatgtggcacaagggccttgtcatcccgaagcttaatttcaatggactcatgaccatagtcattagcttctcccttttcttcttgtccgcttttatgtaaaaccattcgcttgtccaaccggtcggcaacttggtacgatagccaattatcagggcctttgtatctttttgatatgcgaagttgtagcagccgaagttcttatgaagaccatctgctctggccttcgtttgatagtgtagctcatgcacccggcagaaagcttcggcattaggac

SEQ ID NO: 63493 - DNA, 780 bp, Zea Mays
ccggagctctcgaacggtggcgatgaacagaggacggcacaaaggaaggttgatagaagcactgcctcggcttcggggcgtcctctccggcggcaaacggcgtcggcagctccgatcggtgttatacgacaacgtcgactgcaacgcaacggtggggatctagtggcggggcaaaaagggtcgctggcaagaggaccaacacagttgtgacgagcagagataaatttcgatgagcggtcgtacgaacagagattaacaagaaggttggaagaacggtgtgagggagtgcagaaggggatgctgccttttataggagaggagaggggaaggagaggagtcggggctgcagacttcacgcggtcccgtggccattgctgcaccataaatccagagaaacacatgccatgaagctccattaatggtagacgttacgacggacgaacgactgagtggcggtggtttcgggctactgcatgtctggcatgacagcggcatggcttgggcgcgcgtgtggctgggcactggtgctcggcgctgctaggcgtagctcggtcaaatcagcaaggctgcagtgtttctgatgtattcgttagctgatttgaggaagaagatagcacttacacgtgggtctcaattgtcattgagaagaaaaacagaaaagaaaagggcccacacgtaagccacacaaaggagagaacgtgagagtcctgggcatgagccttcggccaagcatttcgtgtgttttttattttttttttaatttcgaaaattcattctttt

SEQ ID NO: 63494 - DNA, 753 bp, Zea Mays
tgctggtcaatagctctaagaactatcttagggataatcagagctgacatatcgtgaagaggtaaggcgctaaggacactctgaacaagagtaagatgatcagcgtggttaagaagtttaacttttcagctcgctaggtacagatcacatgacacgattaaagggaagtagtcagaaggagtaattgtgtgaggggtgagagggaggccaagataggtttgggggaaggacaaaatgagagtgcccaaaatcttagagagggcatgagtggtggaatcatcgacaaagacagggaggaaggtaggtttgctatagtttacggtcaggctagtggccaaagcaaaatcatcaagcactttcctaagcactggaggttttcacaaagataaatgtgtcatcggcatacttaagaacatgacacggctccccatctacgatgggatgacacagatcgtgctcaacactcctaaaggcaatgagctgacggagaacatcgaccacgatgatgaaaagaaaaggagaggccttgagtttagtagcatggcagatttggaagcatagaaatgcgtgtgtgtttgacaatgcttccccaaacatccacgtaattttgttgtccatccatgatgatgccttattatggggctttgttggggctgctgctcttaggaaggtctggcagtagttgggtgtgtattctcgtttttccttttcctttttcctttccttaggtgctttctaggcaccttgtattgg

SEQ ID NO: 63495 - DNA, 507 bp, Zea Mays
cttgcagcttgtgacggtgattatccaaatctgccatggtaaaacgatggctcctctccaagatagtcaaagaattgttggtgtcgcgatacaacctatcaaggttttcacgagaagctacgagtacacgtttttcttcctgcagacaagaatcagctctcaagcacccagtaagcagcaaaaacacagcagagagagccaagtaagcttacttcattagccgccctttcagagtcaagctgagcactgagagaggaattcaatgagttggcatcatctaaagaagctaaaacccgagccaggtccatctgaccttgagaatacttctcctcgagctcagagtactgctgggtcatatctagcaaaaaacggttgaagaaggatattcagttaaaaagcagattaatcaagtagccaaggaggaaaaaaggcactaaccagcatttgtcattttcaaatcagatatctgcctctgaagcagcatcagattccaatgcgtcagagaca

SEQ ID NO: 63496 - DNA, 459 bp, Zea Mays
gttaggatgagcgattgtagtggccggccatggcgcgccgccgtgtgattctggggatgtcctcgccgtcggcgttgggggggggagaagatgcctctgccgttagatctgaacgtgcggtagagattagaagtttctcacccattcggcttgggcgactactaaccgtccgatctagatcggtcgtacgtggtgtgatcgggggcattttaaatcatagacgttcatcaccgatccgatggttccaattgtttaccagttcgaacagccccaagtctaatctgtgtcgtccatattggatcgtgcggccgatatcttaggatacccctttggtcgcgatagttttgcacataagaccctctgttttacgaaaactaacccaccgtccatgcagaggtagttctggttcttagaaatatttgcaccatagaccctagactctctggaaattgatgcgag

SEQ ID NO: 63497 - DNA, 550 bp, Zea Mays
cgtgtcctgtgcccatgccgtggcagaaaagtgcgtaggaaagcaaccatattatagtactcgtaataatttaatgcctaaagttttgggtttgactcgatcgatcgatggctttcgtctttcattgcgctgttctcaccacatgtgtgtgtggctgggtttgtttttccggtgtaccctgtcttccaaacagttccattccaccaacagttccggacaagcttgacatatagcacttccaaaagcttgtggtcgtgctacctatttgaatttagcatggttaaattaacattttgctcgtccacttcttcttaatacaaattgtatgggttggactggactgtctgacgccaccaaaacgtatgaacttttccccatgacgatggctatgatatgacaaactaaggggctgtttggtagcacgactaatccgccacaccgcaccacagttttaccgcagcagattcgaccgccgcggcttaggcacggcatggcgcgggaggccacacaccaaactagccttaactctcttgaaaccctgactttttcc

SEQ ID NO: 63498 - DNA, 393 bp, Zea Mays
ccaatctgatctaatataatatgacttaatctaatctaatatgatttagtccgatctaatccctaattcaggttagttaatagtggtaaaatagattagaccctactcatataaacatgttttaatctaattcactctaccataaattgatgccttagaccaactcgaacatatacatacaatctaacctacatgttcttgatatgttgcctaatctatctatttcaaaacaagattctaacctaccaacctgatctacatgttcctaatgatttgcataacctatgtattccaacctaacaacaaaacatagattctgaccaacctacctcatgaaatctatcttacccactgttatcttaccagatgtccataactcgaatggagacacca

SEQ ID NO: 63499 - DNA, 374 bp, Zea Mays
actatgataaaagtcattatcctgaaacaaacccgaagatatttaaggcttattagtttgagatcctttggcaaagacacaccccaacttctggtttagcttatatcatccccattgacacattccatcctacacctctatcattctttgtgttgcttatggccttgtagcttgctttaagatccttcttgtcttgaagttgttgctttgtgaaatgtgctaggggaacttctcattgaactgactagtgatgcttctccaaccacctgagttccaaccattttccctttaaattgggcatcaaccttgtgctcaattaatacttcaattaaacccttctcatataagaagtcccaattcaccctagatgcttc

SEQ ID NO: 63500 - DNA, 385 bp, Zea Mays
gcatttcatcgaacatgtggagcacacatgtatctgttgtaacatcgatggagttacttcctacaacaaactgtccatgttgggacatcaatggagcttcgttagttcgcggacatgtaatgatgtaagtcgccggagttgtggttgccggttgcccccaaagcatcgcttggtcgcgggctatcctacgcggcctgcgctcgctgccaatcaccagaccacgcgcagaggtggctccacccatgttttgcacgttctctgctccggggaagcctaggccgcgccaactctagggaaaccaaaccgtgcccggtaccgaaggtggagatgccgacgtcacgtcctcctccgcgtctcacagcaaggacgacgccgcgtgatgtag

SEQ ID NO: 63501 - DNA, 520 bp, Zea Mays
aaagagcgttgtccatggcaagctcactctgtacggtgctctaaaccgatttggggaaagtctcaaattggggctctctggtggataatcggaggcacgagtgggtgtgtttggtgcttgactacatagaggagccgatggcacgctcaatttataggattcaagggcggtggcccatgaattggagatggtgcggtggcggccggagagggaagaagttactggcgcaagcaattcgtggatgttaccgtggcaagaccaccggcgacgaatagacatgctaaggcgatgtactgcgacgtgtttaaagggtcatagcgtgtcgcgatcacggcggacaacgcatacctcgacgacggtcgcttaaccacgtcgccggtgcaagtggacgagtgacagtgcggccacaatgtcctgagctcatccgcaatgagatctttttaccgttgagcgtaatccatacatccgaggcacgaatcgcgacggctggcgcgaatccgggcgcacggctcaccggcgg

SEQ ID NO: 63502 - DNA, 602 bp, Zea Mays
gtcattgccgacttaagccgattcgctccgttagtaggatatagtggtcaccctaagttgagtaagcacgagcatgttgatacagggtgagcaggtaggcagtgaggtacacgactgaggggtcgtcctcaagtagctgctgaccttccaatgcacgcatcctggccatccaaacgggacggtctctctgaaagggtggaaagaatctgagcggtgtgtcggccacttcttcttcatacagttgacacaaggtcctcaatgccttgcgagcgacgacttggcaggtgtctttgaatctgtgcccagcagcagtgacactccattccacatggtgcagactggatccaatgtatacagtcacgacacacttctctgtgccatgctcgacgaattcacgaccatcatactctggctggctcctgatttcgaggcgaactgtgcatgctctcagcaacttggggaaaccatcttcattctggcaaaagctggtttggcagcgaacctccatttgacttctgagagaaggaaagggggaaagcatttttgaaatgaagggatgagagcaagattttttttaagaaaatagttttgactcaaaaact

SEQ ID NO: 63503 - DNA, 903 bp, Zea Mays
cctatgtgatggtagcttcataaaaatcttagtgacactatttattaggctaatgggtttaaagtcctcattttttcaatatcctcgttctttggcaacaagatgatgttagcctcattgagtatgtcaaaattttgaaatccctgagcatgtagaatgtgcatgaccgctattaggtcattcttgatgatgggcctacaagatttataaaaaccacccacaaaaccattaggccctagtgccttatctgtgggtgtttgcccaatagcctacagaatttcatactcaagtaaatggtgtgtccagattgacgaggtcgaaactttagaggttcaaggcatcctactttggatcatattgcctcatttatgtcttcctcgctaatgtgttaaaaagagatttagcaatgttggcattaccctcatgtgacgttgcccaacctcccttgaagtgtaagtgctagataaaattatttcttcttctcctgtatgccttcttgttctttcaatgatggccttcgccatgacgtgtttcttgagtctggtacacaatagtatttcttcgaaagatagctccctcaattcttgtgcggtcttgagctgttgtatcacatccagagtttcgcgtcctaaaataagaactacaagaattcaggtttcaactctaattttgaaggttgaaaggtcacaaagttggagacactcaaattccttcatcaataactcttttctatggttgatgagagtgtttggattagatgcttgtgcttgtatatatttccctcgcgcccacctgcgcccggtcatctatcgattaatcctgctccagtcatccatgtgtctcagttctagtgtcatcctctatccatccatcagttccccgtcctccttagcacgaattagc

SEQ ID NO: 63504 - DNA, 502 bp, Zea Mays
caaagcatacattactcacaaataaaaatatactcgcaagatgtaatttcatgtcaagacgaaggaacatttttttccataatcaaaaaagaaaaggtttagagtccggttattaggattcagctgatttccccgattgtttgttgagtcaatccttgtaataaatacctatggctttgtccatgtaaggacaaatagagatcgtttgaatgaaagtttagtttacgttctgtccagccctggcgctctactgctcaatatcgttcttctctattattgccgtttagttcagggagagagcaagaacctggtcgatcctgcggtgattaatccaacattctcttctatggtcacggctatatatatcttttccgccaaatccatctacgaaaaattctggatacattgggtgcccttcgatccggcaccatgcatgtggacgccaaattaatacagcaaaggaaacatcatatttgatcgcaaggtgtcagaaccatcctgc

SEQ ID NO: 63505 - DNA, 769 bp, Zea Mays
ggaatacatcatgcacatcagatagatgatctggtagctcgagctggtaggccatctccctaactcgcttaaggattttgaacggtcctataaagcgagggggataacttgcctttaactttaaacctcctcattccatgaattggtgacacctttaagtatacatgatcaccctcttcaaactccagtggtcttcttcgattatcagcatagctcttctgtcgagtctatgctatcctcaagttctcccggatcatacgaacttgttcttctgtgtcttgaataatttcaggcccaaagaactgtctttcaccagtctgatcccaatacagatgggttctacactttctaccatataaagcttcaaatggagacatcttgagacttgcccgataactattgttgtaagagaactctgcatatgatagactcttgtcccaactgcccccatgcttaagggcgtaggctcttaacatatcctcaagtacttgattggttctcttagtctagccatcagtttggggatgataggccgagctgaaattcaacttcgtatccatattttcatggaggctcttccaaaatcttgaggtaaactgagaccctcgatcagaaacaatcttcttcggcacaccatgcaggcacacaattcgttccatgtatagctctgctaactaggaacccttataggttgtcttgaccgggataaagagagccactttggttaatctatccacgatcacccatatggaatcataacctttttggg

SEQ ID NO: 63506 - DNA, 283 bp, Zea Mays
ggaataatggatccttgtgtccctggttgtcgagagaaaaggggcagcgtttgcgtagcaccggaaacggacaggggcatggcatccttgtccagagatactcctgctttcttggcagagagggcgtgagcggtgagccgcatccttgtccagagattaagataagaatctgacggctggcggtgacccaaactccgcgtcgtcgtcgtcggtgccttgctttaggcttgtccgtgcccagatgagatctaggctgacggaacacacgaacattcgaatgttg

SEQ ID NO: 63507 - DNA, 1053 bp, Zea Mays
ggcatctaagagcggaacaaaaattagataacttagaatctacttctaaaactaaaactatagattctaattttcatctagtcaaaatatatgtgataaatagtctatctcgatgtgcaactaaggttttgctggtgtgccgctatctttaccacaagagttgtacaacataggttctaatcctatcattagattatcaacctagactattaatattacaaacacaaccaaatacataaagtaattgtggaagacaagggtgataaatatgtaagctcacattcaacaatgtcagtatttttaccaaagtatcgagaagctcctcgcttgactcatagtcctcattggatttcctcgcaaaaaaaactcttgtaggggccaagttgccggtcaggtacccctatggatagcctcctagccttcctcatacacaagtgggtccttgaaatgtcctctcctaaaatgttgcccattgccttcagtaccaaacttccagtcgaaatgttgtagtccttgttcacaccattatatgtgatggtcacaccacaacacacaatttgtatggtcccgtaagactacaagcccctccgatgtatatcaatagtgtatgtaagtacctaatagcgagaagtgtgcaaaccttgctaaacactaggtgtaagcctagagtaagtgcatttaacagtgggttaaccatcctaaacagatcgcaaagcacatacagtaatcaccaagggtatctctaatcattatacaagtggagagctctaaaatggatagtgacaccctagtatagtttctcaactttgtccactcccttggactggttggggttctatatagccacacccgtcatgaatatggtcgctggatagggtttccacgctctgctagacctagtgatctaactgtcgatgttggcgatgcaaccatgaggttagtccaacgatcatcgactctcactgagacactgaccctaggagtcgacctctagccattagcgccctccaccatcaggctcgctaagtgccgattcggtttgtggactacgac

SEQ ID NO: 63508 - DNA, 917 bp, Zea Mays
atttcttcaacctttagaatgtactcagttctggcactgctcgccgtaccgttcgctcgggcgctgcgtggagccacacccatgcctgccatttcgcgtcatgctggaccatctgcctgctcgtggcctcgcactatgcagtggaacgccaccttcccgacgactcttccccttcttccccactcaagcaatgtgacggtttcctctctctccctccattaatagctccctccattaatagctgtcgccgtttcttctgggtccgtggtcgcctcatcggctcgtcttctgctggttcatctccccgcgagtggactagtctccaacgcctgtccgtttctctcctctctcccttaatccgtcattttctcctcaccattaaccgatctgtattttctccgccattaatggctgccgccgtgattctacttcaccggacgtcccttccccctttctaggctataaataatgtgcccatgacccctgagtccgtgctcgacctccttcttcgctttccccatgcgccattcctgctgccagcataatccatgcaccgtcgcttgccaaccatcgttgctgggccaattcgacgccgtcgagcctccctcgctgccagcaacagcttacccagcatctcctcgcctctgttctactcgcctgccgctgctcgctgtcgtcgccgtgattgctgctgcatcgcttggagtgctcccgaccgaagagcctcgtcgcattcctacacgttcttctccgcgcctgctgctgccgtcgcgccatcgccacacctaacaccgtcatcatcaccagaaagatccgtccctgagcctagctcgtccgcaccgctaaaaccgtcgatccgctccatgtatcgtggccacgtgctgaaggtagaagacgagatctattttttgttagct

SEQ ID NO: 63509 - DNA, 1195 bp, Zea Mays
tcttctttaagtccgtgttgacttgttctatggcatattgagataggtgattgaacttggcaaggtactacattacaaagtcactgccttgcttcaaacaaacaaactcttcaagcttcgtctaaagaataccacctggaatgtaatcgtcactaaatgcttgtttaaactcttcccaagtgatgagatgacctttaggctgaattgctacgaagttttcccaccaggtactagtgaggcctcgcagttgttgagcaacaaataggggcttctgagtctctatgcatcggatcagcccaaatttttgttccatcacgcggagctactcatccgcctccaaaggtttttctgctttcacgaagacaggggatgagttttcgagaattccatataagtagtgtctctagaagcctgattttggcccctgcctccttgatggtggatctgatttccttccatctcttggaggaaccgggtattgtcagcagtggcatttagttgggcagcaatggcctccgccaaagttgcaggtaccggcgacgggattagggtctccttcccactaccccgagaagtccctgcccgaccatgactacatgtacttgttggcatctagagaagaaaacatactttatattatacaatatggttatacaacctttgttacattattccaagctcttacttattatacatacttagtccatacaaactcactcctcctagtaagtctaaacaaaagaaacaacacactactatattactctagtcctcaacatcctttgccgctccagacccgctactagcttcgggagggcgattgtccacaatattcataggaggaggtgttccaaagatgtctagctatccatagggtcctccttcaccagcttccattgcaccatcgaccatctcggcaacttatggtggtacatatggatgtagctggtcatataacacatgcacttcttcgtgcaggatgttattatgcacttatagattttccagggctagactcagctcttccacctgggctttggcagttgcctcacaatcctaggctatggatcacgaattcaccacccaatcgatagcctcatcatgctccacccactcccgttgcaggcgttctacttctccttacaactcaacaatgcagtgactagcatgcggacactccctgcctccatgtcgc

SEQ ID NO: 63510 - DNA, 582 bp, Zea Mays
atttcgtttcattttttgttgtgtgtgtcctccctcccaaggaaacagatgtgccgttacttcctgtggtcgcatgcatgtgctcgcagcacgcgtgccgtgtggaggcgcaggattcgcgcaggagtacaacgggtcatccaactgtcagagtaacggatccgacatgtccctggatggatccagcttctggaccgtagggtaacggctctggacagactggattgtgtactgtacttgtggcgtagtagtagcaatagtaaaggacttgtggcgagagatctggctggcctcctcgtatccagaataaacggcagcactaattaggtcaaaacgcagaagctcgatttgacgtatccatggatggatccttgattacaggccaatccatcgttctagtgaaaaaagtgacagcaacgatcgctttgatttctgcctactccattccattggccgatcgggtcctcacttggattttagtgtatgatggatcactataaaaattcctcgatggactgcacaaaatatcacagaaataactttctatgcacataggaacacgaataatctctcgaccataag

SEQ ID NO: 63511 - DNA, 374 bp, Zea Mays
gtgaagctctcaagactcgatgttcgaactctactcgccgtcatggattagcactggggacagcctctgcgctgaccgtccaacccgtgtcatccctgctcgatttcacgagagcaccgtaatcatggtaggtctctgatgctcctcgcgtcgtttgtgtgagctctaccgtgcagttgccgcgggatcgagctcgcgggtctgtgcttcccgtcgccgccgtcggtagcctaggttctcgggtccccgtggtcgattaagcccatgtctgagtccgacgttgttcggggttcgtgatggtgccatcgccgtcgtttgcgtcaagccaccttggccgattgggcgctagttcgccggagcaccgcgtggcggtg

SEQ ID NO: 63512 - DNA, 440 bp, Zea Mays
ctcctgcgcgttcgagagaaaaaaacattctcacgacctgcgtttttacaaggcaattttggcaccatttgttgccccactggggttgggtggtatttctcctagacagaacgaggtctgtttcgcggaatggtggaggaaatcaagccggcgagtgaagaaagatagaagggaaggttttcattctttcgttatttttggtgcttggaccctttggaataagagaaatatttatgtttttgagggtgcctctccttccctttcggtagcccaaaacttcagcagagaagaagttagattgtggtgtttggctggagctgctaagctccaggttttagtgagtgggtgggtgatttttggtcatggagggatggcttaactctctcctttctagaggtccctcttgtttgtgtcaggcgcggattcgtctttgttttttc

SEQ ID NO: 63513 - DNA, 3347 bp, Zea Mays
gcgggggcagtccaaggagttcctgcgggtggaagtgcgaggtgcgggagcgttcgatgccgggaagtgctccggttccggggcacaacatccagtggactccatctcgcaggtacggcttctcttctgtagccagacgccagtgataatatctcatgtttccactacgaacactgcgaatatttagttctgttataccacttttttagataaaatgtctcccccgctttatttctgggaattatgaaacaacagttctcacactctaagcatatcagcatatttgagggtgcccaccaaaaccaattttaccctcacaggtacttactactagggatagtgtcctaaactcaattctcaacctggcatgtcaatcaaactatatctctaatgggaatgcatcgtgcacgcctgcctaagcttgcggaatctgagagtttttcttgccaccatgttaatcttggctgttgctttgggcaacaccaccttaacatctgccagacacctgtccctggaaacacatagcactctatatagtccatagaacatcaaaagtcagagtcagtttcataaatctgttctccttttatatacagggacgctactttgaggagcaggtattggggactcctagtgcccctccaattgcaggggtcgaggaggatgttatgtttcatgcagttggtaaggacatcagagactgtgatagaaattcattgatttaacttgtcctggaaatggtgttttccttggcattcatatggtattgcaaacagaaagggctgaaatggatggagggcttgagaggaatggagtatcatcagtagcagatatactggcccaagatgttcatgagcttcatacgaggtaaatcgaaattgtagattgctcacagttatagtttttattacattttggggcaaatctggctaacatttgctctttgcctgttgaaattatgcgaattcagctcaattgttcatgaagatggcgttgagaataacttattagctcagataccgagcttcactattaagtgagttttgatttatctttaaccttattcatttgaagatgttgttgtctgcctcctgttcttattgcttgcttgctctcgtcagtgtccaaaatgcatggcaatcctttgttgcatatgatgcatgcttcaggttatgtctgaatgcatgggcaagaaactgcatggaagctccagacttccttcgggatgagtgcatggtactgcgaagtgcctttgggtatgcaacagcttatgcatgagtacatgttctgagtaatctagtattacttcactatttttgccttttagcacacaacttatgtgcttctttttatgaacagaatacagaacttcttgcttcatccaaaacacaatagtcaagttgatggtaaacaaatgtatgataaggatggaaattgtactataaagggaaggaaacttgttaaacagattgagattgaaggtatgtataagcaatcatttcagtcatcaacattactcgccttgaaacattacatcggaaaattcttcaggaaaaggctagcatattacaataaggaatgtccgaactgtaaacttgtagcaatgtttgaaaaacaaagcaagcttacactaacatatttttattaacagtaaaaaagatacgggttgtacctcaaagaccaaagcttcgagcaacatcatcctttagaaatctctacatgcaagctggcagtgagtatgtcagacagatttctaagattctgaagagccaggttacgatgttgacatccacatcatctacatctttgccggaaggttaatatgaaagtttttgttttcctatagcaaaccccagtcacagtaatatttacatcgacagtaacacagtgtctatggctctatgctttcagaaatgttcacatgcactctagaactgcaaagttcttgcaaaggtcataagagagattcaatttctccacaatatttgaagccagggactggtgaatctcaactcttgtaagttacatccttagtcgttgttctgtgatgtacttgcatattcattctttcattggaactatgaaacagatagtattcttgaaccgtctgttatcacttatgttttagttatctagagagccagggggatgttattcttgttgaagtacaagacaacaatagggttgtcataggccgtgcaaaaattcaagtttcatcattgactgatactcaagtatgtctaaacaaattcatgagtttagtgcaaatgtttcatgataattctgtagtcactgaaggagtttgtatttggacaaatttgaaaagcagcaggatgaaatcatcaggtggtggcctctatatcttgatgatcaagattgtgtcggaaaagttcagcttggtatgaatttatccatgtcttccaataactatgggtccgaaaaggttagttattctcatcttttctttctccaaatccatcaaacattgtgttaaccttgtctcatctatattcttataagaaaacatattgtattatcgttacagatgctgcaaggtggccctgcagtggataccatcatatatgacatggttctggaagcggcaatgagggctcaaaatttcaacagcaaaatgcttcatatcaatggtccatggatttggctgttggacgagttttctgattactatggaatatctgatgcatatagaaaattgaggtgaacaattgttttgcttgtgtatagtcaatgatgattggtgaatataattatacatgatagaatcacatcatatgttactttttacaggtacttgtcttacatcatgaacgtggcaataccaaccaaggattgtttggaacttatatatgaacttatcgttccagtcacaaaagcacgagaagatagaactttaacaagacaagaggtatcatctaagttctctctatatattattgcaaaactcggagaactcggagataaaattgcaaaacattaaaatgctcggcaaaatatttaccaaatcatgtccacaaaatacactgggcaaattgagaaccttctacaattccaggtttcagtagtacacatcagttatcgtgttttgttctttgttacagcgaagtattttgatagactgtgaagatcggattaagagtctccttgcagctctgtttgaaaattacaaatcactggatgaatattctccaactggcttgtcagatttatttggccccataacagattctgctgcaccagctttggcacctgctgttcagatattcagtgtactgcatgacattctctccaaagaagcacaagacatacttaggaactatttgcaggtc

SEQ ID NO: 63514 - DNA, 572 bp, Zea Mays
tattatatgtattatttgggtacaaacagaaatgcagagggagaatctacttgccttgctcaaacgtaccctacgagtcctcttcaaacaaattcgggtcttctaccacgtaatccgcttcaaatatagtcgcacatcgtacatacaaaaataaaacatacaccattcaacaaacaataaaacatacattatgcaaatcacgcttatcaaaggaagacatccaacaataaaagttgattcgtaactataatgtaaatcaaatcgtaattttagcttgaaggttagaaacactaattatttcattttattccttttggataaaacaagtgatgtatataacatggactaaatttaatgaaatgactaatcaagtctaaataactaattatgaacatttgagatataaatttaattaacaatctatgggaaaagataattaatctattaattactttaatttcattttaggaacaaatgatacaattcactaataaggaaattacgttcaataatataaataattatttaaaaaaatcaaacattacttgacctattttaatattttacacaac

SEQ ID NO: 63515 - DNA, 271 bp, Zea Mays
ctggttctgcctgcacacacatgcacacgacggccgccgtggccatgcatgtctcttcgagctcgagcggatcaatgcacacgggcaccatgtactagtaggcgtaggtgtacgcgtgctgttcctacgaacggcacaggatcgtcatgtcgtcgtccgctcctcttgacggcatacatgatacggccacaccccaatcgctccctagtagtcctatctccgtccatccatcaactttagcacaggatcgatctctagctagctatactgc

SEQ ID NO: 63516 - DNA, 727 bp, Zea Mays
aaacgtaggaaacgcagtaggatggtattacttaccgacacctaggactttgacagccaaccaccatgtgagacggctccgcctaaagactggaaccccacgatgtattccttgatcaccgcttgttcctcctctcgatttgccgaatgatagtggtgtactcgaaaagggagaagagtttattgttttttctatggccgaggggtgaagctaatatataggggcagggttatggttagcgacggccctagcagtggtcacaataacccaagaactcgctggaaccctaacaacattcatgtttggagaacactcaggcaaggggtgtagggcatggatatacctattctatttggtatgagtctaaggttctcgggttggttgcggaacatgagcggactccatgttggatcgcgaagaaaataacgctggtcttgccgggacgaaggacctagccacgagggcccataggtcagcgctgccggtgagcacgcacgacgctaaacaagacacgaatcaagcgatttacgccactggtgtttcatgtggttagcaagcgcaggattagcccaatgccactggccttggtgggcacagagttgggaggctaggcacagatgggtcggctcgtggcccacacacgcgcgaggggggagaacaacatcactgggtcgggaccgaaatacgacccaagctttagtttcttttttatttaaatcagatttta

SEQ ID NO: 63517 - DNA, 399 bp, Zea Mays
tgaccaccatatacgcgtaatgctggagatcgcataagaggttagtttggctgatcctattttcattagtacaaactccgaccgccgagtagctaattccatttttttttcaccgcccaactggcgcatcgagatctcctatcgatcaggcctgggctccgatggctctgacacgttgacctcgccgcgtccgctcctttggagagttttgactaccacgcacactgggactcacagtccaaagtctgaactcgctcgctcgtgatctcacgtgcagcgcaccgagtcccggttggccggccggttcgacccgatcgagtgtagtgtagactacacggacggggagacgtcagcgactcagcggcattggtgggcagcgtcagcgttgaccgtgatcca

SEQ ID NO: 63518 - DNA, 395 bp, Zea Mays
gaggggcgccactaccaacgccccagcaggagcagcgtcgaaagaatcctcagccagcaaatcaagcatagcgcttatctctgcatcactagggttcaggggcacctcaaaatggacctgccgttcatcatcaggaatctccccaagcgaggcaaccaaggcactaacttcttcagcagagggtcgcactctaaggcccaaactgccatcagtgacaggtggattcgacacaaaaagggtgaaggctttgggaggaggcaggttccaggccgagtatgccaccggagcaccaacatttgacactttgcccctaaggatcatctcaagtcggctcaccaagtctgcagagggaattcttctgttggtaacccgagttgagtcggctagccctcgat

SEQ ID NO: 63519 - DNA, 355 bp, Zea Mays
tttagagtgcagtagatgaagttttaggtgcaactcaagctacccagggcagaaacttgcctagggaagcaattacatgtggtgggaggacctactccgagacctatgttaggagtaggaaatgccaaaaagttacagtggcttaggacttgcagcaaggagatggcagtggcagtgacaatgacagtcacaacgaaaatgatcattgagagccaactcaaaatgaccaagatgctgcagaaaaagtgattgatgatgaagatgaatctggagctgctggtgatcaattcaagctggatgatgatctcatataggtgttgccttcttggaccttagtcatagtctactaatctac

SEQ ID NO: 63520 - DNA, 478 bp, Zea Mays
gcgagcataaattctcgagaatgtaggggctaaaacataaagttctaggctcggttgtaatttgttttgacttggggaggacggcgggtttatttaaaaggagtccgaggtatctttagcaattatcctaggccgaaggtgtatcagcgatcgagagccgttggattacaaaacaagcgctcggattagattgtcttcacatcgaatcggtacgcattccccacccttagatctgtgatgcacgccccggatttaaaacaatagaatttgagtctcgtgcgccagatctgtatcggacggtcgtgaatcaatctacgaaggggtacgcgatccactaatctccgtcgttcagacagaaccggacggtgtagatttggttggatgaagggctatacctgcagtaatcagatccacacaatccagatcggacgaccgcatgatcttcttctacctccacacccagtcgtagatgcccgca

SEQ ID NO: 63521 - DNA, 617 bp, Zea Mays
aaaacactctttatttttggtaagccaaaaacttcaacgtcatcaaataacacgaaactacatgaaacatgaactttagattaggtggcccacgcatataggtgtgacaagtgcaatgtgtacttacggagactctaaagaaaagggaggtacgactgcaaccgtcctattttggttaagtgtaggcggtgccattgatcttctagtatcgatcataacatcattaaaagaaacataaaactatgagaatgattaaatagcatattagaaaacaaaaatgggctatagctttgtaattttgcaaaggattgtaaaacgaacaaaaacatctatttaggctgcataattttgtgacaaaaacaaagttgggccatagatctatcaaacgaaacaaccaagggtaacaaatatatagaacacacataaatagaatctgaaatgaacacgcataaatatatagagccaatgcaatgactaaaaagttttattggtatgataacaagcaaaaagaaatgactgaactaaactactaaactgtcgccgcgcatgatatggacaaaaatatagacaacagttgttagataattcaccataatagataatgtgtgtttggacat

SEQ ID NO: 63522 - DNA, 694 bp, Zea Mays
tggtcaccctgagtcgagtaagcatgcagattgacaataaacaattcgagtgcctttgagaatgaagtcattttattgatggtgtatctcccaattacagaatacaatgtcgtcccaatagcttttgaaatctagctaggggtaaaacttcctgagatgctctatattccatgagttccctatttccgtgccatccatttgagtaaaatgatatgatccaggctgagtgacttctgctactatgaatggtccttcccatagtggcgacaatttgtgtcgtccctcccccgttagaattcggcggaggacaagatctcccactgcgaaggatcgatgccgtatggacttatcatgatagcgcctcagagtctgttggtacctagctgactgaatcacagtatttaactgttcttcttctagtatatcaacatcctcgagtctagtaacttcagcttcagctatgttttcgaagatcattcttggcgccccaaacttgagatcagccggtagcactgcctctgaaccatagaccataaaggggtgtttccatgcaaagctcggctaggttgagttcttaggctccaaaccacatacggaaactctctgatccactttcctgcgaacttttcattcttgtcgaagacattctttctgagtgcttccaatatcattccgttggctctttctacttgcc

SEQ ID NO: 63523 - DNA, 1226 bp, Zea Mays
gggcttcaactcgatcacaaattccacattcctttccggaggcaacccgagcaagtctttgggaaatacatccggaaattcacacaccaccggaatatcctagatttcttgtactatggcctcaaaaacttgtctagatgctttgactgggacagctacagggatggacaattggacttcttcatgaccataactcaatttaatggtcctttggtccgcattgatgatggctttattctgggataaccagttcatacccagaattatatctatatcatgtccctttataacaatcatgtttgtagggagctcacgtccggccaaagttacgggtacgtggaagactacttccttagtaaatatctgacccctaggtgagtgaataacaaatccctcccttgattcagtgctacatatgcaatgcttctccacaaaagtctttcttataaaagtatgtgatgcaccagaataaaaaaggatagttgttgggtggttggcaacaagaaacgtacgcgtcatcaccggttcgccttccggtgtagtcgccacctgagtataataaactcgcccagttttcttcatacttttgcccactggagggttggccatgtttccctttccttgatttgtgttcccggatgtctgttgaaagtttgatttgttctgcttcgggtaggggcagtctttgataaaatgcccagacttgccacaattaaagcaaccacttgaggaactaggaagggcagggaaacgagcaccaggggcactcggctagttgttctgggcggggacaggagtgggacgaatgaacacgggttgtctaaatggatatgtgggtgggcgaggagaagaacagtttgggttgaaaggtcggattaccaaccttgtcttcttttcaggccccggagttgatcattcacccgcatatctttttgactttacttgtcccgcatttttggcttcaactgatagtgttgtgctgacagccctgatatatgtgagatccagacacgtagccattttgcgctagagtctgtcatttaatcccctcatgaagaaatttttctttttcaagtctgtgtccacttgatcgatggcgtactaagagaggtgattaaatttgttgggatactgcatcatagaatccccccttgcttcagacgtatgaactcttccaacttcatctgtagcactccttccggaacataatgttccctaaatgccag

SEQ ID NO: 63524 - DNA, 704 bp, Zea Mays
tagatatgcctctatccaaggcttgaatcgttaccaaaggaaacttaaattcccattcagttgacatgagtgctctatcgagcttttcataagtaggtatggggagggaattttcccaggtatattgtctacctgttaggtctatttctcttaaatccaagctatctatcacatcattgaggagaaaaggccagcgaccattaaacatgtcattatttttctccttactgcttctcatgatattaaaatccccccaatgaggaacggaagagaaatctcatggcaagcccgaacaagctccgttagaaaagctaatttgaattcttcttgagctgggccataaacaaccatcaaaatccatttgaagttatttgttctattgcacagatggaatttaatgtaaaattctcctttagcgataagggttacgtcaaaagcattcactctaactcccagaaggatgcctccagatctgtccctcggtggaaaacaatgccagataaaatctactccaccagacagacgtgccaaatttgcattggacatatccttcttaccggtttccattatcgctaagaaatctaggttggggtccctcacagcctcttaaatgtaactatatttagccgagtctgaaagacctctgctattccaaaaaaagcccttcattaggaaacattcattttttgttttgaagtaccccc

SEQ ID NO: 63525 - DNA, 664 bp, Zea Mays
gtttttagtacgtgaaaatccgtgaaagatttcccatgcgtacattgggtatgttcccaatctcaccaccgcagcgtacatatatgggcacacagaaaactggggatctatgtgagaattcattctccgtcgatcattaagttttagaatctcttcatgagaatctatttatggcccgtacgcttgcttgaatcatgagcttttccaggcattagggggagatttcaagtaccaaaaatgaatgccaggaaattataatgaatgcagtaagcattcaggctcaggatcacgtactaaaactgaacctttaggttcgaatgatttgcaagaagttgcaaattgactgccatgtgcatttactatgaggtgtcactcaaattaatcctatgtggaagtgccagaaagagtggttacatggaaaaccacttaactccctattgcaacaacattgtaaataagagggggagaagtatggacacaaactaggattaagatgcttgcaagcagctgaaggctaggccttctgagatagtaaatgcagaccatctattcgttggtaaccaacctagtgttggaggacacctaaaggatattgattatcctgtgaatggaatacattcacaacctagctcagtgcgcactaaagaggctaggttatcggaag

SEQ ID NO: 63526 - DNA, 658 bp, Zea Mays
actttgcttgaccaacagggggtgtggattggttgggtgtttgtatctcatatagctaagcctgacttgaatcttctgtttgggtatccatgtgtttcgtggcttttgcttgtggttgaggtggactaatcatgtatccaaacatttttctattccttttgttgttcttcattccattcatcaaatatctatgtgactcatttttctcgttcatagttgttaaggtaggaatattgttgttggcattatttacttcatttccattagggttcatcatctagtcgaagggtaaaagagttagtgagacagactgcataagaggcttgcatgacattaagataaagagttaacacaacattttgatttccaagataagtttagttaaggaacaaggatggtttcagatttctcctagcttcatcatactacaagagtgtacaagtgttataatccttaacaaagatcctttgagctttatagatttcagagcatgatatccaaatcatctttctgatccaacaatattttgagcacaaattgagagaaagacttgagtgggattttagggcaatagagtatcacattgtttgcatatagcagatgacaccacactttattctctttataaagaggcaaaacacaataggtgcgagagatt

SEQ ID NO: 63527 - DNA, 455 bp, Zea Mays
cttcggataatctttttcccgaagcatgttgaataatatagtcaagatcttcggacggtgcttcgagagcaggggatttggcttcttcggccacattcttctctagagctatgctagcatctggaaactcttctccggcatcctgctcagttgcggcaggttctgcttccgtgggcgctgagggtcgagcttcggtttcagctcgagccgctacatcttcggcagctatcttcacagcggtaggagttggtgctcttgttgtctccatgatatcgtctagtacgctagccattcttctcctcttgggagttgtggcgggagcttttgcaaccttcggcaattctgcttctaccggtgggctccgaatttctggcaacactattgttttttcaaactctggctttttggtcgccccatcttcggcttcgactagctcaactataggcaccttcgac

SEQ ID NO: 63528 - DNA, 758 bp, Zea Mays
tctaggtgtaacatacataatgaaatgtcaatgcatatgatgccatgcccaagttttagttcttataacaccaggggtgttacatgttcaaatgcctgggcgaaatcagggtacaggtttcgagcgagaagaggattctcccaccagagtctagcatcttgttcagctaattcacgctctcgttcttgagcctgtcggcgatcatgacaacaggagttgggtctttcttggtgtacccgttcatcaggagtttctcccacttccgaggcttcgtcccgagaaacgggttgcgatgggtcccgatctctagcttcgtgatgccgccgcacattccggggtctctttctccgtcgtcgggcatctcgttggggaggttcctccttctacatggtagtttcatcttcgaagacgggcgatgactccaatctcccctgaatgaagaggacgtcagggtagaaaggagcaggtatggtgatgtccttcttcccatcctcatttaagggcagaggtactgggaggacaactcactgtgttttcctttctcggtaagggacattcgcttccttcctctgagtgatctgtgtccactccttagtgggcgatgtggacaacagagttcttcaggtcggagaggccctgactaactggccctccattttctgagtgcttttgagccctggcttgcgagggaccatcttcccccatgctatgagcaggggcgtggctcgcagactcacttcagcttctctcgagattcc

SEQ ID NO: 63529 - DNA, 935 bp, Zea Mays
aaagtttcaatgaaggtaggacacacacacgcacagcacattctgccggtaaaaacaacatggatgtgggcccttccttagatttctgctgctgactttcgttgaactaggtgtgctcatctgtttccagcttaggaattttccgtgaactggtgtgctcatctgcttccagcgtaggaaatttccgtactggaacatcgtaggaattttccgtcttgtagtctgtagggtcagcaatgggcgctgaaagtcaagggtgctgagcttgtgccagatctaatattgccgttgccgatggggaatggatggactaccctctacccatgcccaccccacttgaacccagtgattaatcagaagacatctctcaaactatccccaaactccaggaaaaagtttatttttagcccttaagttgtctgattaaaggagaacatatcagttacaaccaggcacattagtgtaaccgtgcaaccagacacattgagaacatttgtaaagttgtctgattttattattgtaaggagcgtgaggcctaaaagtccagacttcgtcaaaactttggtagctaaaagtagacttcttcatatgcctaaatggacatagattatccaatgggcaattagaaaatgatgtaaagaagagtagcctttcgcgttagtctccatccccatgtcatgcctccatggtttcgttaagtcgccgcttatcgaccaggttgggatagttgcctgctctagtccgggatgtggtcgtctaggcggcgcgcggactcggacgatgactcccaaacagaaatcactgcctccgatccatcacttgttcctgtttcttccgcatgcttcttctcgcgggtcgtgctggtccaggtccacacgcggcaggcaggccgtcgacggaactcggaaggatacggtagcacgggaacaggaagc

SEQ ID NO: 63530 - DNA, 662 bp, Zea Mays
tctaggccagcaactaggacgagtacttggaacacttattcaacattgctatctgttactgacttgtgtgccacatatatatatttagtcagccttcccagaactctagctttctctcgagcagaacaggtactcctttgcaatcacaccacgctcgttggacagtcacaccggtcaccgtttgccacctgcagtgctggtaagaacgttgtaagagtggggtaagacgcttcataatttgtattccaccaccaccaccaccaccaccctgagagatagttgtagggttcacattgtttgttgcctttttgtctctgttttgtgctaacaatgacaggaccaaagaatcaaatggacaaggataaggggctcaagcttaatgacgatgagtgtgtctctcagctggaattgaaggagatgatgcgcgcgatgactaaagcttttaaaaataccaggactctgcggcgacatcctatgagcagcttgatcgacgagttgctgaacttgttacacgcatggacgtactggaggctcgtcccccccaccaactccagccctagctcactctcttgtggacgacgacgacgatgacgacgatgtttatgcaccgctgcgacaacgcctcgcacgtaatcgatagggtatgagaggtaatggtagac

SEQ ID NO: 63531 - DNA, 655 bp, Zea Mays
gatggaagttggatttattttgcttcgggtatgggcagtccttgatgaaatgtccagactttccacagttgaagcacccactggaagtactgggaagggcagggtaacgaataccaggggcactcgactgattggtaggagcaggggcagtagtgggacgaataaagacaggctgcttgaatggatatgacggtgggcgaggcaaggaatgattttgatttataggtcagatcaccaacctggttctcttttcaggcccttgatttgacctctcacccgcataaccctttgattttccatgtcccatatttttagcttcaactgccagtgtcgtactaacagctctgctataggtaaggtccagacatgttgccatttttcgctggagcctgtcgttcaatcccctcaaaaagtaattctttttcatcaagtcagtatccacctggtcaatagcatattgagagaggtggttgaattttttaagatactgcatcatcgtttctcctccttgcctcaaccggataaactcttctagcttcatctagtgcacttcctctagaacataatgttcccggaatgccaacttaaattcttcccaggtaacctaatgcccaacaggctgaattgctaaaaaatttgcccaccaggtattggc

SEQ ID NO: 63532 - DNA, 921 bp, Zea Mays
gaaaggatcacaagtcgaacgtcccggttcaggttttttgtggagctataggaggctgatcaaggtgggctatggtactgttaaccaagtgtgttgacatgctaagagatatgaaattgttgctggaaacattctcaccaaatcaatgtaaactaaaattttcagcaacacactgcaacacaatcccctttcacaatttttttgacttctttttttatacttctttctcttctttttttataacactgatggggtgctgagatcaaatgcaatgacacaatatgaatacgatggtggtaactagcaacttgaggaattttaaacaacacaaggtaacagtaccgccaaagggttataggtttttttgtggctttggactattggaaaaaatatataagatggatgaagactgtgataaatggatgacagtaagacctaccgtgacaacgaaagctttgataccagatgatatataccgagttatattcggtattggggtggcccgatcttcacgatagtaggttgataaataggatggttgggtataaaagtaactgaataacaaggtaaaattgtagaaaaacagaaggtaactaactttatacctgatcaaggtcggaggtgaccaagcgacggggagagagacaccgaaaccatgtagacttcgactcgatctccgaacgaccgtagaaccacaaccgaagctaatccacacaatgcgaggcagccatactggaactcacaaggcacgaactagtggatcccagagggatctcttcacaagtccaggagaacaaggaagaacagtggtagagtaaacactcagcagctcggctatggtaatcacttggattatcaaattatcaaaggttatcaaaagttgtctgacatcatagacataggggggtatttatactagat

SEQ ID NO: 63533 - DNA, 748 bp, Zea Mays
gaggaattggcctccccctcaacagcagcttcaaatcctccagtctcagcaggagctggctcaagtggaccccaagtggtggaaggagtggggtcgggtccgtcagccgtagtagtggaagcaggctcgactggggtgaccgatggagttggctcgagagcaacccaatcagcatagtcgtgctcctcctccacaaagatggttttgtcccatctaatctagacctgcaagctcaaagacaggggatggacaaggtacagtctcatcgaatgtaacctcacaagtatccataatatggttagtctctatgttaagaacacgataagcatgagaatgtaatgcataacctagaaaaaccccatcagaagactgtgactcaaacatgtccagattaccctattttagcacaaagcatatgcagccaaataccctgaaatgactgaccttgggtggccatccaaatcgcagctcataagaagttttgttcagaaaatcccgaagaaagatgtgattggacacatggctagcagtgttgatcgcttcggcccaaaaacgcctaggagtcctatgctcatcaagcatcatcctggccatctcaacaagggtccgatttttgtgttcaacaataccattctactggggcacatacagagaggaaaattgatgctcgagtcccaaagaagcacaaaaggttgcaaattgagtatttttgaattctgtgccattgtcactgcgtataactctcatg

SEQ ID NO: 63534 - DNA, 383 bp, Zea Mays
cagaattgcgatttcaaatcttaatacattttgttactcctaggatgaatagaataccaggaggtatgagattcatcaagtatcagttgcctcaacgtcgggacctttgggactactaaccgattcttaaaccaaagaatacctttgtcatctagttgagaacacatagtgggatccactgccatactttccttaatatgagttattccgacatctgtcttatgagcttccacaatttgagtaactagggttgattccaactgcaaattggctagtagtgttggctggaacatactcagattcagtcgttccatgtcttgacagatggtggtttcgtacaaactagtcgacaaatgacataaatgctccttgcgactaagcgc

SEQ ID NO: 63535 - DNA, 429 bp, Zea Mays
ttgcatgatactacggaagatttatcgaaggcttctccaaaatagtgaaaccccttacttcactattggagaaaggtaaagagtttaagtgggatgaagcatgtcagaaatgtttcgaggaattaaaggaaaggctaaccactgcaccagtgttaattatgcctgatattcataaaggatttgtgtgtattgcgatgcatcacatctaggacttggatgtgtgttaatgcaataaggaaaagtgattgcctatggttcaaggcagttacggaagcatgagaagaattatcatacgcatgatttggaattagctgccgtagtgcacgctttaaagatttggaggcactacatgattggaaacaagtgtaaaatcttcacggatcacaaaagcttgaaatacatcttcacgttgaaagaactcaacctaag

SEQ ID NO: 63536 - DNA, 335 bp, Zea Mays
gtacaatgtcgtaggctgaatcgtgtggtcctgtctccactttgaagatgcattcatacatgtgagctcattcaaagccaggacttctgaagtccgaacattagaaactctcatcttagtcgcagtcaataccatacgaccgtgagtccgtgaccatacgcatacagtgcctcgactgaaataaagaaagtaggaaccacgttggcatagctctttctaacatgctaaagggtgtgtttagtttgacatttggctttggcttctgctctctaaaaacaaaagccaaatcgaaggactggatataggaagtagtttttttaaaagctgactttctt

SEQ ID NO: 63537 - DNA, 317 bp, Zea Mays
gtaggttcttcggaactgaaccttgggaaacaaattgtcgttttcatttgtgttgatcattaccttgcgatttgattcttcctctcccctctcgctaaagttctcttgcttatccttttgatttagctcccaaagtaaatccacacattgattgagcaacacatggcaaggataaccatctttcacactccgatttcattattactcgttctaacgcaaactctgggcgatgttcatgttcaaagtttataatttttaggtttcacctattcaccccctctaggcgactttcagttgggctctaacaaaactgtaga

SEQ ID NO: 63538 - DNA, 402 bp, Zea Mays
cctcaacggcaccagtgacgtgaaccggggctctggatctgctcgtcttcggtaaccgtgaggaaccagtgcgcgtcggatcgatctccactttgagtcggcgacggaaccggggctccggaccggatctaccgactaggcggctaccgctaacggcggcctcaactctgtgtctagcacagaggttagtgacctgatctggacatctggtgttcaatggaaacccctaccttattgtggatgtcttccctgtgacctgatctgcttattcccttcatcctttttctttgcaagtcttccccgtgagttgtattgatccgtgaggaaccagtccttttggaaccggtactccggatctactactaacggcggcgagttcttcgtgtctggcgcagaggtaat

SEQ ID NO: 63539 - DNA, 407 bp, Zea Mays
ctcgtcgctggtaacctcaacaacctctagccaatcgtcattcggctcgtcaaattgacttctatagcggaaggtatatcttaggtataccagaccaccttcgctggagccagcagcagtctctttcggcatctcccagtcatttacaagcggccaaaccttgtaagcaatatgctcttgaaccaaatctctggtgccaatgtaagtacacaccatgttgaaggccatcaaacatgcttgcacttcgttcccacttgcaattgttggccttctgatgccgaagcgtgaccgtatggggcgctggattataccccttacatccaagagcccggccatttctttcggaatgttggcacatgatacctcacatcagaacggtgcacaaagttgtaacatccgaagttgtt

SEQ ID NO: 63540 - DNA, 557 bp, Zea Mays
attcgggactgcccaaacaagcgtaccttgcttatacgtgacaatggtgagtactcttcagccagtgattccgaggaaactagtcatgctatgattgccactaaccatgcagaaaatgaggaagtccacgttgatcccatcgacgccgataggtatgagagtcttgttgtgcagcgtgttctcagcacacagattgcccaggccgaaaaaaatcagcgacacgctctattccataccaagggcgttgtgcacgaacgatcgattcgcatcatcatcgatagtggcagctgcaacaatttggcaagtacagctttggtagagaaattatccttgcccactcacgcaaacccacatctgtatcacattcaatggcttaatgatggtggtaaaataaaggtaacacgttcggtacgtatccccttttcactgggttcttattctgattatgctgattgcgatgttattcctatggaagcatgctctttgttattcggtcgatcttggcaatatgatactgatagtttatatcatggtcgttcaaatcattattctttcat

SEQ ID NO: 63541 - DNA, 623 bp, Zea Mays
aaaaaaacgaaatgaaaaccaaaggtgttgcctacctaagacttaacaccgtcaagtagaactaatggagtagagacgtacaacaattttattttgcaagaacagagacaaacacaaaaaagtctaaaaaataagggcaaatctacagttacaccccaaaacaggggcactggcgtaattaccccttgtttaaatcaattatttccccatctatgcttatgcactaatacaatgccgacgacttggtaaaaaaactgcaaccttttcatctactcgcttctctgctgcttcgtatacttccacaccgacctttcttccatagcagcttctccatctatctcattgatctagatcccaatcccagagttccatcctgctcatatatcctttcactgttcctcgttcctcttccaatcctccttgttgataagatcattgctggtggcaggtgccatatacatcgcgttggattcatagttcaatgccatggtatctgtggcaacaatatatagtggcgtcactcacatggcagcctgtcacatgcgattggtcggtctacacgtcaactctaaatacatcctatatgtctcgactccgagacgaaggtcggcgacaatgatggc

SEQ ID NO: 63542 - DNA, 472 bp, Zea Mays
ctcatgtaactgaggttggacatattgtgggatatagggtgaacagtatgaagacgtactgaacacttcttttgactgggaggtttgaatggctaacgaagcaagttccttctttgttgatagtatgatggcatgttcttggtgtggcctttgtccttgccataaaacaagcagaatggtttccttggaggtgcattgaatctgccatcaaaacttcggcctccccttccgcctctcagagcaggtggatgaaatgtgttgtgcaaaggttgctgctgagaacttatttgctactagcccaactgaccctgagaccaggccatcttttcctcacactgcaccgtgttgtggatagttcggacatgccttggatggaatcttccttcaaagcccctggtgatttcggtttatctgtgtaatttctccattctttggcaaaaatcattgtttgcccttatgtactcgtccatct

SEQ ID NO: 63543 - DNA, 526 bp, Zea Mays
ttgcttaaagcagggaaggttgtgggaaagggcgaatctttgcacaaaaagaggtattctagaatcttctgctaatcgccttttgtatttctctgttgctaaatcagctatttccagttcacagtctacacaaataagtacaatatcatgtgaggtatgaagtcctgatgttctagatgctctcgaacgagtcgttttattacagagttcttaccttgatttttgacaatcaattatgcttatttttggaagaaagattcaattatgcctattagaaaaatctcttagacaaacaaaattcaattcaccacaagagcttctttatctttttgttgttttgatcatgaattcccaccttttcacactgctattttaggtaccagtgggcagtggcacacacatcataaggatgaagatttgaaccaagatgagaagtggtagtgtgctggtaaaaacttgtacaacctcttatttttaagaaacaaacgtatactacattccacgaaaactaatgttaatcttagag

SEQ ID NO: 63544 - DNA, 788 bp, Zea Mays
gtcagactgccctaggtctgaattcaggctgacagggtgattgggcaatctttggacttggattcgaccataatccagtcagtgtttggctatggttgctatagtaagaatgtagctggatcattaggctacaactttgctacagaacaatggtcttgttgccatgtaaaatcaggaggaaatctgccccaaacatggtctgtcaggctgactgaagaacaatcccatggtacagtaagcagataggatcaggttctgatcccctcaccaccgacgagccgtgcgtttggattcgcgctcgccgtggtgattcgcactcggatccgttggatagcaccagaggtaagtaaatatcacgccgtggatacactccgaccactattttactccggccaccgtacccgagcagatcacggttgcttcggatgggttcgccggagatagccacttcgcggccttgcgccacgtaccttggcacgttaacctcaccgctgtgactcacgttagcccgtccggtggtcacccaggagcttgccacggtaattaccaccgatggcgcgccagtgaccccctctttctccggccgccgcgcgtctccctccaattcactggccaccgctcaagcctgctataaattgcgcatacccatggccccgttaagtagtcaagtccctcatccagcaacccgtgcctcgaatcatccactagagctccccaatttgggatttcccccaaatcaaccaagaacaccgtgcggtgtgacctcgccgtggccaacgagtttcagg

SEQ ID NO: 63545 - DNA, 288 bp, Zea Mays
gagaagtattctcggaagtgatgttaacgcctaaaggcaccttcccagtaggatacaaatgggttttcgttcgtaagcgaaacgaaaacaacgaagtggtgagatataaagcaaggttagtagcacaaggctttacgcaaagcccggcattgattataatgaaacatactctccagtaatgagtggcataacatttcgatacttaatttcactggcagtacaaaatcgtctatctttgcagttgatggacgtagtaaccgcatatttatatgggtcactggattcgga

SEQ ID NO: 63546 - DNA, 421 bp, Zea Mays
ttataaggcttatgttagaacttcgtgctaacaaaagaaactaacaatagcacaaagtgtttcagctaccactcgctctaacgttcagcggctgcatcatcatcctcatcctgcaaatgtgtaagtatatcaacacacaaaagggaaagaaagcaacaatcattatgaaaaaggtttcaaatatacctcatccaaaatatccctagcttcgtcaacagcaagctctctaccaccttcatccaaattaatgtgataaatctgttagctacactactgacctcggtaaacactattgctatggcatctagagaaatatcgtggtttggttcgcaaacagttttcatatgggaacatctagccttctccagaatcaaagttgtaccacgggtggtaaccagcacacaaaaatcgccttggccac

SEQ ID NO: 63547 - DNA, 447 bp, Zea Mays
gggaggatgtcaattgaggaccggaatcggatacacactcgcatgaacagggcaaaggctgccgagctgtacagtcaggcaggctcatgcttagtgctggtaatgcgcgctttcaccagctctcatgaaatcattcattcatgggcgtcgcctcgcccaccggtgcctttctccactactaaatgcagtgctcaaaccgaagcatctggtgggtgctgtcagagccacccccctttcctttggccccaagctcacacttctccatgccatcgccatgcatgctccttcgttctttagcgagccacacctactctgctctgttgctcacattgccatatatccttttcccatccatccattcattcattcattcgcgtcctcttttgtgtttggaccccccgtaaaccgtaatctcgctgccatacgtatcatgctgctttgctttgc

SEQ ID NO: 63548 - DNA, 839 bp, Zea Mays
ctaccccgtactcgggatggctatgattcaatatgggttatagtggataggttgactaaagtggcacactttatacctatgaagacaacctactcaggagcccagttagcagagttatacatgtcaaggattgtttgtttgcatggagtaccaaagaggatcgtatcggatcgaggaacccaatttacctcgcgcttttggaaaatactacatgagtccatggataccaagataaactttagcttggcttatcattcaaaaacggatgggcaaacggaaagagcaaaccaagtgttggaagatatgctaagagattgcgctctaaagcatggtagaagctaggataagagtttgccttatgcagaattctcgtacaacaacagttaccaggcaagtcgaaaaatggcaccgtttgaagcattttatggacaaaagtgtagaacaccgctttattggaatcagaccggagaaagtcaagtatttggtccagaaattctccaagaagcagaaaagcaagtacagattattagagagaatttgaaaacagcagagtcgagacagaaaagttatgctgacaatagaagaagagattgatctttgaagtaggagacttcgtataccttaaagtttcaccaatcagaggaatgaaaatatttaaggttaagggtaaactatctccccgctacataggcccgttcaaaatattggaaagaaaaggtgaagcagtgtaccagttagagcaacccgatagtttgtcggatgtgcatgatgtatttcatgtgtcacaacttaagaaatgcttaagtgtaccggaggaacaattacctatggaagaactc

SEQ ID NO: 63549 - DNA, 709 bp, Zea Mays
ccattttagtgaagaattggttatggagtttttgatattcacctccctaattggattgcacacatttagtcttggtgtcaatgaggcatttgacatgagtttgaaaaataaaaaatgcggtgaatatcagtactatcatgtatgagatagatccatgtgaatttgctaaaattgtcattgaaattgatacaatatttgaaacaccaatagaaatgggggtaggaccccaaatattagaataaataagttcgagtggtgttgtcgatatatgaaatgaattatagtagggtaattgatgactcttttctaattgacacatattacaaactaaggaaatagtagactcctagagatacaaaagattatgaatatgtaaaaggggtcgaactacttgatgagaaggatgatagaactgatcatgtctttgatcctgacgcgtagaatagctcacaagtgcctacttgatgaactcaatattggatggcttaaggtggtaaaggctaacttcacattttccccgatcattaatgagataataccaaggataaaattcaaaaacacattattattatgggatagtttataaactgaaaatgtgtttagtgtaaggatctggtacgcctagaggggggtgaataggctgcctataaattttcagctcaagaaactattaaattctagagctgcattggcgatcttggcccgacac

SEQ ID NO: 63550 - DNA, 654 bp, Zea Mays
aaactaagcaaccatgtaaaccttttaagagcatggaagataagagtctggcacctttagatcttattcactcagatctgtgtgaaatgaatagaatttcgatgagagcagctaagaaatatttcatcacatttattgatgatgctactagatattgtcagctctatcttgttaagccgaaagatgaggcacttaattgttttaagatctataaggcagaggtagaaaaccaactagaaaagaaaattaaatgggttagatccgatagaggaggggagtatctttctaatgaattcggtgaaatattgtgcgaaacatgaaatcatccatgggacaacaacaccctactcacctcaatcaaatggggtggttgaacggaaaaactgaactttgacagacttggttaatgccatattggatagttttggtttacctaagtcatggtggggcaaagctatttttgttgcatgctttgttctaaaccaagtttcatcagctaagggtgataaaacaccctatgaaggatggaaaggtataaagcctactcttggatttctatgtgcatggggctatttagccaaagttaatgtgcatgtgtgctagaaacaaaaattgggaccaaaaattgttgattgtgtccttctaggatatgtg

SEQ ID NO: 63551 - DNA, 1255 bp, Zea Mays
caaagatgaatgaatgtgaggatcccgaatcaaatagtatagatgctaggatggaattaacaaggaatgtacccatgatgatgtcagaaccatcagtagcagttccagcactgatatgattaaccctagcaatattatatcccatttggttgtgattgatggatggagcctgattctacttgttaggattattgcctcaagctagaatggtgtatgcaggcttctttggacaagcattagcatagtggcatgcttcaccacatttgaagcatgtcctggttgttggggtagaagggttggctttctttggttgtgtgctagctagggtagcttagtttatggtgtctgggtgtggtttgtggtgtttgttgaataggcatggatatgattgttggggttccttgtggccgagtatagcgaggacgtctgctgctgcttgcttgaccctaggtaaaaccttcctcttcatctcgtcaagttgaacacgcttgtgttcaagagctatggccttgtctagcagtttctggaaagataggaatgagtgggacatgagctagtactgcagcggcccaatgagtccttctagaaacagttcttgcttcttatcatcatctgcaacttcctcaggggcatatctaggtagcggatgaacttgtcattgtactcgcttactaacatccctccctgcttgagtgagagaaactccttgatcttcattaaactagcaggaatgtggtagtttttgaagttggttgagaattctgcccaattgatggtgtcggcggcagcatgtgctgcacaataagcatcccgccaatctgcagcggggcagtgaggtgacctgatgcatataacacctccctatcagtgcatcgtgcaatgttaagcatcttctccacggatttcaactaatcactagcttgcaatggatctaggagctggaaaaggttggtggtttgtggctcatgaactcatggtgtttgtctctaggtggtggattggtgtgggcaatgctggttattattgagctaagcttgcatgttggccatggtattagccatttgctggagtagctggtttggacagcgaagaaggcttccaccctagtgggtggaggatttgggggattcatctatgattctagattaactgttgtccttgttcgaccatctagggttagagatagataggtaagatagatttgcagataagacaaatagttaggtacaagacacatgacttttaggttgagatc

SEQ ID NO: 63552 - DNA, 403 bp, Zea Mays
tgtatgtattcaaaaataagtactcacatatgctaacaatactaggagtggaaaggaagctagcaacaagatttaataacctcaaacaataagtatagaaagtatgaaccaagcaagcaaggataatatggtaggaaagtaaagagcacaagagactcatgatttcttttatggaattcagattcacaaagaatcctacatctccattgaggagttcacaaagaattatctttcaaccatttcctctctcaagagatcacatagattgatcttgagttcttcactacttgatgggtgagaacaaccctctcaaggccaatccacataaagtcagaggctccctagcacttctatcaatccaaagcaacaactcctcaagagggagatcacgattcccctcttc

SEQ ID NO: 63553 - DNA, 996 bp, Zea Mays
gtcaacctgttgaatacagatgtttggggtgcccccaagcggggtactgtggcatcccaaatggatatggtggcatgccccacatttgatttaggacatatggtggaggtaaatatgtgtatggatatggcataggtggataagggggtggaggtgtccatgtagatatgttaggtctcaattggacagtataaccttccatttcttcggattggtggggtggtccaatcggtcttacctctcatgaatgggcgagcgaggttgctttgctggccggtcactcgggccgaccttcgttttcacatatttggataataattgatcggcatagcccggatgatgatgctcgggacccacgctgcccacgtcgtccgccataaagaaagaatacacgcaaccaggcgatcctgggccccacgaccgcagataactttacctgggtaaaacgtttggttttaccatcgcccggtggctcatttctgaggaagccatcactgatcgaccccctctttggcctataaaatgaagaggtttgccctagacgaacggacgcgcgtacgagcaacagacggaccgagacgcgaagacgaaggaccgacgaataggaggagaacacaccgatgacccagaggccggagccctgtcgcccaaccaagacttagttaggactccactctgtaacctttagctccacctccaccacgactctctcgctcgcttgtaaacactactttgagatttagcgtaagtcgtcgataaccgaatatagagacattttacataaatcaatataaattttacgttcaccgtacgtcagcttgccctactgcgtcaacatgcgtcgggtgcgcaaaacttgaagtctcgtggtatgacgagggagaacatgacaatatctaggaatgtgcacatagaaaactgcaggatccatgtacaatacaacagaccaggtgagtcagccagccaccgctatggggagctaaagcttgatcgaag

SEQ ID NO: 63554 - DNA, 354 bp, Zea Mays
gggaaaactggggtttatagtgcaaatgtgtccaagacacagagccggcccagtcggggactgcgggttatttcctctattttccagggggtctttaggaaatgttctcgggcgaagaggtacccgtacactctggccgtccgatcggaaatcaggggctcggattagatctccatactcgcgaaccggtacacaccactagccatcggatcaagatcctacggctacacgacgaaaacaaagtcataactcccatggccgttgatctgcccaccgacggacacgatcatccgattgaatcggtcccgccctaatctaatcgcggccgttcacggtgatccaacggcgcacgca

SEQ ID NO: 63555 - DNA, 510 bp, Zea Mays
gggtccctcgaagaagaaataccctcaagttcagaaactattgtatgcagtacttctaactgcacgtaagctccgtcactgcttcgacgatcacaaagtcatagtagtcactggatttccaataggggatattcttcacaataaagaagccatcggaagaatagccaagtgggcctatgaactgggagctcatgacattgagtttcgacctcgtaccgcaatcaagactcaagcactagttgacttcatatcagaatggaacgagcaacaagtgccagataactcggaaactgcggaagtatggcgaatgtatttcgatggctcgttgaagctgcagggggcaggtgtagggatcctcttcattgcacctggaggtgaacaactcaaatatgctcttcaattgctattcccagcgtccaacaatgcagtagaatatgaagctttgattcatagactgaacattgccatatcactgggcatcaagagactgatggtatatggggattctct

SEQ ID NO: 63556 - DNA, 593 bp, Zea Mays
cgtctaaccctgattggtagaggcaacactggccacaggtgaagggggcactccggagtgggccgtgttcggaccggaagctggctctatttcctcgggatcctcctcttcctcacttcctacctcattagcgttcatgtcttggtgatgcatttctaggtgaacgttgtcctccacaagctcctcttgcacatcatggagctggttctctaggatctcgatggcgttgtcccggattaccacctgctgctccaatgcttggatgcggttgcccatctgttccacctgtagatccttctccacaaattctgaagacaagtcaaccatgaagtcctccctatcatagagggtgatctttgtagcttgagcgagcctagcgaggtgtgtcatggcgtcgctttgcaaggcctacaggcggtacagtgcactcatacacgggacggtgattctcccaatctggtcgggatgcatggcccacacatccttcacgtggctcactctgttacaccacatcgggtcattcctcttctcggcggggaagagtccaagggggtgcatcatcatctctagtgggtgatatccgcagaaggtcg

SEQ ID NO: 63557 - DNA, 418 bp, Zea Mays
tggcagatgatgtaatcagtgctctcttttaaagcttcgggagtaggagtggcaaccttttcaaatgaaattttctctgtggccttttcttctgttgccttttcttcaaattccgcaagcttcgtcttagcaggcactgtgggccctgcctcgctttcagcctgggttattgtagtctcaacttctatttgcttagtatcagctttgggttgcgttttgtcagcttcagcaactttccctttgggagcgagacttatggagtcagttgtctctaaaatatctaacaaatttaccatcctcctcctcttaggagtgttggtagaactcttttctgccttcagcgttgttgcttctgttgaaggacttaaaatctctagcatctttgttgcttcttcagtttttgactttttcgtttcag

SEQ ID NO: 63558 - DNA, 1492 bp, Zea Mays
aacaaacacgctcccaacattctaaggccatgtgggacctgaatcatgattcacccgaggcaccgcgcgtcgcttgcgcaactacgcttcacccgagcccaacctcgggcgaacaatacacctgcgtggggttcgtgactcaccagaggacaccttcgggcgggttttgcatgttcgcctcacccaagagcatctcgagcgaggtcccagcatgagcccgacctcggccaacttctcagaccctagaacatgtgcatttaatacagtctatacaaccacctacaccaccacgggcaccaaagtcaataaagggtgacacgaccctagtctaatctactttttactatgcacaagacggtcagggcatgaatatctagcactatttccccactccaaccactattccaaccactccgatcatgactgcatatcaatgttctgacccggcctcggcctcaggagaaatctctgcctcacccaagcccggcctctgcgaactgcaccaacagagaaacacacgataccgcctgctctcccgctaaccccgctgaagacaggatggctactgtaacaacaagataggtgtccaatctacttttcgccatctcggatgacaccaagactagatcactacattctttcaccatgccgagcactgttttaaacaactacgactagacaaaagtctcgtctaggatgggctcggacgcctgctcgagctcctgacccagcctcggctctctatctcacaaaagacaatgcaaagtaggagggccatcccgccggcgtgccactatagggcttgggcgcacctccgttgaccacgacaataacgtagcaacacctgtacgcttgggtttcctccttacgaatataaaaggaggagtctggggccttcagaaggggaggcaagaacacaacactttgccgctcactccactcatgatattggcaccgacctcaatcacacttagagacttgggacctgctccctctctcgactagcttgtctcccctactttgagcacctaagtgcaagatactataagtctcatcccccatcgctgaaagtagggcctgctcttgctcgaactaggataaatcttgtgtcttcttgcatcactcatctggacaggggcacgcagcacgaattcacttgttggttaggaccccagttcccaaaacactgacagttggcgtgccaggtaggggggcgctgcctattgatagcacattcccattaaggatccggatggctaatcctgaacaccctttgcaactcgacatggtgatctggtttgggagtcttaagttcatgtccctctgctttgattatgacatggtgctcctcccacctaaacatcgcaccaacaccgactaccgtctctcccagccagggggagcacgaccacacttgctcccctgtccagacaaggggcacccagacctttgtcgctgtccttcttgccggaggacacgaaacaaccgcaac

SEQ ID NO: 63559 - DNA, 274 bp, Zea Mays
gttgaaaggatgcacaagtggacttggagtaatagaaaggtaagatgtggatgatcaacatctcatgtaagacattaaaagtcatgataaatgcctaaaagtatatgcaagagtccaagacataatatagaagaagcacaaatgaggacatctggagaagtgaagaaatgaagaaaaacatattgttctagagcatcgattgtgcccaatgatgcatcgaatataccacgggatatgagaagcattatgtcaaataagggctactgtatctcag

SEQ ID NO: 63560 - DNA, 651 bp, Zea Mays
gttggaagtgaggagaagattgcattaaccatttgtagtctgccagcctgtgataagaagatagaggttgacgccagtcttttctcaattttctgaataagaggaagaaaagcacccaggttgggtctttgtaatcccaagggaagccctaagtaagtgaacgacattgatccaattttgcagcggaatgtatttgcaaggatttccatttttggtctgtgacattgatgggaaaaatattagatttgtggtagttgacatgtagccctgtggattcagcaaaagaattgagcatcgcctttagaaagaaaagttgtctaggacaagcttccattatgagaatagtatcatctgcatattgaataatagggaaatcaggaccacaattgctcggcagggggagccgtaagatgccacagtcacaagccttgttgacaattgactgcagaagatcagttgcaagaacaaaaagaagtggggacaaaggatctccttgtctgactccgcgtttgcagtgaaatcgtttcccagggacgccattcaaaagagcttctaaagtgccggagtcaagaatcatagaaacccagtgaatccatttgtcaccgaaccccttgtgcctcaaaaccttaataatagttgcatgttcccatt

SEQ ID NO: 63561 - DNA, 285 bp, Zea Mays
ggacggctaggattagtccccgtttaccctctcatgttgagttgatttggtccgttcatctggatcggacgggtggaaacaaatctagagtaataaaatcctacccgtcgtttttacatccaacggttccctgcgcataccgcttcgcgaccgcgcggatcaaatcctcaccatccgcgtgtgatcggatggtccaaaccccaccgtaccccttcgcgggtcaacattgctaaagagcccctctgctttcaggatatcaacccgccatccagagagtactattct

SEQ ID NO: 63562 - DNA, 463 bp, Zea Mays
taggccttatttttgtcaattttggccctcataaattttcttttttactgttgtggtggactaactagagcgtgagattgttggtgtaacatgtcgcttatcttgtggtgcacaggtgtgaagtccggtgatggtggtcgacggcaaatgtgaaggtcatgcatgtttttactattcaaggtgtcgcctaggtatcgcggctggccaatctatataaggtgctccatgcaccgatagttggtcatggacgtggttatgggttttagtcaagtaggcatatgggtcgatccacctctagcctcaagccctcattcttctctcttcttccttcagttttttgccttacctgtagtagttagtgtggttgtcgtaacgtacagaaaaaatttaaattcggaaccactaaccttgtcttgagagggtggaatcattggttgcttttccccttgcatgcatgtgtctt

SEQ ID NO: 63563 - DNA, 294 bp, Zea Mays
agaaggtcaacaactattacgaagaggagaggagacagaagatccccatgccggacccctcttttgcataaaaaactgttacctggaactccattcagcaacacagccgaggtaccagacttaaggatggactgaatccaagagatccatctgctgggaagccaagatgcttatgcatttccaggatggcactatgaccaattgtgtcaaaagccttagcgaagtcaagtttcagaatcaccactgatgacattgatggatatactcatatgtccaggccagaaagtcttggat

SEQ ID NO: 63564 - DNA, 695 bp, Zea Mays
ggcgtgtccggcgacggctccaacgggagcccatcccttgcttgcctccgacgacgcttctccaaggcttcccgagctcgcatcctctctcgagctcgggccttttctgcgtctttcctctccttatccatctccgtggtgagcctacgcgcggttcggcccgccgcgtcctccgggaccggtggccgggagagtttaaaattcctcaacccctggggacgaacgaaaatcccaacagtaagaactaaagacgtaagaaacacggcgcaaaacagaaggagggtcggacacttaccagggacacatacccatggtcgtgacgcatcgagggctggctaaggacgccagcgtccagccaccctaccgtgcccgctacccgtctgaggaggtcatcggcagagaggggggtcgaggacatccgtgaaccctccaaatcaacccccgactttatctccgaaagccgcaaccgccgctctgccaatgggagcaccctccagtggtggatagcggcgacgacccccgctgcggtaaggcccacggcttgtaacttctgcagggcacggagaatgggctggagcttctcctggttctcgcgtgtggccccccagcgccagttatcactagcggcggtcaccactcgttgagaaaacggcggaagcatcccatcgtcgttccggagataaaaccaccggttc

SEQ ID NO: 63565 - DNA, 449 bp, Zea Mays
tatacatatctacctctcattctattgttagtgcaatcgtggttcaagagaaggtagaaggggaaatcaagaagaaggtgccaatatatttcatctcaaaaatattgggtccatccattacacagaaatagagaaggtgttatatccagtacccatggcttccgaaaagattcggcattacttccagtcatacaatataattataccttcatctcaaccattgaaagacatcataaggaataaataatcaatgtgaataatttgaaaatggacagcagaactcaacgagtttgtcattgatttcatgcatcgatcatcagtttagtctcaggcgttggtagacttcatcgtcgattggacatcaggggcttaggactaagcacttatacgagacaaaggaatatggacagtcttctacgatggatcttggggtaccttcggcatagggg

SEQ ID NO: 63566 - DNA, 609 bp, Zea Mays
tgagtgggctccaacggattgtattggggacaaataagttaagttacaattttttatagttttgttgtgtgattagagaaagtcgtaaatcaagaaggatggaatgtcccagtctaatctgttgaaagttctcagaggatagtatcgctgtgtggggcggctattgcctgctaatttagcagactgaggtgtgaatgcggtttaggtcgattagcttccattttggacaaggcgcactgttttgctgtgtgtgccctgaatttgtccagaatccccgtgaagaattaatgcttggtgaaacgaacaatgtcatgtgatgtttctccagaaatgtggtcccgttcattttttttatatagttggtggtgattgcagtactgaagttatcctccctggaagctggaacgattgaactgtagtggtcggtgttaatatagtacaaagtctagcatttggcatgaagaataatattctgaatactgttttctttcgtcagctgttcctctctcccggcaattcttcttccgttcttgctctaatcatttggccacctacttcatcgcgaaggtaagtcttttattacattctgttgaagtacgtatttcacaa

SEQ ID NO: 63567 - DNA, 435 bp, Zea Mays
acataaccatccatagcattttaccgaatcatgtgctcagtttatgattgttatagtttttttatttgattttgtcttcactctcttcccttctcttctcttctctctttagatgttgagagaatcttcaatttcttgagttgtggtttgtgttggggattgcattgggggtgaagcactctctagaccactgcaaacactaggtttgagtagtttttggacgcgatccgagatcgccttgttttgagttcttttgagaaaacacatcaaatggggattttgaatctgtttgtgtatttgtgatttgatctgtatcaaacctcacaaaaccttttctttttctctgtgcttactgtctatgaagtttgagaggatgttatgcaggttttgaggcgtggcactaccgctcggtatgttctgcattttctcttctag

SEQ ID NO: 63568 - DNA, 308 bp, Zea Mays
gcgtgtacatggagcctttgatcgatgaattggtacgtgcttgggaggaaggggtatggacgtatgaccgagctacgaatacaaacttcaaaatgcattttggtaccagtactccttgcatgacttaccggcgtatgggctattctgcgcctggtgtgttcacggtaagttcccatgcccagtttgcaagaaagctcttaggttcatttggttgaaaaagggtggcaaatattcgtcgttcgataaacatcgacaatttctccctcctgaccatccattccgcctagacatcaagaactttacgaaag

SEQ ID NO: 63569 - DNA, 374 bp, Zea Mays
tgccttcaagtctcgaccgtaatttcctctctctctcgtcgcctataaatctgagccttgcttgttcctcgccctcggatgagctctcttctcctcccctctgttgctctcactctccccgcttgccgcaccttgttggctctgtagcttcgcctacgtcgacgatctcgccccgtctgaagctcttccacgtcctctgctccgcgctgcgccatgtcgtgccgtcgcgccatcgctgtcaccgcgtctcgccgacaactgtgcccacgtcatggccatgcatcgtcaaaatttgccagtctccatttcctcctctgtcgagccccacaaatttcgctggctgcttactgctgttgtgtgccgttcatgtttgt

SEQ ID NO: 63570 - DNA, 454 bp, Zea Mays
atggtgccgtcgtcactgatctgtgcgccgccggagtttgagcagtgtctggggcggggcggattgaccgccggatcagttctagacggcttagattagaaattgcaataccccttcaccgcgtttgagttgtactgttgatcgcgaatcgggcggttgtaagcaattattagtttataatagcgctggtcagatcctagacgtggatccccgatccaacggtggttggggaagcgggagcgggacctcggccgatctaatctgggcgcctcgtttcagatcggacagctgtaatcggccgatacccattcggctgttacatttgtataagaaaccctaggttttctcggtttcaacccgcagtccaaccacggtgcagtatgagtctagggtttacttacgccaagccccctactgtctctggtaattggcgcccagtccaaggtgttataaa

SEQ ID NO: 63571 - DNA, 759 bp, Zea Mays
caagagcctaggtgaccaggacaaccaaatccatcctaaggaacaacatcattcactagaaacaaacaagacatgcacacaaactgaaaccaagaaaagtctacaagaatagccctcaaccaaatctttagaattcatccaatggcttaagggctactaatgtgtacgcatacgatgggtattccaagacagtccaaaagtcccacaccaagataagaacaccgcctagcatggcctcgactagggtagctcccaatcaaagcaactccaatctagttaacctaacaaggttggccccaactagagctcccttggcctagtcactcgtccatggcaatcccaatctcatcaccatgatcaagccagccccaactcccttgacctagttcctcgaccaggtcaaccccaaccttagtcaccttgggtaatcctgacctggtcacctcgaccaggttggccccaacctcggtcactttgagctaggttagtctagttcatacactcataataagactctacgacatcatagaccgagggtaccatgaacctctatgaaaggctaacacatttatgacctctaaccatttgggacatgctcttaactaaggcatgtgttggataaattcaggtatagtacaaagatctgcaaagacatttgtatctaaccaattggatccccaaaggacaataaggacatgtgggtcatgacatgccccactataggtgtgaggtgatcatacgccttggacaagatatgtg

SEQ ID NO: 63572 - DNA, 389 bp, Zea Mays
ggggctgttcctaagcccgggctgggtttggtgtgtttccgttgtggtgaagcgcatcgccgtgccgagtgttagtggagtggcaggtgctttatctgcagccaggatcacaaggatgtggtgtgtaggaggaatcccaatgggaagctcaaatgggagccagtgactccttcctcttcgcagggcactgtcaacgtgatgtcaatcgctaagcatcaattctataccacccctcagcagcagttctatatgcccgggactcctcagttcctgcctatgccaggtttccctcagtacttggccgcgcctactcctgcaccaaccactcctgtaccatcccagtttggagctccacgactgcctcatccttcgactctgtggggttcttc

SEQ ID NO: 63573 - DNA, 534 bp, Zea Mays
atgccgaccatggcgtagtgtagccctacgacagaggttggcctccggcgataaattgttgtcaacttgcttgatctctcacccgcagttcctcccacatgctctactattccccgtgaccctgtcaccgaggctggattgacgtcgcaggcgagaatcgactgcgatagctccccggtgtgaactctcgtggtgatggcagtgactcagttttgctggctccgctcaatggggtggttggggaaaagcggcctaagtacttatacgcagagaggaggccgcataacgaaggctgccaacgagatccacggaggaggccgttcacgcgagcgcgagagctggataggaaaaagggagaatatgtgtctgacttgtgaacccatatgcctgcgactcagattgaggagggcaatggttgacacacgagctcgcgcatgactagagataggctacggtgcggggcctacgtgtcagtgacccggtcacgtggaatgcaggccggcacgcttgggaatcgaagtgggctatggtgag

SEQ ID NO: 63574 - DNA, 647 bp, Zea Mays
tgaaaaacacctctggtacttgtaagtgagatatttcttttttcgaagtactcccaatttgaattggttattttgctactagggtatagtggtcaccctaaatcatgtgagtgtgagcatgtcgcatcgacttaaggcgtttccgacttaagtcgtttgttctgttagtagggtaagtgatcaccctaagtcaagtaagcgtgtgcatgttgcaccgacttaaggcgtttccgacttaagcagatttctccgttagtagggcatagtgatcaccctaagtcaagtaagcgtgagcatgtcgcaccgacttaaggcgtttccgacttaagccgattgctccgttagtagggcatagtgatcaccctaagtcaagtaagcgtgagcatgtcgcaccgacttaaggcgttttcgacttaagtcgattgctccgttagtagggcatagtgatcaccctaattcaagtaagcatgagcatggcacaccgacttaaggcgttttcgacttaagtcgattgctccgttagtagggcatagtgatcaccctaagtcaagttatgccaatttcgagtcaagctcaatcgaagtcagttgtcaatcaagagtttgagcacttttgaaaaatgaaagctttattgatgatgaaatctt

SEQ ID NO: 63575 - DNA, 309 bp, Zea Mays
attgtggccatgcatgttgttctctctcgacaacccaaatgcaagttcctggtaattaatacagaaaataaagttacaagattgtttaggatcatggccacatatacccacacgtatactccttaccactggtgatcgaatggtggtcagtacgtttgctcatccatcactcatgcaggtttgagctagctgcaataattagtgcactaacaaacaggagacggatttgctgagagcaatgacaagaacatctcgctggaagatatataatcaaatctcatccaaacaaatcgatcccccgtttattcc

SEQ ID NO: 63576 - DNA, 618 bp, Zea Mays
tgaagttagggtttcgagtttggttacctctcctcatttgatcgttatgggttggctaaactaaaccttctagaatgtttaacactcaattatggctttgacccttggctttggtgacctttgctttaagtaatcacatgtgataataggttaatgagtgtgggttgggttaacctcccttgctaacacctgaggtgttacacctagatggttgttcattgttgttttggtgctcgtattgtaggatgcatggtggcccatgcgtattttgctcgggactgttgcgaaaacgatttatagcaaaaaaaattggggacttttgctcggatacggtcgtcataggtgacttcgcacctttgggtgtttcgcgcatttgtgctgatctggatgcacccttgggtgacttctacacggatatggtcgttgttagacgacttcgtacccttaggtgcctttgcacatttattgtgttggtttggctacacccttaggggacttttgcacagatatggttgacgttagacgactttgcacccttaggagtcttcgcatattttttgtgctagtccgactacacccttaagaaacttttgcacgaatatggttgtcgttagatga

SEQ ID NO: 63577 - DNA, 475 bp, Zea Mays
ccctctatagtactcggtccggtggtacacgggaactcgcggtaacggctacttcagacgcgtaacatctacttcaacggtcgggtgacacgtggtggtctggtggtggaccagttcggtctagtgccagcccaagatggaagggcccaatcaagatctcggaggacgtgttcccggtccagtgtgcttgtgtagtgcagaattccagtagcttactaaacagctatttgggggcttagggctataaatagactcccatttagaccccctctcttcaccaagtcactcaagagctagcacttcacttctatgcattagagaaacacacatatgtgatccgagcgtatatttttgtgagatagagttgtgctgctgcttgcgtttgtgctcttattctttgggtgttgttcttgtgctcttgcgcacgttctactcctctctctctcttgttgttcttgaagtagttgctccgatc

SEQ ID NO: 63578 - DNA, 354 bp, Zea Mays
gagatgtggaaggtataccggtggacctcgatccccatgtataaggagagtagccttggaactcccatcagaaatatggccttcttcacagtaacacaatggaccctagagacttaagcttattctcatgagtgaccttgggtatgagggaccctagaggcttattctcatgagtaccttgggcacgaggggccttgagttcttattcacacgagcaccctagatgctttaatcatctaactgctgctcaaatcgcaaggctccaatgggacttatattattccttctttgaatttcctctaggcacatggtctttatagattggattaggggttgcactcagatctctttgtg

SEQ ID NO: 63579 - DNA, 609 bp, Zea Mays
gacgcatcagcagtaattacagccccatcaggcgccaagtacagatatgccgctcgattaagctttgctcttgagacagacaaatgtaccaataacattgcagagtatgaagcagtcatcctcctactccgcaaattcagggcactcaatgttaagacttgcattgtcaagaccgattccaaagtcatgatcggctacatagaaaaagattgtacagcccgagatagtcttcctctagtacctgtcagccgtgtgaagtctagagaagtaattcaaaggatttttaatctagcatgtggaccgaggcaaaaaatgaggagacaggcgcacttgcgaaggctgctgcaagaggagaccctaagccatcgaacgtctttttccaaataatcgaagcccccgtcataagggaccccgttgggaacaggataataagtcttatcatgaccaaagactggagggtccccatcgcaccgccacggaccaatccgaggctaaaaggctcaaataccgaagtcgttgcttcgtcctaatagaagggcaactctataataaaggaatttgtcaacccttgctcaaatgcatcacaaccatcgaataggtagatctcct

SEQ ID NO: 63580 - DNA, 726 bp, Zea Mays
gggggccacacgcagatgctgccgccgcgcggggagagccacaccacacgcacgcacgggcacggttggcttggctcggatcggatttcggatggcggcgggactggaccggaccggaccggacggccgttggggatggaggagtgatctgattgggagacgcaatgcaacccccggccgggtttggctttttcgttctttgtcgcgtgctgtgctgcctgtttgtgtgctcgggaggccggcggcaacggctgcgtggcattggtgcgtcgcatccgtttcttcttctcatcccttcgttcctccactccttgattgccgaagggcggctgatgctgatacaggcagccatacggtacagcaatcctgatggccaccttgatgtacgtgccataaatcctggtaccgtgtgacgacgaccggtgaacatacacggaacgatatttcccccccctccccctcttttgcggaaaaaaacatactacacggaatgattgggggtgtgtgtgtgtagggtgtagtgcgtgcgtgtcgagtgtcgacggtaggcgtacaaggcgggagtgtgtctatgtgtgtgcgcgcatgaagttcagtacactgttcacgtattctttgctaaaaaaaaattacgggcgacgattatccccactactccctaacgatggataacgtgagtagatagtatagtctgaggggagtgtgacggagcatcatgatcttcta

SEQ ID NO: 63581 - DNA, 761 bp, Zea Mays
atatatttcaactcaaaaccttgggagaattttattagatttccaaaataaaacttttgggtgttacagtatgggggcatcagctaaagtaatacaagtcgatgcatttgcatgtacatttctacttcatcacccacccattgtagtaacatctaatgtaaagtagaaggtatacattgatttgcatgaatccaatctctgcccaagataagactataattcccatctacttcggtgacaaagaaagtagaagcgagggtctttgtcccaatggtcaactcaacgaacgtgacacccttggcttcgatcggactattgttcccaatgccgctgagcgtcttattagtcctgatcaactcattgtcctattttcctaattttctgtataatgaataaggcattaaattcacggctaccccaccatctaccaacattctggaaaccggtatcccatcaacaagaccacacaaaaagagtggttttaaatggttaaccaattcctttggtttggtgaacatgacatctttaggaccaaaatcaaactgagcaaccacaggttcatcatcgctgataattgtgtaatcagcctaaaaagtaattacattaacatccatacctagttgctcgggcgaggctccatagtcgacgaggtccccacctagtaggtcgtcttatttgatgttgtcctcatccataggtgttggagcacctgtaacatcccaaaatcccaaccaaggtttgaaaccctaacctcctaatcc

SEQ ID NO: 63582 - DNA, 672 bp, Zea Mays
gttttattcctttactctggatcacacaattgtgaaaataatttttggatgcttgttcacacattggccagtggcaaaaccaacctagattcgaagcccaaacaccattttgttgaaagagacgactctggcggtggctagggcaccgagagtgtaaggggcgactcatgctgtggtggtgtgtcttggcggacgatggctctaagctcggtgcaacgaggcagatcaatggatggtttgtgccatcgtggaatggtggtggccgggtgcagtggcggatctagaaattactaaatccctgaaccaaacttaatatgacaaaaggataacaaaatatagcattacgaaatttgagtgcactaaccaaaccaattcatactagctaaacaccacaattgagatgcatgtaggtttgcaattggatttacagcaaacaatgaggaacaatggcagcgattcccccagcatgattaggctatctccaaccattctccccacatttctcctctatctgcactttatattatattttactacgtcaccccaaaagatacccccacataaagatgtctccaaccattcaccctatcaagctcctctatatattataattcaattatttgatatttttccatcagttcttgaagttttaaaaatcatagactatttgta

SEQ ID NO: 63583 - DNA, 1203 bp, Zea Mays
gatcagttgcggtgggggtcgaggcaaccatagcctttttgagtgtgctggtagttgttggtagtttgtgtggtactgtgcgtcgcggttgtatacttcttgctgatgttgaaactatggttgggaagtgtggactacagtctttgctggctgttctaggtagtccctttttctgcatccatcccctttttcacctctttgtatgcgcaatagtctttagttgagtgactagagcttttgtgaaatatgcagtaaagcttgtattcataaggtggacctcgtccacgccccttccccttggggccctactgcctcttgccagctagtaactttggtcgtagccgcaatggatgtcttcgggttcttgccgctgaatattgtggatttgggtctgcggcggaggcagttgcgctcgcacccaagttttggagctccctgagtgtgaagggtcctttggctagtgttgtgcttcgaccttgcaatagtggagatctttggaccatgcgtacttttcaaacaactgatataactcctagagtgttatcggtgggtccctagtgcagtgactatataaatggccggtgcgcatgtcgttgatggcataatgaatggcgattccatcctctactaatggcaaatgagacttgagagacaggaacttattgtagtaatcacgaaggctttccctatctagatgtcggcttagtgatagttcagtgagggtgtcgatatgcagtatgtaaccttggaagtgtaggaggaatttttcccaaagggtggcccatgagtcaatcatcagcacaggtagcctggagtaccaagttagagtggggccctctagggtgatcatgaaggactttgccattgtgttgtcgtctccaccagttgaagccattgtgacatggtaactcatgataaactacgatgggtcacccttcccattctattttggccagcttctgaacctgtagtttcttggctagggtgtcccctacaacctggcgaagagcgagcacctattgttggtgaaattgaaagcctataaagcgtcattttgtggagactgtctggcttcgtcaaaactgctcaaccttacacgaccttgcaaagggtgagcggggtcatgtgcctgtagttgcaaaatttcttgctcaagggctaggagatgctctttttcttgctagatgaagatgcggattctgg

SEQ ID NO: 63584 - DNA, 947 bp, Zea Mays
cgagaagagagcataggaaatgataatgactgcggtgacaaatacctagaaacctcacgagagaggaagaatctaggtaggacaggagatgaactcacgagcaggcgaggtcactgaaatacatacacagagtgttatgacacagaaatcgagtgatttggcgattgagaggtcaaacggcgtgaaaacagagtttgaatgacgaatagtgccataggaggtttgaaattggaaatgaggcatgaaatgactttgaattgagccgatacttcacgaataggtttatatgggtaaatatgagtgaagtgtgcgcttggtttgatttttggcgaagaaaatggaatttgggcactcggctcggaatcaatcgctataaaggggaatttgtgtaaaattgaagcctgggatatcagattggcgtgagattttgcgaatatgttactggaggtatcgtgaaggtgcctgaaaaatttgggattgattggagcatttttggctggtttgggcatttcaccgagcacgcggcgtgcgagattctaggttttcggtgaaacaccattttaggtggagaaaccctccctaaggagctaggaacctgcatggggaagcataaaggaacaatggtacacatacatgcacagggattcacaaattggctcagttttggttggaggatcaaaaggggtggaaaacaagctcactgaccacagagaagggaagagggaggaaaggagagccaagggaggaaaggagagccaggctactcactagagaagggaagaggagcagagcctgagcacgggcaggagcaccacgtcggagatcgccggcgatgagcagagtggcgcttgaacgccagggactgagaagagccagagagcagagaggggaatggggacctctggctcggtctcagactggaggtccttttttaaaacgtgttatgg

SEQ ID NO: 63585 - DNA, 370 bp, Zea Mays
acctcctccaccacgtggcatcgtcgtctcggccatccaggacccgacgtcatgaccaagctcaccagcagtttacacccttcatgtagtaggggacgttttgagggtctctgtcatgcttgtcagttaggccgccatactcgtctcccatttagtatttctagttctcgcgctgagcaggcttttgatttgatccattgtgatctctggacctctcctgtactcagcatttctggatacaaatactatttggtgattttggatgattattcccattttctttggacttttcctcttcggttgaagtctgatacgctccccaccctcacccaattcttcgcttgggtttccacccagtttcgtcgctcgg

SEQ ID NO: 63586 - DNA, 501 bp, Zea Mays
ctgggaggaggtcaacgggagttcgtcgattcgccgagagatctacactcacccgatctgcgtcatttgagcttcaaggtccaaggtacgtgtcccctgctccatgttctacatctccgattcaatccgtgtcccaaatcaacctgatttcgattaaccctagggtttacttgtacttaagttgtttacatagatccatttaattgttcatggccaacttggacaaatagggtttactgtgcactccgaatcgcctaaaatggtcaactgatccgtcgttaacatgtacaccaacaaatctggtttcagtgtatccaccaacgtgtatacaccatgaatactcttgtatggttttcatattcgtcatcgtgtactggtcatttaagtgtatccaccaacgtgtaagaggtcaattatgttgctgtcatgttgtttgtatgttgattgttgaatgttgctcgtactgaaattaatgttcttgttgctatgcgaacatctaag

SEQ ID NO: 63587 - DNA, 768 bp, Zea Mays
ccggcgccgccaatccgccggcgagctagggctttctgatcactggcctctccagtttcccgccaccatgggggtcgacagcgacgacgaggatctcgtcgtctatgggacgcccatcgagcgagaggaggacacctccgcccgcaagcgccgggccgtcgccgaggctggccaactccgcgccctccctgcctggaagcaggaggtctttctctcacctccctccttcttcttctccacctcccaatctccctatcctgtatctgtatcgttgcggtaggacagaatatgtgctctgttacggtgttggtattgatggattcgagatatactagggcatgcaatttcgtgagtagcaatgcaacaggtgttgcgtttttttaatgtttacggtttgtggagcaactggggtgcatttggttgtgaccaagagagactgcacatactcttccatttggggtttgctcacatgtctgctgctatgtttagctttggtggcacatattataaatagagctgtgctaattttctgcttgtaccactggggttggggtgaaagcaagttcgagttttttagggcaatcggctttatgcccagttttgttagttgggcaatatgtcaactaggaaaattcagagacagaataatggtccaaattgtgaattatatctgcctactccctccgtcccaaattataagtcgttttaggtgcatagaaagctatgcacctagaaaagacaaaaccacttatagtttgggacgggcgg

SEQ ID NO: 63588 - DNA, 547 bp, Zea Mays
aaaaggaaaaaaatcgggtcgtgccagatcgagcccgccgtggccttaggctcagggctggcagggctcgatagccaacatgccaggttgtatttatgccgggctaaaacggtatcgggttacgggcttatcggatggtccgacccgtttagacatctctaactgctatgttgccgtggagaacttggcttttaagaaatgaggtggtccatggtacaaagcttatgcttgtggctgtatctgtcagtttcctttagaattatgctacttctctgctccttagctgatatcagacaatggaaaaaggacctaaagggtaagcgaactatcctttttagtttctgaacaaagaagtggaagcacagtgtgtgcccagtcttttctaaaacttaaacataacgactaaccaaaataaaatggaattaaactaactagtctagctaaaattatgtcgtcgctatttttactagcactttataaatatattagttaaacaattaagatatcgagctagatagaactatcttaaataattctagcaagcaag

SEQ ID NO: 63589 - DNA, 326 bp, Zea Mays
atagtgtttagaataatgttgagaacaacatgatgttcgctggattgacactattatcaatctatgaacccggctgattaatgcaaatacaacaagaagaaaatataaaagcatatttgaaagagaagggcaatgagtatgaaaaacttgtttgtcattacactatacatgatgtagtgtggtatgtccaagcatctaatcttgtatattaaatccctaatacatgcaaactattcaagaaaattaagatatgaagtgtacttcaatcttcattctgacatgataccggtggttggttgtttaaatcgtggctcatactgaatcat

SEQ ID NO: 63590 - DNA, 1307 bp, Zea Mays
ataaatcttcgaggaccttgttgaccctttctatctgaccatctgtctgagggtgataggcgatgctgaagtctagcttggtgcccatagctttctgaaggctcgtccaaaatttggaggtgaactaggttcctctatctaacactatcttccttgggatgccatggagtctgactatctctttaagataaatttggccaagggtggctcctccaaagttggttttcactgggatgaaatgggctaccttggtaagacggtctattattacccagatagagtcaatccctttttgcgtccggggtagtacggttacaaaatccatgcctatttcctcccacttccattcaggcactgggaggggttgcaataggcctgcaggcttctggtgctcggctttcgttcgttggaaggtgtcacaccaagccacatactgtgctatctctttcttcatccctctccaccagtatctggttttgaggtctaggtacatcttggtagttcctgggtggatggagtaggctgagttgtgagcttcattgagcaggacttctcgtgcctccccttttggtacacacagaagattcttgaaccaaaggtctccttgttcatctgtcctgaggtccggaagttgttctttgcgagctttttccataagtcttgctgtctctgagtccaggcattgagctttgcatatgaggtcttctagcattggtttgacttctaggctaccattgtttcccaaacatgcattcagttgagttgattccttcttccaatcttctaagaagttggttccctttatcccgaaaggttttcggctgagggcgtctgctaccacgttggcctttccggggtgataatgaatctcaaggtcataatctttgatcagttccagccaacttctctgacagaggttgagatctagctgagtgaagatatacttcagactcttgtgatcggtgaagatgtgacatttgttcccaattaggtagtgccttcatatttttagggcatgcactatggctgccaattccaaatcatgtgtgggataattctgctcatgcggcttgagtaggcgtgatgcataagcaatgactttctcgttttgcatcagcacacaccctaagccttgccttgaggcatcacagaagatgacgaaatcctggtgtatatctggtagtgtcaaaatgggtgcggtcgtgagcttctcctttatgatctggaaactttcttcacacttcggggtccacacaaacttattgtctttcttgaggagctcggtcataggtcttgctatgctggag

SEQ ID NO: 63591 - DNA, 405 bp, Zea Mays
cgccgccgcaatttctcgcccgatgtccacctcaaactctacgagctagtatttcttgcttagccttcaacccaaaggattacgaattccacaaacgccaacaggctctccttgcaagcctctctttttaagttacggggcacttgtcatgcacatgggcgaccgagctcttccatttatatctctaccactcctcatcggtgaccggacgaacgccgggagaaacaggccgatccgtagctgcctgcacacatcggtgatcgttcgatccatgtgcgattgattgatcagggaggagcgagtgatataatgccttgcttggcgcaagagttccacccgaagctgcccgcggcgaaccactactgcaagtccttgtcgtcgctcatccgggagacctacgcgcac

SEQ ID NO: 63592 - DNA, 500 bp, Zea Mays
ctttgaaggcagagaatttaatggcagcaggtcggtagcaatagtaaatgttgtgctggttagctggagccgattgagttataaggaaaaaatgcggaggagtcgtgctaagttcattccatgccttgtggaccgccgttgtaggttcccgtcgtgcctcccattacgtcaaacatgtttatgcaatcttgttttcaataaaggactcaaggaaggtgtttttggatcatcaacccaaggcatcctttgtttatgccacagtctgagcatgttatggaaaaataaaccaatcccgtaagggcctactgttggggatgtgcctctaccaaaggtcctcaaactaacaaatcttagttgctttatggtctgtttcaggaataacaagttgaccttcgtcgtagtaaccttttgcaggataagagaagaaaaatagaagcttcaacattaatgcatagccgaagcacgttgtggcatatgaagcaagtaacaaaaatgaagga

SEQ ID NO: 63593 - DNA, 616 bp, Zea Mays
gttttacgtgaagaatgacttgaaggcaagagaagatattaaggaagttatcatgcgccacatttggtcccgcttcggcctccgaaggccgaaggttgaaattgacgaagctgccgaagcatgtcagaaggcatttggtactgtctgcttctttattggtacaagagatttggttcaagagcacatagcatacagagtatggtcgcttatagagagctgggaaatgccgaaggagaccatcaccgaatctaatgaaggtgaacttgtccggctgaagtacgcattcagatacgaagataaattcgatgaaccaaacaatgactggctaaaatgcatcgaagttaccagtgatgaactgcttggatcatactccaaggcggaagacaatgcattatccacagccttcggaggtcgggaaaaaaagagattgaacagagtttttgacgctattggctttgtctaccctgactaccgttatccactgcgaggtcagggaaagaagaggaaaactgctgcttcggccactccagtcgagcctgcaccgaagggcaaaaagttgaaggttcttacccaccggccacgctatattgaaccggccgtggtgcctgagtttggc

SEQ ID NO: 63594 - DNA, 1284 bp, Zea Mays
ttgagcctgaagttggactgtcagactgcctgaagtctgaaattcagattaacagtgtgatgggatgaactttgagtatgaattccaccttgatttagtgatcaaatgagctcagttcctatagtcgaattgtagatggtttatagctctacaactttgctataggtcactggatgtgttgccatttgaaaatcagagaaaaagtggcttaaacttgctctgtcaggcaactgaatggggggatcgccatggtacagtagctcgagtggatcaggacgccagcgcggcttactcgccgccgatgaccctcccccgtgcaaggattcgcgtcgccgcgttaaaattaacgttcgctggcaaccggataacgctgcatggttaaaagatcgtcgtcgccgtcgagctggaagccaccccggtcagccgcggtaccccttccctttgctcaccgccgtagataaagtcgctcgccgtcgtcatgccatctctgtgcccgctgcgtgtccgagcctttccacggcaccgccgtgattctctactgtcgtcccatcatcgccgatgaggttgccacgcctctggacacgtattcaccgcgcccaaggttcttccctatctccggccgccgcacatcttcattcaaattagtggccaccgcccgctagcactataaattgagccctccccaagctgcataacatcatcatcccacccagccaccgttaatcgctggcagtccttcgctagaactcgcgaatttttgattcgccccaaatccactctccgccaccgtagaatcaaactcaccgcggtcagccctttccaggttagctcatcgctctctctccctcgtttaagtactctgatggctctgtgatacttaccgagtcaccaatttgaactgagagaccaccaatcatcgggaacgcgatcaaacgctcatggccttcgcggttctcgtgggcaggatagaataggtcaccatttgtgcaattaatttaggggaaataccctctaggtcatgaatttggtgtagtccgaagctgggcgctggtcatcgcctcaatcggccggtgcagtggctcgccggagctcctccgcgcgctgccgtcgtcggggacctagcgcggtaaagagatagaacctcagggacctcggtgcaagttgtcagtgactgatacaaatagtgtctgaacccattaacagtttgacagaaacgcgggggccgttctgcaaaacctccagggcgcgggcgtgcgcgtgcgctttcccctctggactgggccg

SEQ ID NO: 63595 - DNA, 930 bp, Zea Mays
gttgataggccatctctccaattcacctaaaaactctgaatggtccaataaagcgatgggacaatttgccctttactttaaatctcctcattccacaaagtggtgacatcttgaggtacacatgatcaccttcctcaaactctagtggtcttcttctattatcagcgtagctctttagcctggtctgagctaccctcaacttctcccagattatatgaacttgcttttctgcatcttgattaagtccaggcccaaagaattgtcttcctctagtctgatcccaatatagaggagtcctgcacttcctgccatataaagcttcgaatggtaacatctttagattggcctgttaactattatgagaactcagcataaggtagactcttgtcccaactactaccatgctgaagggcacaagttctcaacatgtcctccaatacttgattagccctttcagtctgtccatcagtatgaggtaggccgaactaaaattcaacttcgcatccgtattctcatgaaaacttttccaaaatctgggggtaaactgtgatcctctatccaaaatgatcttcttcggtacaccgtgtagagacacaatccgagccatatatcactctaccaattgagatcccttataagtagtcttgaccggaatgaaatgagccggccagtctatccacaataacccatatagaatcatatcctttcgatgtgcgaggcaatctagtaatgaagtccatactaatctcttcccacttccattcgggtattttaagcggttgcaataatccagctggcctctggtgttcagccttaactctttgacgcacatcgcacatagccatatgtgcagccacatctctcttcagtccataccaccagtacttctgcttcaaatcctgatacatcttggtactaccaggatgaata

SEQ ID NO: 63596 - DNA, 286 bp, Zea Mays
aaatattcgatatgatatggactaaactttacctttagttttgtaaaaccaaacaccccataagattgcagcccagtccagcatcgtgggaaacaagatggggtcggttgtgaagacggatcacttcagactgtctccagtggatatggtaaaatagggatgtgaaattgtagatgacattgtttgacactgtttatagagtggggatgaaataggggttatgattataggtagccatgcagcccaaggctcggtagcccggcccgaggcccgattttttggcccg

SEQ ID NO: 63597 - DNA, 322 bp, Zea Mays
agtgaatacagcaatggtggcgttcttatccccggtgaggtacactaaaccaaggttgatatcttgcctgctagctcgaattcggatagacattgcgccctaattcatgtagttgcaaatcggtccgcatcaaagtggtgcattaatcaacgttctttcactttggtataacgatcataccgaaaatccccatggattaagcacacgatgacgcccaagttggctcaataacactgaaccctagcttcagtatgattagatgcagtaatcgcatttcttttcccatcagaccgactgacattgctacctcaaggcattatta

SEQ ID NO: 63598 - DNA, 396 bp, Zea Mays
gggattgcatgtgaacttttgtttgtgtgatactaaacctcggttgctgcgcaggttctgatgtttgggcctacgcaagcaaccactactgacaatactgattttgtggtggagactttagttgtagtgtctgccgatgatagtgtgcctggctctatgtctgaatgttttgagtctaacggtgagtctgggagttagtttccttggacggaggagtcctcggatgaaggcttagactattttgttgcgttggatgtggctgcggcggggactttgccgtgtgtggagggtgctgaggatcttcctggtacaagtactggttgtaggcggcgaagggtggtgggaaaatagtgtgtgggtgaattttcgcggagtggcaggcgccgtcgcacgggg

SEQ ID NO: 63599 - DNA, 384 bp, Zea Mays
gtcgtgacgtagaggcttggaccacacgcgcgacgggcgtgggatgcatgtggacagttgatcggatgggggaagggaatgagggactcgtggctgaccgtggaactgaaagtttgattcaggccatttacatctgatacgacacaacacgaaaataagagtctaaagtacgacaccacacaaaggaaaatggatcgggctaggcctcaaacttaggcatgatggttgacacgacacgactagatgggccatgcttaggcggggcactgcacgaagtggggcacgaactacaaagctaacgtttaactgattattgcatgctttaatattttttatcacttcacaaaagttatagaaaaatgttgatttctctttctcatataa

SEQ ID NO: 63600 - DNA, 377 bp, Zea Mays
cgccaataagactctagccccaccaacaggatcgtatcctctcctaaggcaggcccgggggccactgtcggtaccctaaatcaagggtaccctcttctacagcatgaagacgccgcacctatgcaatgtccccaggccatacggaggacggtgcctgaccccaccgcatgggcaggccaaagggcgccacgtggcaaggaaagacagcacattctggtatgaatcgtgggggtccggacctccacagaaggacaccgaacccctatacgtataagttaaggttcgaacctcaacaaggtaccggaactaggaggaccctagcgtgagtaggggttcgatgctgacacgtgtccagaccttgcccttcacttcccgct

SEQ ID NO: 63601 - DNA, 648 bp, Zea Mays
caaagagcaaagttaaggaacaagattaccaacacattgacatgagagaattgatctttattactctcatgatatattcataagatgcttcacatgggcatcctgcaataattcaccatgaattcataaaaccttagagcagttctctcttttgcctctatctaggaaaagcaacctctaactttgcctctagttctataggtcaccctttgttcttttactcttcgatgttctcgtgatgcacggaccatgagcacatggcctccttttcattacttgccaagtacaatgctcacttataagaatgttgtggttcatcttgaaaatcaaccaactacaaacaccaacttctaatacctacccatcattcgtccatggtgcccctcagcacgcatgcatgtagaaaggttctaggggaacaccacatactgttagttttaggtaacttatatatatagtccaagggtatgcgttatagatatatacaaaactaggatatgtgcatacacaatttgttataatgcataagcatgctaaaacaattcatgcaccacatcagtcatcaaatcatgtccaactaaggtactacatcttgcttggcacaatgcacacatctgagtagtatgcacaccacaacactattttaac

SEQ ID NO: 63602 - DNA, 465 bp, Zea Mays
ttggaatcttgcatactcttatattcttgtgtatgcttattttcatgccccaaggacagttcaagacatttcagttaacatgttcttgaccacccttgtttcttaatgatccatgagcggtcattttattttgcacatccgtggtaatctcgttgtttccttgtaacttccttcagtaatgaatttttacttcaactcttctatcagaaccttacttatcttatccttgattgttttctccaccttgccattacgcgagtcttaccttaattctatcctttgtcatactttttattggtatcatctttacctttgtcatctttacatatcaccttgttgcttattgtatacctgctctataaaattttcccttttccatctcaaattgagagttgtattttacccattttcccttggatgcatcctattctttgccgcttgaactttcaactccatcgtttaatg

SEQ ID NO: 63603 - DNA, 598 bp, Zea Mays
atcgtaacttcatagcccaggtggccatcttcacagcgatctacgaggggtaccttgggatcgagacccattgggacttgtggctccacctcttgcacacgtagtcgttctcccttcccttggaggtgaggaaggtggaccacgcggtgagggccgacggctgcattctctagctatgctcggatcaggcgcagctctacatccctgccacccttacctcgtcaaacaaggggtggtagagccgttggttttatctccacaatgaggaagagcgatggccggagtacacctaatgtgtcgttaccgcggctaggcagcactagcgatgggggtgcaccgcgagagcaccaggcccagctgtagcccctgctagacgccctgaggaggctccgtgactgggggctcaccgcatccggggtcgtcgcggccttccaccacaggagggtgctgccgctgatggagtggcacctgcgcctagatgaaatgacattcgaggtttccatggagagttcctagatggcctcggttgccctctcgaccgacgagctcctcaggcgggtgatggggatggtggggaaggcagaccacatcgtcccca

SEQ ID NO: 63604 - DNA, 833 bp, Zea Mays
gtgcatcgagtatcatcccattggctctttccacctgcccattagctcttgggtgtgccactgatgcatacttgatctggatgctcctctgctcacagaagtcaaagaattctgaactggtgaaattagatcccaggtcggtgattatgctgttaggtattccaaaccttaacattatttcctgattgaactccactgcctttggtgaggtcaaagaggcgatgggcttgtattctatccattttctgaatttatcgatggcaactagtatgtgagtatatcatcctttagcttacttgaagggcccgatcatttaaagcccccagcatgcaaacaatccggttacaagaatagtctacaactgctgtacgggtagatgctgctgttttgataagaattggcacgacttctggactaactcggttacatcattcttcgttgtcgaccagtaaaacccggacctgaaagccttttctaccaaagtccttgatgctgcatgtacaccacactgcctggcatgaatcccatctaacagttgctttccaatagccgagtgaatgcacttcatgaggacacctcctgcacctcttctgtacagtagaccccctataatggtatagtgggccgactgtcttgcaatatgttctgccgtagctttgttatctggctcttccttgttttttatgtatatgatgattagctctctccactcattgggatctgcctcttcctgactcagaacgtggcattcctcattctgatctatggagacgctcagttgttgtatttcttggacaaaaaccccaggtggaacttgagcccgactggacccc

SEQ ID NO: 63605 - DNA, 404 bp, Zea Mays
agacaggtggtagcggtggtggtggtggcaactaggcctaggaaacttgagaatggcttgccgaagcaacagaggccgtgggccgtggaggacttgcttcggctgactctgccgcgcttcagcttcagcaatttctttctgcttttgaatggtaacctggcatgtccttgttgtgtggcccttgtcctcgccacaaaaaaggcagtacaacttttggggttgatttccaaaccttccaccaccaaaacttcttcctcctctacctcttggagctggcggtctgaaagaagtctgttgtatgctcgaagtctgggaactatgatggctatgttgggcattgctggccctatcattgttggtagtggagttgtggattgatcggacatgcctgggttgaagtcttc

SEQ ID NO: 63606 - DNA, 722 bp, Zea Mays
aaacaaggcaccaaccacgtacagttattaattatttaatcaccaagggcaatctatgactaacttgcaaattaaagctgctgggcacaaaaggtctgctttagtattccactacacaaagcgaaagtggcgtagctagagatgcatatgcatatgcattgcaacttgtttaatcccccctaattttgagcattattacttcatacaaataaccatattatattcgaatgaaacaatgcatggggggaaagactgtcatacatatatacatactataatcatatactgtacttttttgtgcatattttgtacagtatacgataattgtaagctagtgacagtgtcctccaaacaacgctcttcgtgtaattaagcgtacgtgggcctggcgagctgtgttatttcttgacacaccagtactgcagtagtacaccacctcctagtcctagctgcctctccctctaggctttctctctctagctaggtgggatgggacacagcaacatgcatgtaacgctagcatgatgccatgatgcatgcaagcttgtcacggtgcatgtaacgctaggcatctagtctatcttcttctctgtgatcatctctgtttgagcttgtttagcattatttgacccgcgcatgcatgtgcacgatataatactacacatatcatgtaacttattgttttgtcacgagcaaaatcttagtgacacatatgattacac

SEQ ID NO: 63607 - DNA, 1484 bp, Zea Mays
tgaaggacgctaacctccgagcgtgctgctatttcttctagatgggaggtatagatgaatctgcgttggatcgtctctcgctggtcacagatatgacaaagcacatacgtgtccaggcctcaggtggaaggtccactacatccgaacttgggcagttctcgcctgtctttgtttggttgttgcgagtaatatatttcattccttttctcctatactaattatgtatactgaacgttgaacgctttggctattccctagctgcacatcatcttataaaccgtcaaacataaacctcaggggccctgttatgcatcagacacctttggtgtgcgacgagccgatgacaccgtgcttcctttactacaggaattttatctagatttggcagaagacaacagaaaaattactccacgagattacctagagctagcattgaggcctgttcaaggtggaggaagggacatatctgcaaagaatgcggtatgatagattttcatgggtgaaacgtagctttgtacttgtgcttggtaactatacgtatggactatacttatacttcttttgttgttctggaagatacgggactccatccgtgcactttttccggacagggaatgttttacacttgtgcaacctgtgaacaatgagaaagatctccaacgtcttgatcaacttcctgtaagtatttcttcctttgaactacagctgctatttgtggtcttgtacttaaaattctcagcaaatatcatatgttgcaggttagattcaaacttttcctaagttcatttacgcaaatagcaaagtacccacatacatattgttgtatatattttttgaccatgtattctgaatttctgattggattggactattttaaaaagtttggaaattttcttgaaggtagtgggttaaggtaccagtcagaaaaatgaagattttgtatgatgcagtgcaaactatattattttgtgcattttcccggtagctgtacatttttatggtaataacatatacttacatggtaccagactactagtccaataaggcagtctttaacacaacttcggtcactgatttgaattgtgatatttttgtaaaacctgtagattgctcttgaaacatatttacactttaaacagtttgatggcatgtacaaattatgtatgtccctttatgacgtgagtcagaatcataatgcacgttttggcataattatattgttctagcagattgatgttggtgcaataattcctaatttctgtgatgcaactgagtaatttccgtccagagttcagatccggtctggatggtttcatgaaatttgttcttgaccgaacaagaccaaaacaacttgaagctagtacaatgacaggtcccatccttgctggattgacacaatcatttcttgatgctattaataatggtgttgtccctacaatctcttcatcatggcaggtatattatgattgcttatagcaatgtgg

SEQ ID NO: 63608 - DNA, 320 bp, Zea Mays
atctgtcatcccaagaatcgcagcttgagacccagctgggtggtacccaggttgaggaaattcatgaaagccaacatcatattcggagagtattggagacttgccctgatgaagcggacgttgatacaggacatcaggtaatatatacaatcccatgagatttttacgcatcatacgtacattgtttgcatatttcttttttagctggacacgaaccataatatttgtcaacaggatttttgctttgatgttcgaaacaacatgttgaggaacacaaatatcacacctcaacccacatcagcttgcacctttacaagatc

SEQ ID NO: 63609 - DNA, 544 bp, Zea Mays
cgcatgatctcccaataaccaccatgtcaacaccaattcaaattgactcggctggtggaaaagttcgagccgatagtgtatgcttgaatgtatgtgtggaaataaggaggatagagtttctcgctaacctcatagtgatggatactcagggaatagatgttatcctagggataaattggctagataagtaccaagcagttattagctgtgataagaggacagtgaagttggtgtccccactaggagaggaagtggtgatcgagctagtctcacccaagccaaggaaaggaggttgtcaccagatggctattgatagcatagagatcgatccactcgagtctatcaaggttgtgtcagaacttctggatgtgttccctaaagatctaccaggtatgccacctgagcggaaagttgagtttgtcatagagcttattccaggcaccgctctcatttctaaaagatcttatagagtatctggaccagaattggttgagctcaagaagcagatagatgagctgtcagagaaaggttacatcagaccaag

SEQ ID NO: 63610 - DNA, 381 bp, Zea Mays
cttgacttgattgactaggttagtgcctattattaggctagctccagatgattgacccggccggtacgtacatatatcatcggtgtggtgtatagtatagggcggcttaacaaatacatgccttgtcatttgacgcgtttgtttggcaaatataatctgagctacgtactagtttatttatagcctactcgtagcggccgggcagatttcattgttgctaatttattcacggacggacacccacgcacactgtcgttggttatcaagcgcaaaccctgcatgcatccttttataaccccacatatgtttcttagaattcgattttagtctcatatgttgttgatgcttctttttttcttatcccctcttaaccatacgcgt

SEQ ID NO: 63611 - DNA, 343 bp, Zea Mays
gccgggtgtaaagactctagaacacgttgtttttcgatcgggccgactttggtcgtagtttgttgtgcgaaaacgatattcattgacatcatacccagaatatttcttgaccctataagcaaagtcgttggctacttgtctcaactcggcactcatagacggatctctttggccctgcaagtattcgcaagttaaaagacgctaaattgagttcataatcagatctctttgacaaactaaacacgtaccttacatttgaaccaggaaatgaaattgggcaatccatttctcgcaccctttctaagaagagtatcatattcctgtggagttgggtcccttgatc

SEQ ID NO: 63612 - DNA, 295 bp, Zea Mays
atgtagaggactgaagagctagctataatgtcgaaggcaccttcggttgagctagttgaaacgaaggttgacaaaggtaaggttgaaagttcaaaaactgaagaagtaacaaagatgctagagattttaagcccttcaacaaaagcaatagcgccgaagacacaaaaaggttctgccacaactcctaagaggaggaggatggcaaatgtactagatgttgtattagaaacagcaaaaaccttgaatcctgctcctgccagaaaaattgtcgtagcttctaaggcgcaacccgaag

SEQ ID NO: 63613 - DNA, 629 bp, Zea Mays
gttggtgatagcggtttgggccttagagtgcgaccctctcccaaagaggttagtgctttggttgcctcacttggtgaagtccctgatgacgagaggcaggttcatttcgaggtgcctttgaatccaagtgatgcagagataagtgccatgctggatatgttggctgaagattcccctgatgcagcccctgctgaaacactggctgtagcacccatcccagaggctgacaaagctttggatactcagaggtctgatagtgttcgcccgaagcgtcctcgccgagccactcaaccaacttctcctgctgagggaagaaaaagaaaaaagagacgtcttcgccgagtgtcatgcttggatcaggatgttggtccttcttctcctgctgctgaggaagtgccagtaccagcttttactgaagctgaccccaatgggtgtggcttagatgatactgatcccaatgggtgtgatccggccaacgctgatcccaatgggtgtaactttgctgaagctgaccccaatgggtgtaccgtccgcattgttgatgaggatgaggaagaggaggatgaaatccctctagttcgaaagaacagccgacgctacatagccagcggcgaaagcagttgtgttcc

SEQ ID NO: 63614 - DNA, 785 bp, Zea Mays
taaaaaatggggtgtttccatgtagagctcggctcggctgtgttcgcaggctccaaactacatatgtcagttccttgatccacttccctacaaacttctcgctcttgtcaaacaccttcttcctaagtgcatcaagtatcatcttgttggctctttccacctcccattagctcttgggtgtgccactgatgtgtacttgatctgaatgctcctctgctcgcagaagtcgaagaactccgagctggtgaagttagaccctaggtcagtgatgatgctgttagttattccaaacctgaacattatctcttgaatgaactccactacctttgctgaggtcaagaaagcgattggcttgtattctatccactttgtaaatttgtcgatggcaaccagtatgtgagtatatcctccttgagctttcttgaagggcccgatcatgtccagcccccagcatgcaaacgatcaggtcaaaggaatagtctgcagctattgtgcgggtagatgctattgttttgacaagaattggcacgcttcgcacttctggactaactcggcagcatcactcttcgtagtcggccagtaaaacccgaatctgaaagcttttcccaccagagtccttgatgctgcatgtacgccacactgcccggcatgaaactcatctaatagctgcttcccaatagctgagtggatgtcatggccgtgcctgacgctgcaagccgtccatattcctctgttgctcctgcaaaagatgtcacctgcagggatacttcagcgcaatgatttgc

SEQ ID NO: 63615 - DNA, 741 bp, Zea Mays
ctcctcctcttgggaaattcttaataggagcaggacctttttgcatcttcagcaaatttgcctttgccagtgggctcaaaatttctggcatttttactgtttcttccacctttggctcttcgaccgtatcatccttagcttcggctgacccgattgtaggcacctttggcaatacaatggactcttcaacgctctacacgatggaaacagcttgttttgcttcggcagttgaagaggtcccttcgctaaattcaggcactatggctggttcaatatatcgcggtcggtgggtcagaaccttcattttcttgcccttcggcacagcagtagtagccgaagcaacaatttttctcttcttcccttgccttcacaacgggtagtgataatcagggtatacgaagctgattgcatcgaataccctgttcaatcttttcttcccctggcccccgaaggctgcaaacaaggcatcatcttcggccttggaatatgtcccaagtagctcgtcgctggtagcttcaatgcatttcaaccagtcatcatttggttcatcaaacttctctctaaatctgaaggtatacttcaatcgaactaagccattttcactggattcggcagtagtctccttcggcatatcctagctctccacaagtggccacaccctataggctatgtgctcttggactatatctcttgtaccaatgaaggcgcaaacattgctaaatgccttctggcatgcttcaa

SEQ ID NO: 63616 - DNA, 445 bp, Zea Mays
tcacactcccattgtattaatctcactatgtaccagtagtagcaactttatcttcatcaaggtacaagttttccaatgagtcttcaatatcttagttctcaacagtatattgttcccttctttctcctaactcttagttcttgatagaggtcaacatcatattttcaagaaacaattttcattgtcgctcttcaattatcatgttagtcaagctaaaacaaaaaatctaaagggaaactagaactaacatggtgtctctagctagtatagaaagaattgaataagttagtttgtgcttacaccactacataaggatgtcaaatttatcatcataagaagtgacattgtcaaaatctagacataccaagagctcacaaacaacagaagtagatgatgaagatgaagtggggtcagagaggggaagggacaataaaatctattccat

SEQ ID NO: 63617 - DNA, 332 bp, Zea Mays
tcagagcagagtagacgaagtagtcgaggatgagacgacgacgctggcaacaaggctgtgctggaagaaggcgaagaggtaggcatgacgacacatcgaggatcctgaagttgccgcgacgggagagccacgacacataggaagaatgtcctcgatagcgccactgtagcgtgacgatggtgcttgaagtcgacgaagaactcgaagaggaacgtggtgcagaccagtgacgggtgtgccgacgcagctcgtaggtgtcgaacaactcagagcgtgcgcaggggatgcgccgacagagtcgacaacgatgtagatgcaacagtaggggtcga

SEQ ID NO: 63618 - DNA, 501 bp, Zea Mays
gtggctgaatttttttttctcctgtgaaaaaagttggccatgacaaatgaaggatgctacaggaccactgtagcgagaacaagttcgagcacgataatgaccggggaaccgagacggtcgttcaggtatgccatggccacttgaagatgaaacccaccacaaatgtcacccaccggccggaaagagtggagggaaaccgctgcgggtccgcgaaactttccacggtgcattgacgctgctctcgtgctcggctgcgaggccaactacaatctgtgcggctgctgcgactgcgagaacttagcttggcagggaggagaaagacgacaggaacagagacgaatagccatgctgatcgagcggcaagcttcgtcccccctcggcggcgaggcgacacgtacgatgcatccaggcacaaatggatggacctagaaacagtaatcaaatgtgtgccagagacgaacagcagagcaaaaccgttcctttgttattcatgacgccgca

SEQ ID NO: 63619 - DNA, 753 bp, Zea Mays
ggcggctgcgaatgcaatgccctttaatggaaatgcgtctggttctgaaactgagtcatggtcatcggacagggatgattttgggagcccgctttcgtggattgaggagtcttctgatgaagatttgactactttgctgcattggatttggccgcagcggagtcctcgccgcaacctgaagcgcgcgaagagtctgctcccccggttaaggcgatagccgaagaccactgtaggcgaaaggtggtgttgaagcagagtgttggtgggatgtcacgaagtgggaggcatcgccggatgggtatggaacgatcccgtcttcgattagatcggggtaggcagcgcgatttactatcctcgacgtccgggacgtgtattggggagggggacttgcgaaatctgtttgagggcaaagagttgaagatgatgttgtttaatttccgggaggcaggtcttattccgaaggctgagctgatgtagcatgtttgctagcctcgctctcgtgttgcaatagtgagtgaaaatgctgccctcccccgtttcgcaatagagagggagggcaacaaaatgtgatttgtattattgtgcgatgtggccgacgggcccttcgttttgtgtatgtaaactatgatgacatcgcgtgctgcgcttactataagattttcttgatttgtaatcgtgttggcgtggcacttaggtgggatggggacttcgcttcccgtgggcgatgtcgagcgcttctggtgcgtgctcggc

SEQ ID NO: 63620 - DNA, 343 bp, Zea Mays
caagtttgaagagatctttccaaacgtttcctgtaaacaccggatcccgatcactgactatggaacttgggaagccgtgtagtcttactatgccctcaaagaatgctcgagctactgtggctgcggtgtatgggtgactcatggcaatgaagtgtgcatatttagagaaccgatcaaccactgtcaatattaccgattttccatggacctttggcagaccctcaatgaagtccattgcagtatctgcccatacttgtcgtggtacttctaaaggctgaagtaggcctgctggttgaagagcctcggttttattcttttggcagatgacacaggagcgcaccca

SEQ ID NO: 63621 - DNA, 366 bp, Zea Mays
catgtatgcaaaaaggagttccaggagctaagtttgaaaaatgagtagaaatgagcatatggattaaaagggatcagaacgaagaagacctatgacttagtgtgttcggatagactaagaatatgtgtgtctatgtcatagaagtgctcagtagtatagccaaatgaagacaagggaaaaataacttaaatttggttaagttaggttgtttctggtgcatcggaccacacttccaaagaaggatttagatgtcccaagcagttggcgccccgaactaaagtctattatgatcgaacataacttctaaaggagtttttttcagactgaaagttcattcatcccttttgtgagttttggtgatttgga

SEQ ID NO: 63622 - DNA, 763 bp, Zea Mays
acccagaccactcgcattgcgggtgatctggataagaaataagaactcacactcgtcgctttccttcaggcaaatgccgacgtattcgcatgggagccatcgcagatgcttgggatccccagggaggtgatcgagcacttcctgaagattaaccctgacgccaagccaatgagccagaagcctcacagacagtctgttgagcgacaggacttcatccgaaaggaggtccagaaactgctagacgctggcttcatcaaagaggttcatcatccaatatggctggccaacccagtcatcgtccccaaagcgaatggaaacttcggatgtgtatcgactacaccagcctgaataaggcctgtcccaaggacccatatccactgccacgtatagaccaaatcatagattctacctttcgggtgcgatctgttatcattcctagacgcttactctagtttccaccaaatgtagatgtctagggaagatagaaagcatactgctttcgtaatagtggatgggctgtactgctatgttgtaatgtcgtacagtctgaaaaacgccctgccaacctttgtgctggcgatgagtaagactttcggggacctaattagggacaaagtagaggtctacgtcgatgacatcatggtcaagactaatagagggtcgaccctagtggaagacttaaccctggtcttcgacaagctgcgggcaacccgcacgaagctgaacccggacaaatgtgtttttggcatttccgccgggaagt

SEQ ID NO: 63623 - DNA, 660 bp, Zea Mays
gatttgttgccggacttgtgctcccgctgctcgtcgtgggtgtgcgtcggtgttgcgcgaattccggtgatggttggaccagcgcgttcgggtgggtttgggcatcgcgtataagtcatgggggcccgggattgtaactagggcgccggattcactcgcgccggcgagctcaccaccgcctgggtgggtggcgccaccgtcgggccgcgctgggaggaagacagacctaggccatcagatccgaatcgtgaggatgggattagatccagtaggggcgggtgtatggccgttggattaggattgtgtggatcagggcgcatgccagtagggtgatgtggtcttctgatctgaaccgtagatctagatccgagggccacggatggatatcggcttcattaaatccttacccttgatcttagatccagtggccgtaatcgcatacctcttcatttattggcgatctgatccggaccgtcagatctggatcgtgcggccctagatccccgatacccattcgccgtgtacatttattaaagagtccctctgttttcggaaaaccaacccgcggtcctcgggaactattctctgtgtctggagattcttaccccgagccccctgtgcttcacagaaattgaggcccagtccagagatcgtttaaat

SEQ ID NO: 63624 - DNA, 679 bp, Zea Mays
tgatgatgactagcttgacgccattgaagcaacaagtgatgaactattaggggcatattccaaagttgaggacgaagttatgaatgctgcctttggtgcccgaggaaagagttgattgaacagagtctttgatgctattggatttatttaccctaattactgctttcctgctcgaaagagggggctaaaaaggaaaagtgcaccgaagcaaaagaaaatgaaggttctaacccaccggccgaactcgttctacttagagagggctgcaaaattgcctactgtggagacctcaaagacagaagctgtcgaagcagttgaagagaccctttcagctccggaggtaatacttcacttttgcattgatttgaattaaggcaattgtgttctaatgttacttttggatttcttggataaatgatcgaggcatctgctacaggggtcgaagcacccagatagccttcggcaatctgcggtccaaggttattgaccttcggcaccaggccgttgagaaagacaagattcttctttctttaattgaaaagttgaagaaaaactagcctgatttggctgcattctctgaagcagaccaaaaaattttaagacttgagaaagagaagaaagctagcaaaaaacgcatagctgatttggaatatgccttatctgctcaagtagagctcca

SEQ ID NO: 63625 - DNA, 1115 bp, Zea Mays
tttgcgtttccccgctcaccggtccgaggccgttggggccacgcgcagttaatgatagctgtctgacccagcggcgtcgctcgtttcgatcgaagaaacagcaaaaaaggaggaggaaggcgtggtggggtgctggagaggggagacctgccagtgatacccattcaggccctgtttggaagtggagtttttccatggtttttgagaaataccatagtatctgctaatactacggtattttagatcagaagccgtttgagagatcattagaaaacagagtttccaatactatggttttactggaaccgtagtatttttggagtattcgatacagaggtctcgacccaagttttctgttccgcgcgcgctcgatgaactgactcgcgctttttttttccgcagccgccgccgcccaggccctagctttctctcccgcagccgccgccgcccaggccccagttctctctcccgcagccgcccccatctctctctcccgccgacgcccagcccttttccatccaccgccgccgccccagctctggttcccgtcgcccccatgtcctctgacgcccaagttatagcaggctggcagaagagaagacttgtctcttgtgagatggaagcaaaattgtcttttgtttgatcgctggaagtgttccagcactactgcagccacctggaagtgcttttgtttgtttgttcgctgcaaaagcttttgaacgtgtaactgctagttgaatcagagaacgtgtatctgctatttgaatcagccaaatactgtggtatcaaacaatgctatgtatggacaaatactttgattatactctggttttgctaaaactgtggtattgtgtcgcaacatactgtaaaccatggtattgaaatactgtggttttagaaaactttatttccaaacagggcctcatccttgtctgatccactatagccggtgttggatggcagcgacatgtttctctcctctcgctgagcattggctcggcatccatcaatgctactgtgcctgagaaagagaactagagggatctatcgatctgactatcagtttgtgcttaagctttctcacgtaccgcatgcatccagcattattcacaaac

SEQ ID NO: 63626 - DNA, 730 bp, Zea Mays
gggagattgggcgtttgcaggctgagcaaaactgctgaggacgttttcactgatgcttttgtttgggatatacaaagggcatccaacttatcactaattaggggtacaatagtagtaggactacaatagtactaagagtacaaactaagtcctgcgggctacatattgttcccacatctgatgtgctatatcatctctctttcgatttccagcttctctagaattattaaacctctgtacatcactattatagtgttggtcaccacttggcacttcgacaatctgttctggatctaactcatcattggaattagttggccactgcatatctccattatgtaggcgtatgaagttgtgtagaacacaacaagcaactgatatatcaacttgcttattaactggatagtgtgagccagtccttagtataggaaacctcattttcaatataccaattgacctctcaatatggtttcttagttgtgcatgtcgtagattaaacagctccttgtaattccgaggcttttgattggctcttccttgctcttgtaagtgataccttgttccacgatacggagcaaggaattgtgttgtatttgcataaccggcatccacaaggaaaaatttaccaggtggtactactaggccatggtcaagtgcatcttgtagaactcttgcatctgaagctgatccctcccaaccggcatgtacatgcacaaactttaaatcaaaa

SEQ ID NO: 63627 - DNA, 2079 bp, Zea Mays
gacccacaacgctgttttaagccagcaactcatcgacttggaggaaagacagggccttggctccagtcaaggaccaaagcaccgcctcttccctagccaccctaagggctgtgaccaagctaggattacatccatcaaagacacatctattcctatgcttccaaatggtccaagcacctaggattactaaagaattgaagccctttcttataagatcagatgcccgagagctgctagacttccaccacgactcaaaggaatcctcgtgagctggacacaactcctgcagccccactgaactaaggaaatcaaaccagaactgcttgacaaaaacacatttgaccaacaaatgatttatggtttcagcctcttggtcgcacaaggggcactgctctggtcggtctagtcctctttttctgagcctgtcagcagtccagcacctattatgttccacaagccagataaagaacttgcacttcccaggagcccaagatttccacacacgctctgctggttcgaactcaactgaaccaaggaagagagctttataagcagagctagttgtataatcctctgaagcactgaatttccatatatgtcgatcccttattccaggctgaagcacaactgcatcaagcacttcacaaagttccaggaattcagcaatgactctgactgaaattgctccatttacatcggagatccaatggaaattagggagagcatctttgaccaaccgtttattggcaagacgcaagggcaccatatcaaacattgcaggagctatgtccttaatacatctcccatccaaccatctgtccttccaaaaaagggtattggctccatcaccgagcttagtaataactgctgcagcaatcagattttgtaccaccttacaaacatgagtggggaagtcggtccaaggcctactgggatctgttttctgcagccatggccaacgagctctcagagcccaacaaaggctctttaactcactaatcccaagaccacccagctccttgggacgggtaaccttaggccaagccaagaggcaatgaccaccacagaactctttcctgcccctccagaggaagctcttcctcagtttatcgattgctttgatggccaatacaggaaggtcaagtgccaaagctgcataaatcatctttgccgtcatgacgaactacacatgaatagctctaccagccctggtcataagttcagctttccatcctggcagaaggctagccactctatcaacaatggcctgaacctggtcccttgagagtttcttgggaaacaaaggcaaaccgaggtacttacatggaaaatctgaaatattacatggcaacaagtcctgtaaacaattcacctcttcttccccacaacagattgggaacacactactcttctggatattagtccttagacctgaagctgagccaaatagatgaagaatatccataggcacactgatgtccggggcagtaggacttagaaataacactgcgtcatccgcgtacagcgagatacggtgctgcatattccttgaagagagaggttgaagaaacccttcctcagaggctcgctgcacgagcagattcaagacatccattacaagaataaacaacataggtgatagaggatcaccctgcctcagcccgcgttgatgcccaatacattccccgggcagaccattcagtaaaatcttggtagaagaggtagctaacagcccgcttattatatcacaccagatctgtccaaaaccaagttttttcaagacctcgagaaggaaggcccacgataccgagtcaaaagcctttgaaatgtctagcttgagaaggatacgagcctgcttctgacaatgtaagaatctggtcgtctgctggactagcataaagttgtcaagaataaaccgtttcttaataaaagcggtttgattgggggaaaccatattttgcagctggcctgctaacctgttagccaacaatttagtcaccaacttcgcgaaactatgaaccagactgattgggcggaaatctctcacactagtggccccctccaccttgggcagaagtg

SEQ ID NO: 63628 - DNA, 680 bp, Zea Mays
tagtaggattatcttgatttgttattcatgtggtgtaacaaagaggttgatgaccagtttcgacctaccgacaaacatcaactgcaacacagaagtgttgtcaataagtgtctatcaaaatctcaacatgaatacatgctccatgcctaacccatccaaaccaggtgagacttcatcatcaagcataatgactgaataaactatccacaagttcttggttccttccaacatgaatgtcccaccaaacatcactcatagatgattcccttttgtgaagcctcgaactatgcaaacaaccaactctaacatttcttggaggtgtgcacccacgttaaccaccaagggtgcaacgtccgacgctatttggcatcgactattcttgttagtgggaaaggcaaaacaattgttctaccccaaccttggaatcattgtgtgacaggaggaatgtgccaatgccttccatgtgaagtacttcccattatggaagacaagcgcacatagtttaaatgctatcactactaagattggttggtccactcagaatccccacattctagttgctcaaggtaaacatgagcatgggccacccgactcgacccgcccagaaaaacctgacccaaaccgaccaaagccatggggggcatgggccatagttttttgacccacaacaatccacaggc

SEQ ID NO: 63629 - DNA, 1749 bp, Zea Mays
agaaacacatgaaaaaagaaacttacaggagtccaaaagaatcttagtgcaacatccctaatggttttaatggcagcatagcagcaatcttgatgtacttcataatactaggttcatcatcatacctggcaaggagtataatatgtttagggtgagttgcagctaatcgtatcctatcgaacaggagacatacatgatggtaaaactgaaaaacaagaaaaacaagcaaaccgaaccgatctgactaaactataggtgcaataggtatgttagattccaatgaggcatagtaccatttcatttgatttgattgaaggggtgcaatttgattcattatggaggccaggaatcaaatggcaagacaatgcaataataggtaagcacagacagggtgtttaagttgacctgatgaagccctaattcaatgttactatctcatcagcggaccagtcgttaggcgaaccagtgacgaacatgtactttggagcggacagaagtgaggaagggtttgggacaggaagaggatgggattgttggtgcttatacggataggaggtggtggtggtctaagcatgagggtgggattgagatcaggaccagaggagtgagagctggagctctccatgaagcagagcatgtgatggtgggatcggtggtagtggtggtgagccttccccgttggtcctgaagccggtaaaagggcatggccatgctagagccgacgacaaccatgtcctcaaacatttatctccctcgcttgacaatagaacaagggggcgagaaagaaggagaattgggagggagggaggaaatccctatcaggaaaccccaatttccaagcactcgaacctaaattagctcttgcaagggatggtatgggtttgaggccacgaaggctacgaaagaaatgggcaagtggtggcggcgatggcggtctgtacccatcccttccgggctttggctctagggatatggtcatggtcgtgtgtgtttgtaggtggatcaggcgaggatggttggaatggatgtccctgactcgtgagtgaaagaggtgaggagggaaagcacaagcatcgagagggagagggaaacaattgcatatttcgcactccaaacatctcttatttgattcaaatgtcatttgacacattctctttattcttattttttctttgtatttggatcctaaatagatgaaaatgtctcttacattttgacaaatcaactggcgtctgaggtcgtaggtataccccttgacactatatagtgtgtgcaggtgcatcagtctctatagccacacctaggccaacaagtgtatatgcaagcattataaagtatgtatagctacaccactaaccaattgcaacatacttaatggcatggattattgtagtggccactatagcacaacatgctcactgatattgcatgattaaggcatgtatcatatatggaccaacaactatgataagatagaggtagttgagcctctatagcctataggatggggaccaccatccttctagagatgtaattctctccttgtgctataaaagggatggaaggagcgaagtagaatggggcttcagcttattcccttgggccttttctggcctcttagcctttcatactcccatgctcataatcatcagagcttgaaagcatattccacacttacatctaaatatccaacatatagacttgaggatgtagggtattatgcttacgagacccgaacctctgtaaatc

SEQ ID NO: 63630 - DNA, 483 bp, Zea Mays
tctctatccagggacaatctggggcggcatccaacaaccctcatgggtcgcccagcccatcgctgcactagtccagctgtccacctcatgcgtccgcacaattgtggggtacgtttatgcatgtgtaaacatgtgttatgttttgcgtaaacagaaggtgcgcatgtggtagggtcgatttgggatggacgaaggtgggccagcatcatgttcgttggtcgggtagttggttcctcctcgtgtttatgctagtatatttaatggttcagacttgcataacaggagagcggcaatgaacctttcgttggtttgtttaggtgggtccacacacgaccgtgattagcgcgcccacgatgctgaaagttaccgtatatatcggaacagaacatatgtatccgatcgtgtgtgggagatcaagcggatttcagcataaaatgtgaaccaaaacagcgtaaatgggtacggattttactataaatcatc

SEQ ID NO: 63631 - DNA, 694 bp, Zea Mays
cagcaactgaaaattagaggagacaaccatatgaacagtgatatctttgtcataagccacctcaaacaaattagggaacttgtcagccagcgtcacattgccacaccaaatatttttccaaaaactggaactcttaccatcaccaatctttattttgcagtatttataatatttgtctcgaaccgagagaatacctttccagaaatgagaatctgaaggtctttccttcaccgaaataataggtttattcttaatgtatttgctttttataatggattgccacaaaccactagtattttctagtctccaaatccatttagccaacaaagcttcattcattttttgcaaatccaaaacaccaagaccgcccatatttttaggggagcagactaaattccaagcagccaaatgatattttttctgatcatgacctccctgccataataatcttttcctgaagatatccattttttttaacacagctttggggcatttatacagagaaagcatatacaggggaacgttggtgagactgctgttaagcaagactaaccgacctcccaaactaaggaaccgaccttgccaggaacccaatttgttctcaatccttccaactatgggatcccacaaagatttgcacaattttttgttatcaataggaacccctaagtatttcataggaagaccactggga

SEQ ID NO: 63632 - DNA, 444 bp, Zea Mays
aaggaatcaaaggatacatggtcacgttgcccgtcgcgcgcacctcatcctggctgctggcaaatcgtcgaattatcactagttcactacacactagtacaccgattgggatggatattagccatactgacacctgtgcttcgcatctaatctaacggtagctagcgcgagtgctgcagagcttcgtcgatttctccctcaccgacaggttctcgccggtgaactgtgttgcgcactagagacctacccgtacaagtacaggtcgtccctgtccacgtcgagatttcggaacggggtaacatgcctgcgcaaagacctacagatatttccggaccgtgaattgctcgtaaagtcgatgcatctccaacggcgctaacacaccacatagatctttcttcatcaagtatatacacgaactcctcaagcatctcccgtactcacaac

SEQ ID NO: 63633 - DNA, 563 bp, Zea Mays
ggatttttttgcgtgtatattacatggctccgcctcattaaaaacctcacctcccgggaggaaaagagtgcgggccggaataaaactgtttggggaattacaagggcgagttggccttgaggagtcaaacaaaaaatttgcgaagattgtctatgttccaggaatgttccaggtcttcgccagattgtgttgttaatctatacgcgctgggagacgacttcgtcttgacgataaatggtccttcccacttcggttccagcttaccccgtgactctgtccgagttgtgcggacaagtacgaggtccccttcgttgaattctcttgggacgactgcgtggtcgtgccaggccttcgtttgggcttgatatttgtcgagggcctgcagggcgaagacacggtctccgttaatgaggtctttggaagttggctcgtctacgtcgggtattgctgaaacgcttgtccgcggggacccatgtttgatttccggcggggtcatggcctccgatccgtatagcaggcgaaatggagtgaatccggtcgcccgacactcggtcgtgttcagt

SEQ ID NO: 63634 - DNA, 609 bp, Zea Mays
agtagacacgtacatcaagctagagactacacgactgaactacatactgtttaaccaatcaagaatgagggctgatctttatcaaggcctgatggatagcgtgtatgctggggagcatcgagcaagtgcattgggtaaattgtgggttctaccggcttccttcatcggtggaccgagagacatgagacgacgatacatggatgcctttgctctcatgcaaaagtacggtaagccggacatatttcttaccatgacatgtaatccaaattgggaggagataatcagcaagctagaaccaggtcaaaaatcacaagaccgttttgatcttgtggtgcgagtttttaagctaaactagacaatatgaagcatcaactcttcaaaaagcacatacttggtgtcgtggcagcacatgcctatgtgattgagttccaaaaaagaggtctaccacatgcacacttccttcttatcatgtagacaggcaataagctaactgttccagaccagtatgacgctgttatatcggcagaacttccagataagaacagattcctagaactttttgatatggtagtcaaacacatgatgcatggcccatgcggacatctcaac

SEQ ID NO: 63635 - DNA, 386 bp, Zea Mays
cacaagacagagcctcagcggtaagcgctaaatcctcaactaaacagtgcaatggaaatgttagtttgtagccccgacgcatgcccaaaatactcgaggacatcggggctagttggtctgagaaaaatcatagcatcgatcgcatagaaagagatctgacatctaatttgctggagaacaagtggctaaataaggccttggtctatagtaagtagaaccatggagttgaggacattaatcaccagaataaacaacattggagagaggggatcaccctaaaaaggtcgtggcggtgaaaattgttttcccatgcctgctcattgaacataatctaagtagagaatgtggataagacattggagtaaacacatcagattacgccactg

SEQ ID NO: 63636 - DNA, 1109 bp, Zea Mays
atttgcggcgtcacatcaaatatcggcacggaagattccgtatgtggtgttgctttaggagtgacgtttgtgttggtcggcatgttcttgccaccgtcaccatgtttaccctgaaaaaattgtaatagttatatgctatttaaagaaaacgatgaatacaacccttcaatgaaaaatacaagtaataagaaaaacattaccattgtggttgtaggtgttttgttctgtttcgttatatttgtatgaagcagtggatcaatatcagcttcatcggggcaactttctaatagtacacgaatatgctgttgccttaacagtaattcatgtacctgtgtgtctgtcaactgcgtatcctgctgggatgctggagtagacatatcgggtatagtttggggggccggacacgtacatccttctttacgtatcatgtaaaaaacattgtttaaaataatggcatcaaaacgatatcgacaaatgattgcataacttttttatattgacgtaaagaccataaaactgactaacctgccgtctagggaagaatatcatctgattttgtagttgttttctgcacatcataaccatcttcgttgtcccccgactccgcacggaggacctcatcaattaactcgccaaaaacatcagatagattgtattgtttctcaacaatctgctgaagagtctgtttaataactgaacacgccttaccaacctccgtatcataatgtgacaacttctctatgaaacccaggcggtggcgggatggaagctgattcagcttgcttgatatcaaatccctgatgagcgggagttcgatgtgaattgtgtgctgtccagatgggtcaggacgaggtacatcaaaagtgtttgttctggtcttatgctgttgtaaattgaaaattattaagtaaatatatagtgtataactgaatattatgttgaaattctatgacaaaaaatatataaatagaatcttgccttaaattgtgcttcaacaggtggtacaactgtgtagcaggtctctgtggtgcttcggaactaaaaaaaggcgtgaaagatggagtaaaacttatacacacatatatagtggagtttgatttgtaaatata

SEQ ID NO: 63637 - DNA, 1418 bp, Zea Mays
ccccgaccgtttccccaaagcgaattgcacgggtggcgacccacaccgccctgcccacgggaacagcggaggcatcggataaaactgcgtgttcccagagattggtggcggtataattcaattgggtgggtcggtgagcttaaggaggatccaagaatgctagaacaagcagcaaagggacttgagctcacctaaaccgagctggccacggtgaggtcttctttgcggtggcagaaagttgatttgggggaaaacaacgattctccggctaggggggctaatcgagggggagagtgggtgctatggcttcgtggtaacttggcgcaacagccccggccatcaatttataggaaggtaaagcggtggccagtgattttggggaggacgcgcggcggccggaaatgaagaagaaggctctggcgcatgacacaggtggccattcaccgtggcaggtgctccggtggtcaccggacatgcaccacatgattcaccgtgacgagagccagcgctaaggcacgtggggcgcaacggtgacaacacgacggcggcgaggatatccaaccgacgatgagctgggggatgaagtacggcatgcttagccgcaaccgagctcgagtggatcagacgccaagatctttactggactgtgcttatccatggccacggcgcacgaatcacggcaagcacgatcaacggcgacggtccaccggtgacgagcaggggggtggaatcgggatcttattcagtttaacattcactgtaccatggcaattgcaggcagccggtctgacagagcactttggagcccgattttctcttaatttcaaatggcaacataagtcaagctctgcaacaaaccggtagagcattataccatctacaatgttgccatatgattctgccacaaaaacccattggagcatgcttaaatttaggcttaaagttgatgtcagttcactgctagtctgaaaattcagaccttagcagcctgacagcctgattttgagcatgattatcttcaatttgttcctaacaactatgctcacaaccttaagcaaagttgttctcctttgtttgctctataactttgttatagcaatccaaggtagattcccactgaatcttagtctaaatggctctcaatcttggatcaaaatcactgtccatctgaagttcagtctatatcagcctgacagtccaactttgggcaagattatcttcaaatttctcacaagaacatggcttgcactcttaagcaaacttgttatccattaataggtctacaagtttcatgtggtaccctagggcaaaaaccctatattttaaaagttgcaaggctccaaagttgagctcatcaatctgaaattcagacttagcatgaaatcaccactaggggcctttttgcaaatgaattcaaa

SEQ ID NO: 63638 - DNA, 1098 bp, Zea Mays
cagacaccaaattgaacccttaacaaacatttcccctcgcttaattgctggattggagctctacatcaccctgtccacggtgacagcggacacaagggacagcaagaagcgttcccggcgatctaaggggtcctaccttaatcggctgggtcgagaagcatcagggacacacaaggatactgaaacaaaagagcagggggcatgagcggacctggagcacgctgaccacggtgagatcactttgcgcggtgctcgggatcgatttgggggaattctgaaattggcgagctctggtgagcaattggaggcacgatttggtggcttgggtgcttgactaccttacggacccgacgacacgctcaatttataggctccgggggcggtggcgcgtgaattggagttggcgcggtggcggccgaagagaaggagatgtactgtcgcgagagcttggtggctttcatcatggcggactcaccggcgacgagccagtgatatagagcggcttacggtgactcactgtgacgtggtaaggctttgaggcacgcagccgggccggataacggcaaactccggtgatgccagcgcgatcaactgcggcaggacacgacggtcggtgagaacagtggctggaggttatctacggcgtgatatttcataccccttcttcgttatccaccagcgccggacacgaatcaccgcgacggcacgaattcaggcgcacagctcgttggcggcgaggggatctgaacccaggatctttttcagttactgtactatgagcacttgttcagagcgcctgacagaccaaattacaacgccaagatctcagatttttgtgcaagaacttgccaatccatccatagcaaacttgtagccctatgatccagctacaattcgactatggcaactatccttaatcgagcaacatatcttactcaaaatcaagccctaagttcatccaacttcattgtcactgaaagttcagatccaaggctgactgacagcacaactttgggctcatttttctccaaatttttatgtaaacaaagtttagttacttaagcaaagttgttctcctattatagctctataaccttg

SEQ ID NO: 63639 - DNA, 656 bp, Zea Mays
gtgctcatggtcggatgaatggggatcggtcgggctgggacttcaacgccaaattgaagtccgctgtgggccaaatgtctgtgcacgccatctttggatttcttgttgatagtaggggagcgccgctgtttcttccctaacccatggacagaccttcatcgccttatcgccggtaagtagcccttgtccatgtttgttgtcatcgccccgtcgtgtacccctggtcagatcggagtttcgggctgtggatcacggaaggatgtgttctcggccatggcttctccgtaacagagctggccgccaccgtagttgcttcggtcgggcgattgtaggagatgaggatgaggggatagaatggccgtctggtgtataatcggcggataagatcaaatcccgcattcctattcgctacggggaatttcagccgttgatcttgcaacctacggtggatattagacggaggcatacccattcgttccttagatccgcgttgttgatttggttggttgcggctcggattagatcgcgggcttattaaaatccggggcattggatcgagattgagcggttctgcgaggtctgcgggattcataatgcactagatctaatccgaatcatcgggcgttgatccaacggcttagatggcctcgtacccc

SEQ ID NO: 63640 - DNA, 360 bp, Zea Mays
aaaatttggaacagggatgaaatcgacatgtcgcttgtccatgtgcctttttgatgtccacgcttcctccctttgtcatcccataatagcgtgcttcatgcgatagcctaatcgagatgccgctgaactgcttgcaggaatagcagtaggagttgagttgggtatacagtaggtagactgggctttttcctccggtgtatgtactccctggctacctggggttcaaaacaatcaatgcagacgaaaaaagaacatacgtcccgtcgtcccgtcttgcttttcgatgcctgctgtttgctggcctttttttttctcttccaccggggctggctctagtctagtggtcccgcgttgtttgtt

SEQ ID NO: 63641 - DNA, 336 bp, Zea Mays
gccctaccgaggcaaattgtgttatgcgttgctgaggtttactaacatgattttatcaagaaattctatatgtgaccacattttgcagatttgttctctgttaacttgcaagaacactgagatgagagttgttatttttgtatcacctgatgttcactaggcattggtacatgtgactttaatttggtgggcatatatgcaaagaaattaaatgaaataaacaaatgagagaagttctgagtagatagctacaaccagcatgacgttcagtatggttgcttttatcaccttggtgatgtctttgatagtgtataactttttctagttaattttctc

SEQ ID NO: 63642 - DNA, 466 bp, Zea Mays
gcaagaggtagaagatgattggctgcctgagtgagcactcggcgatagccctccacgtcaggggttcgcgggaggccattggctatctatgctaggactcctccaacctttcttggtgtgtttagcacccaagcgaagtcagggtataggttccgggtgaggagcaggttttcccgctggagcctagcgtcttgttctgcttgctcccgctcgtgctcctgaacttggagacgatcgcggcggcgggagttgcgcagttctcggtgcgtcctttcgttaggggtttcccccatttccgaagcttcatcccaagagacatgctaagattccattctcccctagatgaagaggatgtctgagaagaaaggcgtgggtgtagcagtgcgttccttcccgctctcccttgagggcatagcaattggggtggcagtccgcagcgcttccctgtcctagttcggagtgtttg

SEQ ID NO: 63643 - DNA, 578 bp, Zea Mays
cagatgggaacaggtactacgctaacgattctgttctaattaggcccaactgaccaacttatgctctctaactttctttatttataagaacaagcgagtagtctagtggtaacactgatctgaagcaaggcgtatgtctctggttcgaagctccgcaggcgcaattttttttgccaaataaacacatgccacttctagttggtgggccggggccgtgtcgccaggcgggggctgtgtcccactttaccaaaaaactacgacccatgtaggccaaggatcccacgccgtcaagtggtgtgtacacgtggggcgttttttactaaaactcatctatgaccaatttatttcatcattacgtcagccgaacaaggcaaattagcgatgacaatatcaaatctaatctgtgaagaaattgttgcgtccaaaatttgtgtctatgacgttcctttcattttcgtcattaatattcaagtctaatcttcgtcacttgtaattgttgacgaagatgtaaatttggtcatagaaatgtatcaatctgtgactgaagtcaccagcgtcacaagaaaatcatcactgat

SEQ ID NO: 63644 - DNA, 590 bp, Zea Mays
cgccgccgttgagattcgcactcactggtaaccggataacatcacggggagagggaatcttcgccgccggtgagctggactccactccggtgaccccccatgctttccctctaccctgcggcttgagccgataagcccgccggtgaaccgccgttctccggccttgcgccacgtgtcccaacctcgccaccgcatcgccgtgactccctctagcttcccgtcgaccaccagaattactgccacgacactaaacacgtattcaccgcaccagcgttcttcctcacctccgaccgccgcgcgttagcacccaaattctcggtcaccgctcgctcttcctataaaattgagccctccaccagttccacaaggtcatccactacccagccaccaagaattgctagcaatcgatcaccagtgtgcccgaatttcttgtttccccaaatcaagcttccgccaccgttgaaccaagctcgccgtggccagccctccacaggtctgctcataccctccctgttcctgttctagcatctttgcttgctggtgatgcctctcgacctatttaatcgaactagaccgccagggatcaccgg

SEQ ID NO: 63645 - DNA, 613 bp, Zea Mays
gaaatatcttattgcgatttgttggccattgaagagttatttcagttcattttacttttgacgtgagtgaatttggtgtgtaacggtctcccaaagcagcaacctgtgacacataagattttcctaagagagtcaggtttgtcttgcaaactgacaagtgtaacgagttagctggacttctccatttcatcacgcatttggaaccacatttcttggtcttgcctttcacgacaattttgtgcacaaggaaggtggagagctttccgcttttcctgtatgtactaaatttgtgctgcttcatgcaaatagtcatttagcgttattccaccccgcagaagttgccttttctaaaatagtcttacattcgccgcatgtaacaaaatactagtgatttctagtcatagaatcaccattggcatgtgaatggatccagtctatgggatatactggttccattgggttggagtcgctaaccatgtctcatctggttttgttgcgaagagctaggatgctataccttcttaagtcctagtaaaagatatactgaatccgaaacatctcgataatagctcagagaatagttgacattgagtaatattgaggcaagtctggt

SEQ ID NO: 63646 - DNA, 518 bp, Zea Mays
ggatgtttaacctgttaattgaggtatgaacgtcgttcacgtgttcacgtttccattcaataggtatagttgtagcgaattagaatttgcgtcaccgtggtgcgtagaatcactcaccagcgatggatgcacctcgcggagctacaccaccgtgattcggtatcggggttggggaaggtgttgcgatgccgttgatccggcaacatgcggctaggaatgaatgtagcataccggttcagagaattaaatccgggccattgattctctcatgggcagatccggaccagtcttagggggattgatgtccgctgctgttgatcggcgaacgtgcgggtgaggctgcctaccgtttcgattgaagttatgtctaatctgtgccgctggtgggtgatcggatggttacgattagaggacaccttgggtcgtggcaactttacttatgaaaccctgaagaaaatggaaatcaacccgccatcctgtgtgactgtgcactgagtcttggatttcatgcgcagaag

SEQ ID NO: 63647 - DNA, 817 bp, Zea Mays
ctttgtttgttaatgaattgcaacaactttattttaatttatcctctttgtgaagctccatttacttaaataataaaatttttctaaaagcttatttataatatatattatttaataaaatattgttattagatttattatactttttggaatatttaaaatatagttatttatgaataatctaatgttttaaaaaatcaattttcgaaaataaaaaaaacaaaaacaacatgcgtgatcaccatcctagccgatcggtccagttaccaccgtcacatacacattcccctccctcccctcctttctacctttcactagtgggccccaccattccaattctcaagctttgaaaaccagccatctcacttacgtacgtgacctcctctctctattccttacatgtgggtcccatccagcccattcaccttctctccaatttctctggtacgctcaattgccaggttatgccgccatcatttgaagcccgacacaaatactatgccgcctgttgtctccgtctgcatgtctgtgttcgaccgtttcttctcccgcgcgaccgctcgtatgtctccattaagctctcgcctattactccatgaacgtttctccattatacgcgcctgcctaacactccacggacgtttctccattgatggccttcaagtaccttaaagccagctgtgtttcccgcctcccttgcttgcctataagaaccgcgcccacaacagcgtttctcgtctcgctatctttcccagctcgccgctcgccctctatctccctgctcgtgcaaggccaggccgctggccctctattctcc

SEQ ID NO: 63648 - DNA, 533 bp, Zea Mays
ttttgcacgttcggtagttttgtctctgttggaggactcaaaatttctggcattttcattatttcttcaatcttcggctcttcagccctatcgatcttcctctcaactcactcgactataagcaccttcggcactacagtcggctcttcagtgctctgtgcaatcgggacaatttcttttgcttcggcagctgaagaggtccctttgccaaattcaggtatcagggccggttcaatataacgcgggaggtgagtcagaactttcatcttcttgcccttcggcttagctgtgatgaccggagcgacaatctttctcttttttccttgccctcgcagtgggtagcgataatcagggtatacgaagccaattgcatcaaataccctgttcaatcttttcttcttccgacccccaaaagttgtggacaatgcattatccttggccttggagtatgccccaagtagctcgtcgctagtagcttcaatacacttcagccagtcatcgttcggctcatcaaacttctccccaaatctgaa

SEQ ID NO: 63649 - DNA, 697 bp, Zea Mays
agaagagacagatggagaatgagaaactggtgcagtatctgcagtcgaagatggatttatcgatgaaatcgctggcgcaagttgcccaagatcaaagtagactagctagcacggtttctaatgcagtcagtgggatgacagagtctgctcgcaccgcaacaggcgacggactgatgggtcctggtcctcccccaattccattaaggaatgctcaggtattgaagaacactcctcctattacttccatgcatatgggaaatgggaacaatcactcggacatggacaccagggtcggtcctgagatggaggctcaggggaggaaaagttggctacccaagttggagtttccgttctttgatggggaggatgtcagggtttggatggataattgtgaatcctattttgagatgtatcagattcctgcaggactgaaagtttgtgcggcatctatgcatcttaaagggaaggcggccttgtggtttcaggcttcacgcgattacctatatgtgctaagttgggatcagtttaagggagctgtcatgaatgagtttgaggccaactcgcattccgacaggatgttggaattgctgactctcagacagagtggatctgttatagagtataagaatcagttcgacaaactggcatatcacatcaaactgtttgacagggccactagtgaaaccttcttggtaac

SEQ ID NO: 63650 - DNA, 640 bp, Zea Mays
aaaaaattgttttccataatttactaaaagcatattgagatacattagtcctttcgtaagtaaaaactagaaaaagtccactttccatggaactgtatttgcctggatacattagtcccacgctgtcacataataattgttcattatcagttgcatggtggtgggacaacattgataatggaactatagaacttcaaaggcttgcagtccgagtcctcagccaatgttgcaggcgcgaaaggatcaaagatccccatatattccacgaagataagcaggctttggtacaaaggctggagccatattatctacatatatcatttcccatcctgactcgctacttacagttcaatactgtcatgcaggaacctgcgtaagcttaaggatgccaactgagactgagaccctatcagcctagacaacatcgatgctctggaggaaatgggtcagtgaagtgcctagccctcctgtgcagagacgacctgaactgggagagcttggacgcaccgtttgccgaaccagctcctccggacaactggacaaggacgaagaggtcgtcgccatcgatgacttcaagcaagccctagtggcgtcactgtcgtggtcagcagcggatggtctgtactgtccacaaccagat

SEQ ID NO: 63651 - DNA, 522 bp, Zea Mays
aaaggcaagatcggcagcaccaacccattggggaggttgaagacaaagagcacgagctctccgacggcaagttcgtcgaggaggagggcgcccgggcaaatccttccgccaaacaccgacgcatcccatccaagtaggtggcacaccatgtcgagcacccactcagtctgggcacgctcgggatgagcttacaaggccatggcaaactacgacaatgcaaagtagagaccttgaaggcaaatgggcgcagagagctcggaggcgaaagggcacagcgagtgggagagaagcaacgcatggctgctactcgagggatgaacccctttttaaaggcagactcccccgctcgcgccccgaaacgccacgagaagtctcccccgatgcacaccggagtacccatcctatgacacgggggcccggccccacaagtcatatagctggcgcgctgatctccgagtgcgaagaaggcgaaccgccacgcaaggagcgtactgttgacccgtggtggcgtgcctcttcatc

SEQ ID NO: 63652 - DNA, 680 bp, Zea Mays
cacaaaccttggatttctcttcttgaggagtatttcgaatagagaaaattcttggaatattcgacgagcggaaccggcacctgaaccatcttcagcctcagcgcctctgccaggcgggcgcgctgagccctcatgccgcgccggactgctggtgccgaggtggtggtgtcttgggggagggggatgaagttccgctcggagccgcggcggatccgagccggcagcatgatggcgggttcggggagattggggctcggtggcctaagcagcacgacgacatttgagggagggaggggagcggcgaggagggggaggagattgggtttggggctcctcgcggtggcccaggcactatggcatcttgaagcatcgtgccctatcgtgggagttggatggagacttcgcgtggtgcgtggatgagggagacatgtaccattagcgaacaatcttatggtcagtattttagaagggacatgtaccatctcaggaggcagctttaatttgctcccacgattaatataccgtaggattacaagcttttactagactctacataaagatggtatagaaacatggaaaggcagaaacataggaaacactagtaaaattttctttcgaattactagaaccaataaaaatactcccccaatctcaatttataggtcgtttggcttttttca

SEQ ID NO: 63653 - DNA, 563 bp, Zea Mays
aagctgaaataattcgggtggttccgccacagttcagtcccccgcgccgccagagatccgcgctcccggattcgcaccggtcgccgtgattcgtgcctcgcacgtagtggatatccacggggaggtaaaagatctcgcgggggagcagatgtggtcgcaggggaggcttatcaccgcgcctatagctgttgcaacatgaccggaccgccgggttgccgtggaaactccgttgacctcggttgtgccatgccatggcttgttactatgcggtagtaaccgtggcacacttaagagtacaacctttgagccattacgccggtgaacgccacgaatcctttgcgccagtattcttccccctctccggtcgccgcacgtcttctccaaattagccaccaccgctcatgaatcctataaattgagcgtgccattagctccctaggtagttgtgcatccagtgaaccagctctcacctccaatcatcccctacagctccccaatttgagacttcccccaaatcggtccagaacatcgtactgtgtgagctcgccgtggccagcgcgcta

SEQ ID NO: 63654 - DNA, 301 bp, Zea Mays
gtccactgtccgaccatggtgttgccgcggcgcgccgtgggcggtactctgggcttgttatgagcaggaactggtggggggaacaggctcgtaatgtcactaattaggcaaggagcgaacgaattagaagatggctggctgggtgattggattctcagctccggcgggcttgccgccgcacggtgggttgcgccgccgtgcccaaagtcggctggttggggaagatggtggccgagatcatgcaaaccgttggatgcaaaaggtgcggccctgattagaaatagaataccgattcgggtgg

SEQ ID NO: 63655 - DNA, 782 bp, Zea Mays
cgagcccctcgggctgtggtgcactcataacttacgaacctcttggactgtggcgcatttatggctcgccctcctgcggcgcactcatgacctatctggactagacctgaatgcgcagactgtaggacacaacaagacaagtcgcatcgagcctcaggctacgaaggctaggggttggcgtagttcgaataatggcgctcgggccctacgctgccaacaccgtccgctataaagaatacaagacaaccaggcgaccccggggctcatggacgcacgtggcttcaccggggcacaacgctcggttttaccatcgcccagtgactccttgaggaagccaccgccactcgaccccctcattggtctataaaagaggaggtcagtcatagggagaatagagacacatagaaggggggaacagacgcccagacggacaccgagacacagacgacgtaccgacgggtgaaagtaggacgcaccgacgaggacctagaggccgaagcctcgctgccaagccaagacttaatttgggctccactctttagcccttagctccgcctcctccaccataagagacttgggagcctctcccctctctctctcgcccgcttgtaacccctaccacgagcattgatcaacaattgtgccggtagtgcaagccaccgaagattggatatagggacattctgctcgaactagtataaatcttgtacccaccgcgcacactgtccagagcctagaacacacacaaatttacatgtcggagctaggttgtgtgaagatcg

SEQ ID NO: 63656 - DNA, 748 bp, Zea Mays
cttcctctcatcgagcctattccagatctcgggagatcaccgaactgcttctcctcgcaaacaacatgtcgctcacatctgctatccctgtctaccctccgtctacccctacctccccttgtgtctacctttgtctatactcgtcaacctcaccttttctcaccttgccgtgcaacgtctcatacgatgtgcacgcaaccgccttccccctcgctcgttcttctcgcggtcatctgaggcccaagtgtcagctttatcttctctaaaagttgtctatttctcgtggacgcgtctgacttggacaaagcctcaacaacctctcctcgtcctgcctcccatcatgagccgtggcgaaatcgtgcaactaactttcgcgccctcttctttctatatatatacacacaccttatcatcgtgaaccacctctcttttcatcctcgcgcgacaactcctcacgcccggttcagctcggtcgtgtgccatgtcgcgtgcaccaaatcacctaaaaatgtgcctgacttgagtcccgcccgtcagtagcacaagcatacccccttgctcaaccgtttcactgatctatcggccccacatgtcgtaatcatcctttccaaaaccgcctctcctcttgaccccgcacctttgtgtcgtgcgtgcgcataaaatggaactagcatccgtgtgtgcatgtgcataagtgtcggcggcctcctctgtccctccccacgcagcagctagagcccaccgtcgc

SEQ ID NO: 63657 - DNA, 398 bp, Zea Mays
attgaaatggctaagtgtgtgtgtgggtgagaagggtccgcctctaaagcggttgcctgcttcctttatacaataagggagagagagttacaagatgcatggggtcatcctagcagtctgactccatttattatattgtaatgtataagtctttccatgaccctgtagcaacgtctcctagacatcacggatagtcaaggtcacttgtctgtcatggatggtcatggtcatcgccagtcgaggtgcacgtcgaccgtgcgtgcacccacagtggcgcaccgatgccatatccaagatgtcgaggtttgacaattagcatgacacatgctttgggcatggtcatgcctatcctgtcgcacagaagtaaaaattctttgaccgcaccaactccttgtcta

SEQ ID NO: 63658 - DNA, 484 bp, Zea Mays
aagctagatttcacagttgaaggcaatcgccaaagggatgagaggaaggcagcgaggtgaggaagagggcgacccccaattaggtcattgggaaaccctagttttccagactgcactaccgcacgggggagagaggaagaatgcagagaaggggaggggatacctggggagcgcaaatgtattgacgctcggactgggccgcaaccctccgacacgccgcgctgtttcctgatcggagtcacaactccagaagtccatccacgccataaaccatcgcggggagcggcccaatcctgtagcaccttcctgggcttggagcttttcgattttagggatgggggggaaagtttcccgccaatggcgattttggcgtggggagtttgaggaggggggcgaccaggagagcgaaggagagagagacgagccatccgtcactttgattcatcaacccagtctttctgatggttcttgaaggaccggcccg

SEQ ID NO: 63659 - DNA, 600 bp, Zea Mays
cagatatgtgtccattcaggaccgacctttaccatttagcttacagtgtataccaaacttgtcaaaggactatcctgagtcaattcagtgactataagtatttacaattccgagagatgtatacgacacaagcatagaggtactagacagaacgagtaaagtggttcgacgggaacacacaatggtttttcacaccaacatagtgaaaaatttctcagaataacctctcggtatactcgcaactccgtgttgctggcgattacatgtccttttatcttatagttttcttcatgtcatttagcgacaaagagagcaatgtgctaacatctggttgagcaatgtacggctgagatttctagcatgtattcatttggtaaggtcttttgcttactaatagaatcccaatgtgtgatatctcctatgccaaaaaggctttcatgcattatatatcttcgggttacttcgggtaaaacttttatgcatgaggagagagcaaagaattaacttatctgtgttttatttttttcaatttaatttcctagatttccaagcactataaagcttgatatagttgttatggccacttggcgatatataaat

SEQ ID NO: 63660 - DNA, 710 bp, Zea Mays
ctttgaccggagggaagatgagattgaatgaatggttttccctgactatacttgctttggttttagcagcatacaggagtatctcttgttaattatgctatttgtttcgttaacctctgtctctctagaattaatcctcttcatgtaattaaataaattattatgcgggatccaactgcaactgctgcatcatcctggtccttcagaggagggaacgggacggggtgggcatgactggggtttgcattgggatcacgctctcgtcccgttccatcagattagccgaaagcgtctatctgcatcctccgcccgcgcgcgggccgcagctaagctaccacaagtacgtactgctgtacgctagtatatagctgtgcaggacaaaagcggtatggatggggatgcgacgataaaggagacgacagttgacggccgtcgtcgcgcggcgccgcgaaatgattaggactgggcaatcagttttctcggtttattcggttcggttttctcggtatataggcccacgatgctgcacgccatggccaggcccacgcctttaaactcttccaaacattaaaaaaaaaactttcatgaacattggttgtttcatacagcttttgagcctcatgccctcatgttacctagtgctatctagtgtatagtgtatagtgtataccacacccaacttattagacttatatatattaagctataag

SEQ ID NO: 63661 - DNA, 485 bp, Zea Mays
gcggcatcatttgatacgctatttctgctatttgcgttattttctcaaacttctagctcttgctcactagcttttgtctggttttcgagcttttcgagctttggtttaagacgtttgcccaatgtctgaggagaagaagatggctgaggagaagataactaaagagaagaagttgtacgaagaaaagaaagttgcggatcctttcattgctggattttatgaatctatggtgaagacgaacacagagaaaattactaaggagatcatggagggtttgtccgaagattctgatgacagtgatagtttttacatggaaagtggggatgaagattttgaggatcggccgtggcacctaagccatactatcttcggaaaatcgactatcaagcaaagtcatattgacgccatgaggggagatattttcatgacatgtctattgtcagacttggaggagacaatactgcccctgctctggaggaaaacga

SEQ ID NO: 63662 - DNA, 370 bp, Zea Mays
cgtggactcactctgaatggtgagccgtcggtactcggacgatgggtttgagacagtgggttatactggttcaagcttgcgtcctagtccagtgtagtgctgatcgtagtattgctggggacgtgttacaattggtgtgctcgtgtctgaagaaagaggggccccccttttatagctcaatggtcgaactttacaatggagacttgaattctactggaaggagctcgacctattacccttgggtgcgtggttcttcttacgttgtctatagggtcatgcgtagttgtactcccatcatgtgtgctatcacgtccgctcgtcatacgagtccctgtagcgagtctcccgctgacatcctcgtagtagtgca

SEQ ID NO: 63663 - DNA, 454 bp, Zea Mays
atccaacgtgaacaatgtgtccactttgatattatttttttgtggaagggaacaccatagatgcgcgctactggacccacatgtatcacctaaccgttgcgctgctggtaggatctgaccgctaccctaacacattacaagcttcagtttacaatctttaattcagcttacaagcttcaatttagattcaggttacaatctctaatgtacaatcttcggtttacaagcttcactttacaatctttaaaatagtcattatgcacaacaccatttttttcacatactaatcctacagtacaaaggtgcttccctgaatctttgcaataaattgtccatacttcaaaatttagatgtacgaatattacttgccatgtgctatctcaaattagaggtcgatagcatttttgcaggccatttcagtatgacaggatacacattgatgtgaggggatcac

SEQ ID NO: 63664 - DNA, 541 bp, Zea Mays
tagctatccctcgcgaaagcagggaaagaaaagaaaagctgctactttggccatctctgctgtgccgaagggaaaaaagatcaaggttttaacgcaccggccaagatacattgaaacagccacattgccgaagcttggtgaagggacatcttcaactgctgaggcagaaccgtctgcacctaccagtcccagggaagaattggatgaattgtcgaaggtgccttcaaccgggtcagtcgaaacaccaaaagatggtgctgaagccaaaggaaaggcagccaaggaactagagctagaggaatcggtagggctgccaaaaattttgagcccaccaacggagccagaattgccgaaggtatcaaaggctcctgcagtaactcccaagaggagaaggatggctagcgtgctggacgctgttatggagtcaacaagggcattaactcttgcccctgcaaagaaggttgccgaagttgttacggctcgcgctgaagccgaagctgagccctcaatgcccactgaggcagtgcctgctagaactgag

SEQ ID NO: 63665 - DNA, 1584 bp, Zea Mays
tcagatgtagcttgaagagtttgttcgtctgaagcaaggcagtgactctgtaatgcagtaccttgccaagttcaaccacctatctcaatctgccatagaacaagtcaacatgaacttaaataagaaaattgcttcatgaggtgtttgagcgataggctgtagcgaaagctggctacctgtttggatcttaccttcgatagggtcgtaagcatggcgatatcggtggaggcaaataattcaggacaagggaagacaaaaaggtttggacgtgaaggaggtgagggatcctcttagggattcgagaagcgatcaaggctagtgatctgttccttcaacccgaatcgtgcttttcctcgcccaccctcctacccttttcagtagtcggtttttattcgtccaactgctgccccctactcaaaccactcagccacatagcaacgcctctagaacagcttcttcaaggcagtactccacaacggatattgctagaatctggactctcaccattttcgctggggcggtaagactcgaagtatcacttcgagccttgagtcgctgctcatgatgaaccagcaggagttcctcttcctcttcctcgtcctcatcctcctctgcctccataatataccgaggaaatcttgccataccaccaccacccacctcatcaactagatcgtcatccacaacctcaccaacaacaactagctcggcttgagcgaacactgtttacatatctgatgtacaccagagtttttttcttttaagtctctgagacatcaacctgggcatccggtcgggcaggccgcttgtgccatggaatcgcaaggccaccagctttcttcctagaggcaccctattgcccgaaggccgcaacccccgactcaaggtcctctgactcagacgactctctagcaagcatgcctagaacagctccaatctcagagtcatcagctaggagttttatggaaatgtgggtctgcttgtgctcctcaagaagaccccggtgaatagcgattacgacctatatttcagcagcaaatggccgagctctatggctagcaccctcgcatactccaccaatgggagggttggacacaaactcagaaaaaatattgtacgataagaaaatggtactaatagcataaatcacaagctttactcgacagaagacaagtaaaaactaggtaagcaaaacacacaaccggaggcaggtccacatagagtaagatcggggagcaccatcgttgacaatggcacccctcagcatcagttcaacccagcacaggacgtccaccacccaaattcgcctatctgttacccgggagggatctctaaccccggtatatagatatgtaggatacattctgtctttcagaggctggatatttgtaacacccttaattttggggtataaaaaattctttgctctgtactcaaaattcaggtgttaccctttcctttattcacttttcttttccctttatcaaaatagtagagagttattttgttctattttggcgtgagctttagaagtgtcatgattgttgcattcatgctactgcatagtttttccaagtgcaagaa

SEQ ID NO: 63666 - DNA, 349 bp, Zea Mays
ggccgcccaaaacctaatctggctcgtcatcagggtcgagttcgaaggattggtctttgcagattatggtaggttggctcacatatgtagccttctcctgctttgtttgtgtgtggctggccgcctggcccctcgtgtaatgaaagcatagcttgccatggatttcagggccttttcgcaagacatgaaagcgacattcttggacatgtccaccattccaactcctgcaagttaccctgatgatccggcgtatgtgtgtcactagattattcgcaatagaatacaatgatgtgcaacgatggattagcttcaaatttaatgggaagataaaatggaaatgggcccgatc

SEQ ID NO: 63667 - DNA, 483 bp, Zea Mays
caatagtaacacatatgttcaatagtcaatgcagtaatagggcatgacactaacacacattccattgccgccacaattgagccagtttgcatccacaccagctcaagtacgttaaccttagcaaattctcttataacattctctaacctagcatttcatctagtttatatagtagcacaacatgaaccgtatctaaacttagtcaaatatccattaaatagggtctggggactcaatagttcaacaccccacacacatataccgacacctagaggtagggtgttttataactctcggtgattttgtacatttgtatactccacttgttgatatttgcatttaacttgttgacatttacattcttacataggctacgcctggaccgggagggagtggatatgaacccacaggaattgaatttgttgagtcccccttcctgtaccctcctcctggtggtggcaacggccaaagctcaaaccatcc

SEQ ID NO: 63668 - DNA, 1363 bp, Zea Mays
tttgttttccctctgtttttctcagttcatcatctgatgatattggaaattcccatttgcacgttggaaatatgctttgtcattttgcagcagtaccctcatatttatgtaatgatatattgtacaactaaagaatgtttttgttgtgttatcatttgaattttgaccgtctactctttttttcaggacgaagaagggacagcaaacatagcatttgaacacctcgttagcatctatgcagttggcttcttgggtgctttgtcgggtgcaacagtcttcatgttgtacacccgcttttcaggcacgacggcttcgcttcagcacttctcctttgcatgcgttgctggtgccttccattggttgccagctgtccttgccgcttatgccgtgattgtccgggagacaaagacaaccaagagcccagtggaatttgctctcttcattgccttcgcctacttaagttatgggatcatcgttagtcttctcgccagtgtcaccaacaaagctctggctacaaggtcagggaccaagaagaaggatgtagcacgtttgatccagcagcgcataaccatcgctgcacacctcagatttgcaaagatgatatccggtacagaagccttttgcatgtacttgaggcttcttggagcaaagattggcaggcattgctccatccgagccatcaacccggtggcagatcctcagctgatcagcatcggtgatggggtccatctaggtgatttctgcaacattgttccaggattctactcaaaggggtttaccagtgcagagataaaggtccgggacaacactgtggttggcagtggcagcttgctccttcctggctccgtcctccaagagaatgtcatcctgggagcactgtctgtcgccccacagggttcggttctccttcaaggtggcgtctatgtcggggcgcagtctctgaccttggtgaagaacacattgctcgcagaagatgaacggattgtggagatggacccgatgtataagaagattgttgggaaccttgccgcgaacctggccatcactaccatgaacgtcaaatcaagatacttccaccgcactggcgtcagcgggcggggggtcctgaggatgtaccaagacataccttcgctgactgagcacaagatatttggcgctggaaagtctttcccggtgattgtccggcacagcaacagcctcagcgcagatgacgacgccaggctcgacgctcgtggcgcagcagtgcggatcctctcggatgatggcgaggtgcctcttcttgacctcacactgaagagcggcaaggcgttttacgcgcgcacaatcgccgacttcgccacctggcttgtctgtggcctgccgg

SEQ ID NO: 63669 - DNA, 521 bp, Zea Mays
aattcacatccattgtgttcctcaattttatgagtgtcttctacatttcctgcttcagcttcctcttcactagctgatgtatattctccatcatcattcacaaggatcacacgattatttggacactcctttatgacatgaccacgacctccacacttgaagcactgaataccactactcttggctgttgaacccactgatgttgaagtggatgttgctggtttataactcgtgtttggagcagcaccgttatttccactagagttgcgttgaatattggatcgcaagcctccaattgaaccttatgtcgctgaggatgcaacagtaaaccttgagattgatttgcttcctctagtcatggttcgtgcaccatatgacaagggcttggtgctcttagcatcttgtttcaactagcgttcagctttggtggcttgatgtaccaaatcaataagactttggtacggctgaaactcaacaatatgttgaatgttgtggtgtaacccagccatgaaacgtgcaat

SEQ ID NO: 63670 - DNA, 727 bp, Zea Mays
ggcaagttaggcagcaaaccaaacgacgagtcgtcatgctagaagacttaccgcccatcccaggtcgtcgtccacgttccacatccgtcgtcgggatggacgcgatgaggtagcttgcgtttgatgaaagattacacatggatgcgtgtttgaccgaggcgctggcaagatgttgtggtgcactcgagcggcatgtagaggcaacagaacagaagatggtggcgcatctcatcgagatggatcaagctgagactgacacgagatgtggataagagattggacaacctcaccatcgagcacacgactaaacacccagacacattttttaagcttaattaatctgtaattagagagtgttatcatgacctaataatcaagcttaatatattggtcttcagatttgagtaaattttagtcagaaaccaaacatcccctgcataaaagacgcgagcacgtcacgtcgtcatcaagccgaagccaagcgtgggtacggtacgtgcaagcaaaacggtggaagtggagggcgggtggacgtcgtcagtgctgtgctgtgctgtgctggctgctgctatcggacggacacgggcctgccatgtcatggtcggtctctggccacgtctcctctcttctttccttccgcaccaccaggtgaccgactcttaccagaaacgcgcagcatgtgtaccaactgttaagaactacgttaccacggatcaccagattcgct

SEQ ID NO: 63671 - DNA, 682 bp, Zea Mays
ccgggagggtgaaaagatcagaagaggatcggattgggtcgcggggtgaagtttatcaaccgcgcctatagctgtgcgacgtggccagaccatcagtatcctcatggagactccggcaacctcggttatgccacgccgtggctcgttactgtgtggtagtaactgtggcacacttaggattacaatctttgagccgttgcaccggtgaacgccacgattaagccaccagtgctctcccctctctccggccgccagcgcgcgattccaaattcacgagccaccgccctcgggccctataaattgagcatgccatcagctccgctaggtagtcaagcatccagtgcacccacctgtgtctcggattgtccaccagagcgctctaatttgggatttcccccaaattggtcaagaacaccgtattgtgtgagctcgtcgtggccagctttccacaggtccgatcatgccttcctcgctctcgtttcaacatccctatgtgctgtagatgcttagcagcccggccaattgaactagatcacactagatcaccgggaacacttcagattgtccttggtttgcgctgtcaccgtgggcagagagattaggagccagaatcttgcaattgatcgaggggaaatgatcgtcaggggtagaattgtgtgtcagccaaaccagggcaccggcc

SEQ ID NO: 63672 - DNA, 670 bp, Zea Mays
cccgcagccgtgcgcatcatgacccgaccccagctcatacccagtgccaaccccccatagccgagagggcattccgccgccgccgtgttgtgtgaaccaccattgtggggctggggcatcgccattggttgggtctgcgggttcagcaatactcgtggagtcttgccgtcgcgtctgcgaacgaagtggtgtacgacgggcgtggtgatttcacgcctgtgttgcgctctgccgcgggtcgtgtgggtatcgcggctaggttgcttcccctacattatcgctggtatgatgtcgttcatgttattcgtcgtgacctcccctccacgcttagaccgtttgtaccgaggtttagggcacctgggctgttcaccttcgctccgatgatggtccgtcgggggaaggggcggcgccgccgtgggtcatgtcgagtaatggggagaacgactccttaccgttcgatctcgttgtgcggtcgggattagttagccgcataccccttcgccgtgtgcagtctggtccattggtctagatcaggcgattaggatcgggtttagggcaaaaatggacctctgtcgttggatttcgatgtggcggttctggttatctgccaacgtatgcgcagcaagatctaatctctgccgcaagccctagatctgacggccgatatcga

SEQ ID NO: 63673 - DNA, 331 bp, Zea Mays
gagcatcctatgaagatcattgacaccttgaatcgggttatgcgaaacaaagtgatcaaaatgtgcaaagtgcaatggagtcatcatggggtagatgaagctacttgggagagggaagaagaattacaagtagagtttccccacctctttcctagcatgtagtaatctcgaggtcgagattatttttaagggggataggatttgtaatacccaacttgtagatagtaaaagagaagacttaatctccttatatgtattgccctctattcattagaacatatgcataatcatatttaaagtgaataaattaactaatgaaacataaataatc

SEQ ID NO: 63674 - DNA, 442 bp, Zea Mays
gtgcactagggttctcaatcttcgtccatgtctggtggttaatctctatggacttgagcttgcgaaaaagctcatccatggtgagattctcgtagttggctgactcgatgatcaccgagaccttcacctccaaaaccctccgatctagagcatgtagtaacttcaatgctctctcatgactatcatagggaacctatactttgttggcacgcatcttgttgacaattgatcgactggaaccgagaaaacctagtgtctatggtctctccagccaactacacaaaattctcgtattcttgccagtacatctcaaagagtctggtctttacaagattattgctctcatggaatttctcgagggtggaccagatctcgtgagtcatagctaagtgtcgaactctctcaaactcactcaacgagaggcatgggaacaaagcgttgc

SEQ ID NO: 63675 - DNA, 352 bp, Zea Mays
ccatcatccactggctctgataacaagtcctctgggaccatatcctcgagagtctgatcaaagttggctaaggacagttcttgcagaccaatgagggcagacaaagcaggagagggaattccgctactttcaccgctggcgacgaactgccgactatttttccgagtcaaaggaacctcattttcttcctcctcgtcatccacattggcaacacaaacagcacccccattgggatcagcaacagatggagcacccacattgggatcagcagcggattgggtacacccattgggatcagtatcagtaagtccagtcgcaggcacttcttcagtagcaggaaccgaggtaccag

SEQ ID NO: 63676 - DNA, 478 bp, Zea Mays
tggtgatgccagtggcatctcagaaggtgtttgcaaagctgcagtggaagaggatatgtgaagtcgtctcggggccaacgcgccgcagacgacacaggtgtcactgtctagaattttctatttgcagagattcacccgagtttggagtctgtgtttagaggcgagccgagcgaaaaaacacactctaggggtagttttacttccctagatggaggtggacaagggtgtgggaggacctccatgatttttcaacattttgtatagaaggcccgagtgcagggagccatcctttttagcaagcacacgctgcctgctctctagcgcatcgatgagcctaatgtcccggaggagagtgctgaggtcgtcaagctcaatcttggcctagtccgagaggcgagggacaaagaccaaaggtaacaagtgggagaggaccctagaaatgagatttgagaataggaaatttcgtggcaaggtcatc

SEQ ID NO: 63677 - DNA, 640 bp, Zea Mays
caacggaaatccaacctcgtatgcatattgactataaaaattatacgcctcgtccacgttactaaatgtcataccgactttaggtatcaatcttatatcaatattgtccggctgcgcacagaaatttaacatttactattcaatagcgtctaaatttaacatggtatatgtacaacattacaaagaagtatgtaagagaataagagtatcatattagggagaacttacatggctttgaagaatatgaggtgtgtcctgttcatgcggcctaatatgtctcatggggatgtgcttctccgcgccgaccacatctgccgtttttgtttgctcatcgatatgtccaggtgccctcaatgctgccgggggagtaacggagacaccctctgtgtatggggcgatcacagacactacaggatttatgtctattgaaacagacgtacctgctggcgtatttacagatgctacaggtggcatgtcatcgccagctccggtgctcgacattttctcgccgccggccgtacctctaacttccgccgccgctaaacgccgccaatacctgagataaagacgtggacgagcgaacgtggacgagctaaccttgtatttgtttcctcccataactgcgcctttatttacgcgc

SEQ ID NO: 63678 - DNA, 1019 bp, Zea Mays
tgtcgaaaaaagaccgcatcgacggtcttcggcattcgaccacttcgaagtcaccgcgagaggcagcgtagactaccctcgcgtgcgacaatccacgcaaaagtcgtctaagggtgcagccagaaaagcacaacaagtgcattaatcgaagtcttttatttaaaagacactccgcgcgaaagtcgcctaagggtgcagccgaaatagcacaacaagtgcgttaagcgaagtctctcattaaaaagacacttcgcgcaaaatcgcccacgggcgcagccggaaccaacacaggcgtaggaatacggccaacaggccacattaccatacaaattacagttacatacacacggcgagggcatcacatattacatcggctcaaccttcgggatgatactcatctccctgtaattgaacagcattatcctctcaccatcaaaaagattccgaagatccccctcgcctatgctcgccccaatcggcgaggacaacaattctcgtttaccaacctggtctactcggagacggtcacactccatccccatacgacggcgcctaccacttcgcgaaaattcacccacactatgttttcccaccacccttcgccgcctatacccagtactcgcactaggaagatccccggcaccctccacacgtggcgaagtctctgctgcacccacatccaacgcaacaaaataatccaagccttcatccgaggactcctccatccaaggaaacgaacttccagattcaccatcagactcaaaacactcagacacagaaccaaacaaactatcatcggcaggcactatggttgaggccgccacaaaatctgtattgacagcagcggttgcttgcgcaggcccaaacgtcggaacctgcgcagcaaccgaggttcagtatcacacagacaaaagtttacacttaaaatccctaacccctattccgccacctacgaaggcccggccgccgccgcggggtcttcggtagctggttcgcccaccgccttcgaggcgtcctca

SEQ ID NO: 63679 - DNA, 352 bp, Zea Mays
gtagcaccgaactgttgacctagagagcatgtttttctgtcgcagtccggtagcagcactgggctgtacggtgtgcactggacaggtcctatgcagtgtccggtgtgtctatgcacaacggatagctgttagaactagccgttggaagcacactagtggcgcaccggactgttaggtgcgaccacacacagaattcgacagtaacaactagtttgtgttggttgagctatttataccccttccaacaaccacattcattgtcttgctgcctcaaccacctagaattttttgctttgagcttgcaagtccacattgcctagtgaggtgattaacaaaatcataatcacgtgtt

SEQ ID NO: 63680 - DNA, 898 bp, Zea Mays
cctggttctccatagtggatcctcttgcggggaggggataacgccatagcggggacttgaacttctgggggattccttccatcaagctgagcttccagggctgcgatccttacatgtgcatcctccagctccaagtgtaccctagagaggtccagggtagcactatccaggtcgatgttaagacctgccaccacaccagctaaggtgttgaggtgatcttcatttgctccacatgcaacaatgctggtctggttctctccacgaatacgcagaggaagatgcctgtacttcgtgttgtgcagctactgccggtaggtgtggctgagagaccacagagttcgcctagcagcatcgctgaccgaagcagcataggtggatagcggcgccagagactcatgtgctgacagagtcctgaaccctctatcacctgcatccattaccctgacatgaatgcaagtgatgtagtaccaagctcgaggaggctcgtacactcgcctggtctcgtacaggggtcggacgtaggttcccaacgcgtgcagaacatcctgcagcaggttagggaagtaccctgtctcgaacattgaggtgtaatgttcagtgacaggccataacccccacgtagtggtcctactgttcttcgttggcttcatcgttgaggttttcctcatcttcttcttcttcctcgtcgtcttcatcatcgtcaccagagtcgtctgggtcgtcgccttcgggagcaggggcttggactactggtgctggcggtgctgaaactgacgatccagctgcgaaggctagtgattctgccaacggggtgggcgtaggcagaaactcctccgagctgtcctccagaatgactccgttctccacccgaatgcgagggagatccacaggaatttcc

SEQ ID NO: 63681 - DNA, 1253 bp, Zea Mays
ctaaggggctaagagcaaaatcagtgcacttttggactaaaatgcaaaaaccatgataataaagcatcttaagtcatatgatccacaatcatgaaggtttgcaatccaaaacttaagatttgggcttatttgcaaaagagccacacttgaactgttttggttaggtcggaaaccagtgatattggccccactttgaagccctatattccccaatttatgaggattttgttctatgtcaccacatcaatattgtaaacctatcaaaggagaacaattttgcttaagagtgtaagcaaggttgttatgaagaatttggagataattaaacctaaagtcaggctgtcaggctgttaaagtttgaatttcagactcacagtgcaactgcagtgactttgggcatgaattcaagcaggattgagcaagaatttgcttaggatttctataacaatattgtagctagatcttagagctaaaactttgctaaagggtgatgatcatgttactgcacaaaatcgggagtaaacagccctacaaatcgctctgtcaggtgactgaatgggctttcccatggtacagtaacctgaaacggatcaggacggcagctcaactcgccgccgacgatccccaccacgattcatgcaggcgccatcctgattcgtgcctggtgaggaacggataacgccgaggatggataactcgtacgtggcgccatctcccgagtccagccgaagttcttcatcggcggccaccgtgactcggtaactttcgccgcggtgtcactcatgccgcgatctgcctcactgtgcttcctatcgacgtggtatgcatgcgctagcaatgctatccgtggctggagatcgtctgtcgggtcgccgtggttataaatagcacggtggtccacggcgaggtgtgaccatcacacacatagtgagttgaatcgaagccgaattcgcgctacctctgccccctcctctcaaattaagtgtgcgcagtaaaactagagttctttgctaagccgaagcacccgctaccaccctcgattagccaccatagccggagaatcaccaatttcccccaaatcggtcagccgcgccaccgagaatagcccgatcgtggccagcccgctctagtaagttcctatccaattcaagtgttgtttccatggctctgcatgctggtaaagctcaacgtggcacccgtttactcaattcgaccatggtttggcgggaacgcatactcgtgaacccagtttc

SEQ ID NO: 63682 - DNA, 569 bp, Zea Mays
cgtgtgtagagtaaatggtttgcgtgctgccgaaatattgcgtgcagtgttcggcttagcttctgctggcttgaccgatagcaggagctcagttcttgataatagaattttctttcagagcgtactgaagtcagcgatgagctagtgacttccaagtttgaacttgaatgccgagtagtgatgtgccaaggaggttgacccttagctcgctaggctcttgctgcgttgaatttttaggacacagctgactagacatgacctttaaccttgctccacactttctaggaattcagttgcgctaagtagagttttctagggtgcagattagtcaacactagagagtgggcaactctatcacgttttttttttttttttgcataccgtgttatcactctcttgctgcagcactccaaaatagtgagcacgttatgagaactttgcaaagtggaatgccacaaagtaaataaaccactatacaaagcactgcaggttctttaagttagtgttggactgttagggatacgttttgattttgagagagccacgtggccattaattttgctctcgtg

SEQ ID NO: 63683 - DNA, 614 bp, Zea Mays
agtaaaaagggggaattggtaaaaagaccatgaaaaacatggaatcatggtttaggccaattataaaagttgaaatacactaattaatctacaataactattagaaaagtttggccaaaataattgtttaaaatccccaaaaaggccatgcaagtgggagctctctagggaaatctgaaaattcagatttctgaatttcagccctcacctagaactcgagcacgttcaccttgatccctagctcaaatccttaagcccctatttacaaagctgtgctaaattaacccctctacaacgtgtgtgaagatggcatcgagattcatgccctagacacatcaagtcagggatttcatctcggatttcagcagtgagacaaacccgatttgatcaccccatatctttggctctagtcaacaaaacccataagccgccacacataaacgacaaaaggaaggtccggtgaagagatctctcgacgggatcatggccataatcgcgaagatttggagccaatccgcgcttgaacttgaccattctctgcacttctcgtgctccacgtcgtgcccaggcgcaagagcgcgcactggcgctcccccgcgcacaccccgagcgcg

SEQ ID NO: 63684 - DNA, 398 bp, Zea Mays
aattgaactaccatttcagtcaaatttcaagcctgaaccggccggacgttcacgaaaagcgtggtgtttgtttcagcttaaatttatgttctgaccaccaatagttgttgcggactgtcaaacgcaatcttttcggtctgaatctataagaatcgatttggtaaaaattgttcaaaatcaatgtcaacatagaatcgaccgagtcattgaggtaggaggaatatgtcactttctatattttaaaccctgtagacacatttatcttcttccacacataatctccacgatacttcgattctccacacagccagattgtcatccgcaggcatatagacgttttgtactcactaccggaatttggctctttgcaagtaccaaatattttgcgtgttttttcg

SEQ ID NO: 63685 - DNA, 722 bp, Zea Mays
ccatttcctctgtttgcaagtgaatcttagtctactcctgcaggctgtatcatggacacattttcattggtgtgcttatctcttatgcagtgccattgttatgtctgtgattgtcctgctccctgtgccctatgggacaagcattgtcatgctacggacaaggatagaaagtggaagagacttagggaaatatccaaaaataaaagccagccaaatcctaaacgaagaataccccagcatttcaaacgctcagtcacgacaggaccatcatcctcacagtattccgcaaatatgactggttttactggaagatttcctgcttcgggtactgcgaaccaaattcaacaggtggatatctctgttatggttgcacaggatatggtgaggggtatcagtctgccgagtgcaccatctcctacgccaagaactaaaaatcggagctatggatccaaaggtgcccagattgctcctccaatttatacattctcaaatgataatcatttccagccttctgttcctagctatggtctggtgcggcctcatgcatctaaaactgcacatgtttcatcaggaggtcatgttagcgctaagacttttcagagtaacccatctcagttttgtgttcgtgcaccaatgggatctcatggacacaggtaccgaccaccatcatatcctcagcctcctcctaacacagttgttggcactggtgtgcccctctcacg

SEQ ID NO: 63686 - DNA, 340 bp, Zea Mays
acttaaattctttacctttctccaacagtgaagtaaggggtttcactattttggagaatccttcaatgaatcttctgcagtatcctgctaatccaagaaaactcctaatcttggacacatctgtgggttgtttccaatttagtatttcacttattttaccggggtctactttgattcctccattggtgataatatgacctaggaaagcaacttccttcaaccaaaaatcacactttgaaaattttgcatacaactgattgtctcaaagtttctgtagaactaatctcagatgatcttcatgtgcttcttcactctgagagtataccaatatgtcgtcgat

SEQ ID NO: 63687 - DNA, 546 bp, Zea Mays
aacggggctttgaatcaaccggttcacggcgacagtgcggatgatcggatggataaacgcgtttcgaacaaccgatgacatggatgaccaaattgaagcttggggaagcttcacgggttcaccagaggttatgtacacactagaatttggactgggcaagagtagaaaagtgggtcgacagagagggtgtcgcagcggtgttctacggagcagaggagtgttccggtgatgggactctggcaaacttcaattggtcggctccgagagcagtaggaagctataaacaagctagaacaggaagcaattggggagttactgacccgaggagtgctggccacggaggagttcttcacggcagcgcgaaaaacagggcggaatggttttgtggactgtgtgagttcttctggtgaaattgagtcgattgctcaagtgcttgtgtgcgctatgtggtgaagaagcaggatccgagctcaatttataggccgatggctggagttggatgagaatcgcggagctgtaaccgccctggcgagctcacccgcgcgg

SEQ ID NO: 63688 - DNA, 524 bp, Zea Mays
cgggaaagtcgaaaacggataacggtcggtaaattccggtatatcgaaaacggataaatccgagcaaaatagctcgaaattgattgggaaacgataactgtaatcggaaaagctcacaataaacaaattctaaccacacatatgttcattcacatccacatataagtctcattcacaaaagtacacaaaacacaatcttgtccacatataattggtcatacactcatacatgtccactcttaaattttaacacacaacgcataagtcttaaaacacgattgctcattcacattcacatacaagtctcaaccacacaaatatacaatacatagtcatgaccacacataaatgatcatacatgttcactaaagttttaaccatatagtatataagtcttaaacacatgatacataaactagaaatcatgtagcatgtcgtctggatcacttgatatatcttctatgacatctaaaaccctaatctctaaaccctaacgggtatagttcttgcctcctttgtttttt

SEQ ID NO: 63689 - DNA, 285 bp, Zea Mays
taagattgcagggtgttccatataaattttaggacaatttgatatagcctttacataggttcgaacagtgggtttatatttaataaacgtaggggctcttatggaaaaagtaacgaaccaaggggcatggtcttttctcggccacatgatctgatttgggtggcccagattagatcaaactttaaatttattggtacgtaatccttgttgtcggatctaaaatctacatcctaaattttttgaagcctcgatctcaactgagtcgaatgattgccgatcaacacc

SEQ ID NO: 63690 - DNA, 286 bp, Zea Mays
aataaattatgagtcaacagaaataattctatgataataaattacgagtcaatctttccactggaaccaaaattatgagttggctgatgcttaagttctgaaaatcacgcaaagtcatgtgctgttcaatgttcaagggtaagcagcattcatgcggtcaccctcacccgtctagtactgttcatggagcctaaccgtaagcgacaggttattcatcgtaactaacaggccatatgggaacaggatgggaagcggttccttgtatgtggtctagcaggcctgtttc

SEQ ID NO: 63691 - DNA, 667 bp, Zea Mays
catagctcttcttctctttcccatgtagcctcattttcaccatggtgactccattgcactgtgcacattttaatcactttgctccttgtgacacgagtcaaggtatcaagaatctggataggatattctgtataagtcagatcatcttgaacactaaggtcctccataggtagcttcttgggtaccctgagacacttcttcagttgagacacatggaatacatcgtgtacatccgcaagatgatcgggtagttccagttgataggcaacttctcccactcgctttaggatcaagaagggtccaataaagcgaggagacaacttccctttaactttgaatcttctcataccccggatcgatgacaccttcagatacacgtgatcaccctccttaaactctagtagccttctcgggtatccgcatacctcttctgccttgattgtgcagttctcaaattctcccttatttgtcggacttgttcctctacctcttgtataatttcaggcccaaagaactgtctttcaccagtttgatcccaatattaatggagtcctgcactttctgccatacaaagcctcaaacggggacatcttcaaactggcatggtaactattattgtaagataactccgcatagggcaaactcttatcccaactgccaccatgtt

SEQ ID NO: 63692 - DNA, 293 bp, Zea Mays
acctttgtcactcattccatgatctgcagtaaacacgtatgctgtttgattgtcattgaagtagttctccataagattgtacacactttcagctatttggtcaacaaccttgacattgttcaggtatatgcttgaatagggtcggtgtgcatggccattggtatcacaacccagtaaatgcaaaaatataaccaacttatcttgtaggagtaactgcctcaatttaatatcgtcaaaagacctgttgacaagatcttgaaactggtcaaatgaccaatgatccagaaatgatg

SEQ ID NO: 63693 - DNA, 365 bp, Zea Mays
gatttgtaaaaaaaacaaactgctagagagaaattcatcaatgagggtgatgaaaacacaaagttctttcatcttttggctaaaggccggaagaggagggttagaattcctttcttaaatcaggatgatgtccctgtgagtgatgccgatggtattaataaaattgccacttcttattataaagatctttttggtcattcggtgatatctaatatcaatatggctcagtgtaacatgaagcaattatctgacgatgatagatctttcctgacggctcctttctcggtggaggagattaagaaagttatttttgagttgaagcataacagtgctcctggtcccgatggcttccctgctgaattttt

SEQ ID NO: 63694 - DNA, 855 bp, Zea Mays
gattaaatggttagtaacatatatgtgctcttttaccatctgtcaagctgaacttggaaaagtagctaacattttctacctgctcctatatgtcatccatggcatcttgttttgcagtacccaggccacctgacaatttgagtagtaccaccaattgggttatgttttctaatccctgtatgtggtagtagatgaaattgtaaactaattagactattgcatcttccattatcacatagtgtattcaggtttatttaagttttaatgatggcttgggcagcgccacgcacgctgggcaggagatggtgacgaaggggaaacaacacctagaggagacatcggcgccacctgcacaacggtggaatgtgaggggagaaacatgagatcctggtgccctgctggctcctgctcatcaagatcttcaaccaccagtcccaaactcttaccatgattttttagtgcagccaataattgttattccgacgtgttctttgtttcgtgctaatctctgttgtgatattctgtgatatgctaacggtggattgtttggtgattgcgtagggtagggagagatacggtgtcgcaaggctggaaccatctctgcatctaattgatgagccaaccccgtgttgggtcttttcaagcctttcaatgtgctgttgttgcgggttgggtggtgacggatgccttcaatattatcccgaaaggcttgactaaattgaggtaagcatagcatgctattttatcccacattgtgtatgatatgattcatagctaattccatgatcccatcaatatccatcgattttgaagacgttaagaaaatgttgaattactgagtagagtgaaaaaaac

SEQ ID NO: 63695 - DNA, 377 bp, Zea Mays
gtcagtttcctcacggacaaccgcgacgtcttcgccaagaaacccgcggatatgctgggtatcctaacggaaatcgacgagcacgctctgaacatacaaccgacggccagaccggtcgcccaacggcttcgacgtttcgacaaagaaaagcgcaaggccatcggcgaggaggtcgcgaagctcctagcgaccaaattcatatgggagatacaccactcgatgtgggtcgcaaaccccatcctggtcaagaagaagaatgggagtaggaggatgtgcgttgactacacaagtcttaacaaggcttgcccaaaggatccttttcccctcccgcgaatcaaccaagtcgtagactccaccacggggacgcggggtgcgag

SEQ ID NO: 63696 - DNA, 530 bp, Zea Mays
ctgagaatttcattgcacattgtttctatcagctccagccattcagtatagggtttgctgaatcttttttggaacttaaagcgataaggaagtcgaacaagttcatacttttttccttcctcctttttcttcggcattccccacccaccagaggatggaaatgtcctgtttgccaggtattcctgtaccaagtctctagtgctaatgtgttcagccacgaccctaaattccgcctcagccagttggcagggggaccccagctgcatattccataggggtcaggtcatgccgaagttcagccttaagggactcattaccatgctcatgagtttctccatcttcttttcatcagccttcatgtaaaaccactcatttgtccacccggtcagccatttagtgtggtagccaatcacgggggccttggtatccttttggtatgcaaaattgtagcacctgaagttcttgtgtagaccatcggctctggccttcgtctaataatgaagttcatgcactcgacaaaacccttcggc

SEQ ID NO: 63697 - DNA, 376 bp, Zea Mays
cggatgtgtgccattgtcgttgtagtgtgattgggtgggtgaagggaaaggagtgagcttagttacaatttgggatgagaaagctaccttatattagttatatatgcttctaaaatggaccaatatagttgagaaatttgaggtagtataaactgatatgagatactatttcatgatggaccatgtttacaaaaaatgcatgggtttgaggatttaggcactacacgcatatccatgctcgcaaaccctgttagatgtggcctttttgtctattaacaaattcatgggcaaagaaattaatttaaacttcgtcctaacagtattttatagaacgtcgcagaagatctgtgagtcatttcattaagggagataaaac

SEQ ID NO: 63698 - DNA, 663 bp, Zea Mays
cgcgcagatggataatggcaaggaggtaagaaatatcgcaccgtggatgaactccagccactattctactccggccgctgtacccgcttgtgtcacggccgcttcggataggctcaccggagttagccacctcgcgaccttgcgccaggtgccctggtgtcttaccatattgcagtagctcgcgttatgcatatccggtgatcgccggtgagctcgccacggtgaaagccaccaatcgcttgcgccagtgcacccccttctccccgactgccaccgcacgatctcaaattcacgggccaccgctcaagggccctataatttgagcacaccctcgtctccgctgagtattcaagcatccaatccacctacccgtgactccaattactcaccagagagccccaatttgggatttcccccaaattagtccggaacaccacgcatagtgacctcgccgtggctagctcgttccaggtccgttcatgctctctgatctcctgtttcagtgcccttatgttctcctgatgcacctcgacccattcaattaagctaaaccgcgctagatcatcgggaacacccaagttcatccttagttcgcgctgtctccgtggatagggtgatttagagcccaattctagcaattaagtgaggggaaatggtcgcgtg

SEQ ID NO: 63699 - DNA, 1329 bp, Zea Mays
agacggataactctttgttgtccgggaggcagtacaggaaatcatcttcatccgtaccgttaaacactaaggcccacttcgggtacttcagttcctgggcatagtgtttggcttcaaaaacttcttcggataatctttttcccctagcatgtcgaataatataatcaagattttcggactgtgcttcgggagcaggggatttggcttcttcggccacatttttctccagagctacgctaatatctggagattcttcttcgaccgtatactcagttgcagcaagcttcgtctcagaaggcactaagggcccagcttcggtttctgtatgagctataacagcttcgacaactttcttcacaggagcaggagtcagtgctcttgttgtctccacgacagcgtctagcacgctggccattctcctcctctagggagttgtggcgggagcctttgtcaccttcggcaattctgcctctgccggaggacttagaatttttggcagcatcactgttttttccaactttggctctctggccgcatcatctttggcttcggctgaccctactataggcaccttcggcactacaatagatccttcagcgctccgagtggcgggagcagcttgtttcactttggcagcggaggaggtcccttcaccaaattcaggcactacggccgtttcaatatatcgtggccgatgggtcaaaacctttattttcttgcccttcggcacaacagtggtggccgaagcggcagtttttctcttttttccttgcctttgcaaggggtagcagtaatcagggtatatgaagccaattgcatcaaaaaccctgttcaatcttttcttgccccgacccccgaatgctaaggataaagcatcatcttcggctctggtatatgccccaagtaactcgtcgctaatagcctcaatacttttcagccaatcgtcatttggctcgtcaaaccggtccctgaatctgaaggtatatttcaatcgaactaatccaccttcgatggacccggcagcagtctccttcggcatctcctagttatccacaagtggccacactctataggctatgtgctcttggattatgtctctcgtgccaatgtatgcacagacattgctgaaagcctttcgacacatttcggcatcactttcaatcgccaccctcggccttcgaaggccgaagcgagaccagatggggcgctagataatttctttattgtcctccctctcaatcagattattcttaacataaaaccattcctccatccaggcctcgggccaccttttccgaaatgttggaaccgggtagcttgcattagagc

SEQ ID NO: 63700 - DNA, 492 bp, Zea Mays
tcccggtgtcgcagagatcgaattgaagcggggatatatgtacaggaaccagtttaggtcggatcgattgaacgaccacgccaccactgcgcggaggcccggccgcgggagcggcagtagctcgcattgggtcgtctccggcggccgtggaagcaccgctccggctacgcggctgcgatcgccgccctaccggaggtgagacacgtgttattgtttattcatcgtgtcggcgtgtataactgtatattgattgttatgatgtttattgcatctatttgcagcgggaggcccgggagcgtgcagcagcagtacaggccgagatcgccggcgagtgtcccgatccaggggaatgccattggctgcgctcctccttgtgggagtggtgcctctgctgagcacacgggaccagtgaaccaaggtgcaaatgcctgtagtatgtgaactttcggaaccatcactttctctgatcgtacatgcatacttgagtgattg

SEQ ID NO: 63701 - DNA, 426 bp, Zea Mays
aacttcagaccttgggcctagacgttcaagagcagatcgtctgcccaaaagtacactgtcttccgtagaaccccttcggccatcacagtcccctggtggcgaacgcgaacggaaacgccgcctctgtcgtgtggaaccattcatatctgttgggatctggatggggtcagggacaacacgttgtccatccaacaccttaatctgaacacgataggcaacagatagcctctcagcgcttggtcctattcccagcggttcagtaatccagagatctctagaatgagggattgaggccaagtcataacaccaaccataacagcgaaaggcctccaaattcttgagctcaagagtctcctcatgtaccttctgcacccaggcgaaagggttcaaaatgtgctggacagtggaaagttcccaagcatgaat

SEQ ID NO: 63702 - DNA, 521 bp, Zea Mays
tacatgtgataggaacaacatgcgagggtaaaggaacgatatcccatgtaccagtgcgttcaagagcagccaattcatcaatcatagctagctgccactcgagaatcccagaagcttcctgatatgtagtgggttcaacaattgccacaccagcctgtggaaaaccatagcgatctggaggttcaatggtaccacggtcacgaagacgatatccctgattaaaaacatcattagactcattattgtcagtacaagaatcaggtacatgatcagtatcaggaccaaccgtagaaatagagcgggaacgacgaatttaggtttggatgacaggtggtttggaagagtaagaagaagatgacgtggaggtggaaggtggtgttatgagaatgagaacatcaaatgtggatgtagaagatgatggtgcagatgcaagaatggaaggaagacacatgaaagaagtagattctgtgggataatatgaggagtgagtagactggttgtgaaagaagggccgattttca

SEQ ID NO: 63703 - DNA, 721 bp, Zea Mays
ccgtgtagtgcgcgggattcacctccgtgatctcctgaagccagcgcaaggatcgcccgggattgtcttcgcctctagagcgttgaatcgctcgtcgacgtcgaacaaggccgaggaaccacgccttcacgtcgtcgggatcaccctcacgataaaagactggtgtggccgccctggtgatttcgcctccctctcctctttcctttggtgtagtttcgctcggattaggtcggtgggtcgccaaatcgccgcgtccggccatggagccaccatagggagaagcgtctggccgccggtgttaggagagactcagagcgcgatgtcgaacgtgggccatcggatgaggcacggacggtcccgattagtagccggaagtaccccttcgcgatagtcgatctgcgacgtccgtttctgatcgggcgagcgcgattcgatctggttactttaaatccaatgcattcgctgataatcggacggcggagttcggataccggttcgagtaaacaaaggtctaatctgggcgctcggagtgtaatcggaggctcgggattgtccataccctttcgctgcgcgctctttccaaaagagaccctagtattttccgtaatcaacccgcagtctacttcaatagttctctgtgtcttggtacaacttgcgctgagacccctacacttcacagtaattgacgcccagtccagaacagtataaaaccagaaaactt

SEQ ID NO: 63704 - DNA, 568 bp, Zea Mays
gtttatatatcctgctgccatttttttttcctggtaacaaaatgcacgtctcctcatgtgaactgcagcactagccactagctagctagtgtgtttggaactttggatttgttttcggtgtaacttgtggcatgctttcttcgatagggcgggccgggtcgcctcaaaacgatacagactttaatatgacagtggaagataagaaggaaccatttgtttagggttgctttgggtttgagtgagaacccgtgtgcgcgcacaggcgacgatcctagtccatggttcccagagacgcttcgcaggaattccactgtcaaagctcggccaacacacacagggaactcaggaagaatctaatcgaacacctatgacacgctatagagacaaataaagattagacagcatgttgcgattatatgtagtatagttattatattgatgggtttttaaatattgtaactatgttggtcttatttgtgtttgaagcttcattctttcgttaaacggcagcacaataaatcgatattcacgattgatcctaggctatatacaaagtattcaactgttt

SEQ ID NO: 63705 - DNA, 737 bp, Zea Mays
caaataccaagcccagaccaaagcctggcgcgaccacgcagtcatcccgagagagttcagcgagggggacctcgtactcgtccgaacagctcggacggagtccaagggcaagctggagcccaagtgggagggccccttcatagtcaagtcaaaagctcccccagcgcttacaggctcacaacgccaaatggcgaggacctggagcactcctggaacatcgacaaccttcgcaaattttttatttgacccatttagggctgatctcgcccttgtaattcgccacaaacaatcttgtaccggcccgcactcttttcctcccggggggtgaggtttttaacgaggcggagccatgtaatatatgtgacaaaaatcccccgcaaaaacatgtgtcgaaaaaagaccgcgacaacggtcttcggcattcgaccaattcgaagtcaccgcgaggctaagcgctagccaccctcgcgtgcgacaaatccgcgcagaagtcgcctaagggtgcagccggacttagcacaacaagtgcgaaaaaatccgaagtctatcgcgaagactatccgcgcagaagtcacccaagggtgcagccggactagcacaacaaatgcgaaaaacccgaagtctatcgtaaagactccgcgcagaagccgcctaagggcgcagtcgaactagtacaacaaaagcagaaacgacagcatcaaaaccatcagcgctaagaccaactataatcacaccag

SEQ ID NO: 63706 - DNA, 399 bp, Zea Mays
agagattcaagaaagttgtatgctccttctcagtcataggaccttttgttttggcatgctgagacatgtaagctccccagctagtactgtctattttggatgaaagtttgaaggggaccttagacatactaaaagcagaagggctggcagactcgatatctagaccggtgatcatcaccacatccatgagggcaggagtcaaaggcccatggccgaaaaagaagcagttgaaggcgccagaccaaaaaataaccaattaatttaaggaggttttcatccatctcaagaggatacagtgacaaggaaagcacatcggctatgcctatagtttgccattgaggccgataaatctggaccactctgctataccagactacctagcccttaaggggattagac

SEQ ID NO: 63707 - DNA, 517 bp, Zea Mays
aaacttggcgctgctcgaatccctggacttgtcgtggaatcagctggaaggggagattcctccaggcttcgcagccctggaagctctaagcactctgaacctttcgaacaatcgtctgtctggaaggataccggcaggtaatcagctgcggacactggtcgacccatcaatctacggcaacaacctggggctatgcggtttccctttggaggaatgtgcaaatgcagcgaagcacaatgatgggaaaagccaagacgacgacaacagagaggtgctgtggttatgttgctttgtggttgccggatgtatcttcggattctggctgtcctggtgtgtcctgttttgcaacagaccatggaggtatgcgctctatcactgtgtcgacaacgtgctacacaaggttgcaagtgtaatacctaaattttagagaaatgaagatttattttaattgggtggtcatgtgaaattcatgtttataagtattatttgtttgaaaaaactaaataaaggaataatt

SEQ ID NO: 63708 - DNA, 622 bp, Zea Mays
taaagaagtcattatgcgccctatctggtcccgctttggcctccgaaggccgaaggtagaaattgatgattctgtcgaagcatgccagagagccttcagcactgtttgctcctttattggcacaagggatttaattcaggagcatatagccttcagggtatggccgcttgtagaaagctaggaaatgccgaaggagactaccaccgactctagcaaagatggtctggttcgactgaagtctaccttcagattcaggaagaagtttgatgaacccaacgatgactggctgaagtgtatcgaagctacaagtgatgaattgcttggagcttattccaaggccgaagataatgctctatccgcagccatcggaagatgggggaagaaaagaataaatagggtttttgatgccattggcttcatataccctgactaccgctatccgctgtggggacaggggaaaaagaggaaagctgctacttcggccaccccagttgagcctgtgtcgaagggcaaaaaggtgaaggttcttacccaccggtcgcgttacattgaaccggccgtggtgcctgagtttggcgcagggtcctcttcagcggccaaaacaatacaaactgctttaact

SEQ ID NO: 63709 - DNA, 504 bp, Zea Mays
tcacgaaaattttggttgttataattttgtgtatcgaaaggatacgaaggcaccagacctcagctaccacacaaagtggccaaccggctggaaaaatgaatggttttatatgaaggctgatgagaaaaacagggagaagttgatgaccatggtcatgagtccactaagtttgagcttcggaatgacccgacccttatgcaacatgcaactggggtcaccctatcagttggccaaagtggaatttagagtggtggctaagcagatcagtaccagagacttggtgcaagaatatttggctaatagaacctatcctacgtcaagtggctggggaatgtcgaagaagaagtaagcggggaagaagcacgaactcgttcgacttgcttaccgcttcaaatttgagaaacaattcaaaaaaatcatgcaaagaatggctggacatgatcgagacaatgtgcaatgaaatacatggaaattataccaaaaaggaagaccaattgatgaccg

SEQ ID NO: 63710 - DNA, 491 bp, Zea Mays
gttttggttgatgttttgattgctggctgctggggctaactgaacaagcaaaaagagagacagggaaactattgaataggtaattaaaccacacagggaaagagtggcaggaggggatccattgaatccacttgtggattaattctacctagggattaaatccatgccaggacctgcatgagcatgatcgtccgcagagattttctactagatacgtcgttgcccagttggatcttggatgtccctctcctcatgacgatcagacgatgccttttgagcgaggcggcagctccgttggaacgctccacgccaagggacaacttgacataggaatgataggattactgtgctagtctgctagtagacaatagacattgatccgtgcgatgcaatgcacgcgtgacaccccaatcacggtccactgtcccatcgcgctaccagctggacgcctctatctattcttatttaattcctcaccattttgttttttt

SEQ ID NO: 63711 - DNA, 449 bp, Zea Mays
ccatttacaggacccacaatacgacgagccacgccaagggtcagcgtggagcaggggcagtaatgatggcgttagggatccacgccgctcgtgacgcctgcgataaaggacacagccacggaagcccaaacgaccggggcgcaaggagacaagcacgatttaccggggtgaaatgtctcattttaccatggctcgatagctccttttaagagaatgagacggtaatcgacccccaccttggtttataaaagggaagggtcagagacgaacacgagaaggtggacacgagaaatacacagacgggccagaggacccggaggaccacggaggctggagtcgaggagcaaaccaccgcgacgtccaaggcttagcagagagctctagtcccatggtccttaggtctacccacacataagagacttgggagctcttcttccctctctcgcccg

SEQ ID NO: 63712 - DNA, 439 bp, Zea Mays
tatgaataattgatgtttctcactttgtggaagaggaatacccttgatgaacaccggtcaggaagggtagatgccgtcagcaagatagtatccactattgtattcgtgtccattaaccatgaagttcactacgagtgcttgaccttgaaggacatcaattaataatggcgactgattgagtatgttaatgtcattgttagatccgaccaccctaaaaaagcatgttagatcaactgatcattcgatgcaacaacttctaaaatgatggtgggatgtttgatatcccccttgtgaattgatcggcatgggcgaccggacaattcctccattgccaatgcatgcaatcgatactttctaacatgcctggaaagccacattcttctacttttgctagtagataatgagtatctgtgacattaggtcgatgacagaagtcctc

SEQ ID NO: 63713 - DNA, 823 bp, Zea Mays
attttatatcttttgtagacggcgggtttattctcaaataactcgaggtttcttttgcaaacacacgcgcgcgaaggggtataggtggatatcggcctttggatccgtatgctacggttgagattagatcttaataagacccgaactggtagttctccagcccacaggatcagaaaccaacggtcccgattaaataatgaaggggtacgctatgctgatcgcacgatcaggatctcatggtcgcgttaggcagaacagatcagagccatccagccggccaccaacgcgacggatttaaatagtcaaaggccatttgtttgacctgaatccagcggtccattgctagatcaatggcaccccataaccatgaccccacacgcacccacgacggttggattatgatcccacggcccagaggttatctccctcaacccaatgagttggccacggcggtgcactcaaaccgcagcggaggcaacgccggagcacggcgggtttgcggtctagagtaccagacgacatgcaaaggcagaaataaggggagaaatagatggcaaatgtgtggggcatacctacttgagtgcgcgcaatagggaggcttctccccgacgagcttgcggccgagcggtcattctttgcgctgacgagaaattgccgaagcctaaatcacacgttgctcgaatcaagcacgtgtacaccacccacggggcccgatgaagctccaggaaccgacatggggaccccgacgttggtctacgcgtgtgtcggcggtgcgatgtggcaccgcggcggaggagcgctcgcgggtcctatcctattgctc

SEQ ID NO: 63714 - DNA, 464 bp, Zea Mays
tatatttcttcaattcgtccaaaataatcgacatcgtcaaggctgggcgtaaagactccagaacacgttgttttccgattaggacgactttggtcgtagtttgttatgcaaaaatggtatccattgacgtcatacctagaatatttcttgaccctataagcaaagccattggctacttgtctcaactcggcactcatagacgggtctctttggccctgcaagtattcgcaagttaaaagacgctaaattgagttcatagatggatctctttgacaaactaatcacgtaccttacatttgaaccaggaaatgaaatcgggcaatccatttctcacaccctttctaagaagagtgtcatattcctgtggagttgggtcccttgatcgacgctagaattcatgaagaaattgttccatgtatggcgtcacctcttcaaggttggtcaatacatatagcatgatatgc

SEQ ID NO: 63715 - DNA, 603 bp, Zea Mays
gcaaatttctgttctatcgtcatctcccaatcaagatatccctcagcatcataatgacccgaaaaagatggtaattgttattaccttgctggcggtgttggtgtggcataccttctatgttttgatgaaggcggcgacgtaggcgcaaatctctggtggccgcttaatcataattaccttcttcatcaaacaccgcatcatcgggaagtcgtggacgaggaggtggtggtggtggtgcttgttgttgcgtctccaacacagcaagtctgtcgacgatctgggacaatcgtcgatccaacctctcgtaagtcttgccaaggttcatgtcaatgaaggcatcatgcactgacttgtggaccgtctcctccatttgctccttcaggagattgttttttgcctcaagatcttggcggctaacacattcatcgaagtctgtagggatccttgcttcttcttcgtcgcctaccatcaaaacacaaaaacaggaaacaaacggtgacggttatccctaataatttcactacacgctcctctcaggtataacacaggaacacactttaatgtatcttaccaagctcttacaagtgtttgacgaaatacaag

SEQ ID NO: 63716 - DNA, 377 bp, Zea Mays
aaagaatttaataaggttttctacattttattcacctgagagcataaaatataatctcccaaattcgactcctaaataggacttttaacaaatcgtcacacactttcatcccaaccatacataagcatacaagtttcattttcttaaagtgaatgcaacacgtggccaattgttatggatgaccacacgtgaggataatgctcaagatgttgtcatgcttcaatttttagtggcgcttaacacctgtggtgttacagatacaactctagctttcgatccacttggtgaagtattctactgtgacgaaagcaaatttgaggttgccttgcgcagtgggcaatggtccgacgatatcaaggccccatcattgtagcaac

SEQ ID NO: 63717 - DNA, 429 bp, Zea Mays
ggcggaggagagtcgtcgtactcgaaggagaactgctctttagagtactccgagtccccaaagtcctctgatggaggacacgaagggcgcttgcgcttcccctccgctgagtgacgcttgcctttacttcctttcccactggccatggctctcttgggtgagtaggaaaaggggaagaggagagcatatgaacaagaacaggtgaggaagacagccgagggcgagcaggctatttaaagaaagtagagggcgacccttcgtttcctgcccgttcagcgaacagtcataggacttcaatagcaacttaagtttccaagaaagaggtcagactactggcgccgattcacatagcacaacaccagaggaaatcaaagtcaaccgctcggacacagcattacacctctccatcacgtcaatttactatttcta

SEQ ID NO: 63718 - DNA, 384 bp, Zea Mays
tgatcagattctaatctacttgtatccatgcttagaatggaggggaaatatctttccttgttgtccttcatttgaggcaacccacacatacagtcgttagccatcgagcataatgttattccatcgccttccttggacgagtccacttgtgccacatctcccaccatcatcttggtcacctacgcatgcacagtcattaagtttgtggttgtccaagtcaccatggcccccgccacttaggattctagctaagtaggggacgtgaagagtggcaaagagaagaagacaggtatatcaccatgtggcttgtaatgccaacataagatgggggatatactcgaccatatgccacataagcctacaagtaggcccaaccattcgtat

SEQ ID NO: 63719 - DNA, 307 bp, Zea Mays
agttggggagggagttaaacttcgacgagatggtcatgccagcttggatggcgacctaaacacctaaaaccctaaaccctaaacatgtggtgttgttgtgaggctatagaggagatgagcctatggtttatagcttgaggtgatatggtggaatgtagttacacaggcatggaggtggatgattacatgatatatctattctggcaacctagtcctatgataatccaactctgcttatctgttagaatactatcctatttgtttaggactctaactgtgtgttttattccaataatattgttatcat

SEQ ID NO: 63720 - DNA, 782 bp, Zea Mays
atcagggatccacccaagaacctccaggagttgtatcagctatttgaaaaatatgccagatccgaagagctccaccagccaaagtcgagtctcagaggaaacccaaagacactccacagtccagccgcacgtggacgaggccttcgcagccagactccggttgggacggccgcaatcagcagcaagtgcacaacatcgccaaccagcaccccgctggcgatgcccctcgccgccaagaatatccccccagggccgcgggaacggggctcgtggtcgaggccgatgacgtgcgcagcagccgtgccgattttactgcctgttccacggcgaagactgcgcccaccaaaccagagactgcccagagacgaaggccactagagataggatggcacgggcgcagccagccgacaaccctagagttgtcgctcacacatatcagcaaccccctccgccatacatccatggccccgctccgcatccaccgcaccacgcataccaacaccaccaggaagtacaaatcgtacctcccccacccccacctccacaccagcaacaacaaaaacatccaccacccctaggccccaaagcaagaggacttcgccgatcagccgtatcgcggagtcattcatatgatcattggggggtccagcgccgacttcgacacgaagcggcagaagcgggaccactaccgcagcatcaaccacgtcaccatcactggtccggtcgtacagacgaagtggtcccacgtgccgctaaccttcgacgcccgagatgtcgatctg

SEQ ID NO: 63721 - DNA, 546 bp, Zea Mays
taaagatgacaccatttgaagcattgtacggaagaaggtgtagaacgcctctcaattgggtcgaagccggagaacgaagattctatgtcaacgacttaattgctgaagctgaagaaaaggttcgaattattcgtcagaacatgaaaacatcgcagtatcgccagaagagttatgttgaccaaagacgaagaccgatgacgtttcaagtcagagattttgtgtatcttaaggtatcaccaatgaaaggcgtgcaaagatttgtggcaaagaagaagcttgctccaagatatgtaggaccttatcaggttatcgaacggaagggagaaatggcctacaaaattcagttgcttgaggacatgagcatgatctttcccgtgtttcacgtatctcaactaaagaaatatctcagaatacccgaggagaaagtagtagtcaaggatctaaagattggatcagacttggtatatcaagaacaacacgtcgtagttctagacactaaggaccaaattaccaggaaatgtacggtcaaggcgtataaaattttgt

SEQ ID NO: 63722 - DNA, 384 bp, Zea Mays
catggttaccacgtaaagcagggacacagtgagggaggagcgaggcatggatgacacggagatggaaatgaccgagccacgatggccaccgatgaattttcaccgactaggctcgggctaggtccgcgaggtcgcgacacatccaaagttacctccctgcgaatatccacggcgtgctaggcacgaatcacgacgattggtgcgaatccgggcgcgtggatcaccggcggcgagggggactgaaccctgggatatttcagtgcactgtatcattggaagcttcatcagttgttctaaccgaggatcttcagaggcatttttcttgaatttttgcatgacaacttgctaatctgtttgtagtaaacttgtagtcctatatacaaa

SEQ ID NO: 63723 - DNA, 766 bp, Zea Mays
tatctctgaggtagaccaggatgccgactgcagctgctcgagagataaccaacttgcaataacccacaaatttgcagtctatctgatgtccatacccgatttcgaatgattagccaggcaaagagcttgcacttcaaaggtgcctagggtttagataagcgtcttgaagttaatgtcagtatgtcctatgaactgtgctctgtatgttgttgacgttgagtagtaacctgcttgagtgaagacccatgttatctcatcctccttattttctacaaggcgcatagattgtacgattgcgcaaagctcaattggctcaagtggtcgattgacgaaatggcatgcaggttgatacttctcacccatccatgatgagctagcgcttcccttgactgtcgaattgcgtctgccagatgccgcaaagactttgggcgctatgtctcttggacgctggtcgtggacccaagcgctacgccaaaaagaagtttttgctccatcaccgattgttattcttgttgctgccacaaagaggagacaaccagtcttgctacaaggatttttaagcatatcccatggagcttctggtttagcccattctagccacagccaacgcaatcacaacgctctagcaaatctttccgaatcaagcattcctaggccgtcaaggtttattggacgtgtcaccgttggccagttgtaaactctaaaaatgtgaatttaaatagtctagtattttattatgagttttattattaatacatgtttcctt

SEQ ID NO: 63724 - DNA, 532 bp, Zea Mays
gaaggagttcctatccctcaagcagggaggtatgtctgtgagttaatatagggacaaatttatttagttatctcactatgctcctagggatgtcgaggatgatgagaagcagcaggagctcttcctagaaggtttgattggaccgctacaataccaactagtatcacacgcatttgtgtcttttcaacgactacttgacaaagctattgctgtggaaaacaagaggtgcgagtttggagaaaaaagaagggctgccaaccagggacaggctgggagttgttctcgcccccgatataatactactccaagtacaccagctcatggcggttccgggcaacagactcgacagacacaaactgctcctccgcaagcaagcaccccagcaagacatgttgctcctaatatatccaccaacaagtcatgtttcaagtgtggacagtcgtgacactatgccaactacagtgccaacagggctgcttttactactctggctccaatgaagcaaggtcaggcctcggcaagaaagagtcag

SEQ ID NO: 63725 - DNA, 373 bp, Zea Mays
gccggagtgaatagtggctcaagttcatccacagggtgatatttctcacccccttgctgttatccaactgcgccgagcacgaatcaccgcagcaggagcgaatctgggcgcacggtcgccgacggtgagttagctgaactggcgatctgatctgaatattgtaccattgaagacctgattcagagcacctgacaaccagatttgtagtgcccagatcgtggattttcgcataagagcttgctaattcgtctgtagcaaacttgtagtccaatgatccagctacgaatcgactatagcaataatccccaatcgaacaatagatcccactctaattcgacccaaaagtctggccaatgtcactagtgacccaatt

SEQ ID NO: 63726 - DNA, 1347 bp, Zea Mays
aaaatggaaaacaacaaaatagtgtaaactgtgcgacccagccgaattcagcccaacaagccacgtgtgcccgctctccccttctccctctcactaagagtcggtccccgcctatcggcactgacccctcacgcgtcgtgccttagtcactgatgcctaggtcccagttgtcatcaccgaccttccgctccccctctctgttcaccagcagacacaccactgccaatcttgcccttgcgagaccagaccaccactccctcacctgtcatttggtgacggagatctcgcgcattcacctcggtcgttacttcccacgtttcctccccagatgcccgctccacaattcctccccagatgcttgctccataactccgagtggcttcaccgacattcaaatggtgacccttggtcacgctacccttgtcgttgttccctccccttaatcagtggcacgtggctataaaatccgacaccatgcatgccccgctcacctacatttgagctcctaacgacccgagccccctgcatgtgtcattattgtcgttgtcgctgcccctagaagctcctcgaagatgttatgctatgatcgggacaatcacaacacgtctcagggtaaactctatgtactcccacacctcataccacaatgctcttgaccctccatgtccccaccaccattgacccatgtctagccatgcgtcgacgctctacctagcactaggaggtgtgcaattaggtaccggaactaaaccgccctttccctcatcctaatgcgcactaaactgactctgattgctcaccatagttaaccagggccacctcaagcacctatatcatcaaccatgcccttcccattggtccccttgccctaattcaagctcagatggttcgccatggccaacgaaagcttggtggcaacccatagccctagacgaaccctgggttggctggtctagccatctccggcgagccaccatcgtggaggacaaatcgtcgccgtgatctacctttgcacaacctttattttaatcaggagtgtccacgtgtgatctaacggtcggaagcgactggtaccggccaacgccgagtcagactggcgctgacaacgtgcattttgcaaaagaaacctctggctttatttaaatcaaaccacagtccaatctggttctaactagggacatcaaatatactttttaaaccatgcagtctatggacaattaaaaatataacctcatcttcttaaaatgaattaaaattcataacaaattcattttaaatcaaaataatgattttggtctcaaataaattgcaaaattgcatagaataattctaaaactatttccaaac

SEQ ID NO: 63727 - DNA, 632 bp, Zea Mays
gttgatcatgccattgatttaatacctggtgcaccgcctttcagactcagaccgtaccgctatacacctcaacagaaggacgaaattgagaaacaagtccaagagatgttaaacagtggaattgtgcaaccaaactctagtccttttgtctctccggtgttactagtgaagaagaaagatagtggcgcctatgtgtgggctatagaaaactaaactcatatacagtcaagaaccgataccctatgcatgtatttgatgagattgtggatgaactagcaggcgcatcgatattctctaaactcgaccaccgttcgggctaccaccagatcagactgagagaaggagatgaatccaaaaccgcattcgaggcacatcatggacattttgaatatcgggccatgcccttcgggctgatgggagccccgtccacctttcaggattttatgaaccagttgttggctccgtttctttgaaagtgggtggtagtgttcttagatgatgtgctagtatacagtgctacgatggaggaacatgtagtacacttgagacaagtgttggatttgatcagtcagcaacagctttatctgaaggagtccaaatgtgtgttcgatcaggagaagttgaaatttttg

SEQ ID NO: 63728 - DNA, 583 bp, Zea Mays
acaaattttggtaaagaccaaattacaaagttttagttcaccaattaaccaacaaagcatagaaaagaagtttggccatttggtttttccaaaatccccaaatcagcccttgaaccaaggtcctatgggaaaattctgaattctgaatttcagaacccttttccaaagatcaatcgtgttctctgtttttcaaaactcaaaaccaagaagtccaaatataaaagtagtgccaaatttccttgaacacgctctggaaaaatttgaactcgaaccaaattcatttggcatggttttggcaccatttgacctcgggaccagacattctgacactggcaccttggtgacgctacaactctctgtccccagcctaaaaccccgtgacgtccacacacaaaagacaaagcactgtcaggggaacaaatctttcacagcgatcttgcccaaattcgtgaagatttgcgcccaatcggtgttagaactcgggcagaagcaacggttccacgtgttcgaccgtggctgacacccccggttcacgcccgttcgcgcacccgcgctccccagtgcacgcccgcgcgcgctcgcc

SEQ ID NO: 63729 - DNA, 1154 bp, Zea Mays
ctcttccactccaccatagccgcgacattcttgggatcaaccgcaatgccctactaattaatcacatgacccaggaaagccacttcggacagccaaaaggcacacttcttcaatttgccataaaaccgattcttcccaagagcacccagaacgagacagagatgtcgttcatgctctgtctcggtctttgaataaatcagaatatcatctaggaacacgaccacaaagtcgtccaagaactcatgtaacatcctattcattacttccataaaagcagtaagggcattagttaagccaaaagacatgactatgaactcgtaatgcccatacctggtgcaaaaggatgtcttcttaatatcctcctcacgaatgctcaattgatgataaccagagttcaaatcaatttttgagaacacctgggcacccctcaacatttcaaagagaacctcaatacggggtagcgaatatttattcttgattgtcacttgattcaaagcacaataatccacacataacctcttgcttttatccttcttctcaacaaacaatattagggaagcccatggtgacctgctaggcctaataaaacccttagccagcagatcatccaattgccacttcaattcaacctgctcctttggagccatccgatacggggccttatgaataggttgtgtacccggaatcagtttgatttcgaaagctgcatcgtgatccagtggaaggcctggaagctctgctggaaatacgtcggcaaaatcacacaccacacggatgtcttgcacccgcaaggcagcctcactctccaccaccatggagaaaaagattcttgacttccttgaccgacgatccggaagcaattgcgacaacaaggataacgtgaactttggagaacctcccaagaataccacctccctacccgatggcacctacaataatactgtcttccaaaaacaggatataacttcgcgatactgagataaccaatccatacccaagataacatcaaattcccccaaggaaatcacaacaagattagctgaaaagacctcatcagcaagaatgacagaacaaccctgacaaactgaacagctactaatggagccactagcagaactaaccataattgggtgacccaacctctgcaccaaaag

SEQ ID NO: 63730 - DNA, 413 bp, Zea Mays
gtcgtcgggacccagggaattcatcaccggagttgcgcccgaccgcggagccgctcctcgccgtggttctccctgcactgcgaccctcgttgtcggtaagtgcattcctcagatctgcaagcatctagtgtccacgtagcaccatctaggtcagagttcatgggctggggcgggtaaaacgcgaggtccgaccatggcgccgccgtggaatgttacccgccgccgtgttcagtcaccgggttggggaggaaggttgtgcgtcgtcgatcatgtggacgatgaccccgattagaagatgggtatcccagattacttcccttgatgaggatgttgtgcccccaaatggtattcctcaccccatgcatggccatacagtgagtgggaactagaacatcccccatcattaggtgcac

SEQ ID NO: 63731 - DNA, 372 bp, Zea Mays
aaatttcttaagttctctgcctattttaaaagaataaacagaaatatataaagtaaaaagggttttgcattggggtccctggcgaaagtttctaagttcattaaagacaggtcctcgggttactattcacatgagtctatgactacgcagaaaaccccctaagtttctgctaaatccaacctgtgatacttcccctaatggaacagtaaccgcggcggaagaaaagggcggaggggcttaccggcggcgagattgctccaatgaagtggtcgagggtgtaggggaggtcttgacggtcacgccgatgtgcagatcgtctccggcgatggtcggagtaggtcggtccacgtgcgcaggcgggcgagctcgtcg

SEQ ID NO: 63732 - DNA, 849 bp, Zea Mays
cggtgatctaaggggtcctagtccaattagcggggtcggggagcatcaggagaacctaaggatgctgaaacaggagagcaggtagcatgaatagacgtggaattcgctgaccacggtgagggctctaccacggcgacggaaaacaaaattgggagctgggaaattggagagtggtagtggctaatcggaggcaggagtgggtgctcaggcttggtgatgacctaatgcagcagaccatgccgtcaatttatagcggcgctaagcggtggccagtgaatttggtttggcgcggtggcggccggagagtgaggagagtactgtcgcgagagctcagtggcatctaccgtgacggcctcaccagcgatgaaccagtagtagagagtggtttacggtgactcactgccacggggtaaggcatcgaggcacgtagcctggccggataacggcgaacgccggtgatgccagtgcgactaaccacggcgggacacggcgaccggtgagaacagtggccggagtttatccacacgacgatctttaccaccctgagccatatccggtactttgctgagctcgaatcgcaacggtgatgagaatcccggtgcaagatcaccggcggcgagggggaatgaatttgggatcttttttagtcactgtacaatggaatccctattcagtgcgcctgacagcccaatttgcagggccaagatctcaaatctttacatgacaacattctaatcttcctgtaacaaagttgttgcccgatgatccagctacaaactttctatagcaaccatagctaaacactcactacatcatggtcgaatcccagttcaaagattgcccaatcac

SEQ ID NO: 63733 - DNA, 650 bp, Zea Mays
aaccactgaattgagggggagagagaagagggtcgacgcgtagggggtagcgctgcgggccagggggagggagctgtagccactagcaaggggagggggttgctcaactaaaccccgcagcgctgcaccctaaacttgctaaagtgctagtgggggagctctgtacctccgtaacaaggggcgcaccaaaggatccccttgatttttgtgtaccctaccctaaaactgtagcaactgtagaggttacagtgctccgttaaaccctgcagcgctgcaccctaaacttgctaaagtgctagtggggagcgttgtacctccgtaacaaggggcgcaccaaaggatccccttgatttttgtgtaccttaccctaaaaactgtagcaaatgtagaggttacagtgctccgttaaaccctgcagcgctgcaccctaaacttgctaaagtgctagtgggggagctctgtacctccgtaacaaggggcgcaccaaaggatccctttgattttgtgtacaccggtatttgtcagttcaaaaaaaatagtggatgataaatgtgtatgaaaattgatattttattgtagtagtgagggaggatttaggggtatccctgtagaagggaaaaaaaatagagctagatgatgtgacataaaag

SEQ ID NO: 63734 - DNA, 556 bp, Zea Mays
catttttagtggatgacatagttttgttttcttccttcatttcctcactagctttaacaattatgtcatacttagcagttaagatctcattttcatcttttagcttgtcacatttagctttggactttctaatgatttgagtatattctttaagcaagtcctctaattcatcataagtaggagaagcataatcatcatcactatcactttcacaatcttcaataatgacattttcattttgtaccttccgttcatctttagccatgaggcataggtgtgtagtggatgaatatgatgatggtggtgaagagaaatccccggcgatggcggcgaccttttcatcatcttcttcttcacttgaagaagagccgcttgagtattcaatgtcggtgagccaatcaccatcaatatatgctttcccattcttatttttgtgaaacctcttgtgcttgccttctttcttcttgaagaacttcttttctttcttcttatcatcactttcatcatctttctttcccttgaatttgtttttcttgggcttgttgcattgatgaac

SEQ ID NO: 63735 - DNA, 1124 bp, Zea Mays
gagttcccaagtctctatgcgttgttattctaagggactatgtatcgagtgctcgctacctaactaaattgaccgagtatcgttgctctaccgcctcctcttttcgttgggctaaccctccctcttttatagactaaggagggcggcggatacaagtggcttctcgttgaaagagttactgcaccgtagtagaacaaagcgttctactcttggtagaaacatgtttgtctgtgttcaccctcatcctctgagctcaccggtattcgcccttgtctttaagctcgctcgttggtatctttaagtcggctaggatgacgtgcgtgggcggcgggaacctaggcgtcatcattattcctcttgtgttgcgccgaccctagccttcgtatcctgagcctcaacttcccccatcgtgttgtaggctcggtaggccatgagtgagtcgcagatctatgacttcgtaggtcataagtggggcacttggtctgtgttcacaagtcatgagtggaaggaggaccaaccttctgccgtggctcagcacaaggcatattaatttaatatggtcagacatttatgacgagggcagtcctagaaacgctagtaaatcgagaggaaagcaatggggcttaccctttgctaagggccttgacgaagtacccttagtactatttccggtgatggcatcttgacggggcccacttggccgctacatgccgatgcctcgccccacctcgacggttgcctcacgaaccagggcggcagtactaatccctccccaaaaaatggaccacggggtggattgccgacatgtgggctcttgggtgataaaatgtacccctaagcgtcgtgaaacgacctcgagtgtcgaacgacataggcctcccagctctaggctcgaagttagactccacccaaacccgtcctgacgtagggaaaatgatggcccgtccgagaacaagagtgtcacaacccaaccaagtaatcgagcccacgtacaccaatccttgccttcaaggccttggatggatatgtaagtgaatcagataaattactcggggtgccgagtttcgatgaacttgttcatttccaaggaccattcacccgtagttgcaagtattataataacc

SEQ ID NO: 63736 - DNA, 421 bp, Zea Mays
tggacatcgaacacatcaaaggttcaggacattaacatagcatgggcgcagatcctaagcatgttggggtgtaagattgtggtgtagcataggcacataccttaatgatgctagaggcaaggaccatggcgcatcaaaggtatgattcctaagtgtggcagaggtgcaggctcatagtgtagtaaaaatgggggcctctaacgtgatggagacagtcccaacttcaaacttagttagagtgtgtgccctaagactgggtgtagcatcattctctgaagggtgtagaggtactattgttgccttgatagttgcgtctactaggtagactaagactggtgactctccatatgtttgttcctagtgcatggaagacaccgacttgagatgttgagacataatcattgtcagttggccctcaagc

SEQ ID NO: 63737 - DNA, 611 bp, Zea Mays
cgacgaaggtgattgggaaggaacaatatcataacaactttggatgttactccttcgtatatcgctctgatgcgagacgccctatcccaacatttcgaaaaagtggccaggatcctagatgaggcaatggttctatgttaagaatgatttggttgagagagaggacatgaaggatgtaattcatcatcccatacaatcacactttggcatcagaaggccttcgatcatgaatagtgataaggctcaagcatgtctggtggcctttaacactgtgtgcagctatattggtaccagatacttggtccaagaacacatagccttcaaagtgtggccccttgttaatgaatgggagatgcctaaggaaaccgatgctagttcaagcgaaggtggcctggtttatctgaaatatacctaccgctatagaagtcagtttggcgagctagatgatgaatggcttgaagccattgaggtgactagtgaggagttgttgggggcttatacgaaggctaaagatgaatccatgaatattgcctttggtgcccacagaaagagaaggttgaacaaaatatttgatgttattggatttgtctatcccgagtactgctttcccg

SEQ ID NO: 63738 - DNA, 622 bp, Zea Mays
agaggattgaggcgcttcaggtggtatcagagttgttaggttggccacaggacgtaacccttagcctgatcaaaagtttttgagtcaaaactattttcttaaaaaaattcttgctctcatcccttcattttaaaaatgtttcccccctttccttctctcagaagtcagatggaggttcagtgccaaactagcttttgctagaatgaagagggtttccccaagttgctgagagcatgcgcagttcgcctcggaatcaggagccagccagagtatgatggtcgtgaattcatcgagcatggcatagagaagtgtgtcgtgactatatacattggatccagtccgcactatgtggaatggggtgtcactgctgctgggcacagattcaaagacccctgtcaagtcgtcgcctgcaaggcattgaggacactgtgtcagatctatgaagaagaagtggccgacaccccgctcagattctttccgccctttcagagagaccgtcccatttggatggccaggatgcgtgcattggaaggtcaacagctgcttgaggacgatcccacagtcacgtacctcactgcatacctgctcaccctggatgcacaatatgatttcttggctcggc

SEQ ID NO: 63739 - DNA, 552 bp, Zea Mays
cgacaacttgtttgacactcggtaaagagccagattctgatagtgaaccattgcttgctgagtcgtctcaatccactttcactatcaaaactaagcaaaatgggatgagattgaatgaacatgatggacgactatatatcagtcagttatcatataccaattgctcatcaccttggcaaaatatacagagcggagctttttgcttggctgcgtaactccgtttcacatttaatctatagatagatagatggattgaccagtatggagtgcagcggcgtttggatttcagacacacaaatatcgagtccccacaaacgactccggctgctgaatggctgtgtcactgtgtgacatagctgacacacatcccctaacacggcccagaagcgaacctgacctcggcctgtttatattcttttatacaagcaaaaagcccaatacgttagcccgcccatggtatatctatagtatgttaacttttttatatataagatgatgtgaacctcactgacactgagccatgcatgagtggtaagatgtgtgacttgcaat

SEQ ID NO: 63740 - DNA, 421 bp, Zea Mays
tatttggtcaatatagatctctgcatatttctctgccttgtgggtggtatggactggtaagaaatgagctgtcttggttaacctatccacaatgacccaaatagaatcatggtgccgcgaggtgttgtgcaaacccacgataaaatccatgcaaatatcctcccatttccaagatggtatggggagaggctgcaaggtacctactacctttaaatgactagctttgattctttggcaagagtcgcactcagatacatacttagcaatttctcttttcatcctggtccaccaatacaaggacctgaggtcatgatacatcttgttactgccggggtgcatggaaaatttggaaagatgagcttcatccaatattttcttcctgcgttctggatttttaggaacaaccaatcggtcctcaaac

SEQ ID NO: 63741 - DNA, 341 bp, Zea Mays
gtagtatacttcataagctacaaatggtagtaagaaagtaaccccaaaaagaattcagaaaagccccaaaaatttcacccaaggttgagcacaagagcaaattcagaatttgcctaagtctaaaaactaacccttgaacaagaatccaacatgttcaccttaatccaaaattcaaaacacttcgacccaattgacaaagtggcgccaaattaaccctagatagccctggaaagaggtgacacctaccctagggcgtttgacacgacttggcaccatttttgtctcggtttggacatgtctgacacagccgacttcccacccccatatctctctaacccgac

SEQ ID NO: 63742 - DNA, 574 bp, Zea Mays
tcttgattgtgacttcattcagagctcgataatcgatgcacatccttctagtgccatccttcttctccatgaataggacaggggcggcccaaggtgaggtgcttggtctgatgtaacctttctctgacagctcatcgatctgcttcttgagttaaactaactctggtccagatactctgtaggctctcttaaagatgggggcggttctaggaagaagctctatggcaaactcaacttttcgctccggtggcatacctggtaagtccttcaggaacacgtctagaaattctgacaccactttgataatctcgagtggatctgcttcactgctatcaatagccatctgataacaactccctttccttcgctcaggcgggactaactcagtcatcacttcctctcctagtggggacatcaacttaattgtcctcttatcacaactgatgactgcccgatacttatctagccagtttatccctggataacatctattccctgagtactcattactatgaggttagcgggaaactctatcccccttatttccacacttacattcaagcaaacactatca

SEQ ID NO: 63743 - DNA, 354 bp, Zea Mays
cggcccttctgctcctgctactaaggaagtgtcagtggaactttttactggagctgatcccaatgggtgtgaccttgctgatgctgatcccaatgggtgcaatccagccgacgctgaccccaatgggtgtgaccttgatgatgctgatcccaatgggtgcaatccgaccgacgctaaccccaatgggtgtgttgttcgtattgttgacgaggatgaggaagaggaggaggaaatccccttaattcggaaaagcaattggcgctacctggtcagtggggggagtagtgatattccttctccagccttgtctgcactcgttggtctgcaagagttgtccatagcaaattttgatta

SEQ ID NO: 63744 - DNA, 412 bp, Zea Mays
gccgcgcgctcacccgcgattgtcgaggagttcggctggccgagttctttcttccccctgctcggactttcccccaccttagcccttaaatcgtgcgacctgatcctctccgtggttcttgcgggaatcctgatttgggctgctcacttgaacagatgcggcgaaatccacggcgagctgcccggccaaacctttccccgtcctcgggtgccctgcgcctatataaatcggcgaccttactcatcccgagccctgaaaccaccaagcagcgcttcggcaatcgacacggagacccagcgctacccccctgctgtagatgctgccaccgccgttctcccggaatggacatcacgggatcattgatgggtgtctctggtgattcttgatggcgcaagcaggccaccctcgcacc

SEQ ID NO: 63745 - DNA, 954 bp, Zea Mays
atagggactctcggacaatccgcgcttaagattgaaagggacagcgaacgcaaagaatgtttttcaaaacaaggggtagaaagtgaaagcgagtgaggcaagtggagaggaaatgctgctggcgacgtcgggtaacattaaaagcccactcacggacggtgcgcgcaagacaactggacggtctgcggcctgattgatgcagactgtctgcttggccaactggatagtccaacagtcgaagcgccggacagtccgctgtcaggggcggacggtccgcgggctgacagtgttttccatatcttgtatagtttttgacaatgagtttcaacaaagattcctaaaaaattattaatcctgtggtttgaataaatgagtttatatatagtaagcttgagagtgtagcttttgcacatatagaattatcctcatgtaataaaagtaagtgatcaaaagtagaagataaatatcatcaagagtaatcaaaccaagttaaacacgtatgtgctcatgttcaaacaacattcgagagatcaattatattcatttcactccgcaatttgcaaaaccttgcttcatctagcggctttgtaaatatgtccgctagttgatcatttgtgccgatagaataaacagagatatctcctttgtcaacatgatctcttaagaaatgatgcctaatatcattgtgtttagttcttgggtgttgaacaagatttgtagccaattttacgacactttcattgtcacacaagagaggaatatttttgaatgaaatcccataatccaataaggtttgtttcatccataataattgagtgcaacaattaccggccgatatatattccgcctcggcggtagagagagcaaccaagttttgtttcttggatgaccatgaaacaagagaccttccaagaaattgacaacatcctgaagtgtttttcctatcaactttac

SEQ ID NO: 63746 - DNA, 490 bp, Zea Mays
ggattttgacacagaaccacgcgaccacgcaccacagcgaatgttgtccttcggcgagcgattggtcggtcgaggcatgtcgcccgacactggttagttcatgaatgccttccctggatcctagcgaactccatagtgcgatcatcaagggctcgatgacggcatacgcgcaagacgccgacagcggctcccattggcattcttgacgacgacgctctctcctactcctggcgatatagctcactctccctcttggtaatgagactcaggggtataggcactgacaccctggggaaactttggccggtgtatatgcgcagaggagtttggattatggaggctgacattgggatcgacggtggcgaatactttccccttccttgtcgacgacggactacgacgttagggcagaggatgtgggcgcacacgaatgaggaaagggttatgatggtcgagcttttatatcccgaggagcagcggtccgaccggc

SEQ ID NO: 63747 - DNA, 527 bp, Zea Mays
tggtggggaaattatgtggccattcagcctgccagacatcaggtcacatgtgacgaatttaaattggcgtttcatgaacactacattccagaaggagtgctgcacatgaagcaggaggaattcatgagactcaagcaaggatatctcaataaattcaatcatttgtcccagtatgcaattgaccagttcaatactgacctgaaaaagaggaattgttttatgagaggcctcaactaccggcttcaaagaaagatggccacctgcgttgatctctcctacagcagggctgtcagcacaacactggcagttgaagctaagcacacaggcccaggaaagtcgaagggcttcggaggtgataggcccaatcaggggtctgaaaagtgacaaaggttggtaatccggcctttcaatcaaaaccgttcttcacctcgtccaccctcctaccccttcaaacatcctgtcttcatccgccctgctactgcccccacttaaaccaatcagccgagtgcccctggtactcgtttccc

SEQ ID NO: 63748 - DNA, 1370 bp, Zea Mays
gtttcgcggggcatagaggtcgccctaagatgagtgattgcaaacatgtttgcgttggatcgagtaggcgtgagtgtactgtgccaatttaagtcattgccaacttaaatcgactgctctgttggtagggtataatagtcaccctgggttacgtaagcgtgagcatgtcgcactgccttaagccattgccgacttaagccaattgctccgttagtagggtatagtggtcaccccgagttaagtaagcgtgagcatgtcgcaccgtcttaagccattgccgactcaagccgattgctccgttagtagggtatagtggtcaccccgagttaagtaagcatgagcatgtcgcaccgccttaagtcactgacgacttaagccgattgctccgttagtagggtatagtggtcaccctgagttaagtaagcgtgagcatgtcgcaccgccttaagtcactgccgacttaagctgattgctccattagtagggtatagtggtcaccccgagttaagtaagcgtgagcatgtcgcaccgccttaagccattgctgacttaagccgattgctccgttggtagggtatagtggtcaccccaagttaagtaagcgtgcaggttgacagcaaacaatttgagtgcctttgaagtctttttattgattatatatttcccactttacagaatacattgtcgtcccaatagcttttgagatatggctaggggtaaaacttcttgagatgttctatgttccatgagttcccaatttccgtgccatccatttgagtgagacgatatgatcaaggccgagtgacttctgctactatgaacgggccttcccatagtggcgacaatttgtgccgtccctcccccgttagaattcggcggaggacgagatctcccactgcaaaggatcgatgtcgtatggccttgtcatgatagcgcctcagagtttgctgatatcgggctgactgaatcaccgtattcaatcgttcttcttctagtacatcaacatcctccagcctagtagtctcagcttctgctatgttttcaaagattaaccttggtgccccaaatttgagatcagcgggtagcactgcctccgaaccatagaccataaagaaaggtgtgtttccatgcagagctcgactaggttgagttctcaggctccaaacaacatatgacaactctctgatccactttcctgcgaacttttcattcttgttgaagactttctttctgagcgcctccaatatcatcccgttggctctttctacctgcccgttggctcttgggtgcgccaccgaggcatatttgatctgaatgctcttttgctcgcagaaatcgaagaactctgaacttgtgaagttggatcccag

SEQ ID NO: 63749 - DNA, 1004 bp, Zea Mays
gttaaggtggagcgcacaggcctcacggttgtcgaggaatttctcctcaatagcaacccaggcttggcgagcaatgccaccacgctcacggatgatatcctatagctcgatgatgaccgtgtcgaggatccaagataggacaacactgtccattcagtgccaagataggacagtgggacacacgatgtcggtgaggacatgccgacgtggttgtcgagagcgtaacactgcatgtgagaaggacaaggtcatgctagagggcgtaagtagagggacaaaaaccaagaactgaaagttttgaacaccagccgtcttagcatggaggttggcgatgacagtagcctcatatgccagaggggtcttagccttctggtacttgggggagggggtcggtggcggtaggaccttcgaggtggtgctcagcattcgcaagctggcgagagagtgtatcggccccaatgcgctcttgctcttagacgagagcagccagcagctcacacttgggcagtagcaactgcagatttggtggctgtgagtgccgtgacgagtgtggattgggttgtagctacctcatggggaggagggaggtctgcagtgctgaaactggagggtcgggagcaaggatggcgctggaggggtggggaggacccatgggcgtgcctgcgccaccaattgcaccaaattcgactgggacgtagcctaggggtgagggatcaggttggctctgacaatagtggtcagggcagggccgaatctgaggtgtcaagcgcctaacacgcccacgcccaggtgtgttgcgctcaccccgacggggtgtgggacaatgacaaccgggggcgacggcggctgcgaggcgtcaaacagtggcatattcgtgacgccgacgaacaaagggatggtgtcggcgacttcagcccacggataacagggagaggtgagatgagagggggaggtctccctagtggaggagacgggcacaccagccatgggagggctaggggcga

SEQ ID NO: 63750 - DNA, 603 bp, Zea Mays
gtagttagctgtttgaggagacatacagatcgctaaatatcacggactgctatttataacacttagtccacttccgtttcagatcatgatgactaacttaacccagactccattatttttcttacaaggttcactgcaactaagaagatttgaatggctacaacttgaatatgttgtatctaatacatgatatttataacatatcaagtctttgtggcagagcgaacaggagttacggcggagcagcttcaaggtgtcagggactgcagccgatgggttgcggctgcgtgtaagcatcatggacaacatccacaaggcgagccgcacaggagcaccctctagaagaagcgctactccgaggcagtgccgcatgcacaatcgcactagccgacacttgagaagacgttggtccagctttggtatttttttcttgttttccttttcattgtatggagatatgatcgtttcgttccttgttttttttgtctgtataaatcttgcgggtgtagttggcgaacctgatgagttggtgatagatttatacgctgttcacttcagattaaagccaactgttcagactgttgcagatgcaatacaaataca

SEQ ID NO: 63751 - DNA, 595 bp, Zea Mays
gaagtatcggtggaactctttactggagctgatcccaatgggtgtggccctgctgatgctgatcccaatgggtgtgaccctgccagagttgatcccaatgggtgtggccctgctgatgctgatcccaatgggtgtgaccctaccagagttgatcccaatgggtgtgaccctgtgccatttattgtccgtattgttgacgaggacgaagaagaagaagaaggcccactaattcagaagaatagtcgacgttacagagtaagtggggggagtagcgatattccttctctagtcctgtttgctcttgttggtctgcaagaattatccatagcaaattttgatcaggctctcgaggatgttgttcctgaagatctgctgtccgagccagctgatggtgatatgatggacgtctgctctgacattccagatgtgggattagaggtatcccgggcagcgtctcgtgcctcgtcgaccttggaaggcggtcttcagagcctagaggttggtcgaagttgttcaattcccatgggggtgactgagagtccttcagccttagaggtggctattgtggagaacccagtcctcaaggatggtgcta

SEQ ID NO: 63752 - DNA, 677 bp, Zea Mays
acaccatggcacgtgatgaggatgcggtggatagcggtaacaaggacaccgacaacgactttacctctaaggtatctcttttcatcgatgatcttgccgcttaggtagaggagctaaatgctgctttggctattcagaacaagttgcttaggcttgctactcatgagagaaaataattcaagagaaagtatgagagcacgcttacggagcttgagtctgctagagcttctgtcgtggtgttcgatgagactgaatgtgatgagtagtgagctatagacatgttgaacatcaccacattacagaccaaatatgccaccctgctagatgatcgcgacaagttaacatctaggtataccttgatgggtgcatgtactcagtgagtgtacatgtagcgcttgtcctcgcctgcaaactgagctagcagagaaaaatgctaggataacctcatttgagaatgctaactcaatgagtgtacatgtacctacgcaatgtgcactctatgaggctttgcattgcactcttgagtcctattaacatgacaagactaggatgatggagaaaaacacataccttcaatcagtcttgagttaggtgtctaacagtgatccctagttgggcatgatggtaagtcagttcaagaggggaattggtggaccagggttaggctttgctgctag

SEQ ID NO: 63753 - DNA, 575 bp, Zea Mays
aggggtctattgtttcagctcggctacacaaggagagatcaatccagaggactctaaattctcaaaacttgtaggatctatctccagtgatgtagctacaacatccactgcagggaaagaagtgtgtggctctaggggtggtgattggtcctcacaaccatttttccattattggtggaaaaacaaatccattggcctcttctgccactcctgttataggcagcggatgacacttctttcattgtgactatccttggtccctgcatctatccagatgtctggagtttgatcaagattaagaactggaactggtggcagcaattgtgtctcaatattatcagacaccatccctagtgaataagttgtatgttgtactacacaagatagcaaaaggggaggttctggtggctatgactaccttggtttactctccaatggttgtgccaggtcaggtgtggcatccatgtctaaattcgttgcatctaatgcaagcgatggatgaggagcttcctctaatgtcacatatatggcctcattatcggctgaattttgcaatacatgtgggtttgcagtct

SEQ ID NO: 63754 - DNA, 465 bp, Zea Mays
cggtggaggaccccattacaaaagtgacaccagtggcgatattttggaacacatggaaagtgatgtttatcgtgatatgttgcaatgcatccaacgaacaaaatagattaaacgtcattagttatgctaaaagctaaaaattctaatagaagatcaattgaacttacttgaaacatggtctgcttctttgctatgtagttggaaaaatagtcgtcatgttgttggtcatagtcctaatgctaccaatcatattcgtgatattgcgcatctcctgtccatcacatagcctcattgcttcttgaatatgaagcaactcctcttgtgcgttgcttcatcgagaactagctccacaactctatgatgagggcactcccttctaagctctgacatgcttggagttattcactctatttgacatgtagtacctacaacacaagcaatttagaatatcaatttcgtacttgc

SEQ ID NO: 63755 - DNA, 429 bp, Zea Mays
tttggcaagcatccaggtaatgaactccggtgaaagtgacttggaaggaacgttggtttggatagctttggctttcccccaggtagactgccatagagcatctcattattccgccctcgatatgctccgtccagacgtattccggcttcttacggattcccatgcggagcgcacagcttcgcaagaggcgtgggaacccttccacttccgagcagtaggatgacttaatggccagagaggcttccatctggaataggaaaagaagggtcttgttaaaaccggggaagggaagagaaaacttttcttgaggtaaggggtattttctttctaaggtaagtcttagggtcagggctgcgacctacggccagtcctatgggctctgataccacctgaagcgtcccgatcctttgggactcaaatgtgaaacaa

SEQ ID NO: 63756 - DNA, 1432 bp, Zea Mays
gaataattgtaattaagaatgagtaaataaaagaaataagacatgaacaacttgtgcaccatgctggagtttattggattgtgtatttataaacaatggtaatatcgataaaaatataattaagttaatattgtaatttgagacctaatttgcaattttagaaattggagaagtaaaggaaaactactatacaaaataaaacaaatatgggataaataaaaccttgctatgatggtttgaccaaactgcataattaaaataggttcaaattcccaaataagtttgaatccaaatttggatttaaaagagttaaggataaaagaaaacaggaaataaaataaaaaaagggaatacatggcaactgggccgcagaccacctattcggcccaccagaggaaatacatcgcgcagcccactccgcgctcaccggccacggtcactgaccggcgggacccgaatcccaggtaaaaaaaaactccctgtgcagtgccatctcccattgactcgtggggcccgcttgtcatctctttccccaccccgtccaacagaacgcgcgcgcccgggtcccgttggcgagctcagcacgttatcctggatccacctccctctcgctgactgcgagcccgaatgacagaccatcttcctcctcgtatcgttgcgcctgatgccgatgtccgcgcaccgcaacaacccgccgcgtagatctcgggccgacctactggtcaccgcctcctcctcgctcggactcggggaaaataaatacccacatgttctcccctgctccctcaatcctcgaagccgaatgattcctgcggcagggctccagcgtcgggggaaaccaccacgccatagctgagcgccaccccgtagccgcccaggtcaccaagagaggcgaggttgggatacaaagagaaggatagcgatgtttgccgtcgtcaatgtccaggacagtctgatcacggtccgtgagcgtcgcgagatggattgaaacgtgagcgtgtacatggatgggctcaggatccttcggggcacaggggggcggcgtgcaccagaaccttacgccatggcagagcctccacccatcggccccaggtctggacactgcataatacaaggtaagcgagccatcgacaaatctgcctccctcgcctctacaaactagacttgctcaaaaatggaatcccctcgatgtttcgtccggtcccctgctcgctgctgtggcaccgccgtggcactgcgaaacgccgtagtcagcccagtcggagtatccatcgccggctggtggtcttcctgggaggtcgcctagtcatactcatggttttgtggtgatgggatcgagctttgggcaggagggggttcggttctgcgctgctccggtggcctcaccggcgcttgggcggagaatcgtgcgcacgccgacgagctcgccgtc

SEQ ID NO: 63757 - DNA, 840 bp, Zea Mays
cttatctgagtctttataaatgaggttgaagtcgccagccaacatccacggtccaagacattcaaccctaatatccctgatttcttgtaggaacataatcttctcattgtctccttgaggaccataaacacaggtcagccaccattcattccccctttcattacagaactgaactgatatactatgattatctagtcttttttgaccagtgaaacccaaatgctgcctccaagccactagaatgcccccaggtgccccaacagaaggaaggtaaatgaagtcactaaagttcgtcccaagcatggaaagaatcaatcgacttgaaataacttgcattttggtttcctgcaaatagaccacctctacccttgaggaatcaacaagttctctcacggagtcttggcgcacataataatttagacctctaacattccatacaattttttttgaaggatccattaaatacattaaaaaaacaacaagccaccaaaatatcagaccttaacagaacaccagatcaggtggagtgctccagccaaacaaggctgaaagggcttcaatatgacattgagacagaggatgagtgaagagttttttatacccttcgattgcttcttggctaattcctttagattctgtgatgatttgtaaagtcctcatagctctctttgttgatctgccccccaggtcctgcatctgaaattccaccccaataccagccacccgacgacttcttctcggagcagaaacaaatggggagggaggtggctgatgtcgttgtgtgatgttgtctggaaccggcaagatacctaaaggccttctgcaaatgttgttgacaaa

SEQ ID NO: 63758 - DNA, 1475 bp, Zea Mays
gagacctgcgtcgtgagtatttttcgtgctatctagctacttgtactgtgcatgccattttaaccttctttgctttgtcgagttcgattaacttttgagcttcggcatttaagcaaccactgtcttaatggctaaggagaagaagattattgatcctgcactggccgggttttatgaagctatggagaagaccaatatggagaaaatcaccaatgagatgatggctaggttatctgaaaattccagcgatagtgaaagttttgacatagaaagtggaaatgaagaagtcaaagaccggtcatggaggccaagccatgttctttttggaaagtcatctattaagcaagggcagatcgaagcaattaaaggcagatatttcgtgatatttctattataagggccggaggggagagcatcggtcctcttcctgaggccaatgaggtggtggctttcagaagcttcataaaagttgggcttcatttcccactgcataagatgtttgtcaaagttttcaaaattttcgaaatatatcttcaccagcttatccccgaggcttttattaaagtaggggttttcatatgggccatgaggagctaagggttggaaccagatgacaggtgcttctgtaatattcacgaattatcctattagacgagagcaactgggaaagagcaatatcataataactttaggctgttatagcttcgtgcccccactctaggactagctaccatgtgcctacatttcggaagaattggccgagttcttggatgcaggagtggttttatgtgaaaaacgatctagaccagagggaggatataaggggcatcattcaacgtcctatatggtctcgcttcggcatcagaagaccttcagtcgcactcggaaatgatgtacaagcgtgccagacggcattcaatactatatgcacctacatcggcacatgggatttgattcaagagcatattgcttacagagtatggccccttgcgagtggatgggaaatgccaaaggaagctgccgctggctccagccaaagtggcctgatctatctgaagtacacattttgatttagggatcggtttgatgaactgaatgatgattggttggatgttatagaagcaacaagtgatgaactacttggagcctactcgaggaccgaagacgaagctatgacagtggccttcggcgctcgagggaaaaagagactggatagggtttttgatattatcgggtttatctaccctgactattgttttcctgatcagaaacaaaggggaaaagtaaaactgctgcttcggcgtcttctagtgcactgaagatgaagaaggtgaatgtcttgacccatagaccgcgacgtattgagacggccgatgtgctagagcttatcgaacgtgcaggggttgctcctgccacagatcaggtcatgttgtgccagtcgagactagtacaaatctggctgaagagtcgaaatt

SEQ ID NO: 63759 - DNA, 548 bp, Zea Mays
gagcatgaacaaactagtgaagagctgtcatgtagatgcaagcaccccactgcatgtatttgcaaaacaaatgatgaaattgttacatagcaggaagatgaaggagtcaaaggaagcattggtgtgcaaggtatggaaaaaataaatactttaatatacggcgttgttgaatattcattagatttaattattgtagggaaataaagcaaccgataccttctatatgtttgagatcagagttgcaagggcatacactagagctgttatgaatagatttgaggaggcaatgaaatatgccacggcatacaaaaatatcccaagatcgagagggtggaccaaatgattgggtggtgcaacacacgaataggtcatgtagaattgtgtggggacaacaccagttcaaagttgtagcaaacgtggacgacaataagtatacttgcgagtgcaagaattgggaacctacatgttagttttctactcctaataatattattgttgtacatgcaggatgggtaacctgataaaacattacataatgatatgtgcag

SEQ ID NO: 63760 - DNA, 1343 bp, Zea Mays
tggacaaaaagggttctgaatgatatcaggggtgagaaggatgttgttgatgtagactggcctgggaagaactgagccaccagctgaggtgcggggaaggaggggtagagttggatgatggcctcgatgtgctcaaacttcttgtttaggcctcagagaatgttgaagatgagtatctggtagttgatggaggcgttcaagttagccatggagttgtccatccccttcatcttgcagtagtagtcgttgacgaggaggtcaccgtaaatggtgcgaaaggtagcgttgagctagaaggtgtgtctcacaagtcccgagaaattgattatcgagagcgagtcagagctggcacgccatgtcgttgcgctccttggctatccgacatagctgggagatggtgtcggagatcctgcaaatgatgatgttgttaatccgattccagcatgaattggtgtctcaccaagggtcaggcaagatgtggtcgacgagggcgtattgcttgagagaaagcaacacctgatcacaacaacaaacataattgttggaggacacaaggacgaccatcactgacagtcaaacatccggagcaatggttgtttgtgtttggacatggagggtggcaatgacagcaacctcgtaagccgcaacaggatcgccccttgggggtgccctaaggtgggggggtgacgatcgtggggttatgtagatgcaagcactgtcgagcggcagcggccttgtgcatgagggtagtggcagaggtgttctcctattcaaggagaagggtggttgcctagtcacgagcgtgtgtgtttgtagcctccttgttcacaatttgagccgcgatgagcatgtcatcaatcttcttgaggacggtcgtggccttagcgtgggcaccctccttgatatttgatgaagtccccaccatgggtgctggagggagatgtgtgtgttgctacaacgacgcaacacaagggctgcaatagagggtcgacaaccaagggaggagcggaagcgatattagacctgtgataccatgttagaggatgtattgtcgtggaattagattgtattgcattgaggtttgtgggttgattatttacattgcataggactaacgccctatgttagtaggcaatgcaataaattcatatatatacacatatgcagcgttgggcgagcttagcccaactatggctataaggcccaatagggttgtgcgactcattctaacaatttgggtagccatgacctttatagcactaagtttccttacgaacaaatccaacttatatatgataattgtcttccccctcacaagtagatattgtacattttaatccaac

SEQ ID NO: 63761 - DNA, 386 bp, Zea Mays
tcatatactaagaaaatagactctagttgggctacagtctttacatgagcacaaaccagccttctctaaaattgccacaacccctcgtgcaccggcgaaggcacagaagtccgcacaatcgctgagtatttcttcaaaagcttcggcctcttcgttgatccactcgataactccttcgagatcaccacagataaatttttggtccgaagagtatgctcccacctttgcaaagctatctttcagtttcttcgcgcattctatggatgcttcatagcatctttctttggagtctcgaagttcttcaacattcttctccaccctagccctttccatttcacttatttcttgcttagcctttgtaacttcaaaattttcattcatatctg

SEQ ID NO: 63762 - DNA, 402 bp, Zea Mays
ggttaatcatcaccatatgcgaggtcctgtgagagcgcatcgatgaggagagagagatagagcgccaccgagaccgcgatgatcttcttctgtgctgacggctcggactctgctggggcagaaatctagccagtcgacctcccaatcctggctctgctccagtataaagacgaactccccaatcgctcccatcgcggggcggatctcggcgacctcctgtaccgcgcggaggaaggtttggcctggcatcaccgcgcgccgtcatcgaactactcatcccctcaacgacgccatcggccacatacactccatcgacggtgagacttctctctgcgcaccgttgtattttcgatgtttgcgcgcggaccgttgatccgatcaccgtcggggagggtggtctgc

SEQ ID NO: 63763 - DNA, 685 bp, Zea Mays
attagggttccaaacgttgggttaaattttgggatgttacataacttcaccgaagacgtgctacacagagaaaagattgatgtgcacttggacgtaggttccatacccaaagtgatggtgtagcagagccagtccccagtgcggtgcggttggcggcggcagagaaagtacgacgaggaatcgtcgcctcctagagagcacaacatgcacgctggagtttcgatgggcatccacacacactggcgaacgatcatgaccaatccgaggactctaaacgacgaccgaggcggagaacgtcaatggcggtaggtcctttctccctcggtatggtggctttggagatgtgtgctcgaggaggtaaaaagggttggtacttatcagcacaagcggacacatagcttaatcagttgtagccgccacgaaatccacattcccataagcaggttcggtggagatgaggtggggcgtggccgaaatcccaagcggatccatcggattcaggtgcaacaaatcgagcaggaagacggttctgttcggtgggccccacgggacaatgcgcgcgtgcggtgggggagtgaggctggcggcgtgggcccacatggcggcgagttgaggtgtgtgcgcgggcggagtctggcggctagggtttggcgcagtggaagtgctggtggagagaggattgggc

SEQ ID NO: 63764 - DNA, 433 bp, Zea Mays
aagattttttgtgactggcttaaacatagagcttgtccagcttctatagtaagagtatcagtcaggtcaacatttattaatatgttctcttttaatgactctgcacatagctcaccattgtcgcactagccataagagtttaacatgtgcatagcctcctgtttcaattacgatgaccatataacttcatttccgatgcacagttaccatcaactcagagacaaggtccctccattcagttttagcgagcacgtttatttgggaacaaagacaaaaaaaaacttgctaatctgactaaagtgacccaagtaactacacattactactgtgtacatacatgaacacaacaaagagtcattcacactggttgcatgcataaatgctcaccgtagctattactactctgttgctttggtacaaacaaattgagttg

SEQ ID NO: 63765 - DNA, 360 bp, Zea Mays
ttttgtctctcttggtctctttggtgcattaggccataagtgatagacctcctagcatacagtcggtgcctcaaccatgcatccaaccaggctgacataactgctacaaggaccacgacctttgcaattagccgccggtgtgcaatagcaggatccattgctagagtgataaaatagaaaaggagattagaggtctaagtttagcttagatgtactgtgctagttgctcaaaaggaatttcatagaacattgatctatagctcagaggcacactagcatcatagaacattgatctatagctcagaggcacattagcatcatagaacattgatctatagctcagaaaatatatgatcaagc

SEQ ID NO: 63766 - DNA, 298 bp, Zea Mays
gtttcgctcgggtagttggtgaccgtagatgtgagatcctgtggtaggaagcaattctgggtttcattaaacgctgaccattagatcgggatcgaatgggcctagtttcgtatcgattcagaaagccttcgatctaatcgtggccatagctcttggattggacgaccaggatagatcgataccccttcgtgggtctaatttgcacttgagcccctcagtttatgtcaaaacaacccgcgatccacatataggagattctgagtctagagatttattacaccagggcccctgacttttc

SEQ ID NO: 63767 - DNA, 413 bp, Zea Mays
ggttgggcacgtcgaggcccctggaaagcgacgaccaacggtccccgggggagcgggagggcggacaagcaggccgacgcggcgtgggataggtaagcatagtggaggaacgattgcttgacagggggagcgggacttgggatccaggctgcgggcgccgcgccgccgccgcttagggttttggatccgaataggggaggcaaaacaggaatcgcgagcaggtgtgcgtcggggaagagggcgcacacatcggacgacagagggactttatggcgtattggacggtccagatcgctggaaggcagaacatgtcaggggcagcctaccccttagagtcttaataggtagtatagatattgcttttattcatgtgctgcgtagtgggagcaatgaaaaatagatgaaacattttg

SEQ ID NO: 63768 - DNA, 1184 bp, Zea Mays
tttgataattgtttcttacaaaaacgaaaactacatacaaagaccctaaactctcaaatatacaaacttaagtcttcttttaagactttattggcaccttcgttcaatagtctgttgacggcttcatcaacgtacgacctcgttagcaattctaattatgtcgagttccccttttagagatggatcagctttaggatcatatggctctggagggggaaaaagctcagctgcatcaaaatacaagtatctgttagtatcgaagctacaataatttacgaagccaagctgtaatggatatacctataagcttggcgtgttcaacagtttcttcagctctcttagcctcttctaaggcgtcgtgagactctttctcatttcttctaatagcttcgttagctatctctcggccacccttcagccatacttcggaatagaactttctgcttaatgcagtagcatcggccgaagggtttttaatgtcatcagctgaaagcgagaatcctggctgaaccacaaccttagcatgttcgcagtcgactttttctaggaccaacacggcccctcgaacaccagcgaaggaacaaaaatctcctctgtcgctgagaatttcttcgaaagcttcggtttcgccgttaatccaacggatagccccatcaggatcaccgtggatgaaattccgctctgtggaaaatgtgccaactttagaaaagctattcttcaaattcttagcacattttgtaccaacattatatcactctttcttatcttgacgaagctcttcaacatttttatgtacccttgagcgttcaatatcagatatttcacgttttgttagctctacattgaagttttcagttgcttcgacaagtttattttctaattcttgcacttcagctttatgcacttatgcttgagcggacagtttagcttcactggattttagtctttcaaccaaagagagtaaaatcttatcctttgcaagaggttcgtttctcaaagttataacctccgatcgaaggtttccaattgtcgtctgatagctttcatcctctgcatctttttgagcttttaaagccttgctaagaattagtccctgccaaacaaagaatgaacagtaacaataagaattacaacaaaaaatagttcactgaaacaaaaattaccaaatatgaaaccaagttgta

SEQ ID NO: 63769 - DNA, 487 bp, Zea Mays
ggcgtcaaatctcagaaagctcggggactaacatagaaatattcccaagactcagattactgtcaccgaggacggcaggttccattctctaaaatcataaggtctcttttgtaaaacgtacccgcgaagggatacgcgctgatcctggccgcacgattacggttctgttgcccagattagatccgagccccggtaggcacacgagccacaggatctatgatctacggctcaaaatcgatcaccgaaccggtatgcagatccgaccacacgatctccatccatccgcccaggttacatctcgcacgaatagtactcacattcaatcctggcccctcatttctatatcgatggctcactggttctcttccccagccgagacgcacacccggcggcgccccgattatagcgggtggacctcgccggaggattcctcttcgccacgctagtggataatccgcacccacatctacgtaaaaccaaattcact

SEQ ID NO: 63770 - DNA, 475 bp, Zea Mays
cgccgaagaaggcaacagtgccaggggctgcccttgcaccgctggacatcaaccaagaggggcgctctctaaaagaagcccgaaatcagaaaaggaaggccaccagcccaacaccacaggaggaggagctcaaccaagagatcagagacctagaggtcatccaccaacaagtacagagaaagagagagaaaatgcttcagctagctgaacttcagaagaagattgacgaattaagctaccgaagaaatgcgccatatcacgcaagatgagcaaggacaaaggccacaacagagagagcttcggcaagagagtccaagctatgatgatgtatggtatgatgatttccaccatggtaactttgctttgttgatgcttctcctctagcaatagaattgcacgctaccccatggccaccatcctacaaaccaccgcaacttcccatgtatgatgggcattctgatatgaagcagttcct

SEQ ID NO: 63771 - DNA, 550 bp, Zea Mays
caataaaccatgaataccaattttcaaaatctaaaacttgcctaaaaactgctacagatcggcaggactagaccgctagacctaggacgaaaggccttaggcatagagggagaaataggtggctaattaattaggccccgtgggccagtacttatatttttaaggatgccctaaaaagcaccctattttcttttgagaggcaacgtcacttccagcatgcatgcattataaaacacaaagaggaattaaaattttgagctaacccactttctttaaaaccatccgggctctctttttctttttccttccaccataatctttacctttgattccctttcgcagatgaattcacccacccccgccagtggaggagactcttgtttcagttctgacttcctttctcgcgatggctttccttccatcttgtgggaagtgcttaactctgccggttaccctacgccccctttgtacatggtgcagttgtatgaggagcattgggtacctcgttgtcgggtctggctgactttggaggctcatccccttcagccgg

SEQ ID NO: 63772 - DNA, 689 bp, Zea Mays
tggtaatcggctgagttatggcattagctgaatattggctgcgccctggcaacacgatgcagtatttgtgccgttcgaacttggctgcgtcatgtgattgctatgtcgcgctctcgcttagtcggatcgctcccgttgagtcggaccgccatcgccgagtcacacatttttcgagggccctgaaggcattgcatgtgtgtcgcaactattgagtcacaattgcgcttgttgcgtctgttgtgtttgttgcgcgtacttatcgtgtaccccaattaccgagtcataattgtgtctgttgcgcttattacgaaggcttgttgtgttgttgtagccctgatggccgcacacgcgttgacaccagacgctagagcttgtactcgcgtggattgtggtggattgttcaggcccctaaagtcacattatgcgcaatctccataaacaattttgtttggtcctatattttattttactgtgttgtgtggcattatatatttatatatcgccaagtggctgtaacaactatatcaagctctatgatgcttggaaatctgggaaattaaattgaaatacaatgaaatacagataagttaattctctgctctcacctcatgcataaatgttttacccgaagtaaatcgaaaatataatgcatgaaatcctttatggcatataagacatcacaaattggg

SEQ ID NO: 63773 - DNA, 871 bp, Zea Mays
ctttggtgcaagtgatagggattagacggtagaccactttgacttcatgaatgggacttggacacccatgtgcttcaccctcctctggaatatgcatttggatggaggtaccgtgttgttgattgtctgagctaaagggtggttgctaaagggtggttgctaaagggaggtaccgtcttggactgggtattgcagctagctaaagggtggttgcttggcaagggaagttgagggtggtgggtttcttagtgacttgagtgtggatgcaccaaaacatttaagggcgaagggtgtgcatttggtccctggtgctggacatattatgacacgtaaggtggtgggctataagatgatgtgtggcatatttcttttgactggttggcctgattgacaactgtcaattctctatacttttgtatggtgattgttcaattctcggttgtatgggccatgttctctccataaaatacataatatagtctttgtggttatgcactttaaggacgtcttccttcaaacctgtggcctcactgcctcctcttggtgatggtccatgctgaaggtagttttgctctatttttatgtggttgcttgtgtattgagccgaccattgagactggatttgcctttccttcgcttactgtggattataaatatttctttcattgccttgagacctagccaaagcttcttgatactttggcatacttttgaatctcttggcggcgttgtcaaaagtcattttatactctaatatattcatctatcttgtgaagcagcttttccaaagtgtggggtggcttcctgggaaaatactaagaacatggtccaggccgaagcccatggatcatagcctcactcacaatgtcat

SEQ ID NO: 63774 - DNA, 546 bp, Zea Mays
gcgctttccacccgagccgggtcatccccggcaacatcctcgggggctgggcaagtgtcaacaccgtccttgaggaccaagttctctgcagtagccgcctctaaggctgatggaccctcagttactcccatgggaccaagatgatccaagtcagtctcctgaccctcaagaccgcgttctaaggtcgatgaggcacgacatgacctcaacccagcatcgagcacatcagcacaaacctccatcacaccatcatctgttggctctgataacatatcctctggaaccatatcctcaagagtctgatcaaaattcgctagagacaattcttgcagaccaatgagagcagacaaagcaggagaaggaactccactactttcaccactggcaacgtactgccgactgttctttcgagtcagagggacctcgtcctcttcctccccgtcgtcttcaccagcaacacaggcaacacacccattggggtcaacagcagatggagcacccccattgggatcagcaacagatggagcacacccatcgggatcagcg

SEQ ID NO: 63775 - DNA, 381 bp, Zea Mays
agggggtctcttttgtaaaacgtacgggccgaaggggtatgcttcaatctcagccgccagatcagaattgaacgaccctgattagatcaccgtagtatacttatatgaacccatagatccggaaccgagggtggcaattcaaagtaacatggacccgatctcgaccctagacgtgaagatcaacggtgtggaagcgatctacccaaaacggtgtcgacgttttaatcacaaccgttcacggatggatcaccggtccgcgacccctcacccatccattgcgatccaacggcggatatcggagccggccgaactacatcctcgatcgaatcccagccgtccgtttaccactccacggcttacgtatcatctccctccccaggc

SEQ ID NO: 63776 - DNA, 357 bp, Zea Mays
ctaaggaggtagattgggttcttgatgtagcacatctgcaatgaaaatgacattagcctcaaagttgtcgtacattttgtgcccttaacttgttggaattttgagtcaagatttgcacattgtggagcctcccaagcagtcgtcgtgttgttgcttagcctcttcacgacaccgatctccatctatgcactggtcgagtgtttctcggtgaagtttggtgcaaaggcgttgttgtgcgtgctacatgttcttgtgtgtccaagtagctttctcaatctttatcttcccaattatgctttgctaatcaataaaggtatcatcctcttcttccgtgtcctcggggttaatgtctcgttc

SEQ ID NO: 63777 - DNA, 429 bp, Zea Mays
aagccatagtgcacctgggcaagagcgcgaggtggcaggccacaatgcacttgagccagagcgtgaggcgataggctcaagtggacctatgctagagtaggaccacaatgcatttgagcaagcacgcgaggcggcagaccacaatgcacctaggctggaggacgagctggcacgccaaggttcatcgatgcttgatgatgatgactatggggaggactacgatggagaggccgatggagaggccgatgacgaggttgttacaacgacatagacaacaaacttcaggtaattttattttgatgatgagttctattttttgttggattgatattattaccagtgcacaatttacaattttgtaggtttcggcggtcccttagagttccacctacacaacccttggaccaacgtagggtcataaaccctgcg

SEQ ID NO: 63778 - DNA, 1643 bp, Zea Mays
gagagagagacagttctttggacctgaactgattcaagaagcagaagaacaagtccgtataattcgagagaatttgagggtggctcaaaccaggcaaaagagttatgatgataataggagaccactggaatttgaagaaggagattatgtgtacctcaaggtgtcaccacttcgtggaatgaggagattcaaagttaagggcaaattgtcccctcgctatattggaccattcttgatctttaggcgagttggggagatggcataccaactcgagttaccggatagtctatcggatgtgcataatgtgttccacgtatctcaactaaagaagtgtctccgtgttcccgaggaacagttaccaatggaagagctcagtgttcagggtgatttgacttaaacgaagtacccgatcaagattttggacactttgactcgagtcacgaggaataaggtgataaagatgtgcaaagttcaatggagtcaccatggagaagacgaatcatcatgggaaagagaagaagaacttcgcataggttttccccatcttttccctaggtcttcttaaatctcgaggacgagattcttgttaaggggggtaggacttgtaatacccaaatttgtaagaacataagaaatgaggttattttccctatatatgttacctttattcattaatacctgtgaacaattaccataaaagtaattaattaactaatgaccctaagacaatatgtgcatcatgctgagaattttattttgtgtgtgcatataataataataataaatctatagaaaagacattgatactcaaagtgggaatttagacctaaatgtggaaattaaaatatggagggagaggaagaaaagaaatactatagaatacaaaacaaaatttataaaaatgtaaactttatccatactagtaagatcaagatctacctttactttgagtacaaaattcacattcatagttgaattcaaattggaattcaaaagataaagagaaaaaagggaaaacatagaagaaataataaaaggggacatcctgcgcattgggcccaattcattggaaccggcccatcccccaacaccactgcacagcccttctctctgcgttgcgtgcgcgttcagtcaatgtcacgcgggtcccacctgtcggatcgatcttctctttccccgcacagcagcaatttgacctgggcattgtgtctcttccatccggccacatcatctccctcctccgctcaccacggctgggctagtaccgttggatcggacgagatctccgctaccagaagtctacgaaatccttggaagcgatctccttgccgcgcgacgtggacctccaccatggacgcatcgcgagcaccacgggtgagagctaggatttcggaatcctaacgaactcggacctcgggcgataaaggggagctcccgtgacctatttcttcccctctgctactctctcgcgcggatttctttcctcagaacaaaaaaatcgccgccaccagtgaggtataggaagcagcgccgccgtcggtgagagagaagaggcacagcagtccggtgtgggcgcgggaacatcgccgggccatactgggtacgaatgggagctcgccacggctgattggcgttgtcgcagc

SEQ ID NO: 63779 - DNA, 406 bp, Zea Mays
ctgggcgcactattacagaggaagacaggggcctcggggcaaaactttccaagacacagaactacatccttacggacggcgggttaatttcataaactacagtgactcttttgaatgtttgctcggccgaaacggtacgggccacgatccaccgtccgattagaattctaccgctaggattagatgtatcccaggccgaatcggtacgctacgacgacactcggatccggatccgacggtctagcacgttagtagccctgaattcagatgcgaccgcccgatcgaaatcctagggcgcaggttcatccgatcaaggggtacgcacagacctattcctagccgtccatcaaagatcgaacgacacggatcctgtcttctaccccgcggccaggtgacggcggtggcc

SEQ ID NO: 63780 - DNA, 788 bp, Zea Mays
ttaataaggtaaaatcttaataactttgctctccaataaataaaaaatactaaacagactctaagacggaattttgtggtttacacacttgctgagtgatgaacatatgtgagttcacacttgctattaacaatgcctaggtcaagagcgggtaccgacagtttggaaactacgtccggggttaccggtagttttccttgtgtttatcacctaaatcatgtgaatgtataatgaccggtttgtggagcgactacccatgagaactgtacaaccacaagccaagtatgggcgtgacctagcatagtaactagtgaaatttagatttctgcgcaccaaatagtgttacgggaatggcggggtacgccaaaaccatctgtaaagtgaggtgtgggggttatgtggggaactcctactgcccatctagcacaagaggggccttacaagaaagggctgctttcctattggttgaaaccacaatgcgtatagtttggaggaaacaattgaaaagtcttgtagtggtctcctgatcgcacaccttgggtgtgtgcttgtggctacaactgcgaacaagacaaggtcgcacactaaggaagtgtgtaaacgacttgtgaccatggaccaaatggagatattcaaactccgagggtggggaaatgaagtaacttcttgtggggaaagtgtacaactctgtagagattaaattgtcatgacagtcgtgctcacacttaagagcatgaaccctcacacgattagaagataaatgatttatggtttggttcgttatggga

SEQ ID NO: 63781 - DNA, 671 bp, Zea Mays
cctcgaagtgaacctgcctctcgtcgtcagggatttcactaagtgaggcaaccaaagcactaacctcttcgggagaaggtcgcactctaaggcccaaaccgctatcaccagcaggaggatttgacacaaaactggtaaaagccttggaaggaggcagattccaggctaagtatgcgacaggggcaccgatgttcgacaccttgcctctgagtatcatctcgagtcggctgaccaaatccacagtaggaattcttctattggtaacccgggtcaaatcagcgaggccttgatacagataagccgggtatgctctgtcttttagtggctgaaggttcttgaaaatgaaatcggcgaccacagcttctgcagtcagacccctctctttcaacaatccaacctcagcaagcagagcccctacctcagccacctctaggttcgtgggggattcggtccagctcggagtgcgaacatctggctgtctccctgaccgtggggggagggaattcccatgattctccacgataaactattccaggcgccatcctttgatgttgtccttgagtgggatgtcaaggtagtcggtcttcctcccacggcgcatctccaaactcgcgccccccacaagctggtgctgccctccggccatcctaggccgacaatggtacaagtac

SEQ ID NO: 63782 - DNA, 608 bp, Zea Mays
gaaagcttcagctgggccttacagtcttgtgaactgcaaaaatgataaaatttgaaccatgatatgtatttatagcacaggtgattaccaaaatagtcgctgcacacatacataaacgatgctcagtatagcagacaaactcgacacaagaaggaaaaagtaagacatgagcaaaagtgaaaagacgtagcctcaaaactaacaagttcaattatacagctaattattttgcaattgctctatatctagtacttaatatttgttattcataaattgattgcagctgatctataacgacttacaagttttatatattgagcctgcatgtactgttaatagtagaaacatacctttgagaccgaaatccatattatctaatactaatttatgtctatccgagtacttgtaaatgtggatgagccaatctaccccaccacatggaggtttgtaatgactgctacctcttacaattcgtatgtgctgaaaaggtcttatacatgtgaatctaggttcttaatagagtatctaaccagctgaccatatttaggtttttaatagagttgtatagataatagagtagtatagatttaaacacaccatttcttttc

SEQ ID NO: 63783 - DNA, 753 bp, Zea Mays
actgaagcaggctcctcgtgcatggcatcacaggttcgcctcatatctctcctccattgggtttattgaaaccaagtcggatagttctttgtttatttgtcgccgagggtccgacactgcttatttgttgctctacatggacgacatcgtcctcactgcctcctctaccgagtttcttcgtcaagttattggggctctccagcatgagtttgcaatgacagacatgggtcagcttcaccatttcttgggcatctctgtcacatgctcaacgcatggcctgtttctttctcaacggcagtacactcaggatattttggagtgcgccgggatgagtgcgtgcaaaccttgtagcacgcctgttgatctccactccaaactatctgcagatggacctcctattggtgatgctactcagtaccacagtctggcaggagctcttcagtacctaacctttacacgtcctgaaattgcttttgtagttcagcagatttgcctctatatgcatgatcccagggagcctcaccttgctgctcttaagtgcattctgagatatcttcaaggcaccacggactttggtttgactatgcgtcgttctcccccatcggagctggttgtctacacggatgccgactgggctggatgtcccgacactcgacggtcgacttctggccatgctgtgttccttgagataacctggtgtcatggtcctccaagcgacaacacacggtctcacggtccagcgccgaggccgag

SEQ ID NO: 63784 - DNA, 358 bp, Zea Mays
ttttgtaacagtggatgggctttactgctatgtcgtaatgccttacggtctgaaaaacgccttgccgacatttgtgcgggcgatgagtaagactttcagggacctgattagggacaaggtggaagtgtacgtcgatgacattgtagtaaagactaagagagggtcgaccctagtggaagacttaaccctggtctttgacaagctgcgggcaacacgcacaaagctgaacccggacaagtgcgtctttggtgtctccgcaggaaagttgctagggttcctggtttcgcaccggggcattgaagcaaacccggagaagatcaaagcgattgaggcgatgaggcctccgacccgtatcaag

SEQ ID NO: 63785 - DNA, 420 bp, Zea Mays
ccggttgccgccaccagtatctgacgatcattgagcttttgttgtctcttgttttcttgtgacccgtgtccgccgaaaatgacgttgacttctctgtcgacgcgtgggaaggcttcacctccttcctcctcctgctgctagggttgtcgcggttctcttggtcctcctcgtggtgggggtggaggtagaggttggaagggtcggctgttccccacggagtgcttgaagtctctgcagttccgaagggtgtggcgcatgtccttgtggtatgtgcactgagcatcgaggatgtcgtccagcgtgcgttcgcctccgcgaggtcctcctcgggcgcgagaggcgggcggtccagcggcgtggacctcttcacgaggcctcttctcctagcgtttgtcgggttactggttcgtgtcgcgtcgc

SEQ ID NO: 63786 - DNA, 572 bp, Zea Mays
gattcgtatgaaagagggagatgaatggaaaacaacctttaaaacaaaatttgggttgtatgaatggttggtgatgtccttcgggttaacaaatgcatctagtacatttatgagattaatgaatcatgttcttagaacattcattggcaagtttgttgttgtctattttgatgacatagtaatttacagtaaatcccttgatgaacatgttgaacatatctgatatctacttgttgtccttcgagaacaaaaattgtatgctaaccttgagaagtgcaccttttgcattgacaaggtagtgtttcttggatttgttgtatcagaacaaggtgcggaggtagatgaagaaaatatcaaagttgtacgcgactggatgcctccacaaaatgtgagccaagtgagaagcttccttgggctcgctgggttctaccggcagtttgtaaaagacttcagtactgttgttgctcccatcaatgaattgaccaaaaaagaagtacctttcaaattgggagaagcacaacagaaggcatttgaagaattgaagaccaagttaacaatagccccagttcttg

SEQ ID NO: 63787 - DNA, 454 bp, Zea Mays
gcctcggaataggatgaggaataccattcatggtacttaagtcctctctagtgcactaaacaatagtgcgacttgatcacgctctacaaatcacaaaacaaaatggcagttcaatactttatttcaatgtcttcttgacattccaatttactttatggtattgcaagggaatattctatgtgaattcccagcttcttgattttctagttttcttattagtgcgggtcttgcatggggatctttttggcttttcgagcgattttccagtattcttatttcaagtattcttttcctccccctaatgtcgtggaatagataattgggcattattgtggtaagtacatatgccatagatttgaagttggggagttgctcttatgatcatttgcattagtcatatgcaataggactatatgccccttttcttttcttttgaaattatcgacttcatgtc

SEQ ID NO: 63788 - DNA, 424 bp, Zea Mays
tgaatttccgaagattttatgtgcttgctacaaaattaatcgagtaatcaattctagtataggtttcatgttaaaacagtgttatcaagtagtaggcaatattaatacaaaattatgggaacttgattggactgaaaaggagttaaaatgagttttgtatgaattaaacaagttttaggattatttttacactagcaattcattttctatattcatttatttctttctttcgagtcctggatggcgtgcataatttgcagagagttcggggttaaaacgcgaaggttccacagactcagtaaacagtcacgggggactgcgagttgtttttaaagaaagacagggtcccatacgtaaaagtgttgggctgaaagggtatggaaggttcacggccgcaagatcaacaacggacggctacgattag

SEQ ID NO: 63789 - DNA, 296 bp, Zea Mays
ggccagtggaggacagggatgcagacaagcacatcgatcgaccgtgtatcaaaactgcactgcacctcgtgcgagagatcgaattgatgagatgtgcgtgatcagcaggcagcgacggtcacttgtgcatgctagtagctaccagcattacttacattgcccatgacgcttttgctgcatcatgtctgtcagatattttttccttcatgctatgctatgctgctaatacagtagtctaacctaacttatgacgacacggatcagcagcactaatgataatgtaatacagcataggc

SEQ ID NO: 63790 - DNA, 1070 bp, Zea Mays
gaggtaatatagagcaagagcgcataggtcttgagaattgtcctacaataaaatcataacattagttagacacacatatagcgaacatgtacaatgagggcaacatgaaaaattgcattagtatcgtcacttactggttgaatgtaagaagtgatagctcctgccatgtggtcataatactttatgtatctcattacataaaagccgcagtcgtttgaccctgttttcattgttggacaatttggtggcatatcgattaggaaattaccaaatttggggaaggatgctttggggcagacatgttgtaaagctttgctcaacctactcattataaccctagcccatgggaatttccttccacacatatccatttggtcataatgatagtccttccatgtagtgccaccgagttctataccatacggattcgaatctaaaatgtggatgcatcgattatgtaggttgattacgtacagtgaccaatgccccctactaagcataggtaccattatctgtttatgaaaaaatatgtaaataagttacatggtgttgtttcactaccatgatgagtaaaatgtatagttaatgtgacatgtgtttttaaggaaagatgagaataaaattgcaaatatgaacaatgctcaatactgttttgcattgattcaaattgaccaacgaaggcagtgtgttgtataagcagttctgtaacgcagtttggtcaaatggctgaggtgtcttactatgatgttcctgctcctcaaaatttagcagggcctaataacaatatatttagcagggcctaattacaatagttgtgaaacaagaacctaccccaacattgatgtcaagtattaatctgttagtggtcatagttggatgatgatttttggaatcatcgcaaacacattcaatgaaacactgcatgaacacgttgtcaagacacttcccatctgcgaaggattcgtaaatatcgagatagtttccactatattcatcgtaatctatgacaatcatgtatgatgatttaaaggatattgttatatattcatattgcgtacgtcaaacaaact

SEQ ID NO: 63791 - DNA, 617 bp, Zea Mays
tgggaggcctcattacctcaatagccttgattttctccgggttagcttcaatgcctcggtatgaaaccaggaaccccagcaacttccttgccgagacaccgaagatgcatttctccgggtttagcttggtgcgggttgcccgtagcttgccgaaaaccagggccaggtcttccactatagccaacccttccctagtcttgaccacgatgtcatcgacgtaaatttccaccttatcccggatcagatccccgaaggtcttgctcattgcccgtacaaaggttggcaaggcattcctcagaccgtagggcattacaacataatagtatagtccatctactgttacaaaagtggtatgcttcctatcctccttagctatccggatttggtggaaaccagagtaagcgtccaagaaggataagaggtcgcaccccgaagtagagtccacaatctgatctatacgcggcagtggatacgggtccttggggcatgcgttattcaggatggtgtagtcgatgcacattcgaagcttcccgttggccttcgacacgacgactgggttggccagccacaccgggtgatgaacctcttcaataaagccagcatgcaacagcttccgg

SEQ ID NO: 63792 - DNA, 552 bp, Zea Mays
cgaaggggtatcgaccagatctggccatccaatcagagacgaacgcgccagattagatccaccataatgcaaaacagtatgccttatcaaccgctggatcgagatccaaaggcccaaaatttaagagatcctatctgattactaccatcagatccgagattcacggcgtggatcaatccgagtgaaggggtacgcggcgcctaatctaagccgtccacccagtgatcaacggcccacgtactaccatgacttggtccactcatgatcgctagattttgatcctatggtctagaggccatcttccacccctggcgctaaacaggtggcgcttccaccgcgatggtcgtgacctcctcgacgatgctcccaagtgtgccgacctacaccactcggccctaaaacccagcgcgaaggagtgcggaactaatggacaactcgataggggaagccttactggagaccgaggtgtagatgctgccgcgcacggcacgcggcgaccctgcaatcaccggcgagcaatttgaattgctctgatgattcctgtgccaggcc

SEQ ID NO: 63793 - DNA, 612 bp, Zea Mays
tgggcaggtgctgaggcctgcgagcgcgtctgtggaggatttggcagcggcagaaccgtcgttgttggcggctgatggggcggtttcacggggccaggctggggagaaaggcacgagcgagtgcgagtgcgtttctgcgtgagagtgcgtgcgttgagatgatccactaaaggctggccgtctgatgcgtttcagtaagagagattagaaaaattaaatgatccagtatgttggttttgacagtgggattattttggagttaatacgttgggtgtatttagctagggcatgagtgtgtgggataatttgtgtggtgtacgtagcttagtttttaactggtgggtttaaggggtagagactagataatcatgtttgttaattagagtttcccaattaatagtatggttatctatcctgaacctgatcacatgctctattacatcttaactagtaaaattaaatttctatttatacctttgccttcacaacttgatttttgtttctttgattcttgtttccatgtaagagcttgctccatttttaaaaatatcaatttatccaccttcaagcctatttctttcatggtgtggatttaacatatcttaatcacac

SEQ ID NO: 63794 - DNA, 417 bp, Zea Mays
tacggtatggttcgacgtatatgcatccatgttctagtgtccttatagactggtgaagctcaccgaggtatccgtttagtctttgcggtcataatttagttggaacacgggatcgacgccacttgaactgctccgatgttaacccactaaaactcagtcggtcagatgccaattcatgtaagcgtcgcgtcgtccgtatcctgctagtgctccccgtgcccttaattcgaatcctctggtgcttgtatcatctgggcagacgccacggaaccgggaccccgtcgtaggcgcggttaggtcattctgggggtttataagctacatccatgcacatggctgctcggtttaggttagaattaggtctggcaggtatataatgggtgctcgggctctccacccccatggcttgtcacggag

SEQ ID NO: 63795 - DNA, 1099 bp, Zea Mays
atgtaatgcttatctatggattattgctatgatgactcctattagggtttagggttactgaagggattgtatcccatctgattataccaaaaccgaatatggtttttgagcaaatccagccatattgtcgaagaacccaactaatgatttactccattttgattaaccaaattgatgtaattatattcatcgcttccttagtggcagcaatattatagaatcagaatcgccttgtctatttcctagcacaatttcttcttctcttctgggtcatgcttgttctccttttgtcgtgatcttaaaatggtgcctctttttttattacatccaatctgaatgaggttctgagcaaaccaggtgttctcctcttttgatcggcaagcactgtactagctgagatctacatcaaaatgctatgttgtactttattttatgtcaatcatatgtttcttttggcatccacttggtcccttgttcccaaccatacaagatttcagattttattatttaagtgccagttttatgcaatccctttcccaaccatacattgattgctctcccagtggtgaggattgtatctaagttcggtggacttattttccttacttttacatccaaaattgaatgacttctcaacaaagctattttgcctgcccaaccattccttgtcttgaagatatctttttagtcatattttgatttattgtagatgtaatgcttatctatggatgagtgctataatggttcctattagggtttagggttaccgaagggattgcatcccatctgattataccaaaaccgaatattgtttctgagcaaatccatccatattgtcaaagaaccaaaccaatgatttactccattttgattaaccaaattgatgtaattatattcatcgctttcttggtggcaacattattatagaatcggaatcgccttgtctatttcctagcacaatttttttcttcttctcttttgggtcatgcttgttctccttttgccgtgatcttaaggggatgacttaaatgtgctccttctgattataccaaaactgaatctggttactgggcaaatccaccataccattgtagaactc

SEQ ID NO: 63796 - DNA, 447 bp, Zea Mays
gattatttgggggaattggattttatgttctttcttcactccttttccttcttggtacatcacctctctttatatatagaggactcttggccacctaaggaaggcccaatcagatcataatgaagcatatccaatcctatctctaattgacctaaatctaatcctatctctgagtgatcaaatccttctaattgatctaatctaatctctttcctaatccttattctactcagcgaggacattataggctgcgccacagtaccaccggtactgttcatgccagcacaggctgggctgtcgtgggcccaacatccataacatatgcatgctatgttgggcttgatcgtgctatatgctcataaaacctcaactgttgtgaactaatccctctattcgttctaatagtgcacatttggttttaggaaatcttcgtaaacatattttcac

SEQ ID NO: 63797 - DNA, 569 bp, Zea Mays
aggacctccgccgcctcctcgccgacggcgccgacagcaaggtcaccttcgacgagttcccgtactacctcaggtctagtttcctcctccgctccgccctttcttcagacgtcgtcctcccatgcattctgctttctgcaccaacgcacggaaagaagctgctggctgcagcagcgacgcgcacgtcggttcagagttcccgtcatgcgacgagactctgccagagctgcagctgctgctccctcgtcgcctgcttgctctactttgaatctgtctgttgatgcgtctcccgtcccgtcaccttttcttaccctgtgatgtgatgtgcatgctacatgagatgactagaccagctgcgtgttctctgaaccagatagaaaaattagaagaactcgggctaaataaaaagtagtaggaaagaggtgtgtgtgatttccaggctcatggatcagcaacggaactctgctctggtcgctaccgatgaacaaacgatccttgtttccgatttctgcggtcgtaggataaagtgtcatgctccatttgcatgtcggtattggaggacaccaaat

SEQ ID NO: 63798 - DNA, 672 bp, Zea Mays
cttgtgcttgcgacatctttgtagatgccccttgaccataaccttcttgccttttgggattctttccttttctgtcgttaaatggccaccatttagcaatctctattccattggtattgacatgctcgtatccatggaatcttcaatactcttgtttcaaatacttacctatgagaaccctgttgtccacttaaacattctagtttatatgtttacaatcttcttgtcttttgagacctcttcctattccgttgttaagtcattatctttcggcaatttccatttccttggtcttgttgtgctcgtgtccctcgagtcttacatattctcattttttatggatgcttatcttcatacccccatgcacgtttaagacatttcagttaacatgcccttgaccacccttgtttcttaacgatccatgagtgatcattttatctcacacatccatggtgacctcattgcttccttataacttcccttggtaaggaatctttacttcaaccattctgttgggaccttacctatctcacccttgattgtcttatccacttcgccgcttcgagagtctttccttaactgcatccttggttatgctttcacgatcatcatctttacccttgtcgcctctatatcttaccttgatgcttacattatacctatcctttaaaa

SEQ ID NO: 63799 - DNA, 475 bp, Zea Mays
gctcgtgttcctggtgctcttcgtagtgaaggtgtgatgatcaattccagctagaattctattgcgagcttattttctgagtagcatgcttggatttggtgttaaaattggtgggagtagctgttctgttgctctaaaacgtggattgcaatgctgttatgcgtgccatcatatttgttatgttacacagataaggactttgggtgtttcttttatcttttgcattttataaaccagtcaacctgcgacttgagatgttaaacttgatgtctcagtaaattttaaaacaaaagggtcacattgttagacgattgcatggattgcttttgtggtataattagatttgctatgaggttagattgctctaaaacgtggattgcttttgtggtatagtcatctttcgacatgatgtgctgcccagttttttcattgacgtgctctgctttcccatcaggaatctgtcaaagcagcaggc

SEQ ID NO: 63800 - DNA, 389 bp, Zea Mays
gccgtcgttcaccgccatcccgagctcattcccctggcgatgttgaggccccgccgtgccctttgccacggtaagttctgcctcgacgtccgtagctcgtgacacaacccaatttgttctctcccctctgatttgccctgcccgcgctcacctaccctcctccatgcagtcgtggtgccatcgtcgtcgactcaagtcatcgtcgcgtccctgttgctgtcaagaggtccctgagattaccctagagataacaaacctccccgccctctcatttccctctcttgctctatgttgcatgcaattcctcgctggagatagatggtgccgccgccgagccacctcactgtaggctgccaccctccggtgcccctacctcgatttaatccccg

SEQ ID NO: 63801 - DNA, 639 bp, Zea Mays
taagaagatctagggaaaagatgggaaaagtctatgcgaagctcttcttctatctcccaagtaacttcatcttctctgtggtgactccattgtactttgcacatctttatcaccttatttcttgtaactcgagtcaatgtgtcaagaatcttgataggatactccgtgtaagtcaaatcaccctgaacactgagctcttccattggtaactgttcctcagggacacagagacacttctttagttgagacacgtggaatacaatgtgcacattagatagattatcaggtagctcgagttgataggccatctctccaactcgcctaaaaactacgaatgatccaataaagcaaggggacaatttgcccttgactttaaatctcctcattccacgaagtggtgacaccttgaggtacacatgatcaccttcctcaaactcccgtggtcttcttctattatcagcgtagctcttttgcctggtttgagctaccctcaaattctcctggattatatggacttgctcacctgcctcttgaataagttcaggcccaaagaactgtcttcctctagtctgatccaatatagaggagtcctgcattttctgccatatagagcctcgaacggtgacatcttcaaactgg

SEQ ID NO: 63802 - DNA, 411 bp, Zea Mays
aagtaatcgaatcaaaacaaagatgaaaatgtgtgaaaggagatggcttgagaattggaggtgaaagtgtgtgaatgaatccaagcaccccctccatttatagggtggattcaggatttctattgttttttgattaatatgaattttctaaattcaaacgaatggaacaactcaagccaatcagagacggatgtgctaactaccaaccatagttactaaccagacccgatcagtaatgcctctagctccaacatgtcggtcggtaacaccccggtcagtaccaaccacgtccgctccaacgacgtcgctattgttcgccttgaccggtcgtcagtcttgtcgaccgaccgagccaatctcaccatgctgcattcgtctttatcgataacgacgaccgagaaagccatgtca

SEQ ID NO: 63803 - DNA, 820 bp, Zea Mays
tcgtgcttcggaccagtatatcaggacgacatagacctcagcattaacacagaggaacaactcctactcaaaaaacttcacatgcgcaacaacaagccaacaacctctagaagcaaaatgacactctcacagccaaaaaatagcgcaccgaagtctaagccaaggtctagcaccttattcagcaagaaaaggagtgcctaagggccctcgaacagaaaatttaagagttccagactcaacaactgccatcccactcctcgcattgagaacaggacatgacaacttcagagaaaccagattcaagctatttttatctactaaacacattattcttgagtttgacttcctgtgctagcgaatttcaagctattttttaaaatcccctcctactgcccacacaatccatgccaagcaaaaagtattaggaggtaccattcatgttgattcatttttaggtggatttggcttgttgaagacaaggggctaattcatatatgggagggacgagcacaagaggggaactagattggtgtcttgttttccttcgatggataactctcctttatatatgaaggtttacttgactcctaagtcctaaagaagtgacccaatctactattagccattctaatcttatctataaacttgaagaggcggagctatggtttgcgaggctatagcactacttgagtgccaagctagaccaaagggcctaagtgcccatgatgctacaacatcatggtgtacaacttgacatgttgagttatttgattttggcacatattgagaatagtccaatagataaaacatgccaagttac

SEQ ID NO: 63804 - DNA, 306 bp, Zea Mays
tgatggccatgtaatcttcacgaagttgcttcgctttgacgctccctccgtgatgacgccacacactgcccttgattttctctggaaccataccaccggattttgaggcccaaacctggcgaaaccagtaactgtagtgttgggtggttttgaggctcaaccatcgaaacctctacgagtagcgtactcgatacgtgtccccgcctactagtctgcaaccgtgtcagcaacacggttcacgtcctcgtgcccatcggtgtgccaggtgccaaccaccacaactagtcacccagcttctccggtccc

SEQ ID NO: 63805 - DNA, 1108 bp, Zea Mays
gactctcggaaaagttgttctgaggtggctagagctttctagaggatggctcgaatgaaagccgagtcattaaacccgcggtataagtcctagatcacggtggcctctgtgacatcggggatgcgattcctcatgatttgaaaatgctttaggaacaagtagagggactcgtcactttggcgtttgatggatttgaggtcttgatggatttgaggtcccatggttgcgctagtttgtcagaaagggattggaatttgcgacaaaccggtggcaaaagtcggcctagtcgttgatgcagtggcgaggaagatgtcagagccactgcagtgcatcctgtccaagaacaatgggtaggtatgctatcgagaccttgaagttaggcggccattaaattgcctggagccagggggaaaggattgagactccgcacgtcccgcgatcctcccggcgatcttctcgatcgtggtcgtggtggtggtccctcggaggcgattgacaatgtgtgtcgtgacgcctctcctgagccaattgggctagtgttgggctgttcgtagaggatgttgtgactctgtcctggttgcacgaatgtgtgctggtgcgccatgatctcaatcgtactcttcccgtcgcctcatctcactttcgtgctagctatcgcatgaagcattgatgtgctccgcgcatctcgtcgagtgttgatgacgtagcgcacgtccggtgtcggacgggcggggggaagaagatggttcaccgcctggatgaggatctatcggtagcctttcgcgtttggggtacgtggtaggccattggcgatttgagccagaactccatcgacttcacttagcgtgttcagggcacgagcgaagtcggcagcagattccgaggaaggagtgggttttcacgtcggagcctgacatcatgctccgctcgttcccgctcgcgctcctgagtgtggcgacgatcgcggtgttgggaattgcggcattcgcggagtgccctatcgtcaggagtctcttctacttcagatgcctcatcctaggatacgggctgagcgggatcctgctccccggcctcatggtgacatcgaatgttacgacgcctattccga

SEQ ID NO: 63806 - DNA, 856 bp, Zea Mays
ctacagctctctagtcagtctctaccacgttcatgaccgaggagatcaggtcgaggtgctctgatcctaatccctgatgcatcgtcctgccctcgcgttagttgtcggtagccagccagtgcaatcattatccgtgcaccctgatcgtaatcgttgtgctagcagctcttggcgtcctctttcagttattctggcaaatcatacagtgtagggctaatctttcagttagtttcgaacagtcattcagatgggagtacagtctctgaaaagcggcatgctagctagcgcctcccaaactttattattctggctgacaatgttgaggccgggccgggttaatgatcagctagctaggaacagtgtaaaggtccatgcactgtgtgtgctagcttgttcaatgtaatcagtagcatgattgtttgatttggtggcatatgcatgactatatccaagattgattctggcgccctataatattgctcctctgattcatgaatggcagagctcctacgtacatgattcataaaaacaggagagtgtggtgcactgaactatatatgtgtggtgttgtacatcaagtgtggtacaggtgctattttttaggaaaattcgagataatctcaaaggtgtactgctagcgatttcttttaaccatgtatcagatgcatagcaaatgagaaccatataactgctactactagaagagccagaatgtaggaaaggaggacggcaataccgtgttttatataaccctcagcggctggtttggtgacgagagatgagaatctatagaagggatttccttctccatggattgggtttgttcgttttcatctcaatctatatggattggctg

SEQ ID NO: 63807 - DNA, 298 bp, Zea Mays
gttatagaaatactaaaggtaatgactaaacccttcgcattttctatgctaagttccctagagtcggatctgactagcctattgcagtcaaaggagaaggggattgaaaaaagctcggaagggaagaagattgcttgagcaactatggaaaatgccgggggttagaagaaacgtcgaatgatggctgtaatgaaggctatccataaaacaccgcccccagtctcgacgaaaaaaattgttgcctctgctaatatcgaagctaataccgatgctgaagctgatgaggctgcgcctgaag

SEQ ID NO: 63808 - DNA, 365 bp, Zea Mays
tcaccgccgctagaaatctcacgccggagtgggaatcatctcccacggatagggggtcatcacatctggtatcaaagccatcagagctggcgatcgttgaagagaagacgcaacggctccccctgcaaaaccattcgtgcagacccggtttctactggaagccatggatgagagagatcgagcagtgcaagggaattgggaccgtatgtttgaatctatggagtttgtgactgaaagactgaaggaggtggagagagtccagtagcaattgttgatgcagtcagagctggcggcagtggtggctgaacaagctgctgttgataggaatgatctgtaccggaagttggaggaaacaggacaagaag

SEQ ID NO: 63809 - DNA, 425 bp, Zea Mays
tatgatagaattgaggctttttttttaatctgaccatccactctagaaactgaacttgcccatcagtcattaaaggagatgtcaccagttaaaagcttagctgctgatagcagtaatcttattgactttgtaattttgttcccacttccgcactgggcataataagttatacatctaaaatcttgattttgggtctcaatagatgtgtctagtgtgttgttattatattccattctttactttatagtttataatcgtgtaagagcttgaattatagaactcatctatgtcatctcatattttgaattatagaattcatctgtcatatcatattatgtgtagttacctactttaggtaaccatattacttcagctttccctaatagtatctttgttgtgtagatgcattcaatgtgctaatcaac

SEQ ID NO: 63810 - DNA, 529 bp, Zea Mays
tcatcaccttgtccacattattatatgagctagctgaacaactactgtattattataggggaaaaaagattatgatgcatgtgcagatcacactgaggcaacttgactcactgacctgtgactgatcatgtagcagatagtaggtgaatcttactagtattgcatagcttccacttttattttgtttcagtctgggtactgggatcatgtgggctgttgcctgcagtagtaaccagtaagagctgccggcatcctgcttcttgctgaagaaagtttttgctgtgtgcttaagaaagttaagaagtgtcgtatttcaatacaattacttctttggagatactaatccacaaagataaagatggcgtgctactaaaagctggagtttgacatccataggtgtttcctgaagggcgtcgtttattctctatagctacacacaagcaatttcgttgcttaaactttttgttcaaggaaaacaccacatgcacatccttccaagagttgctgcctttttcaccttaaatcctca

SEQ ID NO: 63811 - DNA, 672 bp, Zea Mays
cacacagttcatccaacagttcatcgataatgggaaccggatacttggatttgattgtaagggcgttgagatgacggtaatcgacgcaaaaacgccaagtattgtccttcttcttgaccagcaagactggggaagaaaaggcactagaactttgttgaataagaccactggcaagcatttgttgaatttgggcttcaatctcgtccttcattgctggtgaaaaccgatatggccgtatagagatcggtcgagccccttcaatcagcggtattgtgtgatcacaaaatctgctaggaggaagggaagtgggctcctcaaatagagattggaatgaacatagcagacgtcggacgggttcaggcacaggcaattctgatagtgaatgcagctgggctgactccagtggtgatgaatctgaatgtctgatttccaatagagtaccatgtggaacagattgctgaacaccatggaggagcactgttgaatcctgatagttgaacttcagccacttatgtttccaatccacaaacattgggctgtattgttccagccaagacatgcccaggacaacatcataacatggtaagggcagcagcttgaaatcggtttgaaaccgaggagtttgtatagaccattcagcctggcacaactcggacacactctggactatat

SEQ ID NO: 63812 - DNA, 500 bp, Zea Mays
cgctagtgataatttataggtgccgcatgctgtgagctcttttctactagggggtacgaacctgtattcctgtgtgcgacatcgatcttgcccggcatcggcatcatccgctgatagcccaccaccatccccagtcgtaataggccagtgggcacagtacaggaccaccgcgcccgcttttgcatcgatggctggctggctggctgcctctctcgatctccccaccttcctgcctgcatgtcttttagagcagtcactactggcctggccatgattcagcccggcctgtcagtgcagtgtgcaggtggcaggtaccacgctcagctctcctcccacaacgaactcctcactcatcatcatcatcatctgtaactattatttggtcataaggggactggactggtggtgcaagaacccttcacaccaaaagttgcttgctgcaatgctgcgtaccactcctctctactctactcgatctcttccatatgattccatcgtcc

SEQ ID NO: 63813 - DNA, 324 bp, Zea Mays
cggatagattgcaaattcgtgggtggccgcacaacccctggtgtcccctatgtaggtgtatgcctgagaccgcgcactacttcattgctgaatgccgagtttcgagaagcatctaggggccattgcaagttggctatctctcgagcagctgcagctgacatcctggtctacctcatagatagtcaaagactggtggttcacaattggaaacctacccgggacacctagaaagggagtatgctccatgctccttctcacggtttgggaaatttggaaagaaagaaactctcatattttccagcgaagggagagaagcgtgtcagc

SEQ ID NO: 63814 - DNA, 456 bp, Zea Mays
aagattcgtaaaggacaggagtctcatgagaaaatcaaagaaattaagacacaaattggtttaggtaaagccccagatttcatggaagatggacaaggtacaatatggtttaaaaagagaatctgtgtaccggaaatcgaacacctacgccaacttattttgagagaagctcatgattcggcttactctattcaccctggaagtacaaagatgtaccaggatctaaaggaaaagtattggtggtacggtttgaaaatagatgttgctactcatgttacactatgtgacgtgtgtcagcgggttaaagccgaacaccacagaccagtaggattgctacaacctctcaaggtaccggaatggaaatgggaagaaatcagtatggatttcatagttggactaccctgtacttgggatggctatgattcaatatgggtcatagtagacaggttgactaaa

SEQ ID NO: 63815 - DNA, 283 bp, Zea Mays
aaggaattggccggagacgagattatggattcgccagatacgaccaaagaggtatcggtgaacttcacaatgtggcgcatgcatgagcatagtgtttagaagatctccaagctggtccagtggtccctctccaccattgtctgagtatttctataaccaaggttctgaagatgaagatatgggtggtcgggaatgggcactggatgaggtcaattacgaagagattcggaatcaggaagtagtagtatggagaatgtgttatcattttgtttgtcatgaactt

SEQ ID NO: 63816 - DNA, 621 bp, Zea Mays
tctcctatgatcttatatggttttgtcctggccttcatcatttttatccaagcttggtcatcagttggacggtttgattgagaaacaatatgatctctgccctccagtcctcactatgtgttgctgaaattgttaatacaactgttttcattagatctactaaaggtgccttcaaaactttgaagaagactttaggtgggaggggaagcccctgagccatagttttagctagcatgccaacatcttcattgtctacccttggtatgtttctcatagagaaaccttcaaatgacccttccattcttcggacggtatcaaggtacttctttagtgttggtctctttgctctgctgcttttgtcaacatggcatgttattacttgagaatcagacttgaggattgctctcttaacacccatgactttcaattttatgagaatgaggaggacagcttcgtattctacaatattattagtgcattgaaatcccaacttgaacacatatgaagtctttggctttgaaggtgaaatgataacggttgcaatccctagtccgaaggaaccccaatatccatcacaaaactgtctagatagcttcatccagtgtcgatgattcctcttgc

SEQ ID NO: 63817 - DNA, 661 bp, Zea Mays
gtgagcaggatagtcaccgtattgcggagctgtcagccgaagtgagtcgcctgcagtacgaaattgcagaacgtgatatgaccattgattgagccgttaactcgcgctctttcgcttgggactgcgaagcgaaagctctagctcatgtggcagagcttagtgcatccctcgaaagccttcaagtgtattgtaatactttacatgaagaagtgcatgtattatatgctcgactgcacccggacgttccaccaaatgtcgctgcaatgggagttggaccatcgagaacaactaatgaaggacctgatggggagctggacctttttaggccccctccttccatgaaccttgccgacgaacggtctcatgcagcaggaaatggagcaacaaaggatgaaaaaaactagagtagtatattttagatattatacttatgtaaaataagtaataaagtcaagttgtacagtgaagtctgtataattattacatttcagtaatgtaatatgatggtgtatgttggcttgttatatttcttttccaaatgtttttttttgcctcagatgccatcacggactcgcacatatgatggtgcggggacatcccgcggtagggaggatactcttaacctgccaccagtaccaccgactttggccgaggctatcgc

SEQ ID NO: 63818 - DNA, 419 bp, Zea Mays
tatggtacatttgacctagtgaatccttccttctgaaaggatacacaaagtatggtatgttcagtgtaaatatgtgcaacatattttaaacatacattacttatcgacggagttcgagatagaggatatgaattgaaagagattttcaattcaaactaaactatcttgagtatcttggatacaaaaattgtctatatccaacatatattgaagaaattcaatatgagagaatcattgttatttgattctttccgatcatgagatgtgctattgtatcttgcaagagcatccggccggatattgctttgcaaagatttgctagctaacagcacatgagatcgagttatgatctccaggtatactcatgctctccttatgtttggatatactgatcttggatatctatagaagatccccag

SEQ ID NO: 63819 - DNA, 554 bp, Zea Mays
tgatgtacaatgtttggtgataggccataaccccacgaagtggtcctactgttcatcgttggcttcttcgttgttgttctcctcctcctcctcttcttcttcgtcgtcttcatcatcgtcaccaaagtcgtccaggtcatcgcctctagggggcaggggcttggactgctgatgctggcggtgctgaagataatgatccagctgcgaaggctagggattctgccaacgaggtgggcgtaggtagaaactcctccgagatgtcctctagaataactccgttttccacacgaatgcgagggaaatccacagagatttcctcgactaccactaggtagacaggaacttgccgtggcggagggatgtagttggtgttggtatgagtggtttggattgtacgttccatctacaagagaaaatgtcaacttagttgaattttaaagaggtaagattagtaaaataattttgtaagaacaaaataagcatgttttgaacagactaggctttccatttctaactagtctaacgacctagagtcagcatagctttgataccac

SEQ ID NO: 63820 - DNA, 391 bp, Zea Mays
cttcggaaagctgttggccacccaggtgctgaagctcaaaattcatattttccaaagaggtctcttcagttctcttccccttatcagagggcactgaggccacatctttttcgacaaccacatccgaaataagtctgtcgatttccatcaggtgtggttgcaagactctcggcttcgactgcggtggtatcttcagcatcgatgggtacaatagtttatccaccgaagctggggcgaggtctattcaatagcttccattatattcatcattcgccgcttcttttgccccccccgcttttcccctcggcaaccgaagcgatttcctttgactgcaagaggatagtcagatccaacctcaaaggacttagcagtgcatatgggaaaggttcag

SEQ ID NO: 63821 - DNA, 360 bp, Zea Mays
cgcagaatagcccatacaccggtaagtcatgcatggagtactggtaccaaacatgcattctgaagtttgtcttcgtagctcgatcatacgttcataccccttcctcccaggcacgtaccaattcatcgatcaaaggctccatgtacacgcccattttattccccgggtgtccaggaattatcaacgacacgaatataatctatctttgaaagcacaaaccagggggtagatttattgggataacaaacacgggccaacatgtgtacagggcaacgctcattccatagggattgaacccatttgtggccaacacaacacgtacattatgagcctcttcggttttctcacggtgaatggcat

SEQ ID NO: 63822 - DNA, 788 bp, Zea Mays
aattataacttaattaaaaatagtcaaattataattatggattgaattaaaatactatatcaatttagattagaaagttatccattggtttaaagaagtatctaatcacaaaactatgtgatatagtacaaataatgttgttactgcgtacacaacttgaacgggctaaattggagtttaaatggatgagatatggattaaacaagtttctagatactttattattacatttatacctaaacatagtttccaggggctaagctgcaattaccagaattatttttattaattttacccaaaaaaatggaccgcgggttctataatcaatacttcaggggtccttttccatttttcgcgcgggcgaaggggtatatgccatcctctgtcgtttgatctgtcttccacggatcagattacatcacgtaaataactaaaccgataagtaacttcaaccgctagatcttgatccgagggatcagatcgcgtggggcgtggccgaaccaatatgaagccctaatccgagccgtacatccacaaatcaacgggccagtgcccatctcctccccgactagagcccaacggcgaagcgatgccccacacgatgttggactcaccggagatggccttaccggcgttccagggctccaaccaccctaccgaacaatgctaaatgaagatcaaggtaaagtgaattctatgaagggtgtcttaccgagggttcatgcatcgagaaaatattgttttaaatgtgtttgtcaatttaaaggttcatccaaaatttattaatt

SEQ ID NO: 63823 - DNA, 524 bp, Zea Mays
cgctaaagcaaaacaaaatttcaacaccataaaaccaagatctactattgttatatattacgggattaccactagatgcgcaggacggcagaaatcgtctcgatataaatgaatctgtcgaatagtgtcgtgcagtcgccgacgtccatcatgtgttcgcacggttcgtcctaatgctccaaatgcaacactgtgaatcatctaggccccttttagtaatgttttggtaattaatgacaactacttgtggactaacgattcttggagaaataagaatgcagggttggaccacataaaacaggaaatgttgaagagtcatacgcattggttgtggatcagatgaaggcaaaggtataatataggttttacttttgccggtcttgaggagtttagagaagatacctgaccggattagtaggctagatagccgtactattaagaggggtcaatgacttagttctgtgtaaaacttagtgcctcatagagcatcaagtagttgcatttgcatgaggactaacagcgcg

SEQ ID NO: 63824 - DNA, 334 bp, Zea Mays
ttgttattctttccaatgtatctcttctttttcttttcttttatgcttttaaggtgggtttgaactgcaagccaatgttataaatttccaaaacgtctgtaaaaattaaagtggctcctcactggtgtataactttctatctcaaaatttggggcttaaaaagtgaggggttctctctgtacaaaattatcaactattagggcagagggggtgctttgaactacaaccttcctttgacagtaggttattttctaaggcttatttttgctggcatctaggtgtaataacatgactttgtaccaattctcagccactaatacttattagttatttt

SEQ ID NO: 63825 - DNA, 686 bp, Zea Mays
gcacaacaaaggttcaaattacactcctacgtaccttgtttcttgggtggatcggagtcgttcatcatgtatgccctggtcatcatgccgcagtgtcaagtatgtctcgctgcaatgataaatatatcttataatagtgatagttactagatcccgcatcgttaagtacgatgtagttgataaatggtgtaattgtctatactttataatttcatataggtatgttggcacgttctggtgtggctacaaggacagtggcatgcaccacatggtggttttgggtacacctgttaccctctgttatggctacaaagcctacaatgtgcttccttgaccgcaacatcacccatctcctttaaatgcaacgagcagaagcattctctagctagaggttgatgcaacctctcccctcccttccactataaaagggagggatcgtgcaacattttaggggtctaattctaatctagaactataggacttttggaaggattctagagcttagactccattaggtaattcactcttggcgagtacaaggatggattaggaccattaggatagaactctcaccataaccacgaggtgaggggggctagagggacttgatgctcactggtgttgagcttgtaaccttttgtcaccctttgtcacccttgtgttcatcattcatgagtagcaagagg

SEQ ID NO: 63826 - DNA, 492 bp, Zea Mays
agcgatctgggtggcaattccacgcctcggtggaggaagcgaacgatcgagagaggagaaaagacagcatcgaaatggatgagcccgacggaagaaatcgccaatcgggatgggatagagagaaagtgcggtggtaattcgttacctgctgctgctcagagctggtgagatcgtcgctcgatcaatagatataggagaaaagacaacagcgaaacggatgagcatggagcatgcgacagatctacgtccaattccgaaaaatactacgctaatttttcggttttggtttcacgcacgcggtagatctacgtttagtcttgaaatttgaaaacacaacagcgaaatggataagcacggagcacgcggcacatctgcgttcagttccgaaaaatttggaaaaaaaatacgtgtgttgggtcttggtttgagatgatggctaatgctttacagggtgggttgatttggaacaaatgtaaggatctttttgtaaaa

SEQ ID NO: 63827 - DNA, 610 bp, Zea Mays
ggggtatggggcgatcgaggccgcacgatctaaatgaaacgacccagatatgatcgtcgaagggctatccattgattcaatttgtgccacccgcggccaaatccaacgacgctggtttaacgcatcaacggaatacgccctagttccatcgtgttcctcggatcagaatcctagggttcgcgttcaatcaaacgcgattacctaatttgcgcccaccccagtctaacttgatcgcccatccaggatccaacgatccgaggaccgtcatcatcctcccgccaacagcgaggcagacgccctagccgcgatgcaccctgacggcagtccaaggtctgctactccgcaaccagatcgagtttcttgacgacctccacaccgagctaggatcgcgacaacttacgacgaggattagataacaccacatctcaccgaggttataggagacgaccgaccatggtgtcggcacttcctaagggccggagagatctccagcagccaactgccccgcacgccacgccaagaggtgcgagcaccggtgaacgcccctgggccaaggctgggacaccacagcctcgtgagagcaccgcggtggcgcttccttcacctaccc

SEQ ID NO: 63828 - DNA, 630 bp, Zea Mays
gctacttccaaaacccaagttgaagcccagaaatgcgaaattgaggaccttcagaaacagctggctgaagcaaaattgaaatgcgctgttgccgaagctgaacgagatgccagtaattactggaaaaattactgggaaaaaacagttgcagaacttcgggcatcaaaagaaaaatgctttgaaaaatctatagaatgtgtagaaaagataaaaacaagctttgccaatgttggcgcgtattcaagtgaagacaatttcgtacggggcgatcccgaggggccaattgagtggattagcagcgaggccgaagcctttgaggagattttaaatgaccgtggggacgtatacgccttctcaggtgcaaggggaattgcggctatcttggagaaatcaggttgcgatcatgtgaaaactctggcccaagccgaagatactttatctattgatgatacaaaggacccctcggccgaagcaagcttagttggtggaaaattctttactgacatatgggaaaatggcggccgagggatggctcacgaaataataaagaagaacaaaaaagatactcacgatgctagggaagcaacgaaggcagctgaaaaagctgcataactcgaaagacggatatgt

SEQ ID NO: 63829 - DNA, 317 bp, Zea Mays
caggccacggcgctggcaagccagagatagagagtgcacgtggggtggctggaggaagaagaaatgagcatttgagtgactggcgtgcgggcctaggcgaagaaaagagttcaaaacagcggttatgggcacacaggacattgcacagtgcagtgtatagtgcactttggatagcctacgtagaggctgaggaagccgagccaagccagagcatcggacagtgcacagtgcagtgtccagtgcacaccgcactgtttggtgagcctagactgagggaattttgaaatgtttctgagatttttgcgtcaatccaaatc

SEQ ID NO: 63830 - DNA, 579 bp, Zea Mays
gtttggggcactgtggccaccctgttactatgcccacttgcccgacgacgtggccgtgtgatcatcgctggggctgccaccgttgtctctggttacaccatgccttaggccatttaccacgtcgtcgcatgccgtagtgactgcccggtaatcgtcgtagcttcgcaaccagtgatcgccacgatagatcgccgcagtgactcatctcttcttcccagccgccaacgcaatctcttcgaattggacaccaccgctcacggactctataaattgagcatgccatgagctccgtagggtaatcacacatccaaagcaccaactctcatctccgatcgtccaccagagcctccaaattgcccatttcccccaaatcggtcaagaacaccgtcgtggagcctctccccgtggccagccctcctcaggttggttcatgcctctctattacatgttctagcatctcttaggtcccctgttgcttgtagactcggtggattgaattagaccacactaaattgcccgaaacaccgtagtttcttctcgattttcgccgtcatcgtaagtaggcgtattccagcccgg

SEQ ID NO: 63831 - DNA, 418 bp, Zea Mays
atcacatgttgacacgcaggtcattacattaaatttggacaatacatatggctccagccgtattgcccagatcacgacacgcaggtcatgaataattcattaatatgcatcatatacacaatagccataccgatcacaagatgccctgcaaaaacaggttagacaaacacgtttctatatgttcgccactacagcagatagccacggcggtcccatgcatcgtatgtatggaaattccactggaaatctcatgcggttaatcaaatcaacccaagtccgagactttcgacccgaagaagattacactcatgacgtcgatctgttacgtcaatctgctggttgtgtacgcagttagccccgatatatggaaattccatgcatcgtatgtatggaaattccactggaaatctcatgcggt

SEQ ID NO: 63832 - DNA, 329 bp, Zea Mays
ccagcagcaaggtcagcggtgactgtctgagacccctcagaggcagcttttgaacggtagaatttcacgattggcaacttcgggaacaccagagcataaagtagaacgcatagaagctcaaagaagcacgagatcgaagagaacagcactgcaatcagtttagtctcatccacaggtgtcagtaacggcaggttttattatagataaaccatgaggtaaatgcaaatctgattgtttgtttgccacatactagctcctttccgcaggccatctctggaattctcaaacaccgcttttgtgaagaaccttaacgccgcggttattgcacc

SEQ ID NO: 63833 - DNA, 829 bp, Zea Mays
cggacggcggagcagtggctccggcgagcctgtatcggctggaaaatgcaatgaccggtgctcaagtgtggccgacacctaattccaccctcaataacactaatccctcaagcaattgcaaagttctagctcaaaaactctctgtccacggtgatggcgcacaccgaggacaatctgaggtgttcccggtgatccaacacgggctagttcaattggttgggccgataagcatctatagcacacaggggtgttgaaacaagagtgaggagggcatgaacggacctgcagaaggctggccacagcgagctcactcacggcggcgcgtagaactgaattgggggaactctaaattagagctctcaggaggacaatccgagacacgggcaggtgcgctggatgcgtgattacctagcggagctcactggggcggtaatttataggttccatcggcggtggcatccaattttgcgaaggcgcgctggcggctggagagaggggaggtcactagcgcaagtgattcgtggctttcaacgtggcaaggctacaggcgatgaacggacatgctaaggcgattcgctacaatgtggtattgcgcttaggcacgtggcgcaccatcggtatgtggctaacgccggcgagggccattccggtcgaccgcagtccaagtgggtatggcgagctcaacagtgaccgagcccgaaccaatccgagcgctaagatatttactgccctcagtaatccacttgcgtggggcacgaatcgcagcggctagggcgaattcgggcgcgagatcaccggtggcaaggggcgatgaacctggggatctttt

SEQ ID NO: 63834 - DNA, 765 bp, Zea Mays
taatgacacatatcaaccttacgttcgtagcatgcccataaaacatttatgtaatagtgaaatttgcgaaagaatctgtacgtaacttttatttgtgaactctttatgtgtggatatcaaactggtggtgtatatatggcccatgaagagcatgttatgtttccttaaaaaaatctcttgcatattgattattattgttattgttattttttctttagtttgtcgggtaacactaatgcaagaatgtcaagcatttagcaggcctgaaataagtggctgtggttcctcccttcatcctacccgtaggttaaccttatcccttcgcctattctggttttttttccttgttgatcccctgatagcaaccggctggtgcagtggcgggtgtgtgtgcccttcacaaccacttacgtacgacatcgcggcctgatggtcacatctctatcatctgactattcaatgactcatgcgttctagtttaatcgctatactaattggataaaataattcctgagcagcagctaggatcttccctagctacctttctgattaataacctgcagatacgacctgatctgccactttttcctttagattttctggtggtggtagagggtttagcgcagcaccatcgatctcaaatatcttggccggcccatacatccctttttcctggtaccttgaaagggatcatgcatggaaattgagaagaagaaaaaaagaatggacatttagtttcatgcatgctagctagtatgtggagat

SEQ ID NO: 63835 - DNA, 861 bp, Zea Mays
ttaaactgacgggaataaaaaaaacccatacataataggagtatagctagctctgtccaacaagtcgtatctctcgctagctaattaaaccacttgtttggtttgctttttcttggtgagcccaggtgggaacctcctccggttacccgacgatgacgacgaaggttgttgatcggcgtaggcgtagcctttgttgtagtagtcgttgaggatgcggtccctctcccgcaggaaccgcgcctcggtctggttgatctctctgcagatgttggcgaggtagtcgtcgatctggcccatggggacggggaagtcgccctggtacgccagctcctccggggtcagcagctccttggtccttcggctcaacctgcggaaggcttcctcgggcatgtgcacggtctggtaccggatcaaggagtcgatctgctcctgcgtcatccgctgaagccgtgggttcttcttggcttccgcatccgcggccggtgccatggccttctcctcctccttcctctgggaagagctcgagcttgacgacatggctggctgattgcagatgatctggatgcagtcgatctcttggcgattggagcggtgctcgggtcgtagggcttccccctcctctctgctatatatatggcgatggaggcacaggccaggccaatgatggaggcacttctccctcctctctgctatggcgatggggtgcgtggctgcaaggcgacgagttccaggtcgaaggtccgtgtgcgcgattgcatatataggggcaaggatgaatcggaggacgaaagggatatagctagttcgttgggatcccgatggcttctcctggcttcacgcacggtgagtctgttgcgactt

SEQ ID NO: 63836 - DNA, 351 bp, Zea Mays
gaaggaataccgcgagaatggaattgagaaatgctctatggcagtctacctgggagaaagccgaaactaaccaaatcaccctcccttccaagtcactgccactggacaccgcttcccagacacttaccaaaatgttgcccaaaaagcccttcgccagctatgccaaaattacagcagggaagtctccgagacaccccttcgttactttccacccagcaataaaaatacccctacctggaggaaaagactttaggccctgtcagggagagatcctaatgaggatgaccccaccatagtctacatggccggatatctccacactcttgacaaccactatgatgaccttttctc

SEQ ID NO: 63837 - DNA, 317 bp, Zea Mays
gagaaggtggtgacaaaggttgcacataaacaacttcggtacatgcctctcactcctagagtgaaatgtttgtttctctcgaggaagaccgctatgcacatgaggtggcataaagattgtacagacagacaagatgggttaatggtgcacccgttagatggtgatgcatggaaggctcttgataactttaatccagattttgccagcgatgcaagaaacgttcgtatcggcttggcaactgatggtttcacgtcgttcaatatgaccgttgcgtcgtattcatgttggcctgtcattgccataccatacaaccttcc

SEQ ID NO: 63838 - DNA, 819 bp, Zea Mays
cgacgcacaggcctccacgatggctaatcacgcttggagacccgtgatatgagtgtcggacatccgcacaaccgagcgaggtatctccagtcagccctgtagctcgtccatcgccaacatcggaagggctgaggatccgaccccacattgcagcacatggtaggtgggagaggaataggcgattaccctcctgcataggataacatgactgggttagggggcagcaccaaccagccttatggccgccatagggcggccaacgacagtcgaggcgccggtggcgttggcctgtagggctaacgttgcaggctcaccgtcacaagggtcaacccttgattccccatccggagaggttgaaggggaggacgaaagcgatatgacctctcctctagcgcttgagcccactgcccaacgaggaaaagcctgtcaccaagataacataggggcaagtattggatgagttcctagacaccacccacctttcctgcaatgggtggctcttggaccaaccttggtgaggacactccggagcaggatgtttgtcgtggtccatggctagccaatagaaccccgaagggtttgaggtggcaaaaccctccccgctaggtgccacttttggaaagcatgggagctatgaccaaaattggttgggggtaagcacgaagcgaccccctacttatagtgcccaatggctcctaaaagccaataaagggcctcacaaatctcaccaactcaatagttgcgagcgacaaaagggacaaggaaccgcccgacccttcgtagcccccaaagggagacactctcccctcgggggctcgg

SEQ ID NO: 63839 - DNA, 560 bp, Zea Mays
tgagtaaaagcttcatccttagccttcattgagaacacctaggaatagcgataaaagtcatcaacgaccacaagctcataccacatcccccaaaagagctaacctcagctgtaccaacagtgtccatgtgaagcaaatcactgggttgcgaagtcatcacattggttacttgggaatgggaagtagcaaccatattgtcatgacgacaagagtgacaaacaaggtccttctcaaatttcaacttgggcaatccttggatcaggccaagtgagctcagtctacacaaaagatcaaagctcaagtgtcctagctcctatgccacatgcaaatcaaagaagaggatcctgccaagagacatcgagaagggccagaggagtgtgtaaatcagcttgaaaaactcaaccaaaaggggaaatccagaaaacaggatccccttgagcatccaaaactcgataaagaccctttttaaagcgcacttcatagtcatcctcaaggagtttcaaaatagaaagctgattgaaatgcaaatttgaaaccaaaccaacatccttgaggacaaa

SEQ ID NO: 63840 - DNA, 437 bp, Zea Mays
tccgtcctctatatcttctttatctccaacaacgttctctatatttcgttctctatatctcatactccatgttttagtatttatattaataaaaaatcaaatatacttcgtaccggaatgtaccatgtcatgtcagagacagcgcgctggccaatcaccgatggcatatcatactgcagcacactgtagcagcgcaggaggcagggcatcaaccaatcaccgacaaccgggtaccggatagcgcaagcgccatatttggcggacgagaagtagactgtaaattttagaggacgttgtagcggaccttgctggactcataaaggagacgataaaccgctatatttagcggagacggccgtttaccggctcttgctggagacagtctaacgccgccgccatttgtgccgggacgggatgttccgacgcagcgggaggct

SEQ ID NO: 63841 - DNA, 437 bp, Zea Mays
aggatacaacagatctccccaagtcttcgtatttctatcacaaattatcatcactagtagtatagtggtcaatacatatggctcttctggctccgaggaccaaggacatattaatgtctaatttagcttcaagctctgtggtgatgtgggatttcatagttatttgtctactcttctcacttctggtagatctgaggtagataatgataagcatgcaaaaaggtggaatttagtgcagttcggctacataaacccaaggtatttgtcgatttaggaccaacctttaccatttagcttacagtgtataccggacttgtcaaaggactatctcgagtcaatgcaacaactataagtatttacaatttcgagtgatgtatgcaacacaagcatagaggtcccagacaagacaagtaaagtggttcgacgggaacacacaa

SEQ ID NO: 63842 - DNA, 433 bp, Zea Mays
acaaaaaccagtgtcgtttgtatgccataaaaatcttaagaactacagacctaacttcctgtaaaatatcagagtcaaaattaacaggaaatcagagaggtagtgtcggcctcaagttcggtagtgctgggtccagaagtgccgagcacacgggcggcagtgccgggcaccgaaaaatgcccagaatgatctcaaacttcacatatagtttgcgcggggtagaagacggttactagtgaacaaaccaaaaatcaaagcttagatcagaaaatccgagagagatggggttttctcaaaacgagcctaaatgagaatcaactcgggtcatgaccaagaactgcactgtgagggtgtacgcagtaatccaaagagtctatatccacccaaatcaatccccaacaatactcatgtcgcaaaaactcgaaggttctcc

SEQ ID NO: 63843 - DNA, 346 bp, Zea Mays
cagagagtggtcatgtgtagtgtgcaagctatgtgtttcctcaccatatgcaacctgaaacacaatgcaggtagagagtatagtaatttatgaatgagttatgagaagcaagcatgcaataaatgtataactggagtacttacatgaccactaggtgtctgatcaaaaagggggtccgtgtaagttggagtgtcatgagatgcatcaatgtcacctccctgacccaaaaaacaatgatactatgtttaaagcctcattcatgtgtcaattaaatttaatcgataattgagattacaatggagaaaacaaagatgaaacatatacatgtttttgcggtgtggcgtca

SEQ ID NO: 63844 - DNA, 463 bp, Zea Mays
ggtgtatatatgtatgtccactttattatgtaggatagaagatgcttttaaagcatagataggtttgggcaagaaaggatagggtaaggaaatactccatccaagattgtggatcttgattccttcgaagatctggcttgaatcttatccttccttgatttgatgaagtcgatcatcttcaatcttcgttctcgaagttgttatccgaatttgggacatgtagtgaaggcagattcttaggtaaacaaaataggttaataggtggttataagttagataaggttaagcagagtctatcttgttgttttgcttctagattggttggataagttatgtaacctgttatatcggtcaagtttggtgttatcatcaaggataatgggtatcggtgttaccataactagggacatagttgagataggtgtgggtacatggggtaggtagattgaaccaagtttttttg

SEQ ID NO: 63845 - DNA, 736 bp, Zea Mays
tgcatctgcaagcactattcagtaggaactataatctattgtaaggaaaatggaccttgtctcatttggttatgtgattttggtgtttgatgatcaatataacatgtggactattttgttttctagtgtttatgtttatattttacaggacgcaaagtggttttggactgaggcattgagggagtaacacctcaaagaagacattggaggactcattgaatacttaccaacattaaccaaagtccaagtcacaagacaagaaaagcccaagtaaagagaatttaagaattgaagactaggttgtatctaggtgcaccggactagttcggtgttgcaccagaccgtgtgcatagagagcacaacttcggcacactatgcatgttagcacaccaaaccactccggtgaggcaatggtggaacacaagatcgagtgcgcaaagagcgcattctttggcatctcgagcctagctcactacaccaatctggtgaggcaccggtagcgcaccagaccaaaggctcaacgctcgaccatggctagctccaacaactttctgatgtggtggtcaccatcaagtccaaacatgcactggatctctagtgtggtgcagagaatctgtcatagcagcaatgtcaagctaacatggaagggcacggaccatcctaatttgggcttcgagtttggtgtgacacagaaaagtctgctaccttcaaacagctcttttggcttcaagttcta

SEQ ID NO: 63846 - DNA, 406 bp, Zea Mays
tggagatgagcatacattttttgaaaaagtatggcaactactagcagatgatatccaatacaatatgagaaaaacattgaaccttccctcttaccagatgcccataaatgaaataagggatcatttacttgacaaattatctgtacttttcaacaagtgcgactcaaatataagagattataatttgccacagaaaaccaattctacgaggtcatcctacagtaatcaatatattgaagaagagttatcatacaacttcaatgctttattaagtgaaccacagaatctccacatgaaattaaatgagcagcaattgtatgcttttaataccatagttcatgttgttttatcaaataaatctagattcttcttatctaggtatggaggcaccgaaaaaacttttctt

SEQ ID NO: 63847 - DNA, 966 bp, Zea Mays
ctgacgtggcgctgcccctcgcactgcgtcccactgacttaccgggcccgcatactgggtcttcgtcttcccgaaatccgtggtgccctccccgccgtgggcatgcagccatcgccgagaacctctggagggttgttaggatgccaacaaactcgccccaaacccttgcctataacccaaaccaccgctcctcctcgcatccctctagtccctgcctcgaccagggtgattgtcgtgtgagtttcgctagggcatagccatgagccgctgccattgctccctgctcagtcaccgctcgtgttttgtccagtacgttcgtgaagctctggtggacatacacaatccgctcctcggctagcctagctcagcgttggtggagggtggcgcaattgctcgccaccgttgaaggaagtcccgtgcgtcttgggttgcattgggccgaggcaccaccgcaccgattcgaggtaagaccacctccacatccttcgccctaccctcctctgcatgtggcaactgtcggggaaagttttagggcgctgagtcgcggcgaccgcgctcggctggagctgctccgccgtgattcctgaacaacgtggtggtcgggcgctgggggtagaagacgatcactgtggtcgtggattgctcggccaacgactaggaatagatctcgtgcgtttgatgcctaagtcgttgatccgtgcgcgtgtggctaggattagatggcgcttacccattcggtctattttaatatgtaccgttgatcatcgatctggcggtgctgggtaactcgcgcttctggccatcagatctagatccgaggcctgcgtagcttaccggttcaaaattagtacgctgtaatcgtggcagttcggatttgatcggacgaccgagatcccgcgatacccctttgcccaaacctttttgcatatgagtccctcgattatttcagaatgaacccgtcgtcca

SEQ ID NO: 63848 - DNA, 356 bp, Zea Mays
tatatctcattctttagttgagctcgtgcaaaccggttgaaccggttttacccagttcgtttctagtttttgttgaaaaagtttctgtttgcctattcaccccctctaggcaactttcaggggccccagcggtggcgggctcaggctccagcacccattagggtccatgcggcctccacggtgctgtttgtaccacgggagtcacccaacccattacatccctcctccccagttccgcggccaggcgcgctccgcgcgcttcgagctggcttttgaggccagctaggtgggacctgtgccatacttccttcaagctcgagaggttatcgcgacatggcatcgtttgccattggtgt

SEQ ID NO: 63849 - DNA, 292 bp, Zea Mays
ccatctcgcaaaagatcataagactcaggattccccccgcacaggacggcgggttggtttactaattttaggagggctcttatgcaaagtcgccaaaccgaaaggctatcgacaacttcaagccgttggatttattttcaatggaccggattagatcggtggaacactgaaccggtaggttttctgagccaccggattgaggatctaacagtccatattttatgccacgaagggataagagttcgtgtaatccaacccgtccacagccgatcggacgcccaggaggcttcct

SEQ ID NO: 63850 - DNA, 583 bp, Zea Mays
ggaggggttgcaataggcctgcaggtttttggtgttcggccttcgttcgttggcagatgtcacatcgggccacatactgagctatttctttcttcatccctctccaccagtatctggatttgaggtctaggtacatcttggtagttcctgggtggatggagtaggccgagttgtgagcttccttgagcaggacttctcgggcctccccttttggtacacatagacgatttttgaaccaaaggactccttgttcatctgtcctgaagtccgggagttgttccttgcgggctttctccacaagtcttgctgtctctgagtctagacgttgagttttgcatatgaggtcttctagcattggtttgacttctagactatcgctgtttcccagacatgtatttagttgagctgattctttcttccaatcctctaaaaagttggtcccctttattctgaatggttttcgactgagggcgtctgctaccacgttggccttcccggggtgataatgaatttctaggtcataatccttgatcagctctaaccatcttcgctgacggaggttgagatctggttgagtgaatat

SEQ ID NO: 63851 - DNA, 817 bp, Zea Mays
cgcaaacccaagcattatttgaatgctataaattctcttccaccgtgagtagtaaaattctgatacaataatatgggcagtaaatcatctagtgcaattgatagatgtagtgacaacatatgcatatgtggtcactgaattatcgtatttgtggagtcttgaaggattccaaatacataatcaccaatcacaaatttgcaatgcatgggaagtctttgtgacttagagcatcccggtcaaatatggtacaatcgacctagtgaatccttcctttttaagggatacacaaagaatggtatgtttactgtaaatatgtgcaacatatatctaaacatataatacttatcgacggagttcaagatagtgcatatgaattgaaagcgattttcaattcaaagtaaactctcttgagtatcttatatacaaagttttctatatccaacatatattgaagaaattcaatatgagggaatcatggttatttgattctttcggatcaagagatgtgctattgtatattgcaagagcatccgaccggatattgctttgcaatgatttgctagctaacaacacatgagatcgagttatgttctctatgagtactcatgatctggttacagttggatatactgatcttggatatctatagaagatccccaggtacaagatcaatgacatacttcaaataagttgaacctactgtttgataaatgtcgatcaataaacattaatggtcacttacaataatcattttgtataacactttgtgtaattgtatagaatgataaactacatactaagggtatgtggtggtctt

SEQ ID NO: 63852 - DNA, 738 bp, Zea Mays
gggagggacagaggagggcgccggcacttatgcgcatgcacacatggacgttagttccattttatgcgcacgcacgacacaaaggtgcgggcggggtcaagaggagaggcggttttgggaaggatgattatgacgtgtggggccgatagatcagtgaaacggttgagcaagggggtatgcttgtgctgctgacgggcgggactcaagtcaggaacagtttcaggtgatttcgtgcgcgcgacatggcacacaaccgagctgaaccgggcgtgaggagttgtcgcgcgaggatgaaaagagaggtggttcgcgatgataaggtgtgtgtatatatatagaaagaagagggcgcgaaagtcagttgcacgatttcgccacggctcgtgatgggaggcaagacgaggagaggttgttgaggctttgtccaagtaagacgcgtgcacgcgaaatagacaacttttagagtagataaagctgacacttggggcctcaaatgaccgcgagaagaacgagtgagggggaaggcggttgcgtgcacatcgcgtgagacgttgcacgacaaggtgagaaaaggtgaagttgacgagtatagacaaaggtagacacatggggagataggggtagacgaagggtagacagggatagcagatgtgagcgacatgttgttcgcgaggagaagcagttcggtgatctcgcgaaaaaggacacgagatctggaataggctcgacgagaggaag

SEQ ID NO: 63853 - DNA, 409 bp, Zea Mays
gatcattgtcctttgaccctcaatgtcagaggtggctgcatggggaaaagacggtttcactttgagagtttttggcccaaaattcctggttttctggaggtggtgggtgtgtcttggagcatgccagttaggagctcctgcccgttggagcaagtgtcattgaagcttaaaaggtttgctcgtgttttgtagtcctgggggcataaagaagtgggtaatgtgaggatgcagctggggcttgtcagagaagtgttgcataggctggaaatggcgcaagatatcagaattttgtccagtggggaagtttggttgctaaatttgttgaagcaacgatgccttagccttgcgtctcttgaaaggactgttgctcggttgagatcgcggatccactatctaaaggagggtgatg

SEQ ID NO: 63854 - DNA, 399 bp, Zea Mays
catactgttccatcactttacattaaagtacaaatccacttcattcgtctcaaaaaagctgtaagtattgttttttagataaattaaattctaggaatgatccaatttattaaaaataataataacgattatgatatcatatcaaatatatttttgtagtaccactatttaggaacatatatgaatattgataatatatatagtcaaattttcgacatcctaatttaaccgtgggagttgggagagggatatttgcgagcacctgccattcgtagttcgtacacagtagtactgctcgtttcacccagggatatttcagtggctgtagcctgtggcctgtgccccgtcggcactttggtcaacctctacaaggtccacacgaaaatgcagaaataatgg

SEQ ID NO: 63855 - DNA, 874 bp, Zea Mays
ctcggatgtaatgttcttttaaatagggtggattgcgggtttattttaaaacaactcggggttccttatgcaaaagcgccacgacgaagaggtatcacaggctcgggttcgttggatcgaagatcaacgcccaacatcatgttaggatccgatctgcgatgccaaccatcggatcaagtatccacgactcttattatcccgcgaaccgatatgtaatgtcatcccttcgatcgatgattgatggcatagatttaaacccccctgagtccccagatcgggatccgaggatgtggaggcaacaaccaaagaaaaagggggggtaagtcctaccctaatctcaatcgtactcgtgcaatccgacggccaccctcacatgccaactctgacgagagttggcagccgcgccaccagacctcgcgttggtaacctcaccagtgacgttcgaattgatgccacgaagcgtgaaaactcaatcaagaactgctacgtgataccaagaggatggtgaattgggtggaggatcataccggggtttcagggctatggagaggtcggttcgcggtgattgaaggattcgcggcgacggagagctttgatgaggaattcctcggcctcccagctttcgatcccgagcgccaagacccgcagggccattgtacgacacggtgatttccccacacagttctccggcacccggtgttagcgtggacggtggacgatcaacagcggcctccctggttcatagcgcgggaggtacggccgcgagctcctagatcccacctgaggtgatattggcagaggatatggcttgttgggttttgatagtcgaggcacaatggtgtcgaacctcatatagacttggtgggggattccc

SEQ ID NO: 63856 - DNA, 482 bp, Zea Mays
tagctcagttaggagccgacaagcatcacaagcatgcgagggtgctaaaacacgaataaggagggtgagtgcggacctgagagcggctagccccgacggggtgattcacggcggcgcagatgatcaatttgggggaaaacccaaattctacggctatggtggctaatcggagatgagagttagtgtcttgggttcaaaataacttggcgaagtagagtggggcatcaatttatagaagctttaggcgggggctccgaatttgggaggagtgtggagcttatctccctcgtgaggcaatcaccgaggctcaccgtggagcgcatgcattcaccttgcgcctgtaactatctcggggtgccacaatcacgacaatgtggtgaatcaggcgactacgtgtcccttgctgcgatcacgacgagcaccagcggcgatattttaccgaccgtgcgggcaagtgggcacggcggtgactcagccccgac

SEQ ID NO: 63857 - DNA, 695 bp, Zea Mays
cgcgacatccaggactctggttggaaaggtcttcaggtctggtttctactggacgacagcgaagagtgatgtagccgagttagtccagaggtgtgaagcttgccaattcttatcaaatcagaagcatttaccagcacagcaactgcagaccatacccgtaacatggtcatttgcatgctggggactggacatgattggacccttcaagaaagctcaggaaggatacactcacgtgctggttgccattgacaaattcaccgaatggatagaatacaaacccattgtttctctgacttcagccaaggcaatggagttcatacaagatataatattcaggtttgggataccgaatagcataataaccgaccaaggatccaatttcactagctctgaattctttgatttctgcgaacaacgaagcatccagatcaaatatgtatcagtggcacatccaaaggccaatggtcaggtagaaaaggctaatggaatgatactggaagcgctcaggaagaaagtcttcgacaagaatgaaaagttcgcgggaaaatggatcagagagttgccgtatgtagtttggagcctaagaactcaacctagtcgagctctgcatggaaacacccccttcttcatggtctatggctcagaggtagtgctacctgccgaccttaggtttggggcaccaaggctggtcttca

SEQ ID NO: 63858 - DNA, 701 bp, Zea Mays
ccgccgcacttctgcctgtcgccgtggccagcgctctgtaggctactatctccagtaagttactcccatgatgttcgcccttctcctctcgtcgtattgcgcctcgtggacagaaaaactgtgctctggtgtgccatcgggggatggctccgacgagtcgccgccgcgttcgctggggcacctcgcctgtgtgtccgtcggaaggaaggagaaccttgtgagccattggatccgggatggagggtagagattagatgggcgacaacggttcgattatggcgtacgtggatcgctggatcgtggggcgacggccatgatcggatccttagtgtttaaaataggcaccgttggatcttgatccgatggcgggtggcgcgtaccggttcgtcgtagctggcttttaatctgaagcgtccggttcctatcctgcggccagggtcgttggataccccttcggccgggtctttttgctaaagagtcctcgggaaactaagaaaccaacccgccgtcctcgcgggagtagtctgagtctaggcaaaataatagcttggcccctgacctttttggtatttggtgcacagtccagaggataatgaaaatagaaaattaattatagaaattggtttttaatacaataataaatccagaaacttatttaattcataactaattcattttatctcctttttgacccattccag

SEQ ID NO: 63859 - DNA, 877 bp, Zea Mays
ccctgctcggcagacaggcttctagctcattccatcgggattatatagataaccacgcacaccgtccctccctccgtccattgctgctccctgggtccgcgttgtagaggccccggtgttgacctcgtcaacgaccggcgttcgaagaccagcgatggagtcgggagcttggcgtgcccatgaagatgatgctgcaatcctcaaatcgacaggtgaaaccacggaatagcgtgaaatgctcgctggacttggattttgctgtcgaatcgcattgcactgtggccagcaaacttcactgatttatcctacgataagaaccccttatacagtttcacggtattctctacttcacatagcacctatcgtccttggaagcggagccctagggcgttaggagtgtcacgcaccggtgatgcatagccgtggaggccggcggtgtcacccgtctgtgcgctaggttcagcagggtaaggtgagcatcatagatctgaaaaagagcggaccagattagaagatcccatacccctccgcttccaattagatatgaccatagatcttcgattgcgtggatccgaggagatctcaattatttgatgtctgggccgtggatccgggatcagatggttgggattggataccatttcataaccaagccaatctaatctaggccgccagatcgcaatcgtgcggctgatgtaatgtgatacccctttggccttggaataatgcagaagagcccctgaccttgtttctatttcacctgcaattcactactatacaaagaccattacacataagtccgcatctttgcaaatgtggaccctagcctttttggaacctcaacccaccgtcctggggtaacaactttacacctgat

SEQ ID NO: 63860 - DNA, 797 bp, Zea Mays
cggggagctcccggctacgttcctaatgtaaaaccactcaccttcataccaaacggatgagggaaggggcgccttgaattactccttatggctagtacggagttggatcatggccgacccgacgaacggttggtcgtcgcggcctgtggacactcgcacactaaagaggtattgccacaacccctgatgcggatagaccccataaacacctcgcacagcgtgataaagcatgctatgtgaagaacggcgttgggatgaaggttttgcacctctagttgatagtaatggaggagcccgcgcatgaagggatgcaggcagaggccgaacctgcgctcatagaaggacacgagcacgatcacctcatcatttctgggatggggcacttcaccatcgctctccagtctccaccccgaaacctccttcggggggaatgaaccctttttctccaggccacggaggcggctttctcggatcgaacaagctcagaatgacaccatgtgtgcggggagcaagacagaacggcgcaaggaggaagaacgaccgaggaggattcaagggacataacacaagggtatggtaagcgtaaacagacccaagcacacccttcctttatttatgcaagatagaagggcatgggcgagacacgaacgacagcggaggaaccaccccctcaaccaagggatgcctcggatgccgagcaaaaagaacgtatgttttgcaggtcctcgccgcctagggcagagtgccaagaagatacgccatgggagaaacgccagtaacgggcggggaggttaacc

SEQ ID NO: 63861 - DNA, 768 bp, Zea Mays
cgaaggatgaccttgcagatagcctcacttacaatagtcttaaggtaaagattttccgagttttaagcagattacgttttacatcctttatgattgtgctgatccccctttttttatagggcttaatcttgagcaatgctttaagggcacaaaagaatgctgaagacgaaagctgccaaatagcccttgggaaccttcggaaagaagttactggactgaggaatgaagccctagaaaaggataaagttctgctatctttgatagatagagtaaaggccagcgaagccaaacttactacatagtacgaagctcatagggttgaagttgaagacctaaagaagaagcttgccgaaaagaatgaggatttcgaagtggcgaaagccaaacaagaaataagcgaatggactagttcaagattacaaaagaatgtggatgagcttcgtgaatcaaaggagagatattatgagaaatccttggattgtgctaagaaattgaaagatagttttgcaaaggtgggtgcatactcatcggagcaaaaatttattagaggcaatcccgaaggaatcattgaatggaccagtgaagaagctgaagcttttgaagaaattcttagcgaccacggggatttttgcgccttcgctggtgcccgaggggttgcagcaattttagagaaaactggctgtgaacatgttaaagttgcaacccagacggaaaccgtcttctccatagacaccacaaaggatccttcggctgaagctactttgatgg

SEQ ID NO: 63862 - DNA, 448 bp, Zea Mays
gaaggatggccaacgtgctggatgctgtgctggagactacgaaggccttgagcccttctcctacaaagaaaattgctgaagttgccaaagcgcaagccgaagccgaaactgggcaagtagaagccgaagctacgaaagctcaggctgaagctgaagctgggcctgccgtgtctgaggaaaaaacggcagggcagattgcacctgaaaagatcgagactcctgctcccgaagctccgaccgaaaatgttgactacatcattcgacacgctttggggaagaaattgtccgaagaagaaattctggaagccagacattatgcgcgaaagttgaaatatccgaagggagctttagtgtttaatggcactagcgatgacgacttcttatactgtctcccggacaacaaagaaatatccgtttgccgggagataggtaagagcatgggattccc

SEQ ID NO: 63863 - DNA, 544 bp, Zea Mays
gagtgtattccttaagtaagtcagctaattcatcataggaaggtgaagcaaactcatcatcactatcactatcatcaataatatcattctcaatttgtaccttccgttcacctttagccatgaggcataggtgagaagtagacgagggtgatggtggtggtgaagaaaagtccccagcgatagcgacaactttttcatcattttcttcttcacttgaagaaaacccgcttgaggactcaatgtcagtgagccagtcaccaacaatgtatgcctttccatttttcttcttatggaatcttttgtgcttcccatcctttcttttgaagaatttcttttcctttttctcatcatcactgtcatcatctttcttgcccttgaacttgtttttcttgggcttgttgcattgatgagcaagatgatcgagttctccacaattatagcagtccatctcagagatgtgctttcttttgctggagaagaacttctttcttgagtcaaacttgatgccttctctattgagtttctttaacattttggtgatctt

SEQ ID NO: 63864 - DNA, 518 bp, Zea Mays
attttatttgtatgcttttagcacatctcaacattagggggaggaatgcccatctagtgtaatgcctcaaatattctattaaatgcacaaaagccaaactgaacatgtcgtgcgttgcgtactcctacgtatatggagtttgccagaaatcgttgaggtgtgaccatattggtttgaatgcttctacctgatgtagatgtggatatacccgacattaatatcatattcacatttgacttattggcatttgatctattctcgaggatgcctacgaaaatgatccataggccttagtgaaagcatatgttccgattgcagattcatgtggtatgtgataactctcctccaattaattcaccctgatgatgatttgccttacaaagaggttcatcttgatgatgaagttcttagcaatgcgcgcaatatcattgtgctgggaatacagaacaatgaatctttcattttgggaaatcacgaatataatctcatatgtagagagtatatctccaaaatttgat

SEQ ID NO: 63865 - DNA, 485 bp, Zea Mays
ttgaccttggaaccatttaattcttcattcttgggcttttgggggatagtcattatataaaacttgaagatccattgtaggaggacatttcttctgaagaaggatatcccagtctctattttaaattcagagaaaaggttaccccaagtcgcttggttagatagaggtgtgctgaatttaatttagattagatgcagtggacagtttggattgggtctgtgcatatctgaagaagttcttttttccattttccttacctacatgtttttaggctgtagtggataataagggtagatgtttggagatggggttgctggagaaaaatgtgctgcccaggaaaaatggacgcactgcatctgaagccaggtggagtccaaggaagccggtagaaacctgtgactcagctgtgggtgcgctcccctgtccaaacaccagcaaacctttaccctttgcctcactgtagactggtcttacgtggacatagg

SEQ ID NO: 63866 - DNA, 618 bp, Zea Mays
gggggagctgtgggccgctgtcgtggtcccttgccttcaacggcatttggggtgtttggcacggtcgttggtgttcgccggtgctctcgaagctcgactctgccgtcactgagccaccactggggacgtcgggagaccgggaattcgtcgacaatggccatcttccgccgtgaaaacgtgctgcgtcgtggccagggtacctgagggcatgattcacggtaggaaccttcacaatagcttcataccctattcaatttggttttgcatcacctgggactcgagctttgtgctaggatcgtgttctagagggatctggcatggcgccaccgcgcccgtacgcgcgccgccgttggtgctgtcggaggaaggggggtgaacccgtggtcgttcgatccattactggcggataggattagatcggtgggacgtgattcgatctgagccatcggaggtagaaaaaggcacgagagtcgttagatcgtgatcccatgggtaaaaatagatcatcaccttcattagatcttgggtgtcggatcgagatccgagggcagccgaggcatactggttcattaaaagggtaggtctaatcttaactcttggtccgcgatctgacggttg

SEQ ID NO: 63867 - DNA, 847 bp, Zea Mays
tttggtggattttgtggtgactaaaacgtgaccagaactcaaaactctaaagaatgaaccactaagaaccagcaactagcccaaacaatgcaattgaaaactcaacaagcaaagaactaagcaaaacagccaaagctcaaacttgttcggattttcagatctagcctgttttttttgtagttttctggactgtaggtaaggggatgggtagaatctctcaccgaaaaaaccttgctctgattaccacattatggaacccgctggggtttgctcccgacctttcaatgagagtgggggataacgcaatttgaggagtatcgacgttgtgctgcccgactacaacaccaagggctgcgctgcgccttagcgatagttacactgcctccaatttgcgttgttcttgctgtgccaagaacaaccttgaacctacaagcaaatcaaagaacaagcaagaacaagtggacaagcaaacaaccacacagaccttgcccaaaggagaaatctgatacacacgaagttggggttctgaatccgagaaaatcgggtggtctaatcgacacacgcgtttgcctgcaagtagcagcaactaaacttacaaccaaacaaaacccaagtctcaaatggtggctgctggtggtttatataggtgggggagcaaccaagaggcgtggaggggtttaaaccctaacttagaatgggcccctagtggtctaaacaagatacaagggcctcagcccaagattgggtctaagcccaagactagaagactgaatgtcattttggcaattctgcttaactcctttggaatttcgtcttgaggttgaatccatctgaaagtagagttcag

SEQ ID NO: 63868 - DNA, 573 bp, Zea Mays
tagtgctaactacattggagatgctagcaaattcctagtggtgctcgctaccatagattaggcagcaggagaccatgcccacaatgggacacagttctatggtgtcggactttgccaatgagcacacatctcataacctagtgcacgacttcctactcaatcagacgctaatcgaatcggagaataaggcgcattgaatggaggccttacggagagtaatcgccgaggcaaggatatcaatcgcaatgctatgtggctcgatgacatcccaagaagtatgtcgaccaattatgagccacctcgtattcagcgccagtgcgccactcggtgaggccacggttgtcccccgtagcccgaagagtatccttggccggtcgccgaggccacaacgatggtgcaccgaagatttcaccccgcggcaaaacctccccttctcttcccctccaccttgctctcttgtttgttagacgacgatggaacgttagcgctggatggcgaagaggtcgcggccccctgacacttataccctgattaccaaagcctaacaatcatggtcagtttgtaacgactctg

SEQ ID NO: 63869 - DNA, 425 bp, Zea Mays
gtcggggagcatcaggggcacacaaggacattgaaacaaaagagcagagggcatgagaggacctgaggtgagctagccacggcgaggtcacaccgctcggtgttcatgagtgatttgagggaaatcccatattggggagctctagtagatgattcgaggcacgggttgcttcactgcttgcacaattacttagcggagcaggcggtgtcggcaatttataggctcccacagtggtggtcggtgaattggagggagacgcgcgacggccgtagaaagagaaggttactggcgctctggattagtggctttcaccgtggcagctccaccggcgacgagccagggccacggggtggtttattgtgactcaccgcgacgtggtaaagcgttgaggcacgtatcctggccggataatggcgaacgccggt

SEQ ID NO: 63870 - DNA, 469 bp, Zea Mays
ctcggttgggtgtggtccagttcccccatagcatgcacgaaagctcatcgacccattttccgttgtgctttgacaagcagttgtaagtacgcgtcttgagaccatgaagatctccgtgttacccctctcaacttgtctgttacttttgggatgtgccatagaggcaaagcagagttgagcgtcgatgccttcgcgatactcctgaaagagtcggctcctgaattaggtcccattgtctgtgatgatgcgattgggatgccaaatctatagacgatcgatttaaggaaggcaacgactacgctttgggtaaagtttactgtaggggtaagcttctggccacttgatgaatttgttgatggtgacgaagaggaatcggtacccaccaatggccctgggaaatggccccaagatgtccaccctcatacgatgaatgactaagatggtggaatcatttgtagtgactgtgccg

SEQ ID NO: 63871 - DNA, 596 bp, Zea Mays
ttgtacgatatgaagataaagggcgaacacaactttttgatttccaagattagttaaggaacaagggtggtttcatatttctcctagcttcatcatactacaagagtgtacaagtgttataatccttaacatagatccttttgaaccttataaattacagagcatgatatccaaatcatctttttgatccaacagtatttctttgagcacaaattgagagaaagacttgagcgggactttagggcaactagaatagagcatcatattgtttgcatatagcagatgacgccatactttattctctttgtaaaagggcaaaacacaataggtgcgaaagattctccaaatttattcatatatcacttagcacaattacaaatcttgaaaggggcaacactttgacattttttttgacaaactccttctagttaaatggtatattattcttccttgtgagatgcaccaatcagagttggaggtcgattgtcttcaactactattctttctccagatggggtttccaaacacatgttctctcagtatgttggattactgccttagccctttgtaaccaattctttccaagaatcacatcc

SEQ ID NO: 63872 - DNA, 2178 bp, Zea Mays
ttcagtccctagaatcacagatcaaagaagaatcatctttgtaggttttatttagcccagaaacttatcatcgtcgaactaaaaaatcaaggcaaacaattctgctccaaaaaagttaagttgtgtttcgtttgctgttcagttgtgtttccttcatcacttaggagcctttagttagctgctcaaacaaaatctgcaaaatcctaagactctgtagaagtattctaaacatacttccacttaaaaatagtgcatatctaatttgatcccaaaaaagtagcacaccagacattaaaacccagtccgcatgatggcacgatgccaagaaagcacaaactgcaattgataggaagtcatcaaacaaatccacaatgattgtttgccatgggtaggcatcctcaaaaaatgagggtgtgtaacaatgtgagcgcccacccaaaaaccattgtgacaaacacccattggaaaagtccgaggaacaatagaaaagccccatctaacaccaaggcagaagacctgtgtcaaaccaaaacttgaacgtaaagacatgtgtcaaaccaaaacttgaacgtacctttgaaccaaactaggaacatacattctgcagttgcggcaacaagtaaaccagacgcgtaccttttagcatacacaattcaaccagttttttcgcacaaacatcacgaaataggaataacttagtgtttttgttttaaaaagaatttagcacacgcagctgcatagtatgtgaaacctggatttgtggattgatttcagttacaaactcataccgattgcaaatttgggtcacacacatgcaaacgcctcaacgctttatccgtgacatatagaaaacataacatattccaagtttaaagttgcatcattttgcagctcgggcctacttaagctttgagctaaagtaaaccaacctctttaggggtattggttatattgttcaaaggtttgatgggtctaaatctgaatctatatgaaatcatctcaatgctttatccatgaatctaaactaaaataaatatgtcattgcaaccttaattggcttgatacatttatttgtggaagcgtatgatacatttacaatgttacaagagacattttttcttaaaccaccagatggtccactgtcctacactcacactgacagcctcccaaatatttagtgaactaaacctttttaggaaagttcaatctatcgaacacttaaacttattgaaagaacaaagcataagccattcttattggtactttctctgtgcaagcgaccaacaaacctagtcgatatgtacgagccaaatgatcggttaaatgatcaccaagcagtagagcaatcgtatcacataaacctaggattaatacttctgattcaaacgcacaaagcaccttcacttaacgcgaagcaccaatcatccaaactaactaacaaagtggaacacacaagacaagaactcggaattaatgaaggtgtatcaaaaaaacttgaacatgaatgtacctaacttttttgtcgcctcggattttcaacggggattacaatttgagatgacacattgataggggaaagaggaaaatgtgtgaacaatatgcaacatcagaacagtatcttagaatcatatatactaaattgatattgtataaaccatttcattgagtttgataatactttttcttttcaattgcaagcctagttcaccatgtgacaatcatgcatcctaactcagaatttaagtacactatatctgaagctaagtggcaacttgcaagtatgtgtaatggttcataagtaaaacactctttcatgcagcatagctaaatggagaaatttggaacaggaacgtacctaacttttccgtcgcctcgaattttcaaggtgattacagtttgagatgacacatcgacagttgaaagagtgataaagtgataatacaaacatatcatgaagcacataggaaacctatgtgtatgcgcacatatttatatgttgcctagatgatctataaagtgatctctcgttatatatacatagttatataaaaaatcatgaagtacatgaaaagaattatatacacacacatattaatttgtttacccaaatcagatatgaagtgatctgtctctatatatgcaaagctatataaacaaatcttgaagcacatggaaaac

SEQ ID NO: 63873 - DNA, 1083 bp, Zea Mays
aagaagtcaagctgtctcaagaaatactgtgaatgctatcaggtacttcattgaagttgagatgatctcatctgaaattgtacctattggattttacttatgttttaaatgtttggttgaataaagggaggtgttggatgctccagcaactgcagatgtgagagtagcaaaaatgcttttggcagaagagatggtgagcatttagcgtttcaaatttaggaacatgtacagtccgtgagtcccatcccgggacatcttttccgacttactatattatgatgctaataacttctgatgtgtcccttgaaataatagaagttcagtggtgttctcattaaaaagtgtttctatgcactgaacatcaatcagattaccttgcctatgattttaatttggattagacaccactgtaattcgtaaacatgacactctggatattttggtagcgagtttccttaaaataggtgtatcaggacttctattctatgtaaaaaggtgaaaggttcatgttcaaacaaaattcttctatgacagcataggtggtggttgtaaagaaaaaacatcagatttcagagagcatccttttgtttttgcaatctattgtcgtttcagattttctgaataatcaacttttgtttcctagatatatctacatttgcatactcatctgagatagatacggagtaccggctaaaacccacacccacattactcttaactctggaatgaacaaggcaccgtggtttagtcattcctctgattatttgtagcatcccaaaaatcctaatctaggtttgaaaccctaaatccaccttttccccctcccttcatcctttaaatccaatacctccactagtttttctttcatcatatgcatacattttgtttgatcacaaagcacctcacttagattatattttctaaacacttagagtatccacaaaatttttgttcaaaagaaaaaaggggcaaaatgggaaatagaaattagaaagtaaaaagaaaaagggaaaaagctctctcctccccctgctggaccgaatccaggcccaagcccacgacctcccctctcccacgcgcccg

SEQ ID NO: 63874 - DNA, 551 bp, Zea Mays
gtggaggagatctgattccgagacaacagacatgtggttacctacaaacgacaactgactattgaggtcgatgggaggaatgactaccgcagcagaactctgattcttccgcttgggagccattgcaatctcgccggcgggtcgaacaagggcgaaatcagaggaaaacagagtggttcgaggcagaaacgtgaagttagggctcagaactcaaaagcgcacgacgacatgagtataaatggggttttcccgggttgggcaccatttctaaaaagtgccaagtcatcactcaggaaaatgagaattccgacatagctcgactgttacctctaaaacaccaacaacatcaaacaccactcggtcgttacctctaaaacgttgacagtgtctgccatagctcggctgttatctttaaaacgccgacggggtcaaacaccactcggtcgttacctctaaaaacgccgacagtgtcttccatagctcgactgttatctctaaaacaccgacggggtcaaacaccacacggtcgttacctctgaaacgcaaacagc

SEQ ID NO: 63875 - DNA, 413 bp, Zea Mays
ggagattggttatttagttgcagcattgtgtatgatatgtattcataaattcacatacttaccagaaagtgatgatggatgtctagtggcacacattttttggtcttgtcgtactttccacctctaagcttatagaacctataagctctgtgatatcaagtagaatctccatgttattttaaaattctcaacgatataagtatgcatgtatgcatagaaaaggcttagtgctctaagactgaggaattttgcataggtttaagggtcgtagttcaaggagtcgagcaccaacacctttccaaccttaggataaatgaggaagcatatccagtggtccctgtacgaatcaaattaatttgtgatgcatgtgtattgaaattattatttttatgcaaaatcacacttacttaaag

SEQ ID NO: 63876 - DNA, 494 bp, Zea Mays
atatcaccaagttagcaaaattggagggttgaatgtacaggtatatttccagaatccacgaaggcattgatttgtgaagttcgtatgcagaatttggagccaaaagagctgttttgacgttgatcgtactgcactatgatgacatagagtgtcaaacatttcaagtatggacttatgttctgtgtactccaaatggtgagcaacataatttaggttatgaggacttaaagttacatataactggtttccctggagacatgttgttacattacaccatgttctttttaatttgtatgcagcgatatgtagcatggatagtaacgcagcggaatttacaaaacgtcaagtacaccgttggatttttaggatatttttctttaatcatgtgtaaacagtattcaggtgccatggttggtgtcctggaaggtaggaagattaaaaaaaagggaattgcattttgcattctggatcttggcaaatcgtgcttgacagaa

SEQ ID NO: 63877 - DNA, 486 bp, Zea Mays
ttggctcctttttgtcaattggaccttatgaatttggctccagcaactaggtgaacatctctaatctttggaagtggctgatttttgacttagattaaatgtggattactctatagtgctctccacttgggggctgaatttgggggttttgtaggacctttttggaacaattcccttactatttcttgtagatatataaatgtacttcaactttggtataaggtttaagtcatgaaatggtcatttgcatagtttcccactaatccaatgcttggggtgtaatggctcaagagggggtgctagggtttgagcatctttttccaaggtgaagatacatgaaaagctagggtatcccttctatcatgattattacttaattaagccatggtttctaatgtttttgtgccccttctccccacttacccacttgtgataacaagccataggtgcatatattgagccagggccttgggtaacacctggggt

SEQ ID NO: 63878 - DNA, 468 bp, Zea Mays
ggcttctgtgctgacgtcatcaggcgcgtagcggcccaattctgtgaatttgtgcacgtactcactgacagattttccatcttgagttagttcccggaattcatattccttgagctgaacgatcccttggggcacatggtgctctcggaaagcagtttcaaactctgtccaggtaacatatctgatggcagcgttgaaggtatcccaccaagctagggccatctcggaaagttgatgagcagccaattgaacacgctgattctccggacatccggtggcttctaacttccttttaatcgtgcgtagccagtcatcagcatcgaggggattgctagatctagcgaatgtgggaggcttgagccttagaaaatctcccatcctgtcttgtggtcttccaccattcgggcgttgattctccagacttctagtgaggacctcaatgagtcgggtttggttggctagaacttg

SEQ ID NO: 63879 - DNA, 558 bp, Zea Mays
ccgaccccataatctggacagtacacacaactgcatgcagcgtgaaatatgagtgaccgcagcttgtgcgcatcggacctgtaattacacagagctcctcgctgctaatacacagctctgcaactccttgcagtcagatccgtcgttgcccagcccgaacggggaggagcgatacggccgcgcgctctctaggtcggcctgctgacaggcagacacaaactgctgacattggactgtagtactgacacactagatcaaggctctctaatcaactgggatcagtatttagtttcgaacggacttgttgcatctgtgatcacagtctcgtgactgacagggcaggtgaggacgataaacaggacctggcacaaacgtagcacagtgtatctggaggacgcgagtacggtatctgcatatgaatgtgcgtgagaaacagcgagagtgggggactgattcgttattattagttattatcttctgcaataaagacacgatggctcgacctagctggatctgattaccgatacggattactctcgctctcaggctctctgcggc

SEQ ID NO: 63880 - DNA, 562 bp, Zea Mays
caattgggcaagagcaccggtagtatcgagtgtggaagggcgatgtaaaagcacattggatttaatagtgttcttcagcacgtcaataaaatgcagagtataaaacatgggatcagttttgttctcataagctgatagctgatctataagttcagaaaattattcaatatagagtgctacagtcgaagattgatgaatgtgaaataactggcggataaactgttcgtgttggtcgcgcccgaaacgttccaacatccaagtactgaattccctccaactagctcccttaagctttctctccacatactgccatcaatgggcagctgggctggagaaatgctgcacagacacctgaatccacatgctggggtcaactccgtaaagatcgaagtaatcttcggacctaccgatccacagtcgtgggttgtccccattgaatgtgggaaagtgctacttgggaagcgatccaagattaggtgtggttggtgatttggctgtgtggcctccaaagtgataaggtgcagcaccgataatatgtggtgaagctgggaactcgaattcg

SEQ ID NO: 63881 - DNA, 1015 bp, Zea Mays
gtaaagttgatgaaaatcatgcgaaaaaagggtaagagctgttgaagttgcaagacatgttgaagatgcaattcattttaatatttggtaaacatacatgtctcatcttctaacgctcacctttaaataacccatgtttacactttttctaccctcagatcgacgatttacgctaaaattcataatcatttacgctgttttgattcacatttttcgctaaaatctgctcgagctagaacctgcacacgatcggacgcgcgcgattttcacgtcgtaatgttcggtctcattcgccgtaacgaaacagatcaatgatttacgctaaaagttgtactcatttatgttatttaagttcatgttttacgctgaaatccacccgtgccagaacccacgcatgattggacgtgcgtgatttacacgccgtaatttccggcccaatcgctattacgaaacaaatctacgatttacgctaaaatttgtacacatttacgctattttggtttacgttttacgctgaaatccacccgtgccagaacccacgcatgattggacgtgcgtgatttacacgccgtaatttctggcccaatcgacgttacgaaacaaatctacgatttacgctaaaattcgtactcatttacgttgttttggtttatgttttacgctgaaatccacccgtgccagaacccacgcatgattggacgtgcgtgatttacaggccgtaattccggtccaatcacctcgccgttacgaaacaaatctacgatttacgctaaaatctgtactcatttacactgttttggtttacgttttacgtttgaaattcatatgtgccagaacccacgcatgatcggacgcacacgattttcacgtcgtaatttccgggctcattcgcacttacgaaacagatctacggtttacgctaaaactagtacccacttactttgctttgttccacgttttacgctggaatacatccgagccagaacgcgcatatgaacgccgcgggggtatactg

SEQ ID NO: 63882 - DNA, 906 bp, Zea Mays
tcagaaactatttttatgaaattctatggaaaataagaagtctaggaaaattagtttgacatttttaggatttttctaccattttctataatttcctaaagcttcactgaaaaagaaaaaggaaaatattaaacagtactgggccggtttcagcccaggcggcccagtaacatagggaaaacggggcgtgcccacgcccgcgagggagactttgcagaagggtccttgtcttcttgaatatcctgacagagtccaaggcactatttaacacagtcgctgacagttacaaagacaccctcgcacttctatccattctcggtttgaagtccacgacggcgatccgcgctgggagctgagctccggcgagctagaccggccgaatgacgccacggctggagctcccgagcgacagggacacaattgaacccttaccgaacacttcccccaaatcaatttcatcgttgggactacgaattaaccggtccatggcgacagggcggatggttatagggacgaacacgttccgaccaaacgacggcgaggatgaccaaattgaggctggggaaagtttcacggggtcaccagggtctatgtacacactttggtttgggcagaacaagaaccgaagagagggtcgatggtgaggggggtcacggcggcgttctacagagcaggcgcgtgttccggtgaaaggctttggccgaacttcaattggctggttccgagagcaataagagaccataatcgtgctaaaacaaggagcaattgggggaattactaacccgaggatgctgattacggtagagttccttacggcggagcaagaacagggaaggggagaaattgtggactgcgcaagttctctggtggaattgagtcaaatgcttaagcactgaggtgcggaat

SEQ ID NO: 63883 - DNA, 494 bp, Zea Mays
gttgaagacaaagctatgacggtcgccttcggtgctcaagggaaaaagaggctaaacagggtttttgatgttattgggtttgtctaccctgattactattttcctgttcggaaacaaaggagaaaaaggaaaattgctgcttcggcatcctctagtatgtcgaaggcgaagaaagtgaaggtcttgacacgtagaccgagacgcattgagacggccgatgtaccaaagcttattgaaggtgcagaaactgccccttctgtcacagaatcaggtcctgtcatgccaatcgaaacttgtatagatccagcctaagagccaaaatcagagaaggcagcagaacagatgaaggtattgagcccagcaattacaacagaactgctgaagccatcaagtgtttctgcagcgactccaagaaaaaggagaatggctagtgtattagacgctgttttggaatccgcaaagatgtcagctcccgcttctgtcgaagcttctag

SEQ ID NO: 63884 - DNA, 910 bp, Zea Mays
ttacgtgtggtgttcttaaggcgcctaggcgagcaagcaaacactccgagcgccttagcgcctaggcgggcaaggcgactaggtttagccgagcacctggacgcctaggtgacgccttaaaaaccctggttagtggggcattaatgttggccctaggtactccatactgcatgttaggtcttttcggccttcttggggcctaaaagggctcatacatatgtgtggatgggatcattccacgtccttgaagggtcgtgggtgctagagagacattagtttggagctggtaatatggttgctagtaatattctacgttttgttcctcataccctatcgtagacggtccggtgtgatatctggacggtccagtgacgtgctcgaacagtccacgtgtatagtcggacggtcagaacatctctactcgccttggcgcggttttcggtggctcgtcgcaagggacgaagccaaccgccgctaggccggatcgttcggcctcagacctagactgtccgatcgtgcgcaggggcatgggttgttcccatataggtagcgaaggatgtggctagccattataggagttcatcggcatcccataaaggggctaggattgggtatgcccatttgcagccaatgggtcctgtaggtcttatttagtttgggcatcgtgtgatggaaaactggtaatagtagatttatcaaaggcacgtgctggcctcctatagtcctcttgtacaccccccctaagatttgttgcgtatgttcccgttgtttctctatgtaagatcgaagagcttggatgtcatcaggtttacttacagcgggtatgattgtagcaggacgaaaactcaccaggttgtattccctctgtcagataagcttctggtttcagtcgaccttgaaatcagcaaag

SEQ ID NO: 63885 - DNA, 386 bp, Zea Mays
tgaaatagctcacactccatttaggccatttaagaatgagattgattttcttaccagacccctcactcattttctttatggtgagggagttcaggcgtatccagcttagcaaatgcctcctcctccacctcctcagcagcaaggacagtactagcagcctacacctggatattgtgatccttattttcaacaaatgcagcacgggctccagacacatatggatggtcaatttcagggcatgatgtcatatgtcgatgaccgctttgatcacatgcattctaactttgatggtcaattctctgatctgcatgatcgattttctgttgttgactctcagctggatggggttcattcacggtttactgatcttcactctcatattcgaa

SEQ ID NO: 63886 - DNA, 419 bp, Zea Mays
attccctctacccatctagaaatccccttggtcactcgaaccctagggtcagaccttctatgccagctcaaatgctcccaggtcagaattcttttaagtggggtagtgttcttagcagacttaaccgtcttgccatcctaaggaattgatgtgatcttagggatggattggctaaccaagcacaaaggaatcataagttgcgcaaacaagacagtccttctcacggaccaccaaggaaagtcattctcttgtcaggctcagccacccgccagtgatcctatggtgtttaatctagcaacagaaagcatgtcagtgatagaagaattcatggatgtatttccagaagagttgccaggaatgccgccagaaagagaagtggaattctacatagacctgatccctggtacgacaccgatcgc

SEQ ID NO: 63887 - DNA, 388 bp, Zea Mays
gtgaagtctggtaacgtcagtgtttttagaaataacagctgagttattttgggttgcgtcggccgttttggaaataacggccgagtgatgacatggcacgccagcgttttcgaaataacagtcgggtgatgacatggcacgctagcattttagaaataaccatcaggtgatgactgggcgctttttagaaatggcgtttggcccaggaaaaccccatatgtactgcactgttgcatgtctctgcattctgtgccttagtttcgcttttctgcatctaggccttctctgccctcttgcaatactgcctccgctctgttcgccagcaaagttgagatggcgcccaagcggaaatcccagagttcgtctgctgcaatcattcctcctatcg

SEQ ID NO: 63888 - DNA, 679 bp, Zea Mays
aataaacttgtttctgatgcttcaggctttagcgggaatttcaattaagtctgacgttgagaggctgaaggttggcttgttaactgttttggcatgagtgcatccggccttcaaaaacgtagcagttatgccacgtgaagctaatagagcatagaaatccctgtgcctagtcataacttcatcgagagcttcaacttcgttttcaatatgctcgaaggccttggggatatcttcagccgaagggacaatttcttcagaggtagacccaaccgagttaaatattccttttagtcggtttacacagcgggtggcaaagtccgtgcacttgttttgaaggtccttcatagactcacgtagctttgtatttttctcagcttcggcttcaactcttgctcgaagttcttttgtttcttgatcgaagcgctctgatttttccttcaaaattgttcgagcgctgtcgagttcctcgcttaatttagtgttttgagattgtgcttccgcgagggagccttcgactgcttgtagcaggaaatctttcttctctagagaagcttcaagatcccttatcttattctccaagccttcaattaaaatttcgtttttcttatctttgttatcctgctgcattgtcaatgctttgctcaacagcatgctctgtaaaaacaaacaaaggttaaac

SEQ ID NO: 63889 - DNA, 1040 bp, Zea Mays
cacagaccaacccgttggtggacggcgggttcaatattgggatctacgaggtctcttttgcataatggcatggccgaaagggtatcggtgatcacgagtcgtccgatccaacattggcagaccagattagaacggcccggatatgaaccggtatacccagatggtcgttggatcaagaactcacggtgtcgattttatgtgacgcgatagaatccaaaccacccaatcccatctacatggctcagatcaaaccacgaagcaatacacgatgattctaatctcagccctccgttcaaatccgacggccgcgcgacgtcttctacctctcggcctcccactgctccttctctccctacaagctagccatggccgcccgacgcgaagtggtcccacggtgatgagcacacaggtgccccaatgccataccacgactcccaccgttgctacgcgagctagagatgaaggtgaacagtttgagggaagacttaccatgtagcgagtaggtctacaaacggcgaggagtgttcccacagcgactgccgcgctccggtgagcgattagagtagcgccgagcacgccctcgacccgtcgatgccatgcatcgccttgaaagacgcccaggattaacctcgttccccgccacgggcctatcgccgacttggctcccatcgagccaacagcagatctcattactctctcccccccatggatgctctcggttagcgcagtacctgggtcgagctcacccacacggttcatgggggaaggcggagctcgagtcacacatatatataggcatggattaacgagtctgattttggtggggggaaacagaaaccgtcggttctagcgccgtctgttgcgatgtgcaaccagagcctgcgccacgtgagggagatgaagatgacaggtagggcccaccacgcttccactacgcactcgcccggccaaatcgcagtgaggcggatggagcccgcggagggtgctgcgtgggagatgggctggcacgcgcagaaggactgacttggccggcaggggac

SEQ ID NO: 63890 - DNA, 402 bp, Zea Mays
ggaggcttcatcgggtcatggctggtcaaggagctgctccaacgcggctacgttgtgaggggcaccgcgaggcaccctggtgagtactgagcattctagctagcagatgagtgagcgagaagcgcttcccagtccgtaaataaatttagtaaaattcaaaagatttcaacgggacctgtgtgtagacgcctaggggccgggtggccattgcttcgtctcccgctgctctggcaggaactgtccttacatgctatcttttttgctatctggtgccagaggaccccaagaatgcccatctgctggcactggacggagctcaagaacggctgtctctgtaccatgctgacgtgctggactacatgtcgcttcgtcgcgcgttcagcttgtgtgatggcgtcttcc

SEQ ID NO: 63891 - DNA, 783 bp, Zea Mays
aaaatattcttccctcatattcagtgcatctccaacaatttcctctatccatctccctctataccaactaccttccataatttatgttaccgtttctagaaatgaagaaatggttccccgaccacaatcaattactcaccctaatgcccccctgaaatgcccttgtgcattgcacatcagccccaattctcattcattcgaggttaggtgcatggtcctcgtacttgtggtttgctaggggggcttgccatagaaatttcgcccccatatcctagatatgtatgatggggtgatcaaccccaccgagttcctccagatctatgtcactgccatcctcactatcagtggctacaaagaagtgatggcaaactactttcatgtggatttcaccgactcggtctgataatggctcatgaatctacatgaggccttcatatggtattgggaagattcgttgatagtttatgtccaacttcaagggcacatactcctagctcgatgtggagtctaacctccatgttgtatagtagcgacttggtgagtccctgcacgcttttgtgtagcgtttttgcctagttagagacatcattcctggcatattagtagcctctattgttgataccttccaacaagccgttcatgataagaagatgattgagaagttggccaccctcaacacgcaagacatcaaatagctactctctctagcggataagtatgtgcatgacattgatggtagaacaaggcatgctccttgtgaggtgcaactagggctatatggcc

SEQ ID NO: 63892 - DNA, 993 bp, Zea Mays
gcaagcagatcatcagttcataggaacatatattgaaatattaacattgtcatcaattcactagaacaacaagcaaatcatcagttcatagaaacaagcggatcatcagttcataggaacaagaaggtcattagttcatagaaacaagcagacatgtaatgtaacagacacataaacaaacaacaattcataggataaaaacccaaaccctaaacaccagtccataggattaaaccctaaacaacagatcaaggcagatcaggatcatgttacctttgtgccaaacatggctcgacagatcaggattagtacatccggagcccagcaagcagatcaagataacaagttcccaacaaatagcacttcatcagtgagcagtagatccagagcctagcaagtagattaagataacaagttccaacatatagcagttcatcagtgagaagtagatctggagcagatcagctaaacagaggagcagatcaggttacctctgtgctagacagggagatggcaccagtgagcagtagatccgaggcaccagttccgtcactaactcgtcgtgaagatagatggacagcctacacacactggttcctcacgaatccatagaactcacattctcaggagcagatctagagcaccaagcaccagttcaccaatgtcggcgcctactctgatgcctttgaaggtgaggtatagagggggaggaatggaggagatggagaacgggcagaagcactagactaccagatcactagcacatcagaatgactgagaccaatgaggcaatgatggaggcatggagcagcgagcactgaatccaggaagattcgagagacaccgagaggcgagagcgcagtggagatatcgagagcgagaggcgtgccacaagcggagaggcaggagtgagtccagttagagttagccagttagggttaggagcttatatggcagcgacactcgtgagtgggctgggccattggggagtgg

SEQ ID NO: 63893 - DNA, 868 bp, Zea Mays
tgaaaattcatataatcactttacaaaatagaaaccagctcattcaatcaaacaaacaaaaataattggatacttccactcacaaactaacaaacataggatcaaatttctaccaacatgttgccgacttcttcttggatgtcagggtctttgtgcgctttcacactgatctagagcaagaactttgtcgaggttgcagtcctggcagtcgtccttccccttcgtgcgactctggcttcggatcttgggcctccatggcgacaagccgacgacgggagactgaagtcaccggactggaggacaaggggatgcccgctgtggcctcagcatgcgactaagcacgggctgctgagcttgtgtggcaagccgttggagttatggaccgtggatgcctagccggggatggatggtgctatggcgggctggcggtggcggtggacagtcgagtggcgactgcggcgtgaccagtgaccgcgtgagcatgagtgacggtgtcaggatcagcagtctaggttttcgatttaggactgggagttgccaaacctgagttgggccttggcggcttggccagtgtttggtaactgttcatctggtgccctggtggagactccacccgtacgggagttgggctgggcttgtgccctggtcacctattgcatggacatttggtttgggtcgcaacgatttgagcttgtgtctgtgttgctctgtaattgggcatcactaggccacaagccagctatacagatcgttaggctcgtgagtaactcgcgagccagctcgtgttcgactctttaagaaccgagctaaaatgttggctcaactcgtaaatcatttcaaacgatccgagtcgagtcgagccactaat

SEQ ID NO: 63894 - DNA, 307 bp, Zea Mays
gaaggacaagcgctataatttagcggacatgatagaggacgctattggacagcttcaggaggatgagaaacgctaaatatagcatacagaaccatttgcattcccttgttggagacaacctaaaatattacattctctatatttcttttctcttcaacaacattctctaaatcatgtcctcaacaacattctctaactctactaattacaaggccacttttggcctgaaaaaattctcgcataggggccaacctttcaaaaatcctaaattgctccttgcagcccattctgattcatggcccatttc

SEQ ID NO: 63895 - DNA, 596 bp, Zea Mays
gatggaggtagtcagatgtattgttcaccaaagcttacctctcgttgggggcttcactatgtcggcgaccagccttgttctcacctctgctaatggtgacacctcccatggttctgctttgtttttttactttgcttagcctcttatcgaagtgcggtttgagcgctggggtgtccaattcgctgatgtcgccgtcggagcgggggtggaagaagacctgggaactgtagatcaaacatctggggctgggattggttgtgtgtgtggatagtttctggaccgttgatagtatgacgtccggtctagattagagtatactatccttttggttccggaccgttgaatctcaatcggacgcctcagattaaatcaaccacgtcccccttttgccgcattaaaccggagtctcatatttccagacgaacggtcccgatttgcgcacgaatacctcttcacgcgatcggatcggggcccttgttttctgatcggacggctcagcccgtccaataccccttcggccaataatctttataaagagcccctgctctttttcagatttaacccgttgtccactaaagttatagaatcaataccaa

SEQ ID NO: 63896 - DNA, 639 bp, Zea Mays
ggcttatgtgcaaaatgggtgcacatttggacttaagtgcaaaaattaagttaaataagtatcttaagtcatttggttcactaaggtgtgattttggaagccaaaccctaagaattgggctcatttgcaaaaaggtccctagttgtgaattcagcctaagtctagatttcagtgtagtttgctcaaatttggagccttgtatctttcaaaatatagggtttttgccctaggtcaccacatcaactatgtagatctatcttaggtgaaaaactttgcttaagagagtaagcatggttgttgtgaagaatttggagaaaagtgcactcaaagttgaactttcaggctgtctgaagtatgaaattcagaataatagtggtactgagccaactttgagtatgaattcaaccttgatctagtgctcaaatgagttcaagccctatagtcgaattattgctggtttatagctctacaattttgctgcagagcctgggaagagttgtcattggaaattgagagaaaaccaagctccaaaatggtctctcagagtgcctgaacatcattgccatggtacagtgctatcggggggaattcagagcacttcaccgccgtcgatcacccctccgccgcgatttgtgtcgc

SEQ ID NO: 63897 - DNA, 449 bp, Zea Mays
atcgtagttcgaggggttcgtaggtcatgagtgcattgtggtctgaggggcttgtaggatatgagtgggaggcaggacgacgcctccagtgtggctcggcatcatgcacagttaatgcgggtcacatctgacgggtcggtctcccgtcagtctcgggccaggagagggaccactcgagtggtttcccttcagtacacccgccccctgttagactccgccattcccgaccccgggctcggtgttgcggggctcatccaggggcgggtgcctccagggtagacactacctgtcacctccagctgaccgacgggccctagttgctagtggctttcctcgggcgcgctcgctgaccgatgggtcctacggacccaggatcttatctccgacacaatgccttgttctttttgtcttcactaaccgaggaacaactagaacaacaaccagaagac

SEQ ID NO: 63898 - DNA, 518 bp, Zea Mays
atcatctgatccactcgaccgaattgtggacaagcggttatagatgtcgttgaaaagtgtgatctttcggttgcttgtggaccgccgatccttgagtagcttaatggtacgatggaaggggcttcatcggtggtaggagcatcggttattggaggctcaatagtatgagcaagatcatcgacactcggtcggtcggtatggatgtaatggaggaggatatggatatagaaagatatgttgaggagtaagggatcggggcgagcaggatcatcatctcatcgatgatggataggaggaacaccattgaagaatacttgccccacactagaaggacgttgcagaggttgctcattgagtaagtccgtgaacatatcaaagttgggactcaacctaggatccatatcaaatcggagattgtaaagctattgaatcgaaacggagagtggaacaccacgaatggaatagaggacttttgaattggagatgaatgtgtgtaaataaacccaagcacaaagcac

SEQ ID NO: 63899 - DNA, 458 bp, Zea Mays
gaggaatagacctatgcgcgtcatacgtgacacacgatgcacgaaactggtgctttaatatagtagagatagagatgtaatgaattggccttttatttgtacctttatttaacaccatacatcaaggatcaactttgatcccttaccttcttgcctggtgatagataaagtcacaagggacatatgtagtgccagttgatgaaagtcaggcaggagtaaataggaaattagagttgtgatgggaggctctagagtccaaaggttttggactcagtaaaactaaactaaataatgagatttgatttcggcactaccacacatggggaaaagatgttagtttggaaggccaagtagtgcctagcaaggacaactagggctcggtgcagctgcgagccaagctaggctcggctcggtcatattgcgagcctgaccgagaggctcggctcggtaacggctcg

SEQ ID NO: 63900 - DNA, 572 bp, Zea Mays
aatctttttttcttctttggtttaggagaatcatgccgcatcttacgcttcccagttgcatttgtgcatgggtcaggtgtgctgttttcacccccacctaaagtggcttccaaatgatcatcagatgatgaattagcatcctctacgccaggaacaagggttctttcatttgtgcagacaatgggtccaaacataacctttagctcgtcctcattctctaggggggttgttttgaacataatacaacctggcattgcctgcagcaccatggtagttcctagtttcagatggccaatactagtgttagtctacaaaataaaaaaagtctacttacttcattttgcatagcccaccactcatcgggcgcactgattgaaccagaatgcgggtctcgaccaagacctatagacctttcattaagagttttccactgggtgaacattctctttaaggagtcccacctattcttcatttgatccctagtgtaagtgcgaccagtgcgttccttaaactttcttatgaggttagcatacccttcggcgtttagaaattattgtggcctgttccgtgca

SEQ ID NO: 63901 - DNA, 417 bp, Zea Mays
ctttagaagaagtgacagttcattagcttttaaagcgcccgagccgtaacctaggcccgagtcgccaatctggcccactcgactggctagcgcccaacgccttgatcacgtccattcgatcgaatcagacaatcttttatgactcgagttactgtagctcgtagtatttaaagcggagatttcaggggagtggcaaaccctacccgcatttgcctctctcacccaccgctctatccgtccgcttgaccgtcacttttctgttctatattgtttggctcctctctctgctctcatctcctctgactctggtgaccgatcagccctgtgcatgaccccacggtccctcccaccggtgtgcacgtcccctcggaagcgcacaccgccgtcggtcgggtactggttttccagcgcctatcg

SEQ ID NO: 63902 - DNA, 440 bp, Zea Mays
caggaaccaaaaaataataataataaattagaacaaaaataatcttgtccattgaccaagaaacatccaacttgcaggctgcaccagaaggttagtacagaaaagaaaaggtccatacaaaaaacatgcacattgaccagctcacatgaccccatttctctcaagaattccactaacaaccgttgaatatttcaactgcacaaggctttatgcagagttgactcagctcaagggcaatcaaatgtcatgtaacaaactgaagtattgtggcaacaatacaaatcacaactccatctaaacaaccccatcacacatgttggagcacctccaagagttaccacaaccaacccccaatctagatttgtttagcaagatttgaagagagaaaaaaactgttctccaacaagtttctatctgaactcttaatctttccgctatcg

SEQ ID NO: 63903 - DNA, 475 bp, Zea Mays
caatatttggcgaggtctctttaagaaaaacgcacggcgaaggggtatgcttcaattctggccattcatatcagatccagaggccaggatttgatcgagccctaacagaagtcgcacgctagtaccaccatcggatccaaatccgatgactcagatctaattatccccagacccagtccttaccgaacgatgcacgatcaacgactcggatcgaaacgaggtgaaacgttatcgctattctaatccaggccgttatctcatgatttaacggtccacgacgctatctacctctaccactgtggagaagggggcaccggatgaatcacagccgttggtcccctaatcaacagacggtgagtcgtcttcttcgtccaggcgaccgtgcctgacggcgtgggactcccccccacggcacaccatgactgcctacactagaacccgagtattgcggacaaaagaacgatccttagggtgc

SEQ ID NO: 63904 - DNA, 632 bp, Zea Mays
cccattatttagttaaaaatgccattacaatcatctgaatgtaatatgtggagttagaattaccgttatatgtttccctttcccatacgccaatgtctatttttttgttatgttcatgctagctattatcatctttggttattttcttttaaattattctactcaatagatggatgtaatcaacctattgctattttgactaattatatgcttgtatggtttcagtaggaagggagaagaacctcaagttcattgtgcaggtatggttcttcataatttacaccatgtctggtagcactcatctttccatttttctagaaaattacatgaactcgatctgaattgttcgatgtttataatcttcctgtttagggttataatatttttatactgtttggaaatatatataacattgaaaaggcagttaattaataatcgggtgtcaaagcgatgatcagctgataaaacaatcatgcaacgaacatgaacacctgctcagatcgggtggggttaattaataatcaaagtctgaacacacaccatgcaattgctggtatttaaaacaagtgctccaaatctcaataataatgccaaaaggtgttcgtgttcgttgcatgattgctttgttagtc

SEQ ID NO: 63905 - DNA, 841 bp, Zea Mays
aacgaccagaacccctcatcactcctttggttgcctaggcacgacgacgtagctttggccgatggtggtgccatggccggagcaagcatccatcaatctcgtgcacaaaactccatcccgagggccgctacatgatgctatgaacatgccagttggaccaaggatttaccagcgatagcgtcgtggcgaggtcggaccacggtgggcagtgactctactgctccgatgagcaatttggtgcacatgggatggccccgggctcgggtgtcccgtgcgcaggcttctacggacctcaggagtgaccccgtacactttaccgaggggtgggtatgttgacgaagagctaagaatggcgtgtggtggcccgattcttctcccatgctagagaagatagatagggacgaggaagcaacggcttggcgaaatccgtgtaggatccatggtatccgttgttctgagtccgatgcagggcgtggagggagaaccatctcgcaatttgggcccacacgccagtcgtggacctgagagttcgcatgagttctctggctaggcagcagaccccaccgatcaacgactcaggccgacacgtgctgatgatgttgggctgcgggagataggaggttgggctgatgcggtgaaacgctgctggtagtgatttgggctggctgtgtggggttgtaattaaatcccagcgtaggtatgcctctcttttcttttctttttcgttttattttcctttttcctatttttagttttcaatttcaattcccagttgggttttcaaatccagaccatatttgaatgcacaaagaaactccaatatgaaatgcaacaatatttt

SEQ ID NO: 63906 - DNA, 1484 bp, Zea Mays
ttttgatcaacttatgcatcagttattagctcatgaaaacaacttgacttcgactatgattactgctagatttatagatgggttaaaggatgagattaaaaatgctgtgattattcaacgcccacccgaattggatactgcttgttctcttgcactattgcaggaagacgtgctgttgcacgccgggcgccgggacaccagaagatcagagttcagttatccttctccactgtcctctaggccaagccccttacctctaccattaccccctgttatcagaagtggtgtaactgctgaagaacgtagaagtccaagaccgaacctgaacaagggagatgacagcaagttgacagccctcaaatcctatcggagagctaagggactctgcttcaaatgtggtgaaaggtggggtcattcgcatcgctgttccacaagtgtaccattacatctggttgaagaaatgtgggagatggcagctgagggggaagagaaggtggatgcagctattggtagtgatcaggaagtggctgaagaaaatgtgcaggccatctcgattgatgcagtaagtggtggggaaggcaacaaaaccattcgtttatgggcgtcagtgcactgtcagcaggttttagtgctggtagattcgggcagctcagccagctttttaggcagccacctaatgggagtcatgcctggtgttcaactgttggataagccagttcgagtgaaagttgctgatggaagattgttatggagcaaatatatggtacctgactgtaagtggctgtgtggaggcattacattttcaacccagttcaagattcttccattgggaagctatgatattattttgggaatggattggctggaatgtcactgtccaatgtcggtccattgggcacagaaatggctggaatttgattatggtaacagaaaagtacatctgcaaggagtccaaccaaggatagaagtttgccacaccttgacaggattacaactggattctctcatcaaacatgaagctgttgaacaactgttggagctccaagcagtggacagtaacctgtctgatcccattcccttgtccatacaacagttgctagaacagtaccaacatctgttcaccaaaccgaactatctaccacctaaaagagctgtggatcatgctatcgacctaataccaggggcatcacctttcagactgagaccctatcggtatactcctcaacaaaaagacgaaattgagagacaaattcgcgagatgctggacaatggtattattcaacagagctcaagcccctttgcttctcccattctgctggtaaagaaaaaagatggtgaatggcgcctttgtgtggattacagaaggctaaatgctcacactgtgaagaaccgctacccaatgcctatatttgatgagattgttgacgaattgggaggagcagcaatattctcaaagttagaccaccgctcaggctaccaccaga

SEQ ID NO: 63907 - DNA, 501 bp, Zea Mays
caatgaaatccattgaacgcaatggatacaccatttagagatgaaaattgacaaaacagtgtcatgatcctcaaagaatgggtataagaatgaccagaaatgagagatttaaggcagatcaacattcgatacctgagaacgggttatagcagataaccagataatgggggagaattgataggggatcccgagattcggatgataaagccacaacatgattcacaaaggaaaagattaccaggtctaggtgaaaagataggtagtcgcatgagattgcttaggatgagcactagaaaggttatgaagatttggggcaggatctatggaaagaaacatggcttggtcatggtttgcgcaactagacaccaaacgatgtttttttttgacataaccacgtgcacaaggaagtttcggtttggctagcggttaagctatgggggtctacaagttgtgtaggtgcaacttcagggtaaaacacacaagggttagaaaacaccaaca

SEQ ID NO: 63908 - DNA, 916 bp, Zea Mays
ccgcgctatcagacgtctcctccgacagtacattaggacccgaattcaaaatttggtccatgtcaaagccctccagggacacatctccgagccgtggagcgccttgaggtcccaaaaccccagcatgatgcacgtgcagagcatcaggggttgtcggtgcaacacccttcgacataaagggtgccacctcgccacgtgaagtatcgatcgactttgcagggtcagcggcaaggccggccctctgcttcgagagaacgacgtcaagaggattcacaatgcggaggggggccttatccttcgatgcgcctgcacgatttgtatcaagccctgcgaaacaaaccaaaatgacaaaaaaagagaagaaaagaaaagtaaatcaaaatcaacaaaatgaagtggccttacacgcaccacccgatgtctcctctggcagtacattaggacccgaattcaaattttggtccacaacacagtcccccgcggagacatccctgacctgtgtagcgtcttgagttcccatgacctcgacacgatgcatgtgcggagcatcgggggctgccagtgcgacagcctccaactcggagggtaccatcaccacgtgaagtctcagacgactttgcaaggtaagcagcatggctgaccctcctcttcctcgagcgaatggggcctagagggttcacaatgcggaggcatactggcttgccatgcgaagtatcagccatctttgtagagtaagcagcagggtcagccctctgctgctcctccttcaagcaaatggcgttcaaaatgccgaccatgcgccgaaggatatcaaggctaacgcggggcacacccttcgatcggtatctactatcaagccctgcaaaacaaaccaaaatgacaaaaattaaaaaaaagagaacaaaagaaaaggata

SEQ ID NO: 63909 - DNA, 526 bp, Zea Mays
gatcttcagacgcccgttcagcattagaatcttgtgtccaccttcttccaattgtccaaggctcacgatattcgtggtgagccttggaatgtagtaaactcctatccgagtcttgtggtcaccattccggcagtggagaagaatgaatccgcgaccacaaatggccatgactgaaccatcgccgaatcgcactgtaccttggaccttctcattcagcgaggagaacgcagagcgctcacctgtcatgtgatttgtggctcccatatctaggatccaccgcgcctcttccttcactttgtcaccaagctgaatgtacagcttgtcctccctgagatgaacgacttggtgcggccccagcgaagccgaggcgtcgtcgaggttctcttgtatgtcgatgacgctggttctcgccagtaacaaagcttcgtccacctcttcagtatgcacggcgtgggattgctcatcgcgcttcttcttcctgcagtctcgcgcccagtgtctagtatttttgcaataacgacattcg

SEQ ID NO: 63910 - DNA, 709 bp, Zea Mays
attttctaggctaacaactaggacgagtacttggaatgcttattcagcattgctatctgttactgacttgtgtgccacatatatatatttagtcagccttcccagagctccaactttctctcgaccagaacaagtactcctttgcaatcacacccacgctcgttggacagtcacaccggtcaccgtttgccacctgcagtgctggtaagaaccttgtaagagtggggtaagatgcttcataatttgtattccaccaccaccctaagagatagttgtagggttcacattgtttgttgcctttttgtctatgttttgtgctatcaatgacaggactagagaatcaaatggacaaggacaaggggcctaagcttaacgacgatgagtgtgtctctcagctggaattgaaggagatgatgcgcgcgatgactaaatcttttaaaaataccaggactctgcggtgacatcctatgagcagcttgatcgacgagttgctgaacttgttacacgcatggacgtactggaggctcgtcccccaccaacaactccagccccagctcactctcctgtggacgacgacgatgacgatgatgtttatgcaccgctgcgacaatgcctcgcacgtaatcgacaaggtatgggaggtaatggtagacgtcgtcatcataatcctgaaccagaccatgattcatttgctaagattaagttctct

SEQ ID NO: 63911 - DNA, 738 bp, Zea Mays
ccaagttcttgcccagctatgataggcattggctcggtgtgagttgagtcgaatgattcccgagccagcaagctaagcacaacatctatctctgtgtcatcagtgctagccggcatctcaaaatgagtttgcttctcatcctctggaagactccgaagtggggcaatgaaagcctcaatgtcctcagaagagggtcgcactctaagacccaggctactgtcacgagcaggagggttggacacaaactcagagaatggcctaagtggtggcaggttccatgcagaataggccccaggagcaccagcatttgaaactctacccctcaggatcatatccagtcggctcatcagatctttagtggggatttttctgttcgtgactcgggtagaatcgttgacaccgctgtacaaataagcagggtatgccctgtcctttaagggctgaatgttcttgaaaatgaagtcagcaaccatagcttcagtagtcagacctctatccttcagcaagcagacctcgacaagcagtactttggcctctgttatctccgaaggggtcagagattctatccaactcggtgtgcgaacatctggatgcctccctgaccgagggggagggacttgcagtggttctccataatgaaccactcaagtcgccatcccttaatgttgtccttgagaggaatgtcgaggtgctctgccttcctcccccagcgaagttccagacttgcgccgccaacaa

SEQ ID NO: 63912 - DNA, 883 bp, Zea Mays
tctgtgtgcagtgaactccttttcactccttgattgctcaattccaattcttattcaattcttgtgaatccaagtacatatatgtatccctgtgcattccttgagctaccttgtagattcctagctccttcgggagggtttcaccacctataatgggcatttcactctaaccctaaaacaccgcatgacacatgttcggtgaaatgctcaaaccactcaaaattgctccgattgaacccaaacttttcaggcaccttcacaacaccttcagtaacatattcgcgcaatttcacgccaatccgatattcgaggcttcaatttcacacaattccctgtttcgagcgatcaattccgagccgagtgcctaaatttcattttctctgcctaagttcaaaccatgcacacacttcactcatattcacctatataaacctattcgtgaagtatcggctcaattccacatcatttcataactcaattcgaattccaaacctcctatggcactatttctcgttcaaacgccgttttcgcgtcgtttgacctctcgatcgccataactctcgacttctgtgtcgtaacactctgtgtatgtatttattcatatttcatatacttatgactgtgactaatacgtgctcacctcttctgtcatttcagtgaccttgcctgcccatgagccgtctcctgtcctgcctggattttcacctctcgtgtgagctttacaggtagacatccactcttttgatattctattggctgttatcgacttgtgcttagcttctctctctcatttacagttgtcaggttaggatgccatgcacgaagaatgtgtcagcgccagggggaggagatgacgaggatcctcctcgccccttcaggcagg

SEQ ID NO: 63913 - DNA, 457 bp, Zea Mays
aggggggaggaatatgaggataataattccaaggtaagaatcaaccaatataactctttccccctcctaatcgtgttacaactactcactttaattttaacttgccaacaaaaattaacctatgtactaaagtatttctgtgatttatcttattccatagccaccaaacataatggtcatcgaccaccacctctacatccatctccctaaccactctgactattcacctacaccacctacccccctaagtccttatcctcatacttcattggacaaaaggtggacccctcatcatctcccctcgcaatatgttaatgaccacctggttacttagttggcacaaccatccctttaagttgatgcatcccactcttcttccttaaaccctaccatccattaccatgagtcctttttcacaggagagaggataaacctcattgttacccataagagcatg

SEQ ID NO: 63914 - DNA, 1113 bp, Zea Mays
ggtgaatggtgtaaggcgttttataagcttctctcaagatatccatcttcacctctgatttttgaggcacacaaaggcgacccctgaaacgaatcaaatcattctcatcaatggagaactcccggggtttaccatcgccaaccctcttttgagcttcctgcaataaacgatcctgctgctgagccgcacacactctctccatgagggaagatttaataagcatacgagtctcctcactagcagtgttgacaaagcacaaagcgatccccaaatggtccagatcagcaatcaactacaaggccacttttggaaccctggatctgctaagggcatcatccaccacatttgccttccccgggtgataatgaatagacaaatcataatctttaatcaattcgagccaccaacgctgcctcaaattccgctccttctgagtgaaaatatacttgagacttttatgatcggtgtaaatgtcacaagccttgccataaagataatgcctccacgactttagagcaaaaaacaccacggccaattcgagatcatgagttggataattcccctcatgcttcctcaactgccttgatccataagcaatcactctgccttcctgcatcaacacacagccaagaccaattcgtgaagcatccgtaaaaattgtgaaacgcttaccgctctcaggcaaagctaggataggggcgtccacctacttgctcttcaatgtctgatagcggacctcgcaatcgctggaccagacgaagagaacacctttctccaaaagtctagtcagaggcttagcaatgctgcaaaaatttggtatgaagcgccaataatatccagcgagccccaagaaacttcgaatttcagagacactagagattctcttccactccaccacagccacaacattcttgggatcaaccgcaatgccctgctgattaatcacatgccccaagaaagccacttcggatagccaaaaggcacacttcttcaacttgccatagaactgattcttccttagggcacccagaacgagacggagatgctgctcatgctcagccttagtctttgaataaatcataatatcatccaggaacacgaccacaaagtcat

SEQ ID NO: 63915 - DNA, 428 bp, Zea Mays
gtgagggttacatgtcatggtaagaaatatgtctggtttaccaaacttctgcaccagagccatagcatccatataccaacatctcatgtcacgaggaccgccaataaacgatgtcaacaacacggtttgcttgccaaccttctctgctctaatatcttcatctagcatgctatccacgaagccctggtataggtctgcccttaaccgatcctgattcttgcgtatatgccccccagtttacacagaacgccactccatacaatgtatatgtagatccttgctggagtaaggcgtcaaagcgttggaaattatcgtggtatgaaattgcttcaatttttgatccctagacatttcagaatgcaggtcataggagtcaaagaattacatggttatatgttgatttattttaatgttgatgaagtcactca

SEQ ID NO: 63916 - DNA, 376 bp, Zea Mays
atttgtggaatttttagaaaagcctagttcaccccctcttgggcatcgtgatcctttcaacgccgaatccacggcgagatcagggtctcctggaatgcgctatagtccagcaggccgatagttttgcctcccgatttcaagagcctgcctcggaacaccgagcggggccatcccgataagagagattatattcgattcatctcgagctcgcaagagacaaagccaccgcattccgagaccacctcctcgacaaccatcagaaccataatgtccgacaccgccttggtgagtagccacgccacgacgaccggtgccacaccatgcatgggtaccaccctcggtggggtggtcgctacgatagtagggaagatcgaag

SEQ ID NO: 63917 - DNA, 335 bp, Zea Mays
agttgccttgaagcggaggcgaatggcgtactgaagcattgacacctcaggggagatcaatacgaccctagatccccctctcgattccatgaacgaaccatcaaaatacattgtccagtatttctatttggtcagagccagtacggattgcacttctgtccactccgccatgaagtcggcgagtacctgggacttgatggccatccgtggcacatagtcaatctcaaaacccaagagctctatcgtccacttggttatccttccataaacatccttgttgtgaaccacctcctcgagcggtgtggaggtaaccaccgagatgtggtggccctgaa

SEQ ID NO: 63918 - DNA, 955 bp, Zea Mays
aaaatttctgctctaattccctcaaaagttaatagaattaggtggtagggatgcgtacttaacaaatgtgataccagtcagggataacgagaataaacggacgcggtaggcttcctatcagccaattctactaagtgtgctaagaattagcttatgtgcccttgcataattttcccgccttcgccggaaaatttagagaaatcagtatcctagttcccagcggatatggtacgacgtcaaaccgatgactatagggtttccgatatgactgtcccgtggctgacacactaacatcgagtttgtctctgaacaacccggctagcatgtccctaattttttccactacatccagtgaccatccattaaatacgaaggtgaaaaccacgggttgcctaacatcattttgtcggctttcctcccagggatgtccaaaatgtgtgttaggtgtcctattagtgccaccccttttgtcctatatctctcggaatatttggccctaggcatatgaggtggcacgatatgattataatatgtcgttgctaggggtagcgtagtgctactgtgatgggtgtaaaacttcgtgtattatgtagcccttggttttgcatatgcgtacccagacggtctatcataagggcccggacggcccgcgactgggctgaacagtccgagggtgtatccagactattcgaccgtatatggcactgcctgggtagttctgtactctgacggtccgacataagggccaaacggtctgtgaccgggacaaattttccgggggcgtacctagataattcagccatgtgtgacgcgacctgggtggtctgtgcacagactcacgtagggtcggacggtccggtgaaatacgtcggatggtctgcgctatagccgaacggtctgagctgaacctgggatggtccgacactgttcagagtcgatcacgtgcttgacgatg

SEQ ID NO: 63919 - DNA, 966 bp, Zea Mays
ggatcagagaattaccttatgtggtttggagcttaagaactcaacccagtcgaactctgcatggaaacacccccttcttcatggtctatggttcggaggcagtgctacctgccgacctcaggtttggggcaccaaggctggtatttgaaagcctagctgaagtcgaagctactaggctagaagatattaacgtgctagaggaagagcgattgaacacagtaattcaatcggccagataccagcagaccttgaggcgctatcacgaaaaagccatacgaaactgatcctttgtggtgggagacctggtccttcgccgaattctaatgggggtaggacggcacaagttgtcaccactatgggaaggccattcattgtatcagaggtcacccagccaggatcatactgacttactcaaatggatggaatggaagtggggaattcatggaatatagagcatcttagaaagttttacccttagcaaggcctcaaaagctatcgaagcaacgttgtactctgtaattggagaatacatcatcaataaaagatttcattctcaaaggcatccaaactgttgactatcaattgacttcgatttgattggacttggaaccaacacgtttactcaacttagggtgaccactataccctacaaacggagcaatcggcttaagtcggcgacgacttaagacggtgcaacatgctcgcacttactcgacttagggtgaccactataccctactaacagagcaatcggcttaagtcggcgacgacttaagatggtgcgacatgctcacgcttactcgacttagggtgaccactataccctactaacggagcaatcggcttaagtcggcgatgacttaagacggtgcgacatgctcacgcttacttgacttagggtgaccactataccctactaatggagcaatctgcttaagtcggcgatgacttaagatggtgcgacat

SEQ ID NO: 63920 - DNA, 386 bp, Zea Mays
gaaaacggaccgattcctataaaattcctgattcgtataaaacacccatattggtcagacaatgaactctactatactctagagcacaaatacagcccaacaaagccggactcctcaccttacgggctagttttggctgattgacaacttggaagtcggaaataataagttttggcccatagaaaactggacctatcaccactgctacggaagctacgagacccggcccaacgtggcaacgtaactggatccgaaatccaacccgttacgtgctcggacccacccagggcaggcaactgcttccacgcgtcacgcatccttcctcaccaagtcactcactccgcgcccaaaccgtacccagatcccgcgtgcacgacaaaagacgg

SEQ ID NO: 63921 - DNA, 479 bp, Zea Mays
caaattccgccccggtgatcgatggacactagcaaaatacacagtggaattgtttagctctcggaacgcttttgcatgtccagtagtaacagggctaacagccatcagagcacgatcgaagctggctgcagtgtgcatggaccgccatgatgtacaaagacgacgtaccatgcgtcaacgtatatatgtatcgacatcgtgcacgcgtactagctacaccgttcacgtacgatggagcagcccgccggtgggtcgacgacacgacgtctcgtcgtccctgtgctgttggctgaattgaacgtacgtacgtaggactccgtacgtactagttagctagaccaccggccggacacaacagtgtatgtatggtgcgtcggtcgacgtcgtcgtcagtgtgggcgccagcatacatcttcttgcattgtgtactgcatcagttgcagcagctagttagcgacgcgtacgtacgcgtacgacgc

SEQ ID NO: 63922 - DNA, 367 bp, Zea Mays
caaaaatccaaagtttatgtggaggtttgtataaaggatgtgtgaatcttagtttgaaaacctagtctggagttaagtgggaacaagcaacttctaaacaattaatactttggccttggactctatgcataaaaagtggatcttaataattatagtaactttgcttttaggggatggttttgagttcagtttcaggtggttgcagcttggttcaattttggggagcagaaaaatcctcacgcctctgctatgctccacttgcgacagtttggattgaggtcgtagataggagtttgaaaggatggtaaatgggagtgaattcgatgcttccagtgcctaagtcatgtatgcttggtgtttatccgtt

SEQ ID NO: 63923 - DNA, 572 bp, Zea Mays
aagatgtcgaatattgaacgtggaggacgagccatgtagtttttgggaagtcaactatcaagcaagggaaagtcgaagcaatgaagggaaaatattttcatgatgtttctatagtgatggtcagggggaagcacggttccccttcccaaagctgacgaggtggtggtctttaagagcttcatgaaagctgggcttcgctttctgctccacaagatgttagttgaggttctaaagacattcgtgatatatcttcatcaacttacccccgaagctcttatcaaagtgggggttttatatgggctatgaggagccaaggactagagccggatgctacgtgcttctataatattcatgagttatcttaccagacgaaggcaaacggaaaagaacagtaccataacaactttggctgttatagcttcgtgccccgctctgaggcaaattaccctgtgcctacatttcggaagaagtggtcgggctcttggatgaagcaatggttttacgtgaaaaatgatctgaatcagagggaggatgtgaggggcatcattcaacgtcccatatggtcacgtttc

SEQ ID NO: 63924 - DNA, 475 bp, Zea Mays
cacgctaccgctagatgggtgacggtgaggttctgacggtgaggttctgtcctctgtcgcccacgctgacgctgacagtgagtctaggagcttcgattagaggcgtggatggcacaccgtgcttcgctagatgggattgccgattggggaacccgcgatttcatgccggaattggctcagtgcagccgggtctgcctttgtcgtcgccgagttgtcccgctaatgtaatctccggtaaaattgcattctgtgcattcgccgtgttctctaaatcacgtagccaccttcagaatagaggttagagtcttgcaccatcgatcggcgtggctccgactatccctccatcgtgggtcggtggcgcctccatggtcgactgccgtgggtggaagatactcgtgggccgttgatttcgcaaagtgcggttctgatcaaatgagcagggacaagttcggccgggtgcctcgcgatcgttgga

SEQ ID NO: 63925 - DNA, 311 bp, Zea Mays
acttggtacgatagccaataactggggccttcgtatccttccgatactcaaaattgtagcagccaaagttcctatgaaggccatctgctctagccttcgtctggtagtgaagttcgtgcacccaactgaaagcttcggcattcgcatccattctctggcttcggagtgcccatatgcacacactaagtctaacaatggcattgggggtcagctgatgaaggtatatttcaaagttctttagaacctcccctatcatgtcatttagcgggcactgaagccctgctctgaagaagctcttaaagacgataact

SEQ ID NO: 63926 - DNA, 350 bp, Zea Mays
aaaaatatatgggaccctggtctagtactgatctaaggttataattttatttaagtattaagaagttaataaagaccatgattaaaaatataagggcacatgcaataatagcaagaaaaattcagtagacccctgagcactaacataccactgcaaaaataataaccaccccaaaccatcatagtaagtgagttaaacaattagaacttggatttggccaatacttcaaataaatcagaagaaagaataaaaatgggaaacattgagcaacccaatttttacctaagtacttataatgtatactgccagagaaaaatataagactaaggtaaaaatgtgatgaaatacac

SEQ ID NO: 63927 - DNA, 663 bp, Zea Mays
aatacttcaaaagtcttcacctccattcgatattggcacttgtctcgattatcccctaggacttgggacccttccctctccggttgtgcttgtaaaccctactacgagcacttaggtgcgaataatataagtctcatccccctctactggaagtagggcatctcctagctcgaatcaggataaatgacttgtgtcaacttgcatcaccttctgggtctggggcacacgacgctatttcactagttggttaggtccacggatccaaacaccgatagttggcgcgccaggtaggggctgtcgtgtgctaacactcagttcccatcaagactccagatggctggctttcaccaccccttgaggcttggcacggtgatcgggtttgggagtctggagttcatgtcgctcaggatcaagtacgacatggtgctcctcccccgggtcccctggctgacactcaggaacgttcaagcgtttgtcctcgtccttctcgttgtaggacaagagacggagcaactgtaaccgcaccacctgttgcgccccatgtcctagcgaggctcctgtgctgaccgatgatgcagactcccttgtgagggacctggccaatgtcactatcacacctagagcaccaccaccggcacacgcatcccccgaactaactcttct

SEQ ID NO: 63928 - DNA, 518 bp, Zea Mays
gttctactcgattgacctacaaagaaaccctgatcacccgctaaaactaaatgtccgaataaaacagatcgaaaactgacacagcaggcatcgcatattcatctagtgatcctaggatactttccacccgcctactcattgtcgatgtattgtcatgttcaaatgtggaatggtacactgatgaacctgtggtacatgcatagtcccttttcctattcaggctaggggacacctccattctatacctttaatccattgatcagatggtcatggacgagagggaggagaggctacctgatctcttatcggagtggaagtggagcttagaagttgcaaggtggagtcctagctaagttttggattggcggggctccgacctcccgatcctcgtcggcgctcctcctcctgtttgtccttgtgggtttatctctgtctgaaggcgtctggttgtgttcaagggctctctccccctttccatccctcggtccggaggtcggcctctcccttttataagccga

SEQ ID NO: 63929 - DNA, 843 bp, Zea Mays
cgttcttcctcgagtacatcgatgtcctccatcctagtagcctcagcttctgctatgctctcgaagatcaaccttggggccccgaacttgagatcagcgggtaatactgcctctgacccatagaccatgaagaaaggagtatttccatgtagagcccggcttggctgagttcttaggctccaaacgacgtagggtaattcccttatccatttccctgcgaacttttcattttttcgaagaccctcttcctgagtgcctctagtatcattccgttggctcgttcaacctgcccgttggccctcgggtgtgctaccgaagcgtacttgatctgaatgcctttttgctcgcagaaatcgaagaattccgaacttgtgaaattggatcccaggtcagttataatgttgtttggtattctgaatctgaatattatgtcttgtatgaattcaacggccttggctgaggttaaagaggcaatgggtttgaactctatccatttagtgaacttgtcgattgctaccaatacatgagtatatcctccttgagccttcttgaaaggtccaatcatatccagtccccagcatgcgaaaggccaggttactggtatggtctgcggttgctgtgctggtagatgttgttgcttcgataagtactggcaagcttcgcacctctgaactaactcggctgcatcactctttgctgttggccaatagaatcctgatatgaagaccttcccgactagtgttctggatgctgcatgtattccacattgcccagcatgaacttcctctagaagttgcttcccagtggatgagagaatgcacttcatgaagacgcctgattcac

SEQ ID NO: 63930 - DNA, 562 bp, Zea Mays
gaatgtcatctttgaaatgtctgagggtcggatcctgagctggtgataacctgacctcaggtctatctttgaaaacacgctggctcctctcaactggtcgaacaggtcttctattctgggcaaggggtacttgttcttgattgtgacctcattcagagctcgatagtcgatacacatccttctagtgccatccttcttctccatgaataggacaggggcggcccaaggcgaggtgcttggtcggacgtaacctttctctgatagctcatcaatctgcttcttgagttcaactaactctggtccggatactctgtaagctctcttaaagatggggcggttccaggaagaagctctatggcaaactcaacttttcgctcgggtggcatgcctggtaagtcctttgggaacacatataggaactcggaccaaccttgataacctcaagtggatctgcttcactgctatcaatagccatctgataacaacttcctttccttggctcaggcgggactaactcggtcaccacctcttctcctattgggaacatcaacttaattgtact

SEQ ID NO: 63931 - DNA, 625 bp, Zea Mays
catatagcgggtccccaacacctagattactgacctctaaagtagccaggccggtaagggcggtaggaagatcaagactcatcaccacaactttctcagactgaaccagtggtgacccaacatgaacatccaaaagaagcagccgaagaagagctaggttcaggaccctcaggagctggatcaccctcagcagttttctcgggggctgggtcatcctcagcaataccctcgggggctagaccaccttcagtagcacccttaggggctgggttatcttcagtcataccctattgggttggacaaccctcgtgtggaacctcagggaccgaagtgtcctcatgaatcagaccgccctcaaaggttgaagatgcttgtgaaactgcccgggttatttctttcccagcaagaagactatccgaaggagcaccattcgggacctctacacggatgtcagcacctccagcttcagaaagttccaataagacaccctctaaatgatttcctctagtgcatggtcaatggtagacaatgtcatcccctagaggctaaccagcctcgatagagcctgaattgggacatcgttgttggctttgctacgacgattcctgcgaaccaaaggaggaac

SEQ ID NO: 63932 - DNA, 456 bp, Zea Mays
acatttaacccctagacccctcaagagacgtgggtattaaatagggttatatatgcccttataccgatggccaaaaggcatgtacaatctcattaagtagggggtatctagagggttaagtgaaaaaataagggacggactcttcgcaaagatctcgtctctacacgactctgtatacatattgtcttttacctacatctatgttgtagggactctgagttatatcatgcaagtctgttggatgtcttttatatttagaaaatcaccctgaggctctaggttatacatgccctaagagcttggttttaacaatccttacctgcaacaatcgactatattattaggctatctccaacaacttatccatccctatctctatatttaaactttactctgtgaacaatacaatctacagtgtaaatagcgttagatggctatggatgaaccactgaagac

SEQ ID NO: 63933 - DNA, 364 bp, Zea Mays
atttttcctaggttctctgttacttaagcaagctaggaaaaataatttcactcactgttcattaattggcccaagccatgattttaaatctttcttgttgcttaatgaatatacttcaatgtttataattggcccaagccatgattttaaatttttcatacccttttccccattttcttgaattttgctcatagggctcacttagggtttttattagggttgcaacattattacctttttgaaagacccatttgttttgatcatgatacttttaagtataggcttggtgggttcttcactcttaagtcaatttgatgctcatgctcaatttggttcacataaaatgatggttattgggttagca

SEQ ID NO: 63934 - DNA, 460 bp, Zea Mays
aaaagatctactgttttcctgaggaatgcctcctaaaactccaaaccccaatgccacagaacatgaaagaaaaaagaaaaagaaatttaacttcttttcagaaaattggggtatcacatttaccttcatcagattacccctgaagctatcatcaaaatggggattttcatcggggtcatgaggagccagggactagagccgagtgcaaaatgcttctgtaacatgcatgagctgtcctatgagacgaaggctactggcaaagaacaatatcataataattttggttgttacggcttcgtgcctcgctctgatgtgagctatccagtcccgagatttcggaagaggtggccaggagcctggatggaagagtggttttatgtaaagagcaacttagttgaaagagaagatataaaggggatcatccaacaccctatttggtcccgcttcggcatcagaaggc

SEQ ID NO: 63935 - DNA, 872 bp, Zea Mays
cactaatttcccacgaaaagtccccagaaactgctactactactgctgttcgcctacctgcaaaatttctggacagcacctctaccgattcgcatagataaacatataatcgattggattgcagcacaattaaacaagatacaaacacaaaagtcaccttaaatcctcccctttcctcccttcttcttccctccacgaaaaaccaccgggagacttgcaccaacgcgacgtagatccgagcgggaaaggaatgacaccttgaagagaaggacttgaggaggggcggctagggtttgatgggggagaggtgggtggcggctgcaaataggtggaggagtgagagggggtggcgtccaaggctagagagaggggattaggggaggacgactagggttaaggggaggctaatggaccggatcgagattcatggcccaactcgcccacacgacagctcccgacctcgtcgccagcgtctaaccaaagaaattctactgtcttactagtgaatgttttccacaaattccaaatcccaaagcgcatcacccgaatgagaaaaaaacaaaaaaagaatacctctaacttctcttctttgcaaaccgggtatcacaacaaatcacccgaagcccaactccgagggcgcgacggtgatgagtcgtgggttttcccctggcggcggtgcttttgtcactcccgcttctctcagcactcggcttaaggtccccgattcgttcaattgacacgagaagagaggtgcgaactttatactcggtttcagccaccaacgacccgccccaatcgcgcggccggcgagatcttcggtggccggtgcggtttcccgcgtcgatttacgtgctcggtggaggtcatcgtta

SEQ ID NO: 63936 - DNA, 661 bp, Zea Mays
aaggctagacatagtatctttggagctcgtcggcattccatgatcttggaatgttgtttccttccatgtccttgagcttgtaggaacctggtatgttcgaagctaagatgaggaaagggccttcccattttacttgcaatttttccgttgtgtctgggtttgctacgcttcggagcacaaggtggcctaacgctatgttcttgagttttacttttctgtctcgccatctgatggtttttgcttgatatttccttatatgctcgattgcttcgagcctcgactcatctatgacatccttcaaaatttttcattatccggatcttgggtcgaagctataactctttctgagcccatcttgactttttcgggggtaaccgcttcgtactcgaagaggagattgaatggtgtgaagcttctaggtcttgatatagaggtgttatggttccaaacaactttgataagctcttttgtccatttcccctttggtaacccgaccaaagactttgtatttcccagcaggattattcgatttgctctttccactagcccgttggattctggatgcctgaccgaagcaaagtgtttgtttgttcactacaacacaaacccccctatagcaacacatctgcagcaacacatggttttatgcgttgtaagaaat

SEQ ID NO: 63937 - DNA, 735 bp, Zea Mays
tctggttcctctggcgattcactccttctccgccggtgatctccagccaccggcggccaccatctccggtgatcctccggcgacctcgcccgagctcttccccctcggtgagcagctctccccctcccctgcctttctctctctctgtctctaggcagtaaaccacccttttgcaaatccttcaaaattctgtgaaatccgatgaatccagttggtggaatatcttcctttgtccctattacatgtccctgcaggtccttggctccttcgggagggttttcccaccccaaataagcttttcactgaaaccctaaatccccgcccttcacgtgttcggtgaaatgcctaaaccacccaaacttgctccaattgaacccaaatttttcaggcaccttcaccacacttccagtaacctacttaccaaatttcacaccaatccgaggtcccaagcttaaatttcaccaaaattcccgttttgagcgatcgtttccgagccgagtgccctaattcctttttcttcgcctaaattcaaaccaagcacacacttcactcatattcacctatataaacctattcgtgaagtatcggctcaattccatatcgttttgtgcctcatttcaaattccaaacctcctatgtcactatttgtctgccaaacgtcgttttcacgtcgtttgacttcttgatcgtcccgtcccgtgccatatctctctgtgtatgtatttattcacgttt

SEQ ID NO: 63938 - DNA, 316 bp, Zea Mays
tttgaattgtactttatttattaactggcaaacaacattagtccaaatagatatattaatcatcaaacactaaaatccgttaattaaatggactctgacctattttccttacaccttcgttaaaaatagatattatgcgttgttaaaaaaacaagccacaacgctatgctctaaaaaacaacgctatggtacgaaactcatcgactagcctaatctaatctagaaacgatttctatgtttcctctctttctctctctatcccctcaatctcttttgccacatcaaattgcttatatcgaaactacagtagtgttcc

SEQ ID NO: 63939 - DNA, 286 bp, Zea Mays
caatgatgaagacttccaggatggcctggacctcggtattaacaccgaggaggaactattactcaaaatcctctgcttgtgcaactccatcctccagaagtataaagatgccctcgtggccgaacaacaatgtagcgaggcgtgggccggagtatgtctccttatctagcaagaaaaagagcacgtccaagccctcgagcaagaaatatcgcagctgcatgcccaccaggaccgagtacagccctcacatggcaccatgagattgagcagttttgacgaagtcaag

SEQ ID NO: 63940 - DNA, 546 bp, Zea Mays
tggagatatccggccatgtagacgatggtggggtcatcctcggtaggatctctccctgacagggcctgaagtcttttcctccaggtgggggtatttttgttgctaggtgggaagtaacgaaggggggtttcaaaaacctctctgttgtagttttggcatagctgtttaagggcttttcgggccacattttggcaagtgtctaggaagcggtgcccgatgaaagtgacttggaagggatggtggtttgggtagcttcggctttctcccaggtagactgccatagagcacttctcaactccgttttcacggtattctttccagacatattccagcttcttgcggatccccatgcgtagcgcgcaactccgtaagagatgagggaatccttcctcctctgagcagtaggatgtcctaatgacccaagagccttccatctggtagaataaaagaagggcccgttaatatcgtggaaaggagagaaggtttttcttaggggtaagaggtgttttcttgttaaggcaacttttaaggtcagggctgcgatct

SEQ ID NO: 63941 - DNA, 621 bp, Zea Mays
cgcgtagttggcgcaccggactgtctacaggacctatcgagagctctggtccattggatttggatctgaaggcttagattagatcgcgcacctgcaatctcgcgcgtaatcgagagcccttcgatgcaatactaacgcaccagatttaaaatcctcagatctatttccacccgcacgatttttatctaatggcgcagatctaacctactccaaccggtatgccggatttaaccagagccgttgcttggctgatctacggtccatgcccatcctagcctaacctgcgcaccttgatttaatctatactatcaacttcacaatctatggccctgccatcgtcttcaacctcacaccctctccttacggcggcacgcccagtctacggcggcggcgcccacccgaggagcctccagccaaccccaagctactgtgacccctctaccagaccgaccctacgctatggaacataaaatgaatggagcacatgggtactcacccacggtgaagctacgacgcacccgaccacggaaaggaacgacacctcccgacgacgagaaatttacggcgccccggtccatgattcaccccacggcgagacgcaaaaccttcgaagtgttttgg

SEQ ID NO: 63942 - DNA, 717 bp, Zea Mays
atttctttattcaggggaactggcacaaagtcagctaccgtcattttgcccataatttgggcttctctgatgctgatatttagggcagcaacatgcgagctcatgacattaggctgcccatgtgggaagagactgaatttattcatgtctctatggatcggaagttctggaccaccgccaacatgcataggtactacaggtaccttaactctttgtccaagatgaccgttctcccaaagggcgggaatcaaatgaacgtccttggggagagtcgggtcttccttctcctccttgctcccaacagtctcgcccgcatcaatgtgtttgacatgatctgggaagagatccttcgtgcttcctggtctcctctcaatgggtgtcttcatgcaccctttattatgaagatgatcgaagtggtcacccagactcacttcgaaaaacctgtcaaacactcccgctacgtaccctactgggttgattccaccaacccagctgctcgtacaaagtgggctccctcagggtttggaggccctgcctcttttgatgagccacctcctcagcctccacatcacccatcctcctctcacgtcgccgctgcctcacgtccgatggaccgcagcgggagaggaagtggtccgggccagggacggggtggaggccgaggacttttcattcgtctggccaagggccttcttggcgtcttcgccatgtgccgca

SEQ ID NO: 63943 - DNA, 1342 bp, Zea Mays
gactaggcaagaattttactcttaccgaaccacgagataaaatcgccgtgtcacttgtctttttaccttatagcgattctactctttctagtggttcacttcacttcataattgctctaagtttaatactcaccttgtgagagcaattaagttaagtaaaagaagttcactcttctcatactcttcattcagacttggccttttgctttcactagtccaatattagtccaagtttgtttcattgacctattttttacaggatcacctattcacccctctaggtgctctcaccagttcactgtttcaccgagtcactaacgctctcacttaaacccctcggtctcctttccctttacattgccaggtccccgactccgcctcacctagctccagcaaggatgcgccggactgaccatggtagcacgacacagtcaacagggatgacaccgatgcaacccccggaccttagcagagtcagccacatacttaacttgaccgcgggggccctggaactacacaaccgacgaccacggcagatgcgttggtacggtgagcacgattctccaagcacaacatgatagaactacaaccaatgatgtgaaaagcaccagtgatatacgacgaccatcgtgcctgcgtgaatcgggccggagagcaccaattggccagttgacagtaacgctatcaacgacgtcgatctgcggcgacacgaccacattatgaatgataagcaacaatagagttaaaaacaggaactcggcgagcttcactgagtcaatatgaacacggaacactcaccacacgaccgataaacccttcgagaaacactggccacggtgagggggagatttctatcggcgtggtcaccgccatcagagacagctctaggccacactttagcaaatcaataaggggattagggacgaactaatggctttatcaagacatggaagagaggctaaacacgatgacatgctgggaggaccacatgtgtacagtagggtgatctttttacctttgaaagctatggccataaccccaaacacctgctcgattgtggctttatcagagctattcactgaggataacaagagccatctccttctactctcttactgcatgtttaccatgcaggaaaaggcatagggaaaagttggagttccctttctgcatgttggacaacaaggcaactgctaaacagctgagtcagccagggaatggatttttacacctccacaagttcatcccaagtggtgtggagctatggcaggtgaaccccctactacaccatctcttttgcatgccacacccgtaactccctagattagtcagtggatggtga

SEQ ID NO: 63944 - DNA, 595 bp, Zea Mays
tcgattgctccgttagtagggcatagtggtgaccccgagttaagtaagaatgcgagtcaatcgtaaacaaactgagcatctttgaaacccctttttttattgatgacatatttccactttacagagtacatcgtcgtcccggcagcttttgagatacagctagggataaaactttctgaggtgttctatgttccaggagttcccgacttctgtgccatccatctgagtgagacgatatgatccaggtcgagtgacttctgctaccatgaagggtccttcccataagggtgataacttgtgctgtccttcccccgttagaattcggcggaggacgagatctcctactgaaaaggatcgttgtcgcacagccttgtcgtgatagcgccttagagtttgctggtaccgtgccgattggattaccgcattcagccgttcttcttcaagtatatcaatgtcctccagcctggtggcttcgacttctgctatgtttttgaaaatcaaccttggtgccccgaacttgagatcggcgggtagcactgcctctgacccatagacaatgaagaaaggagtgtttccatgcaaagctcggctgggt

SEQ ID NO: 63945 - DNA, 351 bp, Zea Mays
ggaaaatattttcatgatatatccattgtgagggctaggggagagagtaccgttcctcttcctgaagcagacgaagtagtggtttttaagagttttatgaaggctgggcttcgttttcccttgcacaggatgctggttgaagtgttaaagacatttgagatataccttcatcagcttactcccaaagctttaattaaagtggggtttttatttgggccatgaggagccaagggctagagccagatgccaagtgtttctgtaacattcatgaattatcctactagacagaggtaattggaaaggagcagtatcataacaactttgggtgttgtagctttgtgcacctctctg

SEQ ID NO: 63946 - DNA, 310 bp, Zea Mays
acacaaacttgtaaggcaacaaaagaatcaagcacataactatagaggcatggaaatggacagaccagtttaatcttacatcaggtgatagaaatgaggataaacatgcatattgtacaaagaatcttatgtacataggctcaagccatggtgggccaatttattaatctgtacacttgcacagattttatgaaatgaaaaaatatcctcacacactgacctaatgttcttcccgattttttcacttcttatcatccactaaatctaagaacattggtatttctaaattgtgttttccccgaagttgcaa

SEQ ID NO: 63947 - DNA, 470 bp, Zea Mays
cttagctatagtaagtcccttcttcctatgggaggcttcagccccgatagatttagggctcgatagttcatattaagtgaggtcaggaaccctagggacccaggggcagcaaatggccttgagcgactaagtgtcattgattgccctaggagaaggagggccccatacacttgaatccttcattaatgcctcaaaatatgagggccatgaggacttaggtcatgagtaactcgggttgcaaggggctcttaggatttaaattgtaagtgctttggagcatgaggtgttgaggacgtcctgggccctggaggccccaaaccttaatctagcattgttaactgacattatagctaaaggagtgtcctaaagcacggagggccttggttcccttcatggtttttaatgggacttggtggcgtagatgtcattccttcatatttccctgatatcaagcccctaccttggttgag

SEQ ID NO: 63948 - DNA, 548 bp, Zea Mays
gtgaggtgaaggaaaggacacttgggttgggttgagccctcgtaagatttgggcagctgcgacctgtgactgaggaccctgagggggggcaacttcgcttcgcgcattgcgtgcggcagtgataatcgcctcaccgaggcccaagacatccaaatccaatcgtcgtggctctcctcggagcggtggcggaggcatcaacaagagccgacgaaggatccgagaggaagagggataggacgtggcgatgtttgggatgagtggaaacacgtccgcgatagaggcatcgagccgagcgacgacgacagaggatccgaagggggagggaagcacgaagtatgggagagagaaggggacggtgacctcgcgactagagaaacaagcggactggacgaccgagcaagacatccaacccatccgaacaaccacgattttcctgatgacgtggaccgccccataacttgaaaaatcgcaccaagttttaatataagagaagagatgatagataataaaaagagatatattatgtctctgtataccccctatgtttc

SEQ ID NO: 63949 - DNA, 850 bp, Zea Mays
cggctgttgccggggacctcgagcaagcccggtctcgagatatatatagggtagcactgcgattcccttcctacctgtacctgcgccttgaacttcgtctgtgcaagaagcaccatgagagagaaaaatggcggggaggagcgtcgttgtcggcatgcgaccagggccccgctccgtccttggtagatggcttaggaggatcataggggcgtcctaatggtgccatggccttgctgcccccggagctagggctgtcgcaccacaatttctcgccgggagccagatctccagcgcggaccctctctcttccgtgggaagaaacacctacaccactggcctgggtaagtacatactcagttgcttcactctagtctgcacatcacatagcattaaaacacgttaggtattcgaccttagagagccgaattgcacttctctggtgatccctccatcgtagggtgcaacggcgccgccctaatgcttggtgctgtattggggctggtatgtgagccatccatctcgtgatgggtgtatgtgattaaaagcgcgacacacccccttcatgggtctgaccgagcccgttggatgtggatctgaaggcccataggagatcttggcgtgggcggttctagaccattgatcacagatcttgtgatcatctattaatatcggttcgttataatgtgagatctaatcttgtcccgtgaaaatagatcaatcggccagaaacagcccatacccctttgcttcgttcttttgctatagaacccatgcctttcattagaataaacccgccatccattcatagtgcaaaacaatcacggatcagtccctaacatttacaaaacag

SEQ ID NO: 63950 - DNA, 286 bp, Zea Mays
cgataagagagcttcaagcactcatgcctagggctttgttttggatcgcattgcaatatatagaggcaagataggtgtcgacatatttgtctcccacatttaataatgatctccgtcatttcccaaaacgaaagattcattgttccgtattcccagcacaatgatattgcgcgcattgctaggaacttcatcatcaagatgaacctcttcgtgaggcaaatcaccagcagggtgaattaatcggagcagagttattacagaccacgtgaatcagcaatcagaacat

SEQ ID NO: 63951 - DNA, 525 bp, Zea Mays
cgattttcaaggaagtcaggggctatttcagaagagttcctaagactcagaattctgtaccgcggactgcgggttgatatctaaatacttcgggggttctttagaaaaattgccacggcgaaggggtacggtggggtttggaccacccgatcacacgcggatggtgaggattagatctgtgtggtcgcgaagcggtatgcgcagggaaccgttggatgtaaaaacgacgggtaggattttattatcctggatttgtttctatccgtccgatccaaatcaacggaccagaacgaaagtcgcgaaaggttacgcgatcatctaatcttagccgtacgcctacgatccaacggatggagtccttctccttcccctgatcgcacccaaccaaggctagccggcccccagcggcggcgccatggacggcgcggtgatttccggaccgaccaagaccctcagttcaattaactgacgcaacgcgaaaagtaaacagaggcgaacacggtgaggtgatttaccgagcgtgcg

SEQ ID NO: 63952 - DNA, 369 bp, Zea Mays
gaaagaaacatggccttgatagggtttgtgcaacttgacaccaaacaacaatttttttgatgtaacaagtgcacaaggagacttgggttggtctagcggtcaagctatggggatccacaaaccgtgcaggtgtaacttcaagggtagaacacacaaggggtagagaataccaacataagcatgattttttaagaggtttcacttgctaaactcaaggttgtttggggggtcttttcatgagaaggatggacaacatttttttgcaaaaagggttacaataccacctagatagcaagacaagagaaacacataacactacctaacaagacttaccaatctgacacgaggtaaggtatttcttatagttcc

SEQ ID NO: 63953 - DNA, 589 bp, Zea Mays
gttacaacaggtgcaagtgtgggaataaggagtggagaactctagccgaatgctcctgcactttggctatttgaccctccccttttatagttcaagtgggtttttacataaagacttattgtccgaagaagagtatgccctattgtctacggcggtcttgctgatgcagctcccctgacatcgccttctggttagtgcgcggttgtatgcccggtatggtgggttgcttcatctgcccggcatacgggtcactgtagcggtttcggtactgagttttcctttagtggcgcccggtgggacccatgggtcagagtcggacggtgccgagggttgtacgcggtgatgcctcatctctccgatgtgttgtggcatcatccaagacgatatatgcgtgacgacgtgctctatcgtggctggagtgggaaaacaatggataccttgtctccccgtcaatcggggtacatgtgtgctcctggcgcgtgcatgttaggagggcacgtttcgagggcccacaagcgtactggcttccgacacgggccttgtgcttctccgccttgcaaagttgctcgacagggcttggttggccaat

SEQ ID NO: 63954 - DNA, 433 bp, Zea Mays
ggcggcgatccggggccacgcgagcacgagcagccaattgcggagcgcgaggcggtggagaaggagagacccgaggaagagtcgagaagggagggtggaggggggatattcccatcctcgggggacagggatcatgtcacgcgggcctccagggcgaggaaagccgccgccattgggcgctggggctcgtcggcgccggtctgggtcgaggcggtgcggctccgggtcgggtggggtcgagagaactcgagatcgataggtggggaagggtggcagtggctgggaggacacgcggctctcctttctgttatttttggtctcgggcttgcctgggtgttgcggcggcacacgctacggaaacagaacagtcacgtacggcgatgatgcccaggcgtcgtttcatagactggggtgcggctactagttagcgatg

SEQ ID NO: 63955 - DNA, 453 bp, Zea Mays
tagctcctgactctgaaccaaacaaatttatataagtgatcattatgtcgtatcattgcaaacaaacacattgttagagtactgtagcaagaacttcaggccctttcttcgcttggtccctaatcctctatggcatatagtatatccttggttactagcggcaaggtcgaccaccttccaatcaagcaacttggtgtgcagctctgacggaggcatgcgtaggtcatcctaggtgtcccccgttttcatgcaaatttctaaatactcaggcagtagctcacgttcccaatgaagatcaacttgccggtattagcacatctaagcattactgaacactcaaagtctcaatgcactccctgatttccttcatcaccatggatgtctcccaagtgctcataagtcatagctacctttgtgctcgataaccgtcataaagttagttgcttgttcgtg

SEQ ID NO: 63956 - DNA, 786 bp, Zea Mays
tggatttgatgaccatgttgtttttattgtaaaaaatgtctaccatggaactttggtcctaagttatgcactgctcaagttgaagatcagatatttttatttattgaagaagtcatagataacaggatgattagagaaagatccaacattgttgtaatttctatggtgcaaggataagttggggaaaagcaaatagaacaagaatttgggaatcttcttggtagaaatttgtggagatggtcagctagatctattggtgataataagttcctaatgagattcctagacctaagatgattaatgaccttgggtactttagacccttggggatgatgattaaagagctgatgaaggtctgagcatattatctaaaagatagggtgattgttaataaatttggtgacaaaactaattttggactgatattggtagggtggggaacctttgaatattagctacctagaattgtttgatatatgtgatgaaaaagaaatcttagttaaagatgccaatgaaaagaattagcagttgcagttcagtagatggctagatgtcgagaacaaaatcaattcggataacctttgcagggatctcaattattttgattttcatgacctccctgataatgtgatgtggaaatggggtgaacataagtgttttcaattaaatctttgtataataagatgtctagtatcactcagggacctaacaagaaacacatttggaaatgcaaaattcctccataaattattttttgtgtggctcctagagaataaaactttgttg

SEQ ID NO: 63957 - DNA, 601 bp, Zea Mays
cttgttacgacaaggttggtgagtgtactggattgtcacctttaaaaaaacaacagccacttcccaccccattaaactcactccacccaaatcttccaccaaagctatgagagatggagtgtttgagcaacctctaatagcccccacctcaaaacaagtgtggattctcaaacctaaccattttaagcgcccacttgatgctttgcccaacgtctctagtgtccccttcctagagcaccactaccatccaaagtgaaccatgcccacaaaaaagaactccacccacgagagaggtgaggtaccactatgtgtattgcaagatggatgaccatttggttgagttttgctttagaaggaagagagataagtgatggggttttgagggaaacaagacgagtgtgtaccacatttctcatggtatacatagtccttctattcaaagatgtgttgctaggcctagaggtgctttgccttaggttcataggtctcaagaaacaatatcatgtggtggttgagtccaacggggtgttggttcatgaaccgtatgaacaaacaccctgtcacagaggctttggttcccacaactctagcataccactat

SEQ ID NO: 63958 - DNA, 946 bp, Zea Mays
agaagaaccggggccttgcagcgggaaagcttatcctccttccggattcgctgcaagagctgatgaaagtagccgaggtgaagtttgggaaggcagcgaggagggtgctcaccgtcgagggcgccgaggtcgacgacgttgcggtgctgagggatggtgaccacctggtgttgtgttcctaggactaaccactagcaagtagtacaagcacggccgattcgcttcacctaacgatggcaatggatacacgaaactcgatactagatggctaaaaccatatagatactgaagtcatataattcgtatgatgacacatcaatctgtcgaccaaatatcatctaactacatactacgacgataacacaactgtgccggcaggatttgacagacataataaagccttctatggtgctaatgatgacacacttgcctgaagaacaagagcaatccttgcagatgttttcaagctataaagatgtgcaataacgtctgaacaggtatgtccttaaaaatgtatacgatatttactgagtattttagattgtattactgagtagttcagattgtattactgattattactgaatattattgagtgctactgagcactttcaattgtattaatgagtattacgaagtatttattgattagttcaggttatactaccgagtattactgattattgtttcgaattgtattacagattattactaagtattattgggcactttcgattgtattactgagtattattgagtatttactgattagttcgagttgtattactaattacttcacactttatttagtatttcaaaacacaggccatgcagatcgctaagaagatgatacaagaagcactggtagtggttgaagttgtaccacacgacgttgttctgcatgacgacataccaagcacagtgcatcaaactgaataactgatca

SEQ ID NO: 63959 - DNA, 713 bp, Zea Mays
cgaacaaggtgatgaatgctgttttttcctcgtcttcttttgccaaactaatctgatgatacccagagtagcaatccaagaaagacaacacagaacatccggcggttgaatccaccacctggtctatcctaggaagcccaaagggatcctttggacagtgtttgttgagatcagtatagtcgacgcacatgcgccaatccactttattctttttcagtacaagcacaggattagctagccactcagggtgcaacacctctctaatgaaccctgccgcgaccaaacgagctagctcaacatggatggcttctctcttgtcgggcgtgaagcgacgtaatttctgtcggatcggcctcgcctgggggtagaccttcaatttgtgctcggccagttctctcgagactcccggcatatccactggttgccatgcgaatacgtctcggttatcttacagaaactggacgagcgttccttcctatttgtcatccagactggaaccgatgatagcggttttgcgctcgttggcgaacccaagattgattctcttggtttcttcagtcggtcgcatagaggtcacgacttgagcttcgttcatgggtaccgtgaggtcttcctcaggctttgagttcgcctgcgcagaagaagttgtcgatggtctgatagtgagggccgcttgaatggccactcgaaaacattctgcggcgccttggagg

SEQ ID NO: 63960 - DNA, 375 bp, Zea Mays
attcattgttccgtattcctagcacaatgatattgcgcgcattactaggaatttcatcatgatgaacctctttcgtgaggtaactcaccagcagggcgagttcatcggaggagagttattacagaccacgtgaatctgcaatcagaacatatgctttgactaaggccaatggatcatattcgcaggcgtccccgagaatagatcaaataccgataagtcaaatgtggatatgatattaatcccgggtatatccacatctacatcaggtagaagcattcagaccaatatggttactcctcaacgatttctggcaaactccatatacacaggagtacacaccgaacgacaggttcagtttagcttttgtgcgtttta

SEQ ID NO: 63961 - DNA, 329 bp, Zea Mays
ggttcgggcggaggttgcagaattgcgtgctgagtgcgtagcacgccactatttggatggtggttctcccgcccctatcgggattcagcacccttaccgttcaccgccccgtggtcgcttcgagtatggtaccccaaactgcaggacccagatagatttggatccatagatcgacggagtcagggtctgtaataatgcttaatttagtatcttagtcttagtcagtcttagttagtttgtttatcttatgttggaatggttgtcatgatgaacttgtaatgaagtcggatctttgtaatgattgtcaccaaggtgtgggtatcccctgc
